United States Patent Application Publication US 2008/0008996 A1 - sequence listing, part 2

SEQ ID NO: 6705 - DNA, 454 bp, Zea mays
  unsure (1)..(454): unsure at all n locations
aattaattagtcaagtaatcgcttaatcgactgcgtatttaaaatagttntctggttaaaactctntatagtttctaccttgngcctttataaataaatgttaattaacgtgattaatggcaaccaaaatacttgttattaattatttgttcgttgtttgcgcgcgacatcgtttgcgcatcatcgtgttgttcgtacgcgtgtccactcgtcgttcgcacactgtcgtgttgtttcgtgcgtcgtacgcgcgctgtcgcgcgtgtcgttcgcaagctggcatgctgtttcgcgcatcgtaaactcgcctcgcttagaatctctcgtgttaattatattacgtatttatttgatagctgttagcatagcagatttaatcaaaactacatagcagttataatttatatattntataatgtagaattaaatgtccttattattacttgtgtaacgt

SEQ ID NO: 6706 - DNA, 341 bp, Zea mays
gagaacacgtgatatgtttgacttacgttcaattcgaaaaagatagaccttgtgcagcttgtcaagcacggaaacaggtgggaggagcacatcacagcaagaatgtgatgaccacttcaagacccctggagctgctgcatatggacctcttcggacccgtcgcctatctaagcatagggggaagtaagtatgggttagttattggtgatgatttttcccgcttcacttgggtgttctttttgcaggataagtctgaaacccaagggaccctcaagcgcttcctcaggagagctcaaaatgagtttgagctcaaagtgataaaaataatgagccacaacggg

SEQ ID NO: 6707 - DNA, 447 bp, Zea mays
  unsure (1)..(447): unsure at all n locations
ntaggggagtgcttatgtaccaagggttgtaattggttagtatcttatgatcttcatgagaaatatgacatcgntatatgactgtatttggtagcaccttatgcaatatttttgaattggccaagtagtgtggtttcgtgcccataatagaatagtgacacttagttgatcttttgttattctttttcagatgtgaagaccaagtatgagacaactcatgggcataagcatattttctagaagaggagagtagcacttgatgactttgataggttcanagtcatgctatcaaatgtttagatcgtgttggcactgtttctattgctcgctcacactnttttctttatgtanacagagggttggtgctatcacgcatgagctcgccaagttgaagaaggcatccatggcttaatcgagatcaaatgtatgatatatcttatataacat

SEQ ID NO: 6708 - DNA, 423 bp, Zea mays
  unsure (1)..(423): unsure at all n locations
agcttatgcttaaaagcgtcatgatcaaaacaaatgggtttttcaaaaaggcaaaaatatgcaaccccaacaaaaaccctaattgagccctatgaacaaaattcaagagaatggggaaaagggtatgaaaaatttaaaatcatggcttgggccaaatataaacatggaagtatatttaataagcaaaaatacagattgaggaagcttggccaaaataattcaaataaaaacccaagcaagcttctcaagtggggactcaataggaaattctgaattntagaattctgaatttcagaccttgagccaaagatcaagcgtgttcaccttgatccctaactcanatcctaatggccccattaacaaanatgagcatatctaacccctctgtcgcatgccagaagatggcattgggatgcgagccct

SEQ ID NO: 6709 - DNA, 431 bp, Zea mays
  unsure (1)..(431): unsure at all n locations
tctaaagggaaaacacgcgataggtctaactaatgttcaattctaaaaagatagaccttgtgcagcttgtcaagcaggtaaacaggtgggaggagcgcatcacagcaagaatgtgatgaccacttcaagacctctggagctgttgcatatggatctcttcggacccgtcgcctatctaagcataggaggaagtaagtatggtctggttattgttgatgacttttcccgcttcacttgggtgttctttttgcaggataagtctgaaacccaagggaccctcaagcgcttcctcaggagagctcaaaatgagtttgagctcaaagtgaagaagataaggagcgacaacgggtccgagttcaagaatcttcaagtggaggaattccttgaagaagaatggatcaagcatgagttctncgctccctacacaccac

SEQ ID NO: 6710 - DNA, 437 bp, Zea mays
gcttagaaaaatctggtatgaatctgcgataatatccagctagtccaagaaaactccggacttggtgaacagtggttgggggtttccactccagaatatctttgaccttgctagcatctaccgcaattcctttagctgataacacgtgcctcaagaattgaatttcttccagccagaacgcgcacttgctgaacttggcatatagctgatgttccctgaggcgcgtcaatacaatccgtagatgctgagcatggtcttcctcattcttagaatatatcaagatatcgtcgatgaagactaccacgaatttgtccaactcgggcatgaacaccgagttcatcaaataggtgaagtgggcatgagcatttgtgagcccaaaagacataaccaggtattcaaacaatccataccgcgtagtaaacgcgggctttggtata

SEQ ID NO: 6711 - DNA, 500 bp, Zea mays
  unsure (1)..(500): unsure at all n locations
cggaagtggctgaaggtttctctgatggtttcaatccattccactcaccaacctttccaaagcangcaacactcccatccttaacaacaaagcctaaccccagtccgccagttcccctcttgaactaactgaccaccatgcccaactgcgactcacttcatgacacccagctcaagaccgaccaaaggtatgtgttctcttccttgattcgggtcttgtcatgtctgcaggacacaagggcagactgcaaaccctcacaaagtgcacactgcacagatgcaggggcactcactaagctagccttttcaagcaaggccatcctagtgtctctctttgctagctcagtctgcataccaggatacatgcacctaacanaatagatcttgatcttagctcgtcatgctcatatagcaaggtggcgtacttggtctacaaagttgtgatgttcgatatgtgtagagtgcactcatcacatnntagtcttgtagacaccacaactg

SEQ ID NO: 6712 - DNA, 362 bp, Zea mays
  unsure (1)..(362): unsure at all n locations
tctgtatgctcttctttgtgttgcgttctgnctccttgtctttattgcttctacactngcacttcaatacatatctgtggtataagctgtctttgaagtgcagggtattttgagataggaactttatttccgctgtgatctactcgaagtgtttttcattcctctacgatcaagtcttcgagtagaggaagaaactctagtttctaagtgtgtatttttattcacctattcacccctttaggcgacatccaaatcctgttcccggacaaagggaactttcaattgctatcagagctaggctctccagtgtgggcttagccgtccagagaagacgatgtctcncaagaggtaacactagaact

SEQ ID NO: 6713 - DNA, 424 bp, Zea mays
  unsure (1)..(424): unsure at all n locations
ggctnttgagtctgaccaatttccttcagtctttctggcagcttcctgacttccatgaattgcaataggcccttgttccgaaggtatattcatgcatagatatgctggatgaagaattgctttgaaaacattaagtgtcccacgaccaatgattgcattgtaggggtattccatgtcaacaatatcaaaaacaacatgttcagtccttgtgttgtggacaaatccgaaggtcactggcattgtgatcttgccaagtgctacaatctaccttcctccgaagccacaaagagggtgtgtagcatcatgaaccttgtcctctggctcttgcatctgtctgaaggctgtagcaaatatgatatccactgcactgcctatatcaaccagaacattgtggaccataaatcccttgatgacacacgatata

SEQ ID NO: 6714 - DNA, 392 bp, Zea mays
agctgcaactggtatggaatacaaaaggggagatattgttatgatattctcttaaaacgtaataaagagattatatggcccatatgagccctatatggtcgacgatgttaaacacttttgaactggtcagaaccaagagaatgatggtttttataccttgacttggcaaggaaacggataaaaggttaacacatacgaccaagttgagagaagctaagcacaccatataattatgacatatccggaccgccattaacctttgatcgggatacataacttgaaagatcccatgaacgagttaccgtttgtggtaaggaaagatacactatgatacttggttgttcctattctgacgatggtgatgtgataaaactcaacgcaagtctttttat

SEQ ID NO: 6715 - DNA, 397 bp, Zea mays
cttgtgcggcagcttcatcagtctccgtcaagcttcggaatattgaccttcggcatcgtcattctgtacacaacaaggcagtataaggtaaatagtaatctcacgagaaggtaagcaacgggtacaagtttaataccggcttaagttgacttcgagcttcgtcaccagctaagtcccgcccacccttcgtccaaatttgtgttataaatatatttccaatgcttcaggctaggctggtgatatcagtcaagtctgctagtgataggctaaagttcgacctgtttacaatctttccatgcgtacaactagccttcataatagctacagctgtgaagcgagaagctagcatggcacagaagtcaccaagctcagctataacttcgtcaagcgcctcaac

SEQ ID NO: 6716 - DNA, 358 bp, Zea mays
tatagagcatgcttcgagcatatctaaaaatttcattctcaagttcatgctccgcaattttagcaattaatcttgctatgtgatcattttgttctttaatcattgccaggtgatcatctatagcatcaatattaacatctttacatctagtgcaaatagtgacatgctcaacagtagatgtagatggtttgcaaacattcaatccttcaatcttagcaattaaattatcattctcaattctaagacaagaaattgaatcattgcacatattaagctctttagataaatcttcatatttttctacctttagagcataaacattcctcaatttaacaaatctcttatttctcttaatgag

SEQ ID NO: 6717 - DNA, 429 bp, Zea mays
  unsure (1)..(429): unsure at all n locations
tccaaatatggcaatcatttcattcaacaacggtgtactcactgatcctggcacagagcctatttccttaatcgaatcccaaagcaagtaagcgtctgccttgtctatctcagcagaatcagctagcttgctcacgagaacctcaagattcgagaggctcttggaagcggggttattcttcgcggcatagttgaacagggaaatcagcttcttacaggagcattgatcagcagcaaggaggactgcggctaggagtggctcgttgaagtccacggtcatgtcagcgagggtggaggcgatctcgtactcggtggtggactccacggcggcgcagatgcgggcgacctcctcatcgtcggctacggcgtcggcgctgccggnggaggcanagatgtcgtctgcgtcgccagcttcctccacatcgagctc

SEQ ID NO: 6718 - DNA, 296 bp, Zea mays
  unsure (1)..(296): unsure at all n locations
agcttgaactcggattatctgctatgctgaaggatcaccttgcttattgcttancatacaataacttaaaggattgcgtatacttctctcttttactttaccgattactcgaatattttttttgtgttattaactctttttgttttgctgctgcgagggacttatcttgagtaaagctttaaaagagcaaaaggatgctgaggacgaaagtactcggatagccttcggcaatctaccgttagaggttatagacctaccgcatcaggctgtagagaaagataccattttgatttatg

SEQ ID NO: 6719 - DNA, 500 bp, Zea mays
  unsure (1)..(500): unsure at all n locations
aattgcgtatagattaagagcatgtttggatacatntgacaaatagctagtttactggctaattttagcactttggactccacacggactcactaatcagttagctaattattagttagagggctgacaaattgtttgccaattagccattagcccttgctaataggtgttaaaggaacataaaaagagaaaaagacatctattagttaagacttcaaatataccctggctaattgtttgcctagccatgaggatctaaagagagcctatgttttctattgagttaagatcatcctaatatttatgagtcaccacactagccaaaaaataactagcgagttttttttgagattgacataatgacataccatttttggaggatgtctgtcttgaaaaatatagcctattttcccagatggacttcataagaggaccaccccataatataggaccgaagccccaccaacacatcacaaaccacaacatatataaacgacact

SEQ ID NO: 6720 - DNA, 367 bp, Zea mays
  unsure (1)..(367): unsure at all n locations
tatgaagattcttcatcccaacatgtgcttttctgtggtgccagagccagcccatgttagtcttagcaattaagcaagggtccagttcacctctatcaaaatccacttagtatagctgaccctctaacactcgcttaaatgctattgaaacattacttcttctaaagacagcgacacctacatcagtgaataaacagttgtaacccattttgcatacttgagatacagaaagcaaattggaatctaatgaatctacaagaaaaacattggaaatagaatggtcaggagatatagctatnttaccaagacctttgaccaaaccttgatttcattccgttgtataactcgtggggatttggttttttat

SEQ ID NO: 6721 - DNA, 465 bp, Zea mays
  unsure (1)..(465): unsure at all n locations
tctgagaggatggctgaagactgctctcaagactgttcattatctattanattagcaacttgaagttctaagagtgtgcttaacacggatcacggttaatcaacttttaaaatgagagcagttaaaaggacaagacaagaatatagtacccacacagctcttataatgggtgatcaggagttgacagactcctgacttttattagagaagtaatatcgtgtacacctcataccagaaatatttgtgagcttaaacccaagttattttgttgccctgaatgatgttttgttggagatacaagactgttgccacataataatgacaagaacaaatatgacttaaattataagaatatgtgtcaaaagaaaaatccatataatgacagaaccaacaatagtttatttctcattcacaaagtgagcattactgtaaatattgttcattcagaacataaaatcttataat

SEQ ID NO: 6722 - DNA, 409 bp, Zea mays
  unsure (1)..(409): unsure at all n locations
agctnggcatataactgacaatctcgtagcctctgtttactttcctcaagtgctcttcatgctcttgctcattctgggagtatgcaaggatatcatcaatgaacactactacgaacttgttgatgtagtccatgaacatgctgttcatcaagtacatgaaataaggtggcacatttgttagaccaaatgacatgaccgtgaactcatacagtccatacttggtgatgaacgctgtctttggtacattcgaaggttggattctgagctgatggtaaccttacctcaggtctatcttcgaaaacgcactggatcctctcaattgatcgtatagatcttcaattttgggcaaagggtacttgttcttaacagtgacttcattcaaggatctgtaatcaatgcacatcctttt

SEQ ID NO: 6723 - DNA, 422 bp, Zea mays
  unsure (1)..(422): unsure at all n locations
gagaagacagcttgaagtcatttttggccttggatcgttaacatgattacttctaaatcaacccatacatcggtggcttgtggcggatagatattccctgagtacaccaaagaagtaaaaggcctcacgaaaggcccaggggcccaataattcgtaaggtcattctttcgtgggcctagggaaggacagccaacaaagaaaagaagacgtgagactgattagtgcanacccagacggtccacaaacgtcgaacgaatgaatcgcaacagagacccgactntcccgcgctgaagcccccatgcaacagagccatgcgaggataagtcggcgagggttacgtatggataaactcaagaggttcactatcttntagctacttgttggtatcatatccacatgtactgccccacggtcgagtatat

SEQ ID NO: 6724 - DNA, 441 bp, Zea mays
agcttgagtatgatgacgagcgcgattattactattgtttaaacaatcacgtagctatgcgtagaaaagcttcggcatggcatcacgaatggggaaccgacttaaggatgaaacgccaaattatgacctcctagaatcactatagagttattgatcacacgttagggcattaatgctctcttacacgggctgcgtcccgtgcctattaatagatgaacagtactcccgtactgttcacaagatttgggatttgctcttgcgtgacgctcgtacctttgctttgttacgagctgaaggtacatttgccattctacatcatatttattcttccatactaataaaatacagatgattcagccgcctacataagtcgttatttatttcttatggtccatatgaatctttcttcactagtgtattttatgctgtctttcataacct

SEQ ID NO: 6725 - DNA, 455 bp, Zea mays
gggcctgaccacacgtctatggacacgatcatactatattcagttgatcaacgaatcacgcagtggtaaggtagcacacatggtacgaggacattcctccattggtatgtaatctgattatgcggatcgcgatgtaatacctatggaagcatgctctcttttgttgggtgcacctgagagcacatagacggggggagaatactgtatccctgtagacctaaatacttaacaccacatacttgattcagagttatagcaatgaacatcaagtgaggagagaggagagctcttgtgaccacaatagacacaatagggacgatcacaagagatacgaggagttatcccgcggttcggccactataatacttgcctactgcacgctgtggcgttccaatggacgagagttgcacttctctcctctcaagtgatccaatgatcaacttgaataccacagt

SEQ ID NO: 6726 - DNA, 229 bp, Zea mays
agcttgtcccatgccatcacgcagaacttttccaccgccaaatatgcactcatcaccataaaaggcgaagtccttttcaatctcagcataaagattggtatcaccaagcctaatcttatcaccggtggtaggtccataaatgctcgcatacttctcatgatcaacagtacagtcaaatgaaccatcaccgataataccttccctgcatataaacttactaggacacttt

SEQ ID NO: 6727 - DNA, 442 bp, Zea mays
  unsure (1)..(442): unsure at all n locations
tctccgccgacgagaccgtcagcgctacccgcggacccacctccagctctttggctataatgactggntctcgtcccttgagtggcgacgcgaacgagagccttctggcggcagcgtccgtcctgggaccatcgctgttgctgcagaggtcgctggcgagtcacccggagttcgttgtcccgcaggctctccgatgtggaggttgttcatacccgcgggagtggaaccagagttccgttcgcaatggcaccttgagtgctggtgtctgttcattatggctgtcggcgcctgaacatctgtgtatttgggcgtaaagcatgtgtttttcctcatttcgagcactatgactcgcctgtcggctagctgaactgcttaaccaagtgtgagatgctctgtgcggaaggtgacgagtgaggtatacgtatcccggaggccgaggagt

SEQ ID NO: 6728 - DNA, 380 bp, Zea mays
agcttctgattgtgcaggcactgacggagggatgacaaaatggcccttccgagtgcccctccatcgcaaggcaggagcctcgttggtctcgtcttccgcctggacctcctcatggttctaccccctagcatctatgcccgcgacctcctcctcctcatgggcctgcaccccggcatctatggctgcaacctcttccgcatggcactgcaccacctcctcctcctctttctatggacatgaaatagagacatgtaagacacatttatatataagtgaatgccaaataagagcaattgcaaaaacatctacatcggtactcctttatagagtgataggtctaccacacagctctggtcgggcgtgtgtcaacaatgcctcat

SEQ ID NO: 6729 - DNA, 349 bp, Zea mays
  unsure (1)..(349): unsure at all n locations
tgcattacggacctataaaactccgcttcggattacaaaccgacttanagatagaatgaccttttagtccatataggtctgagtcaatgttgtaagctcttataagggacatacttgtaattcctcacaggctgcgtcctgtgcctataaatagtgaacagtattcctttactgttcacgcattctggtgattggaatcgcatcttctggaatccaacctttgccaaggcagaggtattattgtattcaatgattcaatatattaagtaaatataatataattcgctcatgatctatttatcccttttatacctttctatcttatgatcgctacaacatctactgtaat

SEQ ID NO: 6730 - DNA, 397 bp, Zea mays
  unsure (1)..(397): unsure at all n locations
agcttcaattgggttaaggatccatgttgaatcattcccaggnttaatttctccatttcttggcataatgtgatgtcagaagtctttactgtaagacaatggcaggaaaccttgcgacttagtgcatctgccaccacgttggcctcgcctaggtaatagtgaatttctaattcataatccttaatcagctcaagccatctcctctgcctcatatttagttctgactaggtaaaaatgtactttaaacttttatgatctgtatatatatggcagatatttcccagcagataatgacgccatattttaagggtatgaaccacaacagctaattctaagtcatgagttggataatgttcctcatgccgacgcaactgtgttgatgcatatgctataactc

SEQ ID NO: 6731 - DNA, 356 bp, Zea mays
tcccctgcccagcgggaaccgtatgttgccctgggcgtcatcgccttccatggatacgtccatgtcgtggccttcccggccggatcaacgttgctgcgaccttcccggctcgatccgccgtccctttgaccagatcgcgtctttctgcctggatccgtcgctgccgtggccttaccagacagatccgacgttaccccttctattctgacgcgggcatgaccaccatgaacggcgcagacgagtgcgctgccgttggcctccctggtggtgctcctcgacgtccggacgatcgaagaagcaagatggtcgacctgctggtgctcttatgatgtatcgacctcgccgatcgttgacgc

SEQ ID NO: 6732 - DNA, 317 bp, Zea mays
cagcttgcaaccaccccttgttccgtttggccggtcttggcgctcgccggagctccacaacgcgcgccgttgtcgaagaccttcccctgcgaacagataaaagatcgagggcctttctgcgaagtgtcaaccgactcccgaaaatagtgcctatgctcattttagattagccagaacaccgaggacccttctgctaagccgtcatcgcgggcgtgggcgcgccccgtttctctgttaagttgggccgcctgagctgaaatcgcctacgactgtcattctttatctctttctcttatcacagacctatcacaattcta

SEQ ID NO: 6733 - DNA, 308 bp, Zea mays
ggcgatcagacaggatttattttattacattataaccacaaggttggctgcagaaccgaacaaggcaatagctatcatggactacacagcaccaatgatgttcgagggaatcatgacgcttatacgaatggccggttcctatcggcggctcaatgaaggtttctccacagatggcagaccaaagacagcctcgctgccaaagaaggccgaactcaagcggaccccagcatggcagaaagccttcgagacagcgcaagatgaacttgccaacggcactagcactgagttcgccagacgttcacaagcca

SEQ ID NO: 6734 - DNA, 434 bp, Zea mays
acacttcaaccagccaaccaggtagacataccagaaatgcaatgctaacctattacgggcatagttcacaaatcaaccttcactggaaatcctggcaaatcgcttgtcttgcacaccatgctcatcttgcttgtgcggaagacccacttgtttctacaacatattggtaggacgcggaacacgacgacatacctcattcctcgtcaagttgatgagctcctcttgcatacgcaacacccaatctgaattcctaaatgcgtcttccaccctgtatggctcaatagaagaacaaacgagtaatgttacaaaaatgacgacacgagatcgagtggcacccccttataatgcaccgaaatgagtcacgggtgactcttgaccgtggtgactcttgtgagcggttgacgcacaattctgcctgacatgcattaccctga

SEQ ID NO: 6735 - DNA, 326 bp, Zea mays
  unsure (1)..(326): unsure at all n locations
tccatcaagcagcacaataatcgtttttatcctaaagcacgagtgttctctacaggagacaggtattaagctagcgagccacacctggacatgatatgacccacccatgactcgctggaatcgccagcaatcataatccatttgactactcggataaaaaacaccccctctatgaccactacacaactgnttgaagctcatctgggccaaccaaccgtactgatcaccacttgtccctccctgcaactggctcactgtcaagcgggcctgactccaacctccgtcaccctgccagtgacacaacacgcagaggaaccaacactcgc

SEQ ID NO: 6736 - DNA, 161 bp, Zea mays
tagctttgtcattatacattcgagcttggcgccatttatcttgttttcgagctccgggccacgtgcgcgccacgttgtttgggttggggcaatgcaacatcgtatctcggcgccatagcctatggcgccgagatgtgataccttggatgccatagtctatg

SEQ ID NO: 6737 - DNA, 401 bp, Zea mays
agctttaaggtaaaagtcataatattatcccattattatagttgaatacatttatccccgggataccaataccctaatggaacctctggaaaaaccctaaaactaaaccctaggggcttatgtgcaaaagtggtgaaccttcggactaaagtgataaaactactatgtctaaacatatcaagacatatggtcacacatatgtgaatttgaaagtaaaccctcaattttgggcttatttgcaaaaatcaccctttaagcactatatagcctatatctgaaattcagttgtgttggttcaacttctgagcaccgaatctttaaaatatatagattttgccaaagtgaccaaacgtttgagaaacattaatggtaaaaactttgcttatgttgaagctcacttg

SEQ ID NO: 6738 - DNA, 387 bp, Zea mays
tacccatgacaaggcatgtgaccagatataatgtcctttttcattatgcctacattcgctataatccttaaccaaactgagttgaacatcatctgttcatatcctcagtctagaattaagttctatcatccttacgatcgtgtgtgttccttaggatgaagagagcattctatgtaactttgcattatgataccaccacgcttccaataaaaaatattcttgcagatagaaaccattttttctcatgataaccaccgagcttagccttattgcaaaagacaactcttatccgcaatatctaagcagagctacgcattattataaatcaaatttcgatacttacatagaagtatctataatacgaatggatatcaacgtagtctatgc

SEQ ID NO: 6739 - DNA, 240 bp, Zea mays
ccaccacagcatgagaggaccctgactgaaccataatgccgcctgcgacactaatctttaagactacacgcccctatacacaaacgccgatctgaacgattagagtctgcgcacagctgggagtctcctgacgctacatcactaactacaacactcaaggcgccgccaccggcacttcacagcaacaaaaaccggaagttacggacgcccgacctcccacctttatttccgtacgaaagc

SEQ ID NO: 6740 - DNA, 335 bp, Zea mays
agcttctgtcctcgcatgccgaaagttgaaatgtatgataccgccgaagaatgccagagagccttcggcattgtctgctattttatatgaacacaggacctagtacaagagcatatcgccttcagggtgtggtcgcctgcggagaaatgggaaatgccacaagaaatcatttacgacgcccgcgaacgtggacttatcaggcttaagtacacttctaagtttggggataatttattgagccagatgatgagtggctgaaaagcattgatcaatctactgatgagctgcttgggacctactctaaggtcgcagatagtgcaatgtgtgcagccttc

SEQ ID NO: 6741 - DNA, 423 bp, Zea mays
  unsure (1)..(423): unsure at all n locations
aagggagagcacaatatatgattaacaaatgttcattcttatatagacacgatatgtagcgcatgccaagcagggacgcacgttggtgctcatcatccacactataatatgatgacgactgacaggccactggaactcctacacatggacctatatggcccgataacttatataagcatcggcgggagtaagtactgactaactattgtggatgattattctcgctttacttatgtgatctttttgcacgaaaaatctcatacccaacaaaccataaaggggttcttgagacgggctcaanatgagttcgacttaaggatcaagataataagaagcgacaatgggacggagctcaagaactctcaaattgaaggcttacttgaggaggagggcattacgcattgagtctcttctctctacacg

SEQ ID NO: 6742 - DNA, 414 bp, Zea mays
agctagagttattttattacagaccagactttaatttgtgcttagagtaatattatacaaaccatgggaggcacacgactcctcccgatagcttaaagcaaaagatcctaaacggaggactgagtgctcccgcacttaagtcttgattttcttcttttggaaccaacttggcacacaatttgcaaaagtcttctactttctcacctaaaaacaacaaatggataaaccctgagtatggaatactcatcaagtgctacccgaataaaaaaaacactctcacggtatgctcgaatgtgcgatcaatggagacttctcatattacagactctgtttgcagaaatgctactaaagggatccctaaaatccattttatttgcaagtaaataaattactgactagaatcttttacctatt

SEQ ID NO: 6743 - DNA, 435 bp, Zea mays
  unsure (1)..(435): unsure at all n locations
agcttgacattgtctccctattggaatccaatgccattcttaatgccaaggcgtctcccactataaagcatactacgagcaaatntaaaattttcattttctaactcatgctcggcaattttaacatctaattttgctatatgatcattttggtggttaatcataaccatgggatcatgaataacatcaatgttaacatctctacatctaatgcaaatagtaacatgctcaatggtagatgttgagggtttgcaagcatttaattcaacaatcttagcatgtaatatggcattctcatctctaagattggaaatggaaacattgcaaacatttaactctntagccttaacaattattttttcattctcaattctaaggctaaccagagattcattcaacatgtccatcttagcaagtaaactaatattatcattt

SEQ ID NO: 6744 - DNA, 422 bp, Zea mays
  unsure (1)..(422): unsure at all n locations
agcttgtcaggttgcatcaaatgatagctatgttatattctttatgtggcaatgncctgcacaagtaaacgagggttcatcctttaatgaatacaaactgctgtattttatcctggaatgtgagagggttgaatgcccatgctaagcgtgaaagtgtgaagcaaacgattctttctaccaacgcaactattatttgtcctcaagagacaaaaactatgagttggactaaggatttattaaaggaaactgtgggttgcaagcttgcaaagcagactgtacacttaccctctctatgagcatcgggtggaattcttattgcttgtgagaaaactaatttgaaaatgctccaattacttacacttcaatctactcaatatcagttagggtcagctccagattggaagacgtggtgtgggacttaa

SEQ ID NO: 6745 - DNA, 404 bp, Zea mays
ctgcaagcttggccactgtgccagggactgtctgttttcactacgtggccatgccaacgtcccacatgcggaggcggaggaggaggccctgctcctgacacatgcaagcatcgagaaatcttcagcggcaccggcccgagcggcactccttcaccttgatgagtcgaaagcacgcgctttcctcggggacggctccaacaaggacatgatcgaaggatggtgactcgacaccggcgccactcatcacatgaccggccgacgggagttcttcaccgagcttgactctagcgtccgaggcttcgtcaagattggggacgccttcagcgtaaagaacaagggcgccggctcaatcgtctgcaccggcgcgtctggtgagcacaggctgctcaacggagtctactaca

SEQ ID NO: 6746 - DNA, 419 bp, Zea mays
  unsure (1)..(419): unsure at all n locations
tcagcttgcacccaggtacattggtccattcctggtgcttgagcaatgtggaccagtggcataccgactccaactacccgaaacattgtctgctgtgcataatgtgttccacgtgtcacagttgaagaagtgtcttcggattcccgaccgaactattgaagtaacctgatgttgtccttgagctggacttgacatattctgagcatcctattcgagtcttggatcaaaaggacagggttacccgaagaaaaactctcaagttttataagatacaatggaaccagcattctgaagatgaagctacttgggaaactcaagacttcttgaataagaatttcccaggctttttagcctcatgtaaatnggtaagcctgtataactatgtaataaagaagaaacccccacatcacccctgcctt

SEQ ID NO: 6747 - DNA, 408 bp, Zea mays
  unsure (1)..(408): unsure at all n locations
ggatcttanatcgactgcagctgcagctatgaaattttatcccatcatggtctttctgggtgccagagcaacccatgttagtcttagcaattaagcaagtgtcgagttcagctctatcaaaatctactaagtatagctgaccctctaacactgccttaaatgctactgaatcatcacttcttctaaagacagtaacacctatatccggaaaaagacagttgtagcccattttgcataattgaaaacagaaagcaaattgtaatctaaagaatctactagaaaaacattggaatagaatggcaggggatattgcaatttccaagccttgacatccttgattccatcccgaagtgaagctcttggggacatggtttctcgagaggaaacatttttctccctgcatgggtg

SEQ ID NO: 6748 - DNA, 416 bp, Zea mays
gttcttcatccccacatgtatctatttgggatgccacaaacagcccatgctagtcttagctattaaacatgcatctagaccggactcttcttttgcaaaatctactaattaaagtttgacgtctaatacacccttaaaagctaatgaaccatcgcttcttctgaagacagacacctctacatttgtgaatagacagatataccccatatgacataattgactaacagatagtagattatatccaagactctctactataaatacattagagatacaatgctcattaaaaaattgcaattttacctaatccttctaccttgccttgaatcccataacgcgaaataatagaatcctgcgaatcttattcttgaccgaggaagagaacatctctttcccccgcatatggttgtgatacg

SEQ ID NO: 6749 - DNA, 336 bp, Zea mays
taagggagaacacgtgatatgtttgacttacgtgcaatttcaaagagagaaacctcgtgcagcttggtaagcaggtaaacaagtgggaggaacacattccagcaagaacgtgatgaccacctcaagacccccggagctggtgcatatggacctctttcgacctgtcgcctatctgaacataagaggaagataagatgggttagtattggtgatgacttttcccgctttacttgggtgttctttttgcaagaaaaatcgaaacccaagggactctctaacgcttccttaagaagctcaaaatagtttgagctcaagcgaaaagataaaagcgaaacg

SEQ ID NO: 6750 - DNA, 387 bp, Zea mays
  unsure (1)..(387): unsure at all n locations
agcttctccaccatgtcgctgctagccaagttgttgcagctacctccatcaatgatcaaacgacatgaacgctccttaatgacacactctgtttgaaacaacgtatgtcgctgattctgctctgccttctccatttgtgcactaagcacacgctgtacaatgaggctctcataatgctctgcatcatctgcaccaatctgttcttcgggtgggtccttagtgcctgcatcatcagccgcaagcaaagcaagtgtagcttcatccaaatcactagcagaggaatacccaccatcgtcttttaccaccanaacacgctgattatgacaatcacgctgcacgtgtccatagaccttgcatcgataacacagaacatctcttgttctacct

SEQ ID NO: 6751 - DNA, 424 bp, Zea mays
  unsure (1)..(424): unsure at all n locations
agcttgaacttacccaaaatattttcaatgcagttgcttctgaatacattgaataagccagttaggcatttcactggttcgggaaatacccctatgacttacaaccttatgcctgtcattgaagagatccaaaggtctgcagaagataatggtgatagacgaacttcaaagatgtgcttggggatgctaaagaccatgagaaatcgctctgaacagaacttcgttgcttatagaaaggtatgccttcagcaaactcttaactgagggtcatttcttggttctttttgacatgttttttccatcttttcagggtctcggtgttgtttgcaacaaaaaagggggatttggtgtaaatgactntgttgtagagttctttggggaggtatgcctttaattttaatagtcatccattctacctagaatg

SEQ ID NO: 6752 - DNA, 345 bp, Zea mays
  unsure (1)..(345): unsure at all n locations
agctttaccttgattcctaaaggccagcatattcttgagagtctttntcccttgatgggtaagacttgcgaaagtagactccgtactcaaggttttcaaacccatgttgttgtaggtgatgaaacgactaagctctgctgtttctgctccaacgtgggttctangcaggaggatgaaaactaaaacttatttgtgggaggtgttttgccttcctgtgatgtaataataagtatacgcactcaagtacccggatatgtaataatcactcttcctatatattacttatgaatgtgaattatgttattggaatcccttctacatactccgatgatgtgtaatggctat

SEQ ID NO: 6753 - DNA, 387 bp, Zea mays
gggatccttaagtcacctggcaaatactgagctgacggacctggccgaagccccttgatcatggtctcgatgacaatttcattgggcaccgttggtgcctgtgcccttagacgcaagaacctacggacatacgcctgaaggtattcttcatgatcctgagtacactggaacagaacctgtgcagggaccggcttcgtctgaaatccttgaaagctagttagcaacaagtccttcagcttctgccatgaagtgatcgttcctggtcgaatggaggaataccaggtttgagcaacacttctgacagccataacgaaagatttggccatgactgaagcattgccaccatacgaagacactgttgcttcgtagctcattaaaaactggttc

SEQ ID NO: 6754 - DNA, 365 bp, Zea mays
gcttcacacctctgaactaactcggctgcattattcttcgctggcaggcaataaaatcctgacctaaagaccttccccactagtgttctggaggctggatgtattccacattgcccagcatggaaccttctctcagaagttgcttcccagtggacgggagaacacacttcatgaagacccccgatgcaccccttctgtataatgtctcccccatgaatgtatagtgagccgactgcctggcaatacgctctgccgagttattgtcggctgagtcttcttattctttatatacttaatgatcgggcctctccaatcattagagactgactcgggttgatctataatggtgcacttttctggttgat

SEQ ID NO: 6755 - DNA, 445 bp, Zea mays
  unsure (1)..(445): unsure at all n locations
catgaagcttaataattgagattcatgtgggtgggttgttgtcctttgttcggagaatcaccccatgcatgcatgtgtgatcgcgcgccacacctgctgggtcataccgggggtgtggaagcggaggacagttgccgatgctctgcacgacaaacagtggatgttggaaattatatcgctcacagtagaggccatccggcagcatctgcaacggcggtggccggcctgccgcaacaaccctggtgatcctcattgtagtaacacaactcatgtaccattagtagaagctattaagagcgtgtgtacatatttcatgggaccatgggcaaaaacgctattaagagcgtgtgagacagagctnccgagcgtacgatcacgggaggctacgccagcgcagatcaaaaatttcaactcgtaaaacaagaattgttctgtataggtacaa

SEQ ID NO: 6756 - DNA, 360 bp, Zea mays
agcttcttcaccatgtgatcatggttacctttataatgttgagcaatgcacttcccttctagttgtgtcaagctcatttttagcctctcattttcttctttgagcttttgatatgtatcatcttttggtcctgcaaattctagctcaaaggaagatttgcttgtcaacggacaacaagcattagcacatggtaaaatagtttcaatttgaatacatgtgcatgagtgaggttgttgcgattttaagttttctattataacctcatgagcaatatttaacatgatatgatcatccataagaattttatgagaacatagaagcatatcatatttttcttgagaagctagatattcatttttt

SEQ ID NO: 6757 - DNA, 428 bp, Zea mays
  unsure (1)..(428): unsure at all n locations
agcttggagcagaattctagtttgcatacagatattatcacaccataaaggaactcatgaataaactcagattccanaaaaaacaggatactcaactcgcaggtgctcagtaaaagtaactttaccatttttacctacgcgaatccgagcaggccatcaaaaggtctatttttcatcatgtaatcacatagatatcaaatccactcgtccagatttatgtatttagggaatttctgtgtggaaaacatgcaagcgttgttttggcacataggaacaaaaaataaaggagtgctcatctctggcacaaatagctaccgcttagatggtgatcaaactgtagctataatataacttagatatcagaatgcatgagctgatnttagtttggttccatctataaagcactaaccttattggactggaacaac

SEQ ID NO: 6758 - DNA, 414 bp, Zea mays
  unsure (1)..(414): unsure at all n locations
agcttctgcaatatttncaagcttacaacatatttgttccttcttcacaacctttggaggatattatgagaaaccgagaagctactggaaggattggaaaatgggctgcaaagctcaatgaattttgtattgattatgtccacaaatctttgattcagtcccaagcgttggcagacttcattgctgactggacgccaggggctcaggaggaagaaacgaataaagatgccgaagcatggacagtgttttgcgatgggtcttggagaaccttctgagcaagagcagctgctgtgttggtttcaccttcccaagttaaaacttgttatgcggcaagacttgatttcaagttgtcaaacaatattgctgaatatgaagccctgctcttgggtcttcaaatgttaaggcaatgggatc

SEQ ID NO: 6759 - DNA, 344 bp, Zea mays
  unsure (1)..(344): unsure at all n locations
agcttcgtcatctgagaggcagttgccctggatgaaagatataatttcggttctccaatcttcactatgaacaggagatatattgagcactgctctttcaagaagttccaccgaaggtgctttttgaaagggaaatgtgcccttgggccatttctaagtattttggtgattgagtgcaaacacaaaggcctaaatgtgaaaatatgctcatggatgaacaaagtgtaaatcacaagtaaaggtatgtttctaaaccttagtacattagttntgtgtactaacatcttgtctaagtgttagaaacaggagaaagaagaaaagaatagaatggagagtggctgtgt

SEQ ID NO: 6760 - DNA, 371 bp, Zea mays
  unsure (1)..(371): unsure at all n locations
agcttgtggtagtggtgtgctatgttatgtattggcttgatgtaatgaataaaataactagtaaaaaaaatggcatgtgcataatagcaactctcttcccatggcagatggcttcggatagaaccacgcctaccgcctccgggattggagcaagacttcctctatgagctgagggaaaggctggcgganaatggggtgagacccaccttcccgcaccttcagaactaccactagacctagcccaaattctggccaatcaaaccagactcattgaagtcctcactcgaagcctggagaaccagcgcccaggcggtggaaggccccaggacaggatgggagaatttctgagactgaagccgcccacgttcgcg

SEQ ID NO: 6761 - DNA, 321 bp, Zea mays
agctggggaagggtcttcatccccacatgtgctaagcggcgatgccacagccagcccatgctagtcttatcaattaagcatgcatctagactggcctcctcttttgcaaaatcaactaaataaagattgccggctaatacacccttaaaagctaatgaaccatcacttcttctaaagacagacacatctacatttgtaaatagacaattatattccatattgcataattgactaacagataacaaattatattcaagagactcaactaaaaacacattagagatagagtgctcattagaaattgcaaattttactaaacct

SEQ ID NO: 6762 - DNA, 417 bp, Zea mays
agcttatgaagattcttcatcccaacatgggctagtcggcggggccagagccaacccatgttagtcttagcaattaagcatgtgtcgagctcaactctatcaaaatctactaagtatagctgaccctctaacacacccttaaatgctattgaatcaatcacttcttctaaagacagtgacaccaacatcatgtaaaagacaggtgtagcccatttgacataattgggaaacagaaagcaagttgtaatctaatgaatcaacaagaaaaacatttggaatagaatggcaggagatatagcgattttaccaagacctttgaccaaccttgattccatccacaatgtgatagctcgtggggatcttggttttctcatagaggagacaacttttctcccagtatgtggtcggcacccctgc

SEQ ID NO: 6763 - DNA, 418 bp, Zea mays
  unsure (1)..(418): unsure at all n locations
agcttgtggaggttcttcatccncacatgtgctaagcggcgatgccacagccagcccatgcaagtcttagccattaagcatgcatctagaccggcctcttcttttgcaaaatcaactaaataaaggttgccgtctaatacacccttaaaagctagtgaaccatcacttcttctaaagacagacacatctatatttgtaaacagacagttgtatcccatatgacataattgactaacagatagcaaattatatccaagactctctactaaaaatacattagagatagaatgctcattagaaatcgcaattttacctaacccttttaccttgccttgattcccatcaccgaatatgattgaatcttgggaatctttattcttgacgtaggaggtgaacatcttcttctccnccgcatatg

SEQ ID NO: 6764 - DNA, 438 bp, Zea mays
  unsure (1)..(438): unsure at all n locations
agcttctaaagggagagcacantttgggactatccaatgttcattntgagaaagacagggtttgtagcgcatgtcaagcaggaaagcaagctggtcttcatcatccacaccagaacatcatgacgaccgacaggccgcttgagctactccacatggatctattcggcccgatagcttacataagcatcggcgggagtaagtattatctaattattatggatgactattctcgtttcacttgggtgttcttcttgcaggataaatcacaaacccaagagaccttanagggattcttgagacgggctcaaaatgagttcggcttgaggatcaagaaaataagaagcgacaacggaacggagttcaagaattcacannatgaaggctttcttgaggaggagggcatcanacatgagttctcttctccctacacgccacaac

SEQ ID NO: 6765 - DNA, 426 bp, Zea mays
  unsure (1)..(426): unsure at all n locations
agcttgagggtgactcgccgaagcaacaaaaactgcatggtggttgcctacatattctgggatgtaaggcgaatgataccaagcagtgtgcatgacctgcttccgctgaacctggtgtgctgcagcttccgctatttccttttgcttttggatgggaacatgacacattctggtggtatgggccttattttcaccacagaacaagcaaaatattttccttggttgatatccaaatcttccgccgaagcccctggcgcctctgcctcttggagctggtggccggaagaagctctgctgttgccccgaagcctgtgaggagcactgtggcctttgctgctgactccccttatcnatcatttgagtagagttgtgaattgatctgacgtgcctcggatagaatcttcctccgaagccccttggtatttc

SEQ ID NO: 6766 - DNA, 438 bp, Zea mays
  unsure (1)..(438): unsure at all n locations
agcttacccatgacgggacatgtgaccggtttaagggttctcggtcagcaagcctacatcggcacgggccttaatcgactcagacggagacactacaccgagactcctttctcgtgcaagtcaaccgcccggtctcagcttaatcatttcaacccaaagtttggtacctggcagaagtacatcttttccgatgttgaacccatcaaggccttgaaggatccatcaatcaagtttattttcgaaaacatcccacccactttgccacatcatctnttgtgaaaataaaacattntgtttttctaaagcaaggctaagcataaaaaatctnttgtaaacggtgatcaaggaanggtaatcaaattcaggaanggtatgcangaattgtntagcaatcaactcctatcacctaatgcatcaagcatgtccggtactcacctg

SEQ ID NO: 6767 - DNA, 399 bp, Zea mays
  unsure (1)..(399): unsure at all n locations
agcttgtgctggccttggcttcctctatcatgtatatctggtggtaacccgaaaagaattcgaggagggacatgacttctcatccacgcgcgctatcgactattttgtctatccatggcagggggaagttgtcctttgggacagccttattgaggctggtgaagtctatgcacatgcgccacttgccgctnttcttttgcaccatgaccacgttagcgagccatctaagataaaaaattggctcgatgaatgtggcttccgacaggtggtgcacctcggccttggtagcctcaggcttctccgcaaaaatattgcgcagacgctgctttttctggcgcaccgaagggtcgatgcctaggcagtgctctatgatggtgcggctgaccccgaccagatcga

SEQ ID NO: 6768 - DNA, 409 bp, Zea mays
tgcagcttgatcgggaacagtaacattttttatttttgttgggtggcaacacagtcaataaaatacatgtggtcatgaacagataagcagaaaagttaattcgccagtacgaacaattaagagctgacagttgactcacctgtagattggtaaggaacctgggatgactccaagcacgaagattctgtcattggctctatgaggggagattacgaggaattattttatgagcatgacttagggtaacttcaccccatcactggcgaatgcttctggcgtcaggtctctggctactaagcgacttgatcagcatagaccttgaacgtgtgccacatagcctcctcagaccgactggagtgatcatctggacatcataaaacagttaaaggagcccgttccacctcttggg

SEQ ID NO: 6769 - DNA, 439 bp, Zea mays
  unsure (1)..(439): unsure at all n locations
agcttgtcgactaatacacccttatttactattgaaccatcacttcttctaaagacagacacatctatgtttgtgaataaacagttatatcccatattgcataattgactaacagatagtataanatatcccagagactcaactaaaaacacattaaaaatagagtgctcatttgagaatgcaattttacctataccctttaccttggcttggttcccatcaccgaatattattgaatcttgggaatccttattcttgacgtaggaggtgaacatcttcttctcccccgtcatatggtttgtgcatccactatcgataattcaacttgagcccncggatgcataaacctgcagggcaaatttaggcttgggtcttaggtacccaactcttggtgggtcctacaatggtagtcacaattttcttagggacccaaatgcaa

SEQ ID NO: 6770 - DNA, 425 bp, Zea mays
agctttaatacacaaattctccctctctgtcattaaacaccaaaaaccatacttcagcaagaacataggatgatgtccacggacagcagggtgttaaggaggaaaaacgactatcaaaactcccccttacttattgaacatatgcactatcagcatttaagtaagatacatataagccaaaagattaatacttccttttgtacctttaccatgttgtaatgtacttcccatcttgaaagaatttaatctttcgagagcttctccacacttgcgtctgaatctttatcctaactgttccttggtgctagacaccaaacttagaacaagttatagtattgcgcacaagaagaaacttctattctaatgattatcaaaagatgtccattgaagcagactatcaccgctaccaattgaaagataccaat

SEQ ID NO: 6771 - DNA, 292 bp, Zea mays
ttgtctaagggggaaaaaaatctcgcgagcaggagatgacaccacagggaaacaataaaataagtgacatgacagggacacacgaaacgcccacacaggacaaggggaaaataccaagaaaaaccacacccttgccgtaaaaaagaaggggccgactcgagactaagtgcgttggccagagaagaaaaacataatcaagaaacaggggggaggcaatctcaagaaaagggtaggacaaagcgcccctggcccaaaacatataaaagaacgaaaatgacccgcaggatactga

SEQ ID NO: 6772 - DNA, 326 bp, Zea mays
tagcttcttccaaatcttgaggtgaactgtgatcctcgatcagacacgattttctttggtactccatgtaaacacacaatccgagccatatataactttgctagatgagaacctttataagtagtctttataggaatgaagtgagccactttattcaatctattcacaatcacccatatagcatcatatcctttctgggtgtgaagcaatccaaggatgaaatccataccaatctctttccacttccactcgggtatcttcagtggatgcaatagtccagctggcctctggtgttcagccctaactctttgacatacatcacacat

SEQ ID NO: 6773 - DNA, 351 bp, Zea mays
agcttcggctccatctatattatggactgcttttgaatctgtccagcttccttcagcctttctggcagctttctgactttcatgaatagcaataggcccttgatcggaaggtatcttcatgcaaagatatgctggatgaagaatcgcttcaaaagcattgagtgttccacgaccaatgattgcattgtaggggtactccatgtcgacaatatcaaacacaacttgcttaatccttgtattggtgacaaatccgaaggtcactgacatcgtgaatttgccgagcgctacaatctgccttcctccgaagccaaaaagagggtgtgtagcatcatgaatcttgtcctctgactc

SEQ ID NO: 6774 - DNA, 338 bp, Zea mays
  unsure (1)..(338): unsure at all n locations
agcttgtacaatgttgatgaacccacaacgtttngggcacatataaaaatacaggtggtaaatgaattataagattggttcacatttaaataggatatgtcaatctctacttatctcgatgaaaaaagcagtctagaagatcacgagggaaaggtataaacaccaaacacactttactcgcaaattctggtggaacatgtttaaataactcttatataaacaaggcatatgtatgttcataacaacgtataggtacctaacttactactatgaagaaggaacgggtaggctgaccctctctggttctgcctttcatatctccgacaaatggactcgac

SEQ ID NO: 6775 - DNA, 428 bp, Zea mays
agcttaatgcccctaaaagattgtctaactttgttaatggtaaggctcccatgggtcaggataacgagggctaacatttatatcctgctggttatcccgaacacaaagctaggagaattcatgctaagaagtctcattgtgtttctcaccatgcatttatgtataaaaatgaggcatctagctctaggcaatctacacatgttaaaatacctaaaaagaaaactcctactgcatcaaatgagcctaacatttcatttaaaatttttgatgcatcttatgtgcttactaacaaatcacgcaaagtagttgccaaatatgttgggggcaaacacaagggcttcaagacttgtgtttgagtacccatggtgcttgtttctaatgtgaaaggaccccaagaccatttgggtacctaagaacaagacctaaaa

SEQ ID NO: 6776 - DNA, 429 bp, Zea mays
  unsure (1)..(429): unsure at all n locations
tgcagctntgcaggagaaggagatgatatgaagctctggcgtgcttgagaaaggcaattcaatttttattaactcaagctatcaatcttacaatgatctatatatccaagactggcccaaagttatgttgaattattatatctgaaactcatatcatctcgggaaaaatattgatgtttgtangaaataaagaaataccctgtgcgataaaacaaggcctacaacatggaggaaagccaaaggatggtaacatttatgcttttaagtgcaagtatcttaacttatcatttcttatgtgtcttgcgtagacacatagaaaaaggaagcacttcgattgttttagaattatgtcatcatcctttgaagaaattcctctcatatggtagattgcatattcatcatttctatactatggcaatctacatgttt

SEQ ID NO: 6777 - DNA, 363 bp, Zea mays
catttttcttacatgagactctactgaaaaaacttgaaacatattaatctcaagcttaaattaagagaaccttcccctgaaagtgtgcctacaaagtttaatacttggaggaaacatgcactttgatttgatatcaagaggggcagattattcattattcgagctttgacacatacaagttaaatgataccaattgaaggatataagaatttgaagcattagtggcatttacttatggatgttgaataaactatgtgccatgcttaattaaacaattttaaatcatgtacggttgctcaagaatatgaaatgagaacgagccatcctaccatatgattacctcagatgcatgcattgtaatct

SEQ ID NO: 6778 - DNA, 399 bp, Zea mays
agcttgtcaatacctgtcaaagcaacagcacatgccatcacagcagctacagaccataccagtaacttggcctttcgcatgctggggattggatatgattggacctttcaagaaagctcaaggaggttatacccacgtattggtggccattgacaaattcactaaatggatagagttcaagcccattgcttctttaacctctgctaaggccgtggaattcatacaggatataatattcagattcgggataccaaacagcatcatcactgacttaggatccaacttcaccagctcagaattcttcgacttctgcgaagcaaagagcattcagatcaaatacgcatctgtagcgcatccaagagcccaacggcaggttgagcgaccaacggaatgatattg

SEQ ID NO: 6779 - DNA, 363 bp, Zea mays
  unsure (1)..(363): unsure at all n locations
agcttgcagttgcaacgagctagagcatttattgtatagaatgaacaagcgcctagatatggtcccatgaagataccgaaggacacgaagcaagtgactatattgaacctgggtgggaggctgggagctgaaacaaaccgactcaagatacaggtcaccaatgaagaaagttccaaagtcgcaaaccagcacccgacatcgccaagatgagaacggcacttaataaagaagtcgaaaatgagcccatagcaacagtcgacggcgagagtgcaaaataagcagccagcgatccgttgagcgaaagccaacgaaccgaatataaagatgggatcagcacgaacgaagaagcangtgcacctgatc

SEQ ID NO: 6780 - DNA, 426 bp, Zea mays
agcttcctccagcagtcttgagcccctcatgcatcccaaggtagcaataggtgccactaggagttatgaagctagtcttctgctcatctttcttcttcatccaaatttgatgatagcctgagtagcaatccaatagactcatgagctctgaagaggctgctgcatctacaagagagtctattcttggtaatgggaactcgttctttggacatgccttgttgagatctgtgaaatcaatgcacattctccatttatcattagccttcttcaccataacaatgttggctagccattctaggtattttacctctctgatcacaccagcactaagaagtctcttcacttcgttccgagcaccttcagctttgtcttcagacatctttcgaagcctttgtttcttggctgaaagaggatcccattgcacca

SEQ ID NO: 6781 - DNA, 446 bp, Zea mays
  unsure (1)..(446): unsure at all n locations
gacccggatctctaaacgacgccgctgcagcttatcacaagcctaactaattctccttttaacaggaaacaccctccacccataggaacacctagagtactcctcatcacctacaacaacatggggtcgaaaaccctgagtaccgagtgtactttctcaagtcttacccgacttaggaaaaagactctcaaagatatgatggatttaagaatcaaggagaggcttttaacaagaatcaacttagatacttttgcagaaaaagcttactaaagtgagtccttactttcaatattttaatgccagattaaatattaatagactctgtttgcacctagtctaanttcaccatcttatcaatacaacatcattttttactcataatgtttatatcctgacttaagttgcacggcagcgatcaagtcttcactcttccgggatataacggc

SEQ ID NO: 6782 - DNA, 427 bp, Zea mays
  unsure (1)..(427): unsure at all n locations
agctttgctnttttgtacatgaatactacttcttctttctggcgaagctttctttacaaacataaaaaactacttctcttttctgccgaagctttcctttacatgacaaaacataaaagactactactcttttgcacaacgattcgtaaaaaactcagttcttccttatactgaaccttttcttgggccaaagcaacggaacttttcacttttgcagacaacataacgtaacaagtcataaaaggtacttctccgaagcntttttggcgaagcagccacttgggaacacaaatgctatgaatgaatgcttatgcatgcgaatggtatgatgtaatggaatgcacgaatgaatgtccgaagcatatgtccgaaaccatattggcagccattacttgaaaacaagacacattagctctgcattccctta

SEQ ID NO: 6783 - DNA, 365 bp, Zea mays
agcttctccacagcgcctagatatggatgtaaatgttattacattttccaccgattgtactattgtcggcaatgatgaacctgttgttgcccagtttgattttggtcctaaagaagccgcctttactaaaccaaaggaatcggtaaatcatttaaagccgctcttcatgtgcggtcacattgatgggataccgattgctaaaatgttggtagatggaggggcaactggaaatctaatgccttattcattgtacagaaaattaggtaaacaagatgacgaacttgtcaaaaccaacatgacccttagcggtgttggaactgatagttcgatcaaagccaggggagtcacgtccgttgaataaacca

SEQ ID NO: 6784 - DNA, 214 bp, Zea mays
ccatcctacaccaccgcgctgcgctgatttaacgttatttcctatgagaaagaccttcaagataaacaccaatggacactttcttcataaaaattggaagcatcccgagcccaacgcaataccttctcccgtaaatagatgaacctccccacgcacccatgttgatatgggaacctgacttaggtctgcactcctgagaggcgagacttttttc

SEQ ID NO: 6785 - DNA, 410 bp, Zea mays
agcttatgaagattcttcattccaacatgggctattcggcggggccagagccaacccatgttattcttagcaattaaacatgtgtcgagctcaactctatcaaaatctactaaggatagctgaccctctaacacacctttaaatgctattgaatcatcacttcttctaaagacagtgacacctatatcagtaaaaagacagttgtaacccatttgacataattgggaaacagaaagcaagttgttatctaatgaatcaacaagaaaaacattggaatggagtggcacgtgaaaatcaattttacccaacctttgaccacccttgattccatccccaatgtgaagctcgtggggactttgttttctatatgaggaaacatcttctctccctgcatgggttgtgccccctgc

SEQ ID NO: 6786 - DNA, 288 bp, Zea mays
cagcagctttaaaggagaacaaattgggacttcattatttctctgagaaaacagggttatgcccatggtaacatggaacaaaggggtcccaccatcccacagaacatctggacactgacggccggttgagcacctcacaggattattcgcccgaacgtgacataagcatcggcgggaggaagaatggcctggaaatgtggaagattattctcgcttcactaggtggactgttcgcagaaaaaatacaaacccaagagaccttaaagagagtcttgagacgggcttaaa

SEQ ID NO: 6787 - DNA, 437 bp, Zea mays
  unsure (1)..(437): unsure at all n locations
agctnggtgccaattgtagaagcaacaagtctctgatagttctggttatcaaattggttaccgttgtcaactgtgagctcggacgggactctgaattggcaaacaatgttttgcctgaagaatttttgggcagtcttagatgttatcgtggatactgcccttgcctcgatccacttggtaaaatactcgacggcgatgaaggtgaacttgaggttcccttgggccatgggtagtggcccgacaatgtccaggcccccacgctgaaagggccacgtgtgggcgatcagctttgtgaattgcgaaaggttgcccgagcggggggaaaatttttggcaagcttcgcacgatctcgtgactcgattcgcggcgcacatcatggtgtgccagtaaaagccttgacggatcaccttggcaacgagggtcctgggccccgcatg

SEQ ID NO: 6788 - DNA, 389 bp, Zea mays
agctttgaaagttggactacgatttccgctgagcatctttgtcgtataggtgctgaaaatgttcgaagtatatcttcaccaacttacccccgaagcaatcataaagctgaatatcttcgtgtgggccgtgagatgccaaggtctggaacctgatgcgaaaaagttttgcaatatacacgaattatcatacgagacaaaaccttggggtaaggaacagtatcacaataattatggctgctacagtcttgcttctcggtctgggtcaagctgtcccgtgccaacctttcggaagagatggccccgcgactggatgacagaatggttttatgtgaagaatgaccttgcagcacgcgaagatatcagaggtattattatgcgccctatttggc

SEQ ID NO: 6789 - DNA, 325 bp, Zea mays
agcttctaaagggagaacatgtgattaggtttactaacgtaaaaaacgaaacagaagaccttgtgcagcttgtcaggcaggtaaacaggggggagagagcgcatcacagccaagaaatgtgatgaccacatcaagacccctcgagctgctacatatggacctcttcggacccgtcgcctatctaaacataggaggaagtaagtatggtttagatattgttgatgacttcttccgcttcacttgggtggtctttttgcaggataagtctgaaacccaaagaacccctcagcgcttcctcaagagagactcaaatgagttcgagctc

SEQ ID NO: 6790 - DNA, 414 bp, Zea mays
agcttatgaagattcttcatcccaacatgagctattctgcggtgccagagccagcccatgttagtcttagcaattaagcgagtgtcgagttcagctctatcaaaatctactaaggatagctgaccctctaacactcccttaaatgctactaaatcatcacttcttctaaagacagtaacacctatatccgtaaaaagacaggtgtagcccattttgcataattgagaaacataaagcaaattgtaatctaaagaatctacaagaaaaacattggaaatagaatggtcaggagatatagcaattttacccagtcctttgaccaaaccttgatttccatccccgaatgtgatagctccgtggggatcttggttttctcataggaggagaacatcttcttctcccctgcatgtggtt

SEQ ID NO: 6791 - DNA, 383 bp, Zea mays
agcttgttaccagatacgacctaactccgttattgtggctctggtggggatctgctctcgccccgaaggcccttaagaacaaacaccttccgaagatcagctcataagccaacatatcgcacaagtacacgccgaagctactatccagggagcttcggtataacgacatgccttgagacgaaaggctgcacccacttaaagagaaaacaccaatcgccccatggaatttgtgcatgattgaactattgtaaggacataatataatttgaccggctgcgcccggcctttaatagggacagacccctggctgtcaactaacttgattgctcggcgtacgcctgactttacctcgtcaaccaaagataacgaatcatatggctcat

SEQ ID NO: 6792 - DNA, 306 bp, Zea mays
gaccctaagcgactggagatgcagcttggtgactagcggtattcattttatttaatcccacacttaaccgggcaaaacagccaagagccatgcgggtggtgaaacaaaacaaccccgcaagcctcacaaggcctgttggggcaagaatttggcacccctagaaactggtcattctgatctgggtgagaagaatggaaatttgaccaaaaggggaaaagaaacttcccacttttatagatgactccagcagatttttctatggatctcttaaaaccaaaatgaagcgtgaattatttaaaaccttaa

SEQ ID NO: 6793 - DNA, 267 bp, Zea mays
aacctccatcaatgagcatacgacatgaacgcttctctatgacacacttttgttgaaacaacctatgacggtggatctgctctggcttctccatttgtgcactaagcactcgctgtcaaagaagctctcataaatgctctggatcatattcaccaaactgtgtctttggtgggtccttagagccattggctttaccacccaacacgcttataggacaaaacgtgacgtgtcataccctgcttataacaaaacattctgtctactggg

SEQ ID NO: 6794 - DNA, 262 bp, Zea mays
tgagcccctggcgccatcacgaagagtctgtacccttgagatgaaatgaaaactgtgccgtaatccacatggaattcataagcttcgcgaaccaattgtccattcttgcactaacttctctattcctatgaatccttcgagggtggatgaagaacattatgtgaatacttggaaataatgcccgagctttctggaccgccttaacaccacatacaataccctctctaattctggataggagttctttgataaactccaccct

SEQ ID NO: 6795 - DNA, 434 bp, Zea mays
  unsure (1)..(434): unsure at all n locations
agcttctaaagggagaacacgtgatatgtctatccaatgttcaattcgaaaaagatagaccttgtgcagcttgtcaagcanggaaacaggtgggaggagcgcatcacaacaagaatgtgatgaccacttcaagacccctggagctgctgcatatggacctcttcggacccgtcgcctatctaagcatagggggaagtaagtatgggttagttattgttgatgatttttcccgcttcacttgggtgttctttttgcaggataagtctgaaacccaagggaccctcaaacgcttcctcaggagagctcaaaatgagtttgagctcaaagtgaaaaagataagaagcgacaacgggtccgagttcaagaaccttcaagtggaggaagttcttgaagaggaagggatcaagcacgagttcttcgctccctacacacca

SEQ ID NO: 6796 - DNA, 261 bp, Zea mays
agctactaccgactctgagagcgcctgtgttttactacattgacgcaaatgcatgtcgggggctgcgcagacaccaccgggccgtgagactccgaagccagcctctacgtcgcgcaatccctcggaataaacccttgccgcatttacttgctccttatatacgtgtagcaactgattaactagggtttggggcagtgggcggccatcggggggtctccagaatcttctccgccgcggggggggggggactcgttcccatca

SEQ ID NO: 6797 - DNA, 333 bp, Zea mays
gcttctgccaataagccctccggaggagaagctcgaaggcctctctttcaagagcagccgaatggtcctttattttgccctctaaactctccataataacccccgggtttttatcctcgaaatcttgccgcatttaccaagctttactcaaccacatactctgcatacaaacaaccctccgtagagaacatccttgtcgcaaaaacataaaagataagaaaagctgttacctcgaaatggaataaaaaaacacccgacaaggctggcgccggagcggctaatgtccgctcgacctcgggaaaccaactcttgaagagaccaaaaccctccccc

SEQ ID NO: 6798 - DNA, 354 bp, Zea mays
  unsure (1)..(354): unsure at all n locations
nagcttctccaaagtttgagggggctttctgtgtaattactgagctgacggtcctggccgaaaccccttgatcatggactcaatgacaaattcattgggcaccggtggtgcctgtgctttcaaacacaaaaacctttcgacatacgcctgaaggtattcttcgtgatcctgggtgcactggaacagaacctgaccataaccggcttcttctgaaacccttggaagctagttaacaagagggcctttatcttctgccatgaagtgatcgttcctggtcgaaaggaggaataccaaggttgagccacacttttgacagccataacaaaagaattggccatgaccgcaacatttgca

SEQ ID NO: 6799 - DNA, 391 bp, Zea mays
gcggcaagcaaacttgagaagggtctacattcacacatgttctaaacaacgacgccacagccagcccatgctagttttagccattaagcatgcatctacacccgtcttctcttttgcaaaatcaactaattaaagtgtgtcgctctaacacacccttaaaagctaatgaaccatcactatttctaaaaacagacacatctacatttgtgaataaactgttatatcccatattacaaaggtgactcacagataacaagttatatccaagcgactcaactaagaacacattagaaatatagtgctcggatgaaatagcaatattttctaacccttcaccttgcgcttggtcccaatcaccaatatgactgaatcttggggatccttggtcttg

SEQ ID NO: 6800 - DNA, 442 bp, Zea mays
gacccggatcttaagtcacctgccagctgcagcttttggaaaacatgtcattgcggtccgtccgggcccttgcggcggagcgtccgcgacacaaagatgaccctctgacagaaccaatgctaaaattcgagtctgcactatgaaccgtccgaaagataagcgcggaccgtctgagacctctctcggaccgttcggcctcaagcgtggaccgtccgataggcaatgatccgaaaaacccgaaggtgaccggttcggaagaatgaattatagcggcctcgcgaaccgtccggtgtgcacgaccaaaccgtccgcgactgggtctgtctgacatctgacgacgcattaaatgcaatatatcccgtgatatagccgttactgttgaccgtgcattttcagacgtgattttaaagggcggaccgtccggcctgggggcgaccgtccc

SEQ ID NO: 6801 - DNA, 457 bp, Zea mays
  unsure (1)..(457): unsure at all n locations
cggatccttaancgactgcagctgcagcttgtaaaaattaaacctgataagatatatattataccttacaaatccattgccgagactagaaaaanaagtttaacccacagcgaatgcacttgcgtgtgcataccgcgccggtagtacaacacggattcgggcgtgcatttcgcacgccatgtcgcattccttccttttcctttgtgctgtgcgaccggcaacgccgcacggaagcagcgaaacactgtttcaacgcaaatgaaatgctggcatgccgccgatgctgtggagcgaacggtcggacccgtgagcatgcaaagtataaaaggcaaaaaggtcggtgagtggaaaaccacatggtccaccaacggatagcttcggatcacagatactangatatgttaataaattaaagaaaagagatgaaaacgccggtataataaaggaaaagcatcac

SEQ ID NO: 6802 - DNA, 384 bp, Zea mays
  unsure (1)..(384): unsure at all n locations
agcttcgntgctccttcgacagccacgacatcacacctgcagggtgccaagaactctccggctgccacattggcatgtacttagggcactaactctccctccgctaaacacgtaacaccctgctacacccccattggacacctggatcctttccttacgactataaaaagaaggaccagggccttctcaaaaaaggtggccgcctggggacaagggcgggacangcgctctcttggggccgctcgcttccctcacccgcgtggacgcttgaaccccctactgaagcgcaccctacctgggcgcgggatgaacgcgaagccgcgggactttaacctctttacacccgttttcggcaccttggtcttccctttgcgctcgccacgc

SEQ ID NO: 6803 - DNA, 354 bp, Zea mays
cagcttgggctgttcaagtgttgggagaagtatacattattcgccagccgccagaagcccattcaaccaactttacaaaatgggttggcttgtaagccgggaatgggctaaaggctgaagaccttatgcccgatattttgatggggaccctgaatttgacaaaatttcgctactctttttttaaaacctgggtgtggcgtcgatctatttttctagacaaacgacaaaggttgcgtcaattttgaccagccaatgaaaatgtggactgctatttgggttagaccaaccggtcgacactgctgaatgcctgagagaagcaataatatctgtcagttccacgggaacgccagttct

SEQ ID NO: 6804 - DNA, 335 bp, Zea mays
agctttgatacacggattgaacatcgacatattgatttgtgttaagagattgatggtatatggagaatctctggttgtcatcagcctgataacaaggaatgggattgttcaagtgattcaatgggaaaaatctgctctgcccttcgaaaagttgaagaataattccaggggtctgaattttatcatgctaaaagaaatcggaacacagcagcttgtgtactgttcaaactcggatccagtcgaacttatgtcccacccggagtcttcgtgcaagaaattctgcagccgagtatttcaatggattcaacacaagagtgcacattattaattacccg

SEQ ID NO: 6805 - DNA, 364 bp, Zea mays
  unsure (1)..(364): unsure at all n locations
agctttgccttgggcagactaattctctaatattattacacgcactgggagtggagaaatggcgatagttncgtgtaccctccatggctaagaggctggacggtggtgtatctgtactctcggttggcgtgaacctgatctgtgcttaaaaaccccggtggcgagtttacatatgcaagggttaagcgcttcatatgtcgtgtgattggggatcctcagctgaatataatcgattcggatcaccgttacttctcggatatgaagacttgttcactgccctacacgtagcaatccagtgaagttgaatggttgtaaaaaactggctagtgctggtcaagtgattgaactatgtgtaaaagaactt

SEQ ID NO: 6806 - DNA, 362 bp, Zea mays
  unsure (1)..(362): unsure at all n locations
agcttgaagtacatcnttacctaatcagagctgaatatgacgcagaggagatggcttgagctgattaaggattattaattggaaattcactatcaccccagcaaagccaatgtagtggcagatgcactaagtcacaaagcttcctgtcattgtcttacgatgaagacttctgacattacattatgccaagaaatggagaagttgaacctgggaatgattcaacatggaactttaaatcacttgaagcttgagtcggttctcctgcaaagaataattgatgcacaaagaaatgatgatggtatgaaacacattcttgagacaatagatgcccgtaaggcaaactgtttcagaaaagaagatca

SEQ ID NO: 6807 - DNA, 419 bp, Zea mays
agcttgtccgtcgccgaagaagatgatcttttattttatatccgccacataaataagtatataaatctgaagaccgtcttggtttaagataaataaagagacaccagccttctatgcttgaaatcccagttgtatcagggtgccgctcaagcgagagaaccatgcccggggcgctttgttaaggccgcatagagacttatcaagtttgcataaaaactttggatgtgctgaatcctcgaaacccggcggctgcttcatgtacacattcttatcaagaacaccatgcaaaaatgcattttggatgtcaaattgtcgaataaaccaattaccaaaaaccgctcaagataggagtatgcgaatagtgggtggcttgacaacatgactgaatgttccatcataatcaacaccattttgctggt

SEQ ID NO: 6808 - DNA, 324 bp, Zea mays
  unsure (1)..(324): unsure at all n locations
agcttggggagggtcttcatccccacacgtgtttaacggcgatgccacaaccaacccatgcaagtcttagccaataagcatgcatctagaccggcctcttcttttgcaaaaacaaccaaataaagtttgccggctagtacacccttaaaagctagngaaccatcacatcttctaaagacagacacatctacatttgtaaatagacaattatatcccatattacacaattgactgacagatagtaaattatatccaagagactcaactaacaacacattagagatagagtgctcattagataatggaaacttgcctaaacctttc

SEQ ID NO: 6809 - DNA, 191 bp, Zea mays
agcggcagaaccgacaaggtggcaatagcacaccgctacccagtcagaaaaggaaattggacaaccacaaaggataagacatcgatggaatacaaaagtgtatatgaaaacaacgggatgggggcatgcaaacagaaagcacaaggaggccacatcaacaaagaaggggcccaacaaaaagccataggagc

SEQ ID NO: 6810 - DNA, 426 bp, Zea mays
agcttctttatggcctcacaaagaggttctttattttctgcaatatcattaaaaacatgcccttgcgagccattagattcatcaaatgtcacgtctatcgctatttcaacaagatcggtggtattgttgaaaacacgatatccatgcgcatttgatgcataaccaagcaagaagccctctgccactctaagagcaaacttcatgctcttgactgtcttgttaagaaaaaagcatttacaaccaaatactctaaattaatcaactttaggttttgtaccagttagaagctcataagcagtcttcttatagaccttatgaagatataaccggttgattgcatgacaggcgcgtgtgaccgcttcaccctaaaaggtgcaaggtgtttagattcattaacatgggtctgcggcttcattaagggtctat

SEQ ID NO: 6811 - DNA, 455 bp, Zea mays
  unsure (1)..(455): unsure at all n locations
cggaccttaagtcacgcagctgcagcttacggaaaggaaccttcgccatcttatgctttctgcttcagccgcaagccgcttcttccttgaagaccttcggcgacgaagcatagaccccacatgaaccccaaacccggggtgaagaagaagacttgccaagtcaaggttgatccagttaaaaagagttatggtgcatcaacgatcactacataaggacatgacttacaaccaatgnggaacatctacaattatggggtgttagtcataaagctcaagaacaagctcgaaagtgaacgggggttggggctcagatatttcaatctagatcaagtcaagctgactttgatggttacgagttcaacatcaatctagtcatgcccaatgctaaggaagtgaatatcaaagagaagatatgtttctagacctagtacattggtttttgtggactaatatat

SEQ ID NO: 6812 - DNA, 299 bp, Zea mays
tagcttcttaagggagaacacattctgggacttacatatgttattttgagaaagacacggtttgtagcgcatgtcagcatgaaaacaagttggtacccatcatccacacataaacatcatgacgactgagaagctgcttgagctactccacatggatttattcggcacgatcgcttacataagcatcgatatgagtaagtattgtcttggaatttgggatgactattcttgcttcacttgggtattctttttacaggaaaaatctctaacctatgagactttaaagggattttttgaac

SEQ ID NO: 6813 - DNA, 397 bp, Zea mays
agcttgccctcctcgccagctgggccgacctgcgagctcctctctggctcccctggccatgcgcctgggccccatgcgcctgggtccccgtccacagctgggccgcctccaccgcgtgagcacttctggccaacttcgccccgtgcgcctgggccttatgagcctgggcccccgttcccaggtggggtatttccgcccagatcgtctgggcactcggcgcctgtgctgcttttgaaagggaaatgtgcctctgggccatttctaagatatttggtgattaaatgtcaacacaagtgcttaaatgtgaatcaatacccatggatgaacaaagtgcaaatctatagcaaaggtatgtctctaagtcttagtcaatggggttgtgtctaaatacatgtct

SEQ ID NO: 6814 - DNA, 391 bp, Zea mays
tagcgtgcaagctataaacatctaatttatggtttcagtttgctggtgaacccttagttaccacttttcatgcgtccatccaggagctactactcgtgcacccacagtaactgtcgcgtgaaaaaactagtggagaggctatctgaggactgccgcatggtgatgaccacctatgagggtcgccacacgcactcccccttgagcgaccaacccgacgccggcgggggcgatcacactggcagctgcgctctcacgctgctttagagaccgatgcataagcttgtgcatttgaacgaacctgcctacacctatcaacgcagtgtcttagagacgatcgatcgatgcccaatatattcatgcatgcgaggttgttaaaagtaatcaatcaaat

SEQ ID NO: 6815 - DNA, 425 bp, Zea mays
  unsure (1)..(425): unsure at all n locations
agcttccactccaactctgatggtatcatctacgctntgncggcactcatgtaacactcaattggtatgacccttcactcatatntattttaccatttgggagaacatattaggccccaaagggggagaacatgaaatagggctctcaagttcttcgttcttggtgattaatgccaaagggggagaaagtattaaacccaaagcaaaaggaccgcaccaccattacaaaatttttaaatatttcacaaatgtgcatttcaattggtatttgagttagcctcaaaatgaatattcaattggtattttaagtcaattttcaattggtaacttatttcagatatcaagttaatatgaagaacttcaattgggataatattggtcgggatccatttcaaaaagggaaaatcatttcaaaaaccctcttg

SEQ ID NO: 6816 - DNA, 357 bp, Zea mays
agcttcttcaccatgtgatcacggttatctttataatgttgagccatgcactttcctttaagatgagtcaagctcatttttaccctctcattttcttctttgagcttttgatatgtattattatatgttcctgccaaatctagctcaaaggaagatttgcttgtcgacagacaacaagcattagcacatggtaatataagttctatttgaatacatgtgcatgaatgaggttgtcgggaatttaagttttctatcaaaacctcatgagcaatgtttaacatgatatgaacattcataagatcttcatgacagcataggagcatatcatacttttcttgaaaagctagatttcaactt

SEQ ID NO: 6817 - DNA, 405 bp, Zea mays
  unsure (1)..(405): unsure at all n locations
agcttctntcaaaggtgttctgtcaagaatattccacgaggagaaaatgagcacactgatctgctagctaagtcagcggcacaagggctgcctttaccttcggaagtattctttgaaataataaaagcaccttcggtggaacttcttgaaagagcagtgctcaatatatctcctgttcatagtgaagattggagaacagagattatatcttttctccagggcaactgcctttcagatgacgaagcttataacaagagaatagaggcaagagcccgaccatatgtaataatagaaggggagctatacaaacatggagtctgttcttcattgcttcaaatgttatccagagctaaaggtataaaatttatgaaagaaatacacggaggtctgtgtggatctcacatc

SEQ ID NO: 6818 - DNA, 353 bp, Zea mays
  unsure (1)..(353): unsure at all n locations
agcttctaaagggagaacatgtgatacgcctatcctctgttcatgtcgaaagagagagaccgtgtggctgtcggcaagcagggaatcaggcgggaggagcgcatcccagcatgaatgtgatgaccactttaagacccctggtgctggtgcatatggacccctttcggacccctaccctatctaatcatanggggaagataagatggcctagttattgttgatgacttttcccgcttcacttgggcgttcttttcgcaggaaaagattgacaccccaaggacccttcaacgcttcctgatgaggactcaaaatgaggttgagctcaaaagaaaaaatatagagcgacaacgcgt

SEQ ID NO: 6819 - DNA, 347 bp, Zea mays
ctctataacgacctgcagcatgcaagcttctaaagggagaacatgtgatacgtcttactaatgctactttcgagaaagatagaccttgtgcagcttgtcaagtaaggaaacaggtgggaagctctcatcataccaaaaatgtgatgacaacatcaagacccctggagttacttcatatggacctcctttgacccggcgcctatctaagtataggaggaagtaagtatgggcttgttatagttgatgatatttcccgcttcacttgggtattctttttgcaggataaatctgaaacccaagggacccttaagcgctttctaaggagagccccaaatgagtttgagctc

SEQ ID NO: 6820 - DNA, 113 bp, Zea mays
gggaaaccacttcgtgttatcactcacacaaaaacatcttgacaaccgacctagcactccagctcccacacatggatctattcggcccgatagctttcaaaacgattgcggga

SEQ ID NO: 6821 - DNA, 291 bp, Zea mays
atagtgttgggccagaactgacccaaccggcccaaccccgaacagaaaacggggacgcgcccgcgcacgcgcccggtttggtggattttgcatagaggccctcgatgacttggataactcgttaagaacccccagccactatttatcggctctttgaaaggtgtaaaacacccttgcgcttttttctcttctcaatccctaatccatgaccgcgaacgacgttgggcccagctccggcgagcttgtaccgggcgattcacacaacgaacggtgctttactttggcagaaac

SEQ ID NO: 6822 - DNA, 80 bp, Zea mays
cagcgatactaaacacataaaaaggtgagaaaaatttcaacttactgctgtcatacaatatgattggactgttgacagaa

SEQ ID NO: 6823 - DNA, 398 bp, Zea mays
  unsure (1)..(398): unsure at all n locations
agtcattaaccagttttggagctatatccttatctgttatctcaaatganaagaagaaacttcattcagcaaataagaacgacaggcatgggttgcagaacaaagatattgtacaggaaaagttctaacgcgtaggacaatatatgacaacacattaagttgcaagtataatcaactaagggtctcaagaacagaaaatacaatgtgctcttgcacaattcccagtttgatttgaaatgcagaattgagaaactgacaaagctagcagattaaatgcatgcacccttcaaataaatgacaaaaaaggaataaatcatgttcttgatgtggttgaacacacccaggcatgtgcaagtacacactgcttatgttgtgaatgcatgcaaaaacgtcaatat

SEQ ID NO: 6824 - DNA, 371 bp, Zea mays
  unsure (1)..(371): unsure at all n locations
ccaaacactttcctgttccacttttntaatacataaaaaacgaacttattacattcataacactattcttgccttatatgacgcagccacaagggtttaaatgcaccgccactatatcacgactcatacaagataacaaatggtggggtccagcttgcaccacatgcacaaaaacttcgcctcaaacctccactggataccgctgcacatcaagcgcgtggacagacgtaaagtttaggaaaccctaaacatacacattctatctcctatgacttgtatacggaaagctaacacatacacttgaggagcataaactcagcttcgttgtcaatgatggaacatgtgaggctgagatcgtctgtttcgatacc

SEQ ID NO: 6825 - DNA, 425 bp, Zea mays
  unsure (1)..(425): unsure at all n locations
acccgctaaccctctgtcttaagctcatcgttcgagtcccaacggttcaccatgtagagtgagtccactagcttttcctccgaacacaaatcctattgtcacctggtttctgaaaccacgaaaaaatcgtttcttgtttcaacaactcataaatagattatatgtccacaactttaaaaaatccgtaggcgcatttgatcctagttgtttgtacgtccagaaaatgctgcgtttattaattntaagattaacaaaatcaccacggacatatcgtttaatattttaaaaatgattggatatataaactcaagcacccgttataagttggagagccaaatcaagatgattgggtttgactatcttcttagttggcctacaaaatttataattataaaataatatcctctacatctaanaaatgcaac

SEQ ID NO: 6826 - DNA, 449 bp, Zea mays
taagctgactggattgaacccccatgccaagtgggaatatttatttttactaaagaggagcttaaccaggtatttatgacttacgtattctagcatggagtataggattttggcaactacccaagaccatgagaaaaaaacaaggtaacatcttgtcttttcttttattaactaatttaaatttaaatagtttgcaagtttaattgaataataattaggattcatgatgttgtacttaacattttcttacttgttctctaaaagcatacaaccaagtgagagcatatattatatgttttgcagcgacacggtaagttaagacataatgatgcaggatgattgcgtttaagaggttttcatgcccttgttgatgaaggtcaactaagggttttaaaaggaatggttgaaaaggttaagaaaatcgactagttataggtgttaatggatat

SEQ ID NO: 6827 - DNA, 403 bp, Zea mays
  unsure (1)..(403): unsure at all n locations
gtcacctgaggcatgcagcttaccgattttaagcatgatcgctttctctttgtcttggccttgcttggctgtccctttcgaccttttagcgccgtcttgaatctcttgatgatgagagccatctcttcatcattgagcccggccgcctcaacttgcgccaccttgctaggtagcgactccttgctcctttgtgcctttagagcaatggattgaggctcgtggagtggaccgttcaacgcgtcgtcgacgtatcttgcctccttgatcatcatccgcccgctcacgaatnttccaagtacttcctcgggcgtcatcatcgtgtacctgngattctcacgaatattgttcacgagatgaggatcaagaacggtaaaggacctgagcattaggcggacgacgtcgt

SEQ ID NO: 6828 - DNA, 449 bp, Zea mays
  unsure (1)..(449): unsure at all n locations
cacaaccaactgaaagtatcaagacagaggaatagtgttatcgctaggcacgaacttcacctgaatgacccacatgctcagaaaagcctctaggcagaacaatgcaaatccaatgaagtagaagatccggaggtcaaaaataataggcagtgacttgctctcgatgtatgtatcatttgccttttcaggaaatataggtacaatcatatcctgtggaagtctgngccactggactctgaataatagcggtagactcactcaccccgacaatgacgctgtcgcctatcaagctgattgctgggaaaatcccactgcatgatgggtagattggtggaaggaaatcccattacaattcagattcacgagttttcaataaagaaagatgcagaaacaatagtgagaggcgcaaatagtaacaatataactcacattaacattnntcccacaaa

SEQ ID NO: 6829 - DNA, 366 bp, Zea mays
agcttcaatgggcgagctcacgcgctgtttttatagaatgactactcagcatagataccagctgaaagtaggagtccgcacatctaattgaagcatgaagcactgacaaagcaactaaagttgatctgctcggtcggtgggaaaggactataatacagcgacattcacagcgatcatagaatagctgagcaggctccaaatctcggcgcctctagcccactacagcttggaatcccgagcggtgcaacggtcaacagcagccacccccgcgattggagccgcaaggtggctcgagtgtcgcagatcatccacgagcaagtctcgcagcgcggctcggaggaggggacatctaacctcacctgctct

SEQ ID NO: 6830 - DNA, 155 bp, Zea mays
aaccgactgtattgtgatcaccactaacaaccttccagcgtttcgggggggggggggggtgtatcatatatgccgtctttacacgtacaaatggggccactctttaaccgggccctaactcccatatgaatcttatccgggccggtatcagggca

SEQ ID NO: 6831 - DNA, 341 bp, Zea mays
actaacaatgttattttgaaaagacaggatttgtagcgcatgccaagcaggaaagcaagttggcacccatcatccgcataagaacataatgacgaccgacaaaccactggagctcctacacatggatctattcggcccgatcacttacataagcatcggcgggagtaagtactgtctagttattgtggatgattactctcgcttcacttgggtattctttttacaggaaaaatctcaaacccaagagaccttaaagggattcttgagacgggctcaaaatgagttcggcttaagaatcaagaaaataagaagcgacaacgggacggagttcaagaactctc

SEQ ID NO: 6832 - DNA, 448 bp, Zea mays
  unsure (1)..(448): unsure at all n locations
agcttggcaaaagaactacataacttttattatcaccaagaattgattctatgttgaactgaatcaaacaattcagttttcgaaatctgttctgtcagtggacagaacacaacaaccaagttgtaaaattcttaactcttaaaccgtcaagcctttagttatgaaattttagcacaatcaagataagaaaagcatctacaactttcttataatctacaaggactgattaaaacattaacttaagcaaacagtacagtctctgaaatctgtacagaaattggacagattcagttactgaatttgcaaaaagcataactcctaaattgttagacctggtggctgtcaaatttaacaccagcaagataataaagttatctaccacttttctatagcatatatctacggaaaacacaatntagttcatcaaacatatagcacgacaaaaaca

SEQ ID NO: 6833 - DNA, 449 bp, Zea mays
tgacacatagctcttttgaatacctttgatcatatctcttttatatgctatgactaaggagctttcaaggttatttcaaaccaagtcataggtatattgaaagggaattggagtcttcggcgaagacaaaggcttccactccgtaactcatacttcgccatcactccgagcaactctctcgtctttgggggagaaatgagcatcaaggaaaaggacttcatccttgggggagagagtaaaagctcaaacgcaaaaggactttgtctttggtataatcttaactcacttatttatgaccaaaggggaagattgcaccaggcgggctctaatgattccgtttttggcgattcatgccaaaaagggggagaaatgagcccaaagcataaggaccgcaccaccaccaatttcaaaaacttaagtggtgaatatttttcaattgatatcctatt

SEQ ID NO: 6834 - DNA, 435 bp, Zea mays
  unsure (1)..(435): unsure at all n locations
gcttaacttgagaaacatgtgccttcttattggtgaatgggacgcccttggctgactaattaggaaagctagtggaagactaccttacccaaaaggggcaagggcagtaggggagttgcatgaaaagaggttatcaggttgattttgctgtgatggcggtcagacggggattcttgcaagtgctcttcccataaactgtagcgggttttcgaaagctagtggaactttgtaaaggcctcgtagtggatccctagccattcacctcggtagtgtctaagggccttgcaaaccctggcgacatgggatacacgacttctgggtatagggtacaacctctgcagagtgtgaaactggtatactagccgagctcanggtcacgagcagctcangactctcgcatgaaaaatttatggaacttanattcgatctgtcata

SEQ ID NO: 6835 - DNA, 451 bp, Zea mays
  unsure (1)..(451): unsure at all n locations
gcttctaaggtagaacacattntaggactaacaattattctttttgagaaagacagaattttcagcgcatgtcaagcagggaagcaagttggagctcatcatccacacaagaacatcatgacgaccgacatgccgcttgagctactccacatggatttattcggcccgatcgcttatataagcatcgtcgggagtaagtattgtcttgtcattgtggatgagtattctcgcttcacttgggtattctttttgcaggaaaaatctcaaacccaagagaccttaaagagattcctaagacgggctcaaaatgagtttagattgaggatcaaaaagattagaagagacaatggaacggagttcaaaaattcacaaattgaaggatttcatgaggaagagggtatcaagcatgagttctcttctccctacacacctcaacaaaacgatgtagtag

SEQ ID NO: 6836 - DNA, 347 bp, Zea mays
cccacatgttctaagcggttatgccacagccagcccatgctagtcttagcaattaagcatgcatctagaccgaccttttcttttgcaaaatcaactaagtaaaggttgccgtctaatacacccttaaaagctagggaaccatcacttcttctaaagacagacacatctacattagtgaataaacgggtatatcccatattgcataattgactaacagatagcaaattatatccaagagactctactagaaatacattggaaataaagtgctcatttgagattgcaattttgcctaagcctttcaccttggcttgattcccatcactgaatatgattgaatcttgggg

SEQ ID NO: 6837 - DNA, 398 bp, Zea mays
  unsure (1)..(398): unsure at all n locations
ggccagttctggagaatgggtgctcgttccctgaggtggtctggagctgtgtaaccgcttatcttggttccgtaccctgagcctgcacactccaccactctgtgacgggtatcctagtatttggaactatagtcctatgggtccggcaacctaaagtttggttttagagaatggacactcgtctcctggggtggtccggagctatgtagccacttatcctggntcagtaccttaatcctgtatgctccaccactctgcgatgggtgtcctagcatttggagctatgatccagggggtccaggcatatgacttggcttcccaggctaaatcctgcaggtcctattacatgaatcaaaggatcaaagatactagttggtgggtcctatgggtgcgctact

SEQ ID NO: 6838 - DNA, 388 bp, Zea mays
tacttgtcaaagcatctttatctaccagcacagcaactgcagaccataccagtaacttggccgttcgcatgctggggactggatatgattggaactttcaaaaacgctcaaggaggatacactcatgtactggtagcaatcgacaaattcactaaatgggtagaattcaaacccattgcttctttaacctcagccaaggccgtgtgaatcatacaagacatcatattcagattcagaataccgaacagtatcataactgacctaggatccaacttcacaagttcagagttcttctatttctgcgagcaaaagagcattcagatcaagtatgcttcggtagcacacccaagagccaacgagcatgttgaacgagctaacgggatgatat

SEQ ID NO: 6839 - DNA, 254 bp, Zea mays
acattttatatctagcaaactatcctgaacataagattaggagaattcatgcttgaaaacctcacactgtttctcatcatgcatttatgtataaaaatgaggcttctaactctaagcaatcaactcatgttaaattgcctaaaaagaaaacccctactgcatcaaatgaacataacattttatttaagacttttgatgcatcatatgtgcttactaataaatcacgcaaaatagttgccaaatatattggggac

SEQ ID NO: 6840 - DNA, 459 bp, Zea mays
  unsure (1)..(459): unsure at all n locations
taaggatactattcaactaaagtaagatgaagttgatattatgccaangtatgaaaactttctctccttcagttgttttagtattctatccttagtgggatgtaccataatatagattaatttcattgcaatataaaatgttcaatagtgcatataactttgacatcaatcatatatgtgcactaatttaaaataatttaatctaccattttgggttctaagaatgatgattcatttgccatcctcatataaggatcatcatttgtgaaaccctcctttgtgtttctaatactctcttttctaagtgtttcaataaggtccttccaagagctttcaagatggattcaaaatctatggatataagagtcttggttgtttcaatcattgagttttaattgaccgaatcaagaaaagatgaaagaagttcaagatcacttggttggatgaaatcgtaaagag

SEQ ID NO: 6841 - DNA, 347 bp, Zea mays
  unsure (1)..(347): unsure at all n locations
agcttcagctggaggttttgttcgcacagtatatacaaagcatgtccgaagcagaggctgagagccttaagatggaactgggagcattggtggaggcaaaggaggcggctacaaaagcatttggtgccgagaaagcaaagaccacgaaggaactggaggatcttaaaaggaaggtggaggaaatccaaaccaagaaggatctggtggagggcgaaaaggataagctccgtttggagattctaatagcggagcagaggcatgccatggctgaattagaggttaagcgcctcaagatggacttggctgcatcggcagaggcgagggagacagntgtgaggtcatgtgac

SEQ ID NO: 6842 - DNA, 395 bp, Zea mays
  unsure (1)..(395): unsure at all n locations
cacatgtgctaagcgactatttcacagccagcccatgcaagtcttagcaattaagcatgcatctaaaccgacctcttcttttgcaaaatcaaccaaataaagtttgccgtctagtacacccttaaaagctagtgaaccatcgcaccttctaaagacagacacatctacatttgtgaatagacaattatatcccatattgcataattgactaacagataacaaattatatccaagcgactcaactaaaaacacattagaaatagagtgctcggatgaaatagcaattttacctaaccctnttaccttgccttggttcccatcaccgaatatgattgaatcttggggatccttgttcttgacgtaggaagagaacatcctcttttccccctcatgtg

SEQ ID NO: 6843 - DNA, 201 bp, Zea mays
gctgggtgactcctccatgcgcctaggtgtcccttttatagccccaaggcagctaagagccgttggaggccaacaaggaaggctatccttgccttctgtcgggtggtgcaccccacagtgcggtgcgccaccagacaattacttgatacagcccgatgcccatccccctactattttggcgcacactaccattgtcatctc

SEQ ID NO: 6844 - DNA, 451 bp, Zea mays
  unsure (1)..(451): unsure at all n locations
tgccagtacctgtcataactacagcacatgccagcacagtagttactttccataccagtaacttggccttttgcatgctggggattggatatgattggacctttcaagaaagctcaaggaggatacacccatgcattggtggcaattgacaagtttactaaatggatagagtttcagcccattgcctccttaacctctgctaaagccgtggaattcatacaaaacataatattcagatttgggataccaaacagtatcatcactgacttgggatccaacttcaccagttcagaattctttgacttctgcgagcaaaaaagcattcagatcaagtatgcatctgtagcccatccgagagccaacgggcaggttgagcgagccaacggaatgatattggaagcacttagaanaagggtctntgataaaaatgaaaaattcgcaggaaaatgga

SEQ ID NO: 6845 - DNA, 443 bp, Zea mays
agcttctaaagaaagatcatgtgttaggactaaccgatgtctggtttgagaaagacataccttgtgcagcatgtcaggcagggaaacgagtgggaagcacccatcacatcaagaatatgatgacaacatcaagaccactggagcttcttcacatggacctcttcggacccattgcctatctcagcattgggggaagtaagtatggtcttgtaattattgatgatttttcccgcttcacttgggtattctttttgcaggataagtcagaaacccaagggaccctaaaacgcttcttaaggagagctcaaaatgaatttgagctaaaggtgaagaagataaggagcgacaatgggtccaagttcaagaatctacaagttgaagagtttcttgaggaggaaggcatcaagcacgaattctccgctccctacacaccacatcaaaat

SEQ ID NO: 6846 - DNA, 446 bp, Zea mays
  unsure (1)..(446): unsure at all n locations
gtgactagagagagtgatttgtagtgttcattagagctcttgctctnggatcgcctcttttctttcgcattctttcttgagatcatactcacttgtaattgaggcaagagacaccaattgtgtggtgatccttgcgggaagtttgattcccaagtgatttgagaagagaagctcactcggtccaagggaccgtttgagagagggaaagggttgaaagagacccggtctttgtgaccacctcaacggggagtaggtttgcgagaaccgaacctcggtaaaacaaatccttgtgtcacacttcttatttgctcgagatttgttttgcaccctctctcgcggacaagtgtttatttctaacgctaacccgacttgtagttgtgtttatatttgtaaatttncagtttgccctattcacccnccctctaggcgactatcaattggtatca

SEQ ID NO: 6847 - DNA, 459 bp, Zea mays
  unsure (1)..(459): unsure at all n locations
agcttgtgaagattcttcatcccaacatgggctattctgcggtgtcatagccaacccatgttagtcttagcaattaagcatgtgtcgagttcagctctatcaaaatctactaagtatagctgaccctctaacacacccttaaatgctattgaatcatcacttcttctaaagacagtgacacctatatcagtgaaaagacagttgtagcccatttgacataattgtgaaacggaaagcaaattgtaatctaaagaatctacaagaaaaacattggaaatagaatggtcaggagatatagctattttaccaagacctttgaccaaaccttgatttccatccctgaatgtgatagctcgttggggatcctggtttttctcataggaggagaacatcttcttctcccctgtcatgtggntngtgcacccgctgtcgagtatccaacttgagcccccggatgca

SEQ ID NO: 6848 - DNA, 442 bp, Zea mays
  unsure (1)..(442): unsure at all n locations
agcttgatggccaagtcaagaagcagggcctagtatattttgtatctgagggtcttagtttatcaaagaaaaactatacagaattggagaaggtgttatatgctgttttgatggcatccaggaagcttcgacattactttcaagcatacaatattgttgttccttcttcgcaaccgttgaaggatattatgagaaatagagaagctactggacggattggaaaatgggctgcagagctcaatgaattttgcattgattatgtgcatagatcttcgatccagtctcaagcgttggcagatttcattgctgactggacgccaggggctcaggatgaagaaacaaataaagatgtcgaagtatggacagtgttttgcgacgggtcttggggaaccttcggagcaggagcagccgctgtgttggtctcaccatccaaagntaaaac

SEQ ID NO: 6849 - DNA, 387 bp, Zea mays
  unsure (1)..(387): unsure at all n locations
tggctgatgtcacgatctgcttactctttaatttttgtaattgnngcagtatgcaaggccaggatttgctttgggtcttgccgctgtcctcgaatcgattcgggcaatcaaggtggaagcaattatgaagttgatccctaatttattggaacattcatcttctatgaagggaccggtaaattgaaaaactaatgtcactactcagtactcattatggctatcaacatgtctctttcctgttttgatggcaacttacgtttctgtttaggaagctaaggacaatcttttggggcgcctgtttggatttggagcaattgagaggtctggtcgtgtgtcacgacagtggtcacgtgacaaaagctcacccattgttaaggaatttgtgag

SEQ ID NO: 6850 - DNA, 206 bp, Zea mays
aacacgcgctgcactgactgacaccgataagttttttggtttttaaggccccaaaaacaccattatacgaagtgttaaatgatgccaaaacatttctacgggctacaaaataatgatactaacactaagtattctgggcataactgactggaactaccaataatcgctccattgagtctctgacctgttttgggggggggggtatt

SEQ ID NO: 6851 - DNA, 324 bp, Zea mays
  unsure (1)..(324): unsure at all n locations
attccctttcttccctccccccccccctttgtctgctccggaccacatactacttccgcgggatcgggagacaaggccccttattcttatcgcacctcgtacctttgctctatgccgggatcttaccgcaccccaaaaccggcacgccgcggaggcgttcttatcgccggcggggggggggggcgatcctgaactacgcctctataataccgtgatactgtcctcaaagcactgattgctcaacttttcgatgaccgtctgacacacttgttaccgctngagatcatataccactatagaaaccgctccttatttgcgtgagaa

SEQ ID NO: 6852 - DNA, 312 bp, Zea mays
  unsure (1)..(312): unsure at all n locations
tgcaagcttaactctggctcaaacttgtctattttattttntaagcactaaaacactcaaaagttcatttactatgcaaatgttggttcttgaaatatgcatgtgacactgcacttaaggggagtatccaaaactcaagtcattcatgaaacccctagtgcaaagccgcaatgcaaaactcaccaattgactattttctctaaaaactatctagcctatggcaaaatattttgaaaaacatgagaaaatatatgagggtaccaatacttgtcccaacaggtgtacttntgtgtgcttatgagttgggatttg

SEQ ID NO: 6853 - DNA, 451 bp, Zea mays
ctggaagttttatcccacatgtgctagcggtatttttctccagcccatgctagtcttagctattaagcatgcatctagaccggcctcttcttttgcaaaatcaactaaataaagtttgccgtctaatacacccttaaaagctagtgaaccatcacttcttctaaagacagacacatctatatttgtaaatagacagttatatcccatgttgcataattgactaacagatagcaaattataaccaagagactctactaaaaacacattagagatagagtgctcattagaaattgcaattttacctaacccttttaccttgccttgattcccatcaccgaatacaattgaatcttgggaatccttatttttgacgtaggaggtgaacatcttcttctcccccgtcatatggtttgtgcatccgctgtcgataatccagcttgaacccccggat

SEQ ID NO: 6854 - DNA, 439 bp, Zea mays
  unsure (1)..(439): unsure at all n locations
agcttctaaagggagaacacattntgggactaaccaatgtttattttgagaaagacaaggtttgtagcgcatgtcaggcaaggaagcaagttggtgttcatcatccacacaagaacatcatgacgaccgacaggccgcttgagctactccacatggacctattcagcccgatcgcttacataagcatcggcgggagtaagtattgtcttgtaattgtggatgattattctcgcttcacttgggtgttctttttgtaggaaaaatcacaaacccaagagactttaaagggattcttgagacgggctcaaaatgagttcggcttaaggatcaagaagataagaagcgacaatggaacggagttcaagaactctcaaattgaaggcttccttgaggagganggcatcaagcatgagttctcttctccctacacgccacaaca

SEQ ID NO: 6855 - DNA, 439 bp, Zea mays
tgacaacgaggagatggcgctcatcatcaagagctttctccttatttcaagcaaagaaatgggaaagactacaagccccattccaagagagtgtgctacaaatgtggtaagtccggtcattttatcgctaaatgccctatgtctagtgatagtgacagggacaacgacaagaaggggggaagaaggaaaagaagaagtactacaagaagaagggcgacgatgcccacgtgtgtcaggaatgggactctgacatgagctccatcggctcctcctccgaggaggatgccataaacatcaccgtcaacaaaggacttctcttccccaacgtcggccacaagtgcttcatggcaaaggacggcaaaaagaagaaggtaaatctggagccttcactaatatcaacatctagtgatgagggtagctctagtgaagatgaggataa

SEQ ID NO: 6856 - DNA, 393 bp, Zea mays
gcttctggagagttatgaagctattgtttcggaaatcaagaacattccggtagtatgtgaatttccagatgtatttccggaagatttgcctggactgccccctgaaagagatgtaaaatttgtaattgagctaaagcccggtacggctcccatctcccgaaggtcgtaccgtatgccccctaatgaattggcggaactgaagattcaattacaagatctattgaataagggattcatccggccaagctcgtccccttggggttgtcccgccatttttgttaagaagaaggatcaaaccttgagaatgtgcgtggattatcgacccctaaatgaggtcactattaagaataagtaccctcttccaaggatcgacatcttatttgatcactgact

SEQ ID NO: 6857 - DNA, 473 bp, Zea mays
  unsure (1)..(473): unsure at all n locations
gacctataaaactcagcttctaagggagagcacattntatgattaacaaatgttcattttgagaaagacaggatntgtagcgcatgccaagcaggaaagcaagttggtgctcatcatccacacaagaacatcatgacgactgacaggccgctggagctcctacacatggacctattcggcccgattgtttacataagcatcggtgggagtaagtactgtctagttattgtggatgattattctcgcttcacttgggtattctttctgcaggaaaaatctcatacccaagagacctgngttcttgagacgggctcaaaatgagttcggattaaggatcaagaaaattagaagcgacaacggaacagagttcaagaactcacaaaccgaaggcggccttgaggaggagggcatcaagcatgagttctcttctccctacaccccacaacaaaatggtgtagtagagaggaaaaata

SEQ ID NO: 6858 - DNA, 338 bp, Zea mays
  unsure (1)..(338): unsure at all n locations
ctccggcggcccgaaccactctaaaccctcgcgtgttcatgtgctccgtgatcacttaacaagacaagcaaaacgcttaaaccccttcctcatcttaggatttagggggggtgcactccgtcaccccgccggagaattccctcttcgacaacaccatataacatttcaaagtaggatgacctgaccatacaaggtttaatgagaactagtctcacatgccccatatgacaaaaaaatgttttcatttccaagagcctaatctctgttggagcctatnttctacttttctctgatgggtgctagaaaatcggataagtaatggaactaacatttatcac

SEQ ID NO: 6859 - DNA, 456 bp, Zea mays
  unsure (1)..(456): unsure at all n locations
gaccttaaaactcagcttattagctntcgctcacgcgcaccgtcccaacggcgctttaatgttgttgacaaaacacaagaagtcgtaacccatccccaccccgcggtgtcgcaatcctatctcttcggatattccggactgatgcatccctcgccctcccacccggccagcaaaagcggcgggacgttattctccagcgcaagccagtcgtggtgccatccatccatgcctatggaattgccaatcgaggtgcacagcaccacccacacagtgttgcgtagtactgtaagtacttgtgtgtgacaggaaggtcaagaactcgtgcagtcagcagacctgcacaaccgctgcgcgggaaccaacggtcatccccggtggagcagtgggcaccaccagaccacgccgaccccattcgccactctactactaactctgaatcagcccatcagtgcgggt

SEQ ID NO: 6860 - DNA, 375 bp, Zea mays
agcttcggcataccccattcccttagtgtttttaatacttgggtggccaagtattcttgaactaaatccctagttccaatgtgttcagatacaactctaaactcatacacagcatctgggcatggtgcccccggcgtcatattgcactgaggcctaatcaaccccaaggttaactccaacgggctctgaactaacttctcctttttctcatcaattttaacataaaaccattcaaaatttcaaccggtcggccatttaaagcgatagctgaccaccggtgtcttcatgtctttgcgataagcaaaattatagcagctgaaagtctcatgccggctgtctttcctaaccttcgtctgatagtgaagttcatgtact

SEQ ID NO: 6861 - DNA, 230 bp, Zea mays
tcatactttttagaaacacattttaattatgggtccagcatatgcctttgcagaactagtgaattattggtgaatcctgtgaagttattcaagggcactttgacattcccatattggtcctctaatagaccggatttgcttcctaatagaatctatgatacaacttctgatgaccatcatacacactttatacgtttgagatcatataccattataaagacacgtttatt

SEQ ID NO: 6862 - DNA, 453 bp, Zea mays
  unsure (1)..(453): unsure at all n locations
gcttctaagggagaacacattntggtactaacaaatgtttatttttagaaagacagaatttgtagcgcatgtcaagcagggaagcaagttggtgttcatcatccacacaataacatcatgacgactgacaggccgcttgagctactccacatggacctattcggcccgatagcttacataagcatcggcaggagtaagtactgtctagttattatggatgattattctcgcttcacttgggtgttctttttgcaggataaatctcaaacccaagagatcttaaagggattcttgagacgggctcaaaatgagttcggcttaaggataaaaaagatcagaagcgacaatgggacggagttcaagaattctcaaattgaaggctttcttgaggaagagggcatcaagcatgagttctcttctccctacacacctcaacaaaatggtgtagtggag

SEQ ID NO: 6863 - DNA, 302 bp, Zea mays
agcttggtgccgatttagattttaaaattcttttaatcttggctgtcgaactgcttgccggtgtcaactgttaactcggacggtactcccaagcggcaaacgatattctgccagaagaatttttgggcagtctttgatgtgattgtggaaacacccctcacttcaatccatttggtgaagtattcgaccgctaccaaggcgaacttaaggttcccctgagcggtgggcaggggcccgacgatgtccacgccccaccgctggagaggccatgtatgggcgatcaactttttatattgcgaggg

SEQ ID NO: 6864 - DNA, 374 bp, Zea mays
aaaacagcaagggtgcatttttctattggctcttaccatgactttggtgatttccatgtggtgagtatggatgaatgctctcttttactgggacgtccttgggagtttgatactgatgctattcaccatggtagatctaataaatatactttcatgcataagggaaagaaaattatgttgcttcctatgactcccactgaaattgtccactttgaacatgagaaaaagactaatgctaagcaaaaaggtgttttgaactctgaaaatcagcaacctattaagttaaaaactcctaatttgctagccactagatctgatcttgatgagttacatgcctcttgtggactttgctataccttagtgtgcaaaaatgc

SEQ ID NO: 6865 - DNA, 459 bp, Zea mays
  unsure (1)..(459): unsure at all n locations
agcttagtccagtggggttcaaagtggaaccgatgacgactaggttttctgtcatggaggcccaaaagcaaaggacagtgatcagatccatcagtgctagcactttgaagaagacagttgggaaaaagttgctcccattctggagaacagaacattctgtcaagtttaactagagtgggtgtgtcttggtggttagaccangtgaatttcctcccgtgaagagctaattcttttatgccgaggtcattgatgagccttctgaaactgtgcataagctgcctattaaaattgccagtgctcttatcttcgtctctgtatataagggtgaaatcccccataagaatccacggaccaagacagacagaacttanacctcttagcttctgcataaactgatgtttattgctatctccctgacgaccatacacacaagttaaccaccaaggttgttgatctcta

SEQ ID NO: 6866 - DNA, 450 bp, Zea mays
ttgaccaggtcgtcccagttggagatctgcgcggaggcttatctcttctctgctcgggcggtgtcggagaggaacaggggaaggttgcggatgatgaggttgtcatcgtccgttccacccagctggtaggccagccggtagtccgcgagccacagttccggcttcgactccctcgagtacttggtgatggtagtcgaggtttagaaccgggtcgggaacggcgcccgtcgtatggcccggctgaaagcttgcggactgggtggttcacgctaggggctccgatcctccccgctgtcgtagcgtcccccacgtctagggtggtagcctcggcgctccttctcgtcaaggtgggctcgacggccgcggtggtggtgctcgttgccgaggcgacccggtgccgcaggtgccgcgttctgcgtgcgcccggtgtagaccgaggcttctcgcatg

SEQ ID NO: 6867 - DNA, 443 bp, Zea mays
  unsure (1)..(443): unsure at all n locations
agcttcggcttcatctatgttatggatggtctttgtttctgtccagtttccttcggtccttctagcagcctcttgatttccatgcacagcgataggaccttggtcagatggtatcttcatgcacaaatatgctggatggagtattgcttcgaaggcattcagtgtccctcgaacaatgattgcattgcaaggatagtccatatcgataatgtcaaatacaacttgttctgttcttgtgttgtgaacataaccgaaggtgattggcattgttatctttccaagtgccactatctgccttcctccaaagccacacaaggggtgtgttgcatcatgtatcttgtcatcctactcctgcatctgcctgaaggtttttacgaagatgataatngctgcactgcttgtgtctacaaggacattgtgaactanaaaccctttgataacac

SEQ ID NO: 6868 - DNA, 450 bp, Zea mays
  unsure (1)..(450): unsure at all n locations
tccttccttctttgtcggaagtcattgtcagcccagatgtacttatccattttctgaagcagcttctctagagtttggggaggtttcctcgaagtattaggctgtaggtcctggccgaagacccttgatcatggcctcaatgacaatttcattgggaactatgggcgcttgtgctctaagtcgcaagaaccttcggacatatgcctgaaggtattcctcatggtcttgtgtgcactggaacaaggcctaagttgtgactggcttcgtctgaaagccttgaaaactagtaaccagcatgtccttgagattctgccatgacgtaattgtccctggcagaagagaagagtaccatgtctgggccacgtttcggactgctgtgacaaaggactntgccatgacagctgtgttgcctccatatgaggatattgttgcctcatagctcatcaagaa

SEQ ID NO: 6869 - DNA, 461 bp, Zea mays
  unsure (1)..(461): unsure at all n locations
agctntatcaaatggatgtgaagagtgcctttctattggaccaatctaggaagaggtctatgttgagcaacctctcggctttgaagatagtgagtaccctaaccatgtttataaactctctaaggcgctttatgggctcaagcaagccccaagagcatggtatgaatgcctaagagatttccttatagataatggcttcaaagttggaaaggccgatcctacactcttcactaaaactcttgaaaatgacttgtttgtatgccaaatttatgttgatgatattatatttgggtctactaacgagtctacatgtgaagaatttagtaggatcatgacacaaaagttcgagatatctatgatgggggagttgaagtacttcttaggatttcaagtgaagcaactccaagagggcaccttcattagccgaacgaagtatactcaagacattctaaacaagtttg

SEQ ID NO: 6870 - DNA, 345 bp, Zea mays
cacgcttcatgcacagcttacggaaccactcatcttatgacaggaaggctccaagagaaacctgctcttcacgatgtgagtatcgattgaagctatgatcaagagcgccgatctggattattagatgacgaactctgccgccttagattatcgtagatatcctcctacatggctaaaggaaacactatatcgagcttcaccaagacgggggaaatatgcgtattgtaccaggtgtacatacgaacgaccgctggtctatactgaggagccaactcatcaattaaccttccaatacgttgcatcactgcccaattgagactccattattcgtttcttgctacttat

SEQ ID NO: 6871 - DNA, 457 bp, Zea mays
  unsure (1)..(457): unsure at all n locations
cacctgaggcatgcagcttcacttttttattatttacttatttctattttcatttctaatttcagggntccagatattactccaaaattcaaatccctttttttaatctaagtttgtatttccacttcaatccaaacgcacaaccaaaaaaaattccagcataaaatttaagggttcactttacttcattttattttatttatttattgggtcattcatgtatataaatgcttccaattatatatatacacatacaaataatccactccaataaatgaaaatctttctgtttacataaattcaaactccagtgccaatattcaaatctaaacttgaaccatcaaaattttaatattaccatctatttatctgaaataaatgaattcacaaataggaaaatccttattatattgacattttaattctcatcttttgaagaattctctcaatcctaaaa

SEQ ID NO: 6872 - DNA, 447 bp, Zea mays
  unsure (1)..(447): unsure at all n locations
tcgggtctcttgccctgcaactcttgtcaacatgaccagaaatttcttgtgaatcggttttaaggaccgcccttcttatccccattgctaacttccgaagccccaaaagcaaaacttcgtattcagcaatattatttgtgcaactgaagtcaagctttattgcatagcatgttctgactttggaaggtgcagctaagatggcagccgcacctgccccgaaggttccccaggaaccgtcgcagaacactgtccaagctttggcatctttatttgcttcttcttcctgagcccctggcgtctaatcagtgatgaagtctgctaatgcctgngactgaattgaggatctatgcacataatcaatgctgaattcgttgagttccgcagcccactttccaattcttccagtagcttctatgttcctcatgatatccttcagagactgtgatg

SEQ ID NO: 6873 - DNA, 163 bp, Zea mays
ctggaaccttgttttcctttggccaaatgccccaccccgcccagcactcccttcgtgccccttatcctcggcacgctctcccacctactacgagcgaacacggttgccggcgggggcacgcaccagcgtgctcgaacgaccaaccttcacccccggactgaag

SEQ ID NO: 6874 - DNA, 444 bp, Zea mays
  unsure (1)..(444): unsure at all n locations
tatttaaattccttgtattgcatctaggacttttctaacctagttgagataaccgccaacaaagcgagtgaaaaagcttaactcgggtcaaacctgacaagtcttaattttaagcttttagcacttaaattcttactttttatgcaattattggttcttgaaatatgcatgaggtactgcacttagggggagtattcaaaactcaaatctctcatgacaacccctagtgcaaaccaaaatgcaaatttcaccatttgcctatgttctctaaaaattatctagcctatggcgaaatattntgaaaaatatatgagggtgccaatacctgtcccaacaagtgttattttgtgtgattataagttgggatttggtttggttgggagttagataaaaaaattcaaaattntccaaactctcctctatctgggctcaccggacagtccg

SEQ ID NO: 6875 - DNA, 353 bp, Zea mays
agcttcatgagagaacaagcttcatatctttttaataaaaagttaagaatgttaccttaaagatagcataaaataggctaccggcgatatgctgccgccggtacctgctgaggtccgcctcaaccttctggaggccaacactcttcgatagagtgccgacagccttcgccccagggtggtcccgaaggcatcctaagctttcttcgttgactcccccgaagagtaacgcacctggtctgtacccgcaagatatagcgtactctttcagttcttctttttcagcctttgacaattcttgcccaagtatatcttggaaattgaagtcctcttcttccgaagtatcctcggctttc

SEQ ID NO: 6876 - DNA, 462 bp, Zea mays
  unsure (1)..(462): unsure at all n locations
ggtgaaggttcttcatccncacatgtgctaagcggttatgtcttattcagcccatgcaagtcttagccattaagcatgcatctagaccggcctcttcttttgcaaaatcaactaagtaaagtttgccgtctagtacacccttaaaagctagtgaaccatcacttcttctaaagatagacacatctacatttgtaaataaacaattatatcccatattacataattgactaacagatagtaaattatatccaagactctcaactaaaaacacattagagatagaatgctcatttgatattgcaatcttgcctaaacctttcaccttgccttggttcccatcaccgaaaatgattgaatcttggggatccttattcttgacgtaggaggtgaacatcttcttctcccccgtcatatggtttgtgcatccgctgtcgataatctagctcgaacccccggatgcat

SEQ ID NO: 6877 - DNA, 432 bp, Zea mays
  unsure (1)..(432): unsure at all n locations
agcttcttcttcattctgatgaanaccaattcctttgatcacttcatcaaaacgaatgttccaactccgagatgcttgcttcaacccataaatggatttctgaagtttgcatatctttccagcattgatcggatcgacaaaaccctcgggctgtatcatatacacgtcctcatctaggtttccattaaggaaagctgttttgacatccatctgccaaatctcataatcgaaatatgcggcaatagctagaatgatccgaatagatttaagcatcgctactggcgagaatgtctcgtcatagtcaactccttgaacttgtcgaaaaccctttgcaacaagtcgagccttatagatgtgaacatttccatccatgtctttcttcttcttatagatccatttgcattctataggtctaacaccatcaggcgggtc

SEQ ID NO: 6878 - DNA, 473 bp, Zea mays
  unsure (1)..(473): unsure at all n locations
gacacataaaactcagcttggcaactattttggtctatggaagcaaaggcacatgtattatgtgtcctctctgntggcacttgtacttgtgcttgttattagcgccaagcaggaacgcatgatcttgcttcctctaacttgggttctaatttcatgggcaggagcctggatgatgtgaaaatgaatattgacgttctcaagaactgtgctacagtcctgttcctggtattttcacaccttctgtttccccttgaattagcccatctcactaaggctactaactcgaacagcttagaccatcttcaacagcttacctttacatatactcatattcaaactacactcaataaacagttcaatatacaatgtaaaacaatgcaaaacgaatgttttagtgatcatatatgttcagtgagcagtcgagcgtagacgttccttaaataccttagattcgaagatgctgaataataatg

SEQ ID NO: 6879 - DNA, 362 bp, Zea mays
agcttaacttagaggttcttccgttatattcttccaaaaaaagaagatgcacattgttggtatagatactctaataattatattgagccttgggccaagacatcaccatcccaggggccaggatatcacaatccaccccgttagaagttcgacgtcctcgtcggtcaaccccaatccagtaacctcccctcttagccacgtctgtgtgtttagtgttgtcatataattattgcagagcagccgaaggttctaaaactgagcaagagaggccttgagtggtaaggccgaccgagccaagggactcctacgcctccgggatacggatacctcactcgtcaccttctgcgcagggcaactcacac

SEQ ID NO: 6880 - DNA, 457 bp, Zea mays
tatgaagattcttcatcccaacatgggctagtcggcgatttcttatccaacccatgttagtcttagcaattaagcaagtgtcgagttcagctttatcaaaatctaccaagtatagctgaccttctaacactcccttaaatgctattgaatcatcacttcttctaaagacagtgacacatatatcagtaaatagacagttgtagcccatttgacataattgggaaacagaaagcaaattgtaatctaaagaatctacaagaaaaacattggaaatatagtggtcaagagatatagcaattttacccaatcctttgaccaaaccttgatttccatccccgaatgtgatagctcgttgggggtcttggtttttctcgtaggaggagaacatcttcttctcccctgtcatgtggtttgtgcacccgctatcgataatccaacttgagcccccggatgcata

SEQ ID NO: 6881 - DNA, 272 bp, Zea mays
  unsure (1)..(272): unsure at all n locations
gaccttgngcagcttgtcaagcaggcaaacaagtgggaagctctcatcacaccaaaaatgtgatgaccacatcaagacctttggagatgcttcacatggacctcttcggaccccgcgcctatctaagtataagaggaagtaagtatggtcttgttatagttgatgattcttcccgcttcactagggtattctttttgcaggataagtctgaaacccaagggaccctcaagcgctctctaaggagagctcaaaaccagtttgagctcaaagtg

SEQ ID NO: 6882 - DNA, 405 bp, Zea mays
  unsure (1)..(405): unsure at all n locations
tcctgcctctccgttattactgtactccattgacctgtttttattttttttcttattggagaacgggggagctcgggacaccaggccagggtcaagtttaccaccactcaactcaaccgcgcgcagattcctcttcctctggggcacgtcacctaatccacaccggcggcacaaggcaacggcttcacgcaagaaatccctccctcggccgcggaatgcgaagcgggggaaaaagcggagcaggcacatgcagcgcgatgacgccgcggacagggagacaagtgacgtcgcgccgatgggatgccttttgactgacagtctgaccgaaatttntgtattttagcccctaaaccgaagtaaatttacgtttagacctaaaaaaattntaaatgcagtattggaccc

SEQ ID NO: 6883 - DNA, 295 bp, Zea mays
tggtcaatttgagaaagacaggatttgtagcgcatgtaagcacggaagcaagttggtgctcatcatccacacaagaacatcatgatgaccgacaggccacttgagctactccacatggacctattcggcccaatagcttacataagcatcggcgggagtaagtattgtcttgttattgtggatgattattctcgcttcacttgggtgttctttttgcaagaaaaatcacaaacccaagagaccttaaagggattcttgagacaggctcaaaatgagttcggcttaaggatcaaaa

SEQ ID NO: 6884 - DNA, 405 bp, Zea mays
tgtcgtctcgcaagccctccgatgtgggggttgtttatatctgcggtggtagaattggagttccgtttgtaatggcaccttgagtgccggtgtctgttcattgtggctgtcagggcctgaacatctaggtatttgagtgcaataccgtgtttcttcctcatttcaagcactaggactcgcctgttggctaactggaccgcttaaccaagtgtgagttgccctgtgcggaacgtgacgagtgaggtatccgtatcccggaggcgtaggagtccctcggctcaaccggccttgccgctcgaggcttctcttgctcagttaaaggaaaacctcagctgctctgcgatgagccggagccggaggcagcggtgtgagcgtggacagaggcggagtcggctggagaagaaa

SEQ ID NO: 6885 - DNA, 227 bp, Zea mays
tgcaagcttgacattgccttcctgttggaagcctatggcatctttaatggcagggcgtctcccattatagagcatgcttctaagtaatttaaaatcttgaatctctatctcatgctcaataattttagcagctagttgagctatgtgaacattttggtctttaattaaagctaggggatcatgaatagcattcacattaatatttggtcctttagttcaaatataaa

SEQ ID NO: 6886 - DNA, 454 bp, Zea mays
tgtcaagcatgttttggtacccatctcttgatgggtccattatggttagttaacaaagatctaggaacccaaatgtcctttgcgctagcgtttggcaaattcattgcctttctagcacaagttgcaattttgggttgcctagttatatatggatcaaatgacaagctatgagagagggagttaccaatgggacaatcattgcattgatgtcccttttcccggcatgtgtagcataggcgttttccaagttttgaagatttcttctttccttgtttgttgcttgctacatggttagtaaaaactttctttgctaaccctatgcccttttgttttaaatggggacaagatttaataaagtgtcccttctttgagtatttaaaacaaagtttgtcatccttgttaataatcaagccatttttaatatagggacatgatctaatcaagtgcccctctt

SEQ ID NO: 6887 - DNA, 255 bp, Zea mays
acctttcatctaaagtgaggttttaattcgaacgactaaccttagtcaaaatctggtatagttagccaaaaaaaaccaaacaggctctacatcagccacctcagctgaggagcagtgacggaaagcacacggacgcgcaaggcatgcgaaccgcatagcagccaagcaagcgtggcaagaacaaggaaagcatgaattcgcgcggatgccggatgcggatcggcccacgtcgtgcgactcgcagtccgctatagc

SEQ ID NO: 6888 - DNA, 372 bp, Zea mays
  unsure (1)..(372): unsure at all n locations
acccacaatggtattccacatttccacgaaacttggaatgattaaatcttcaaaattcactttagactgggagaagtagctccaaaagaattacaatatctaaaggtactaatgttttaactctaaaaactggttgaattcataatgcaatagaaattacttatatcaatttctggtcaaataaaggaatgcttaactggggcctttcatgtgataaatagtagtgcttggtcatcaaggccaaataacgaaaaataaaattaaaatctatacttaatactcttaatagcacgtgtcaccatatcatttgttctagatggctttttataacgttcaccagaaccatctttgntcttgacaggactaattgga

SEQ ID NO: 6889 - DNA, 404 bp, Zea mays
gctttcactcaccatcatactgaagcatctctttatatcgaatattgtggacacgtacacggtcaaagatgttaaaatctgcataccggtagtgctttcgcaagcataaccatgcgatcagcccagaaattgatagtgacaactgcatcaccatctaatacaggtccaacagctttgccgatgtcatcaactatcacaaatgggggcaagtattgatcattagccttgggctgtgctctcaatgttttcacagcctcaagtgcacttttgaatttgtagggtgcttcttcgagcacctaagcattccagccacgtttaaccacatcccagtcattctagaaggtgttaaacacaacaaaactgtgagccaagatgcttgacaatgaacacttatgcttgaatac

SEQ ID NO: 6890 - DNA, 446 bp, Zea mays
  unsure (1)..(446): unsure at all n locations
agctnggacagtgntctgcgacggttcctgtggaactcttcgggcaggtgcagctgctattttagttgcaccttccaaagtcagaacatgctatgcagtgaaacttgatttcagctgcacaaataatattgctgaatacgaagctttgcttttggggcttcggatgttaaaggcaatgggaataagaagggcggtttctaaaaccgattcccaagttatttctggtcatattgacaagagttgtaaagcaagagacccgaagcatgagaaatacttggatacagttcgaaggcttgaagcttcattcgaagggttctctgtcaagaatattccacgaggagaaaatgagcacgctgatctgctagccaagtcagcggcacaggggctgcctttaccttcggaagtattctttgagacctcgctaccatatatcttataaatatctt

SEQ ID NO: 6891 - DNA, 458 bp, Zea mays
  unsure (1)..(458): unsure at all n locations
tgcgttacaaacatcttcaaatccacaaataggtataaattattttttattacaaactactatttacttgcgaatttaaaaatttacattcctaccgccgactgctgatgtgcactcctagtttctcacaacaaatgtttataatgtggaagtgtcacctgaaagtgtcgtggtgtttaaagtcaccgaaaggctaagccagctggtgtcctttcaatgtcaatcatatggttggaaataaaactaatggtgaagcaccagaaggccacagtaatattgagacagcatcagttatcaaagtggcatctataaacaggaaagtcccttttaagtacttgtttgaagttttgctcggtaaaactgggacaaatgagattatcttataaataatagttcanaaataagtntggatatgatgtgttagggggtcatctctcttcctcaaagattctcataaa

SEQ ID NO: 6892 - DNA, 360 bp, Zea mays
caagcagggaagcaagatggtgtgcatcatccacacaagaacattatgactaccgacaggccacttgagctactccacatggacctattcgggccgatagcttacataagcactggcgggagtaaggactgtctaattattgtggatgattattctcgctttacttgagtgttctttttgcgagaaaaatcacaaaccctatagacgtttaagggattcttgagacgagctcaaaatgagtttggcttaaggattaaaaatattagaagcgacaatgggacggagttcaagaactcacaaatagaacgctatcttgacgacgatggcatcaagcatgagttctctcttcctacgcacctc

SEQ ID NO: 6893 - DNA, 372 bp, Zea mays
actaagcatgggctggctgctgtcttgctcatggcttaatgctaaccttgtgaagtttttatctgcgcacctagagagtgctacacgccaggtggatgtccacttccaattacactcgggacattggaaaccataattccgctatcgactgctcataccaacatgaaactgaggcatgaggcatttggtctattgtactagcaacctacccatgataaatcgtctgagcggttgcccacatcgactcatttgggacgcccgcatgcggtgactttatctgaagtcatatatgggtacctgcatacgacagacgcggaccgcctaaacggctgcaaaataagttatttcgcctggtaccggtacacctaactc

SEQ ID NO: 6894 - DNA, 427 bp, Zea mays
  unsure (1)..(427): unsure at all n locations
agcttatctctaaataaaaggaaactactctcttatgaaatagaccctaaattactgatgggatgttaaagtccatgatcgccttctccttctatgtttattttataattccagaaaaaagataacctaaagtagtaattatttcaactttaatctaaattataaattgaccatagatcatattctagtagattataatgataagcagtttaaccaggctaaccaacataagttaaataaagacctaattataaaagaatgagacatggtacaataaatgttgttattgcatagtaaatattcatatggagctaacgcaactggaacgagccaatttggaattaaaacgaattagttatgattttccgaagtctgtatgtggttggtacagaaataactaagtgataaantttaatctagttgtcat

SEQ ID NO: 6895 - DNA, 438 bp, Zea mays
acatgtgctaagcggcgatgtcttatttagcccatgctagtcttagctattaagcatgcatctagaccggcctcttcttttgcaaaatcaactaaataaagtttgccgtctaatacacccttaaaagctagtgaaccatcacttcttctaaagacagacacatctacatttgtaaatagacagatatatcccatattgcataattgactaacagatagcagattatatccaagactctctactaaaaatacattagagatagaatgctctttagaaattgcaattttacctaacccttttaccttgccttgattcccatcaccgaatataattgtatcttgggaatccttattcttgacgtaggaagtgaacatcttcttctcccccgtcatatggtttgtgcatccgctgtcgataatccaacttgaacccccggat

SEQ ID NO: 6896 - DNA, 296 bp, Zea mays
agctcaatgttttatttcatgaaaccactttcttttttttctcacagggatggctggaaaaggaagctatgtacctccacaatatattcccttatacagcctagataccgaagaggatcgtgtccctgccgtggaagagaaccatgctacgcgccctaaactaaaccaggatccaacacaatggtcatctggcatctgcgcctgtatagatgacacccagagctgtatgccactttctaatctgtgatccttgatttacagaagaaaaatataaaatgtgctatttggctgcatgt

SEQ ID NO: 6897 - DNA, 448 bp, Zea mays
ttatgggaatagtcataaatgttcccaaaaataacttttatctcatttatacccctgggatacctaaagccccatttgaaccctggaaaaccctaaatccaaatcctaggggcctatgtgcaaaaattgtgcacatttggactaaagtgtcaaaagtactatgtttaagcatataaagtcacatggttcacatttgggaagatttacaagccaaaccttaagttttggatttatttgcaaaaagaaccccaattgagatttcactctaagtctgaaaaacaatgttatgggctcaacttttgagctttgtaacttctaaattctagggtctttgccctaggtcaccacatcaaagttgtagaccaatcataggagaacaactttgcttaagaatgtgagctcagttgttaagaagaaattagagataattaaatctaaagttggacta

SEQ ID NO: 6898 - DNA, 455 bp, Zea mays
  unsure (1)..(455): unsure at all n locations
ggactganatggaagacgatcatgacgaaggatgattcttatttcgaagctatgtgcagaagagctttggcatgacagcagtaaggggaaaccgacttaaagatgaaaagccaaattagacctcgaggaattattatagagttattgataaaagtaaagggcattaatgtaattttacacgggctgcgtcccgtgcctataaatagatgaacagtactcccgtattgttcacgctgacttgacattagcatcacgcttgtacccttactttccttcaagccgaaggtacatttgtaatttgttgttgtttatataagtaaaataaatagaaataaatgaataataatgttcaaagtaatcatgttattttccgtgttctatgtataaatctctattatcttttattatgattatgaaggtgtgaccttcataaccttcgtccgaaatccattata

SEQ ID NO: 6899 - DNA, 425 bp, Zea mays
  unsure (1)..(425): unsure at all n locations
ggatcttaagtcacctgcggcatcaagcttggcccacctgcggcttttattcttcctgangtgggcccgggggccactgtcggtaccctgaaactagggtaccccttactgctgtataaatgtaatacccacgcggctatttttagtcacgtggtaaaagagctgtatgagggaccaggccatgactcgccccagccttgggcgacttctctgggccagcaacagcacctgaccccaccacatgggcgggtccagtgccgccacgtgtccagagaaagtgacatactctgaggcatcatcagtgagtccggaccttcatcggaaagtaccagacccctgtatatacggtccgggcctccaaggttggtctaggacctccacgtgtgcgaaccggaccactagaatggatccgacatctcctgtat

SEQ ID NO: 6900 - DNA, 432 bp, Zea mays
cgccctcgggcgtcttgtcgcagccgaagcactatgtcttccacctgaaagcctcggggccgaacccttcgggcgtggtagcatcacagagactactgataccgcgccaaatgtagtaaggcaacgtcccaagcttcttcgagctggtccagcgagtcctctcggctgatctagttgctttggtcgtcgtacgccttcgtcctcggggaaccgtattctaagtccgtggggaggacggcctcggccccatagactagaaagaatggcgagaaacctgtggctcggctcggctcggcgtcatcctcagacttcagaccaccgagggtagctccttcatccaccgcttgccaaacttgttgagatcgttgtagatcctaagttttagtccttgcaaaatcataccattggcacgctcacctgcccattcgtcat

SEQ ID NO: 6901 - DNA, 431 bp, Zea mays
agcttcttgactcccatggacagcattggttccttgttccaaatgtatcctcatgcataaatatgctggatgaagtattgcttcgaaggcattaagtgtccctcgaccaatgattgcattataggggtactccatgtcaacaatgtcaaagacaacctgttcagtcctttgttgtggacaaagccgatggtcactggcattgtgatttttctgagtttcacaatctgccatcctccgaagccagaaagaggatgtgtagaatcatgaatcttgtcctctagttctcggatctgcttgaaggcctctgcaaatatgatgtccgctgcactgcctgtatcaaccagaacattgtggaccaaaaatccattaatgacacaagatatgaccatagcatcattgtgaaggtaatcttgagctgaaggcctcctggg

SEQ ID NO: 6902 - DNA, 452 bp, Zea mays
  unsure (1)..(452): unsure at all n locations
ctttgagaagaagaaagcagngaatccttgcattgctgtgtttatcgagtcaatggcaaaaacaaatacagagaaggttactaaagagatgctagaaggcctatctgaagatactggtgatagtgatagctatgatgcggaaagtggaggcaaagattctgaggatcagccctggagaccaagtcatgcaattttcggaaaatcgaccatcaagcaaagtcacctcgaaaacatgaggggaaggtattttcgggatatgtctattgtgagggctggcggagacaacaacgttcatgcgcccaaggaaaatgaggttgtgatttaccgaagcttcttcaaagctgggtttcggttcccactgagtaggtttgtagttgaagtgctgaaaacctatcatatcttccttcatcagatgacccccgaagccatattaaggatgggagtcttcgtct

SEQ ID NO: 6903 - DNA, 320 bp, Zea mays
cattctcactcactcacctactcatgccccccaataccactttgacccaccccatcgatcaattgatcaccaccacaacccacaccccgcacggtcgatctatcttgttatatgcgtgcatggaggggagcaacagccagctgctggagacctgcctatctgctagcctctacgcggttactccttctccatgcgcccatcctcattcccttcttgccccgctgccgaaccaacaacacatgcttctgcagatgccgattgtcaaggagcaggctgccaataatcatggcctgatgctctcttcggaccaccaccaccac

SEQ ID NO: 6904 - DNA, 455 bp, Zea mays
  unsure (1)..(455): unsure at all n locations
ggagcgcactgcttcatattcagctcaggatgtttgcttttaatatacaatcaaaacaactgtatttgcaaatacagataggaaaatatatgttggaaacacaccgctgataagcaggatctcgtctacacccttggcttggagctgttcagcctgtgtaatgaagcctggcacatgctggttgctatgaacatagaagaaatgcatagagacagcctgagtacttcagcttttcagaaaacaatagaaggatttcagagacacaagagcaacagaacttttggcttcggttagtggaattaccttcaaatgttttaaagttntaagtagtctgcagatttccattgaattggtcgtatcctaatctattctagattcattggaatttttaaaaccttagaaacaatttttgtgggtcaaaagccttgacaagtggttattantatttttaataa

SEQ ID NO: 6905 - DNA, 165 bp, Zea mays
ataaatggatttctgaagtttgcatatttttccagaattgatcggatcaacaaaaccctcgggctgtatcataaatatgtcctcatcaagtttccattaaagaaaagtgttttgacttccatttgccaaatggtaacaccccaggggttacaataactaaaaatt

SEQ ID NO: 6906 - DNA, 442 bp, Zea mays
tgccaagccctcggacccggccggacttcaccggaggctttatatctacctcaccggactttggtcttccgccgccacgcgtggaccgagctatccagtgagtctccgaccaattccttgcacccatatcttctctggtatcccatgaacctctctgacccatccaattgctctatctcgccgtgaccaggccggactcctcgccgccgacgagcatccccgcctgcgtgcgtggaccgaccgactccggccatcttcgacggtgacccgcacaccgttgtgatccccgagatctcccctacgtcctcgaccacttcaccggagcaatctcgccgccggtaagacgctccgccctttttccgccgcggttactgtttaagatagaagaaggacctcgggttatgatttgtagaacccgagggggtttctgtaacgtcagtga

SEQ ID NO: 6907 - DNA, 469 bp, Zea mays
cggacatataaaactcagctatgaaattcttatcccacatgggctaatctgttgttctctatctcacccatgtgagccttagcaattaagcatgtgtcgagctcagctctattaaaatctactaagtatagcagaccctctaacacacccttaaatgctattgaatcatcactgtttctaaagacagtgacacctacatcagtgaatagacagttgtagcccatttgacataattgagaaacagacagcatgttgtagtctaaggaatcaacatgaaaaacattggaaatacaatgggctcgagatatagcaattgtacccaatcctttgaccaaaccttgagttccatccccgaatgtgatagctcgttggggatcttggtttttctcatatgaggagaacatccttttctccccgggcatgtggcttgagcacccgctgtcgagtatccaacttgagccttcggatg

SEQ ID NO: 6908 - DNA, 377 bp, Zea mays
agcttgtgaaggttcttcattcccacatgttcttagcggcgatgccacagccagcccatgctagtcttagctattaagcatgcatctagaccggcctcttcttttgcaaaatcaactaagtaaagtttgccgtctaatacacccttaaaagctagtgaaccatcacttcttctaaagacagacacatctatatttgtaaatagacagttgtaccccatgttgcataactgactaacagatagcaaattataacctagagactctactaaaaacacattagagatagagtgctcattagaaattgcaattttacctaacccttttaccttgccttgattcccatcaccgaatatgattgaatcttgggaatccttatt

SEQ ID NO: 6909 - DNA, 293 bp, Zea mays
caggaccctttcaagtactttaattcccgggcatagtagttggcttccacaaatttctcttccgataattttttacccgaagtgtgtcgaataataaaagctagctcttcaatagacgcttccggagtcggaaattcaaccttctcgggcgcgtcttctttctccagcaccaaaccgacgtccgaaggtccctgttcaatacactgtccagttccaacaagctctgtttaatgggcactgagggcccagcttccgcttcaacacgagatgtaacagcttcggcagtctccttt

SEQ ID NO: 6910 - DNA, 361 bp, Zea mays
gttgaattgaatgaaacgcgagagtcgagttgggcaacacaaactggcaccgttagcgtccgactagcaatcttcaagaaaggtcaatttcggaaatatgccagctagctgggactctggactaactagctagtacgagtagcactagcagcattactttcgctcgcggctggctggcatggcgacctccaagaacagcagcccgtctctgtctccgctggtccgcttcctcctcggggcggcttcggccaccgtgctgctcctcttcttcctgacggcgacggcgagccccgcgtggaacgcgctggaggccggtcctcgctctggctcaggcagcgtgcgctgcagtactagtactcca

SEQ ID NO: 6911 - DNA, 459 bp, Zea mays
tctcctggacaagtgctgcacttaccgctgagtgcgaagcttttactatataataacaagggagcccctggcgtaggtggagttagtgttgttagatctatcaaatactatttcagctcttcaaaggccttctgctggattggtccccattgaaagacttcggctgacttcagcacttcgaagaatgataagtttctctctgctgatctggatgtgaatctattgagagatgccaaccttcatgtcaatctttgagcccccttttttgtagttggtgactccatctgaagtatagcttcaattttacttggattagcttcaattccctttgttgaaaccaagcatccaagaaatttccccttctttactccgaagacgccattttctggattcaactttaaaccagcttgcctgaaactggcgaaggtctcctgcaaatcagcaatatgattctcctgt

SEQ ID NO: 6912 - DNA, 456 bp, Zea mays
cttcgtcaatttgcctttgcaactcagctatgctggccaccttcttcttcttcctctgcacttgttgatgtaacatctccatctctctgatttcttggtctagctcctcttcctcaagcgtcgggctatcagcttttctcttctggcttctggcctcccgaagagagacggtctcctggttgtggtccaacggttgtagtgctgcaaccccagccgctgaagctttcttcggcgccatagcgaaggtctatagcttccgaaggtgttcacgaagactcgaagtggaagtgagttcaccggaggtgggcgccaatgttggggacttgttctcaagtgctaagagttaagaacaaggcaacataaaaagtgttaagtgttaaaatccttcgtccttcgaagcattatgttcctttgggaaataatgagtctcggacgaacgtcatgagagacatacct

SEQ ID NO: 6913 - DNA, 291 bp, Zea mays
  unsure (1)..(291): unsure at all n locations
tacccgatggagaaggtggtcatggagctaatcctccatcgtggtttatagcgtcgcgctgggggtcgtgaagacccgagaatcgagggggtcatcgcgagcggcgtctggtaggtggacgaccgcgactgtctcgcaggcgggtaggcaagggggactggtgcggcggtccctgatgggatgacgatgcacgcggnggttgagaagacatacgggcgcggcatttcggctgaggangtgatcgcgactatcactaggatcctcggctgtaggtggtaactacatacagct

SEQ ID NO: 6914 - DNA, 400 bp, Zea mays
ttttgaggagctcactgcttaatctggcaattttggcttgggcttcaaccaatgaaccctccattggttgaagaacaaaatctttcttttcaagagcagcttcatgatctttgattttgctctccaagccctcaattataacctcattgttcttatctttgaggtcctgttgcatcctcaaggctttacttagtagcatactctatgcaaaataacattcatcagcaatcaccttcatcgtaaaacaatgaaaagcagagggaaaaattttaccttgaaattagaatagaataagctgtcggcaatatgctgtcgtcggtagcgactgatgtcaacttcaaactttggaaaaccaacactcttcgacagagtgctgataatctttgctcacgtcgatctc

SEQ ID NO: 6915 - DNA, 447 bp, Zea mays
  unsure (1)..(447): unsure at all n locations
ngaagccatggtaagtagcataggctaataatatacgaattgtctcattcctatctacgggtgcatcggtttcaccgaaatccaaaccttcaacttgggagtatcccttggccacaagtcgggctttgttccttgtcaccacaccatgctcgtcttgcttgttgcggaagacccacttggttcctacaacattctgattaggacgtggaactaaatgccatacctcgttcctagtgaagttagtgagctcctcttgcatcgccaccacccaatccgaatcttgtagagcttcctctaccctgtgtggctcaatagaggaaacaaaagagtaatgctcacaaaaatgtgcaacacgagatctagtggttacccccttatggatgtcaccgaggatggtgtcgaccgggagatctcgttggattgcttggtggactcttgggtgtggcg

SEQ ID NO: 6916 - DNA, 316 bp, Zea mays
agggccggggaaaaaaatgggggtaagtaccgggtttaacacacttccccttacaaaatactgagggtatatttatttgctaaaataggtcatgggtcggatttgagccatcttcaatggattcacatcccggcagctaaactcgtttttggatgacatgaagaaataaacacctatggccttacctttctaattcgattttactgcttcgcaggattctcctgtgttcaattaaattaacaatctctctcctataccaccacctaaacgtttatactcaccacataatgtgcagctattcaagtcatcacatttg

SEQ ID NO: 6917 - DNA, 406 bp, Zea mays
  unsure (1)..(406): unsure at all n locations
ggacacagtttattttcgtcacccagcgaatgccaacgggcncgaacaaacggacacatgtagatgcataacaacactacaccatccaaagaaagatataataaaacatgcaaaagggaaaaaagggcgctacgagagtcacgccaggaaaagaaacacgatagacggagccaccgccgagaagatagcgcgactactccaagaaagtagggagaacatccgacgcgatgcgatcaaatacaaaggacacccaagatgcaggttcgccgaacctgcgacacaagcgagccgtcagtgaaccagcaattgacaaaaagccagagaacagaagcgatgcgaatntacgatacatgaaacaacaccaacaccggcagaaagacgctcggacacaccccaacccacgcga

SEQ ID NO: 6918 - DNA, 433 bp, Zea mays
gtcacctgaggcatgcaagcttgagaagggtcttcatccctacatgttctaatttgcgatgccacagccagcccatgctagtcttagcaattaagcatgcatctagaccggccttctcttttgcaaaatcaactaagtaaagtttgccgtctaatacacccttaaaagctagtgaaccatcactttttctaaagacagacacatctacatgtgtgaatagacaactatatcccatattgcataatcgactaacagagtacaaattatatccaagagactcaactaaaaacacattagatatagagagctcattcgatattgcaatgtcgcctaatgctttcaccttgccttgattcccatcaccgaatatgattgaatcctggggatccttgttcttgacgtaggaggtaaacatcttcttcgtccccgtcat

SEQ ID NO: 6919 - DNA, 461 bp, Zea mays
  unsure (1)..(461): unsure at all n locations
acctgcggcatgccagctttctgaaatcccaaggataacttaatcttgcctattatgtgtgnaaaggagttaagttctagttgagactgttttagcttcaactttctcatgctaaggcttatctcaaattccttgagctcatttgaccgagtttgttctttcaaagatctctcaaatgcattaaggatgcgctgatcagcttcaggagaagataagctatgagcgcggcgagtcatctgctgatagccgccagcataaagaacaagctgactttccactgaattcaaacgctcctgcttgatttcacgcgttagattttgtgtaccaccagtgctcaacttgcttgaacttcagagtcttcatgcttagaagaacattgaggaactggaccttgtccatagacaggcatctcattaacaagatgaagcgttgtcaatgtgctgctgaatgatttctcaaag

SEQ ID NO: 6920 - DNA, 450 bp, Zea mays
tgagaaagtgctgagggcacgggcgaggcgcggtgttattctgtcttggtcgttacatgcctaggatggtggtaagtataaaaatctctgttatccatgccaagtagtaagtgctgttcaacataaataattaaaatccattaatccatatatgtattgattagagaactttgttggcaggtgattcctccgggaatggatttcagcaatgttgtagttcatgaagacattgatggggatggtgacgtcaaagatgatatcgttggtttggagggtgcctcacccaagtcaatgcccccaatttgggccgaagttggtgcttgatcccaaattcctttgcagacctacaacaactgtcttcacaagtgtcgtaaatcttaaggtcgctgcatgacaactttgtcgcaggtgatgcggttcctgaccaaccctcacaagccgatgatcctg

SEQ ID NO: 6921 - DNA, 391 bp, Zea mays
agcttgccttcgcttcagactatctctccttttccaacggagttgtggaacgcgccaatggaaaaatcttcacagccgtcaaaaagatgctcctcgaagaaaaaagggcaagtgggccgattagttacccgaggcggtctgggcactaaacaccactgagtgcagggcgaccgggaacactcctttccgtcttctatacggatcggaggctatgaccccacaagaaataaaacatgggtccccacgaacagttccttcagccgtccctgacgtggacgaggccacttcaaaggatctcatcgatggagaccgagtctttgccctacaagcactaaacaaataccaagcccagacaaaagcatggcgcgaccatgcagtcatcccaagggaa

SEQ ID NO: 6922 - DNA, 431 bp, Zea mays
  unsure (1)..(431): unsure at all n locations
tgacaatgaggaaatggcgctcgtcatcaagagtttcctgttttatcctcaagcaaaggagagggaaagactacaaatcccgctccaagaaagtttgctacaagagtggtaagcccggtcactntattgcaaaatgtccattgtcaagtgacagtgacagggataacgacaagaagggcaagaggagggaaaagaagaggactacaaaaagaagggcggcgatgcccatgtttgtcgggaatgggattccgacgaaagctcaagcgacttctccgacgacgaggaccccgccaacatcgtcgtcaccaaaaggctcctcttcctcaacgtcgggcacaagtgcctcatggcaaaggacggcaaacggaagaagttaaatctaactcctccactaaatatgaatcttctagcgatgataatgttagtgatga

SEQ ID NO: 6923 - DNA, 302 bp, Zea mays
  unsure (1)..(302): unsure at all n locations
gcctctcatataacacgctgaaggtacaaaaattgtatatttggaagcttatgaactttgaattattcttttgctcttataataactcgttcattcttttcatataggggttaatactcatcaacgccttaaaggcgctaaagaatgctgtagacgagaagttgactattgctctcaacaacccttcaacagaggttattaagcctgaggaacgaagctttgtgaaaagactaaaattctacttacattggtcgacaanggtaagggggatgaagctaactacatgatcccatctgaaatcc

SEQ ID NO: 6924 - DNA, 467 bp, Zea mays
gacacataaaactaagcttctaagggagaacacgtgataggtctaaccaatgttaatttctaataatatagaccttgtgcagcttgtcaagcagggaaacaagtgggaggctctcatcacaccaaaaatgtgatgacaacatcaagtcccctggagctgctacatatggacctcttcggacccgtcacctatctgagcataggaggaagtaagtatggtctagttatcgttgatgactattcccgcttcacttgggtgttctttttgcaggataagtctgaaacccaagggaccctcaagcgcttcctcaggagagctcaaaatgagtttgagctcaaggtgaagaagataatgagcgataacgggtccgagttcaagaaccttcaagtggaggagttccttgaggaggaagggatcaagcacgagttcttcgcttcctacacaccacagcaaaatggtgtggtaga

SEQ ID NO: 6925 - DNA, 389 bp, Zea mays
  unsure (1)..(389): unsure at all n locations
tataaatactcagctttatgtaatatatacaaaggaagcatagntttttattttatgtgtaaaatgacagatcagccttttgggtcttcggatacatgtattttctgagcactacaatgtacgtggatgatttttcacaagctgttagcacaaagtaatatgtgatctcaaacaaggaatgcaaacttttttaagcccattgaccaatggatgttacagatatttattggaaatttttgcatgcaagcagaatcaaatttagttgaagatagggagcacatcaattcatactgaaaggagacaaattggcgattactaattacatgtttacaacatacctcggttggtgaaccactgcacaaacatttacaccttcaagtgcttcatgt

SEQ ID NO: 6926 - DNA, 351 bp, Zea mays
atgaatttgatatacaaaataatgttcaatcaaataaaaatataagttatctggatgataggtgcagagttatagcaacaaagtaatattgcaattgtctcacgaataatctttaagcttgaatctaaattaagtaggcgcattatagcaacaaagttagaactgtaattttcccgtatggatttgatatacaaactaatgttcagtcaaataaaaaaagatataaccttttgtttttcaaggaaagtagtatcactaattactccaccatggaaaccaaaaatgagtataatgcaatgatgatttatcttttgagagatgaatgttatgtggctggcatatgcaatatgg

SEQ ID NO: 6927 - DNA, 435 bp, Zea mays
  unsure (1)..(435): unsure at all n locations
taaatctatggtaagtagcataggcaaggaatatactaatagtctcaagnctagctgcaggtgcataagtttcatcaaagtccaaaccttcgacttgtgaataacctttggccacaagtcgggctttgtttcttatcaccacaccatgctcatctcgcttgttgcagaatacccacttcgtacctacaacattttgtataggacatgaaactaaatgtcatacctcattcctcgtgaagttgttgagttcctcttgcattgccagcacccaatccggatctcttagtgcatcctccaccctgtattgctcaatagaggacacaaaagagtaatgttcatagaaatgagcaactcaagatctagtggttacccncttatgaatgtcaccaaggatggagttgacggngtgatctcgttgaattgcttggcggactc

SEQ ID NO: 6928 - DNA, 155 bp, Zea mays
  unsure (1)..(155): unsure at all n locations
tgaccatcttttccttcttcctctgcacctgtagatgaagcatctccatgtctttgatttcttgggctagctcatcctctggcggngtcgggctgacaaccttcctcttctggcttcgggcttcccgaagggagaaagtctcctgattggggtct

SEQ ID NO: 6929 - DNA, 389 bp, Zea mays
  unsure (1)..(389): unsure at all n locations
agctngccacagccgagcaagggggcaaactaatacctccaaattctgttgtagcttttgagaggaatatgggcaaagaagccgaaacccctgctcccgaagcaccttccggagatcctgattatatcattcgacatgcttcgggaaaaagattatctgaagaagaaatttttgaagccaaacactatgcccaagaactaaagtatccgaaaggggccctagtgtttaatggtacaaacgaagatgaattcttgtattgcctgccagacaacaaagaattatccgtctgccgggagatggccagcagtatgggctttccgaagctcgaagttggcctctgtgccatgacgaaggacgatcttgcggatagtcttgcatacaacagtctg

SEQ ID NO: 6930 - DNA, 457 bp, Zea mays
tgcttacttggtaagatgaccaaggcgcctttcacgggtttaccggttatgacattagatttattggaactcatacatactgatgtgtgcggaccaatgagtacgacagctaggggaggattccaatacttcataaccttcactgatgattttagtagatatgggtatgtctacttaatgaaacacaagtctgaatccttagaaaagttcaaagagtttcagaatgaagtagaaaatcagcgtggcaagaaaattaaagcactgcgatcagatcgtggtggtgaatatttgagtcatgagtttagcaatcatctaaagagttgtggaattgttccacagcttacgccgcctggaacgccttataggaatggcgtgtctgagcgacgtaatcggactttattggatatggttcgatcaatgatgagccagtcggacctacctttgtcgttttggggat

SEQ ID NO: 6931 - DNA, 442 bp, Zea mays
gcttgtgcaaagtccactcgaactaatcttttgttaaacccgacctcgctgtaacatgacacccgaaggtccaacacaacaagcaatgaatgaattcagaattattgcagagcatatcagtacaagggacctggttcaggagtttttggctttcaaagtttttcccagtttgaaagaatgggaaatgccgaaggtaaagggggagaagaaagaaggtgaacttgtacgtttaccttaccatttcaagtttaagaaatactttaaagcgccttgccaagagtggctagatacaattgaagtaatgtgtaatgaaatacttggcaattattccaaaaaagaagatcaattaatgactgcggccttcggcacccgtccaaagcgaagactgaaccgagtgttggacgcctttgggtttgaataccctgactatgaaaatctgaac

SEQ ID NO: 6932 - DNA, 457 bp, Zea mays
  unsure (1)..(457): unsure at all n locations
tggcctgaccacacgcncacggccacatccataccacattcattgtatcaatgattcangcaaggttaaggtaacacacatggtacgagtacatttctccattggtatgtattctgattatgtggattgcgatgtagtacctatggaagcttgttctcttttgttgggtagaccttggtaatatgatactgatgcacgtcaccatggtaggagtaatacatacacttttacgcataaacataaaaacattactttgctacctttgactcttgctgaaattgtacaagctgataaagatagagctgcaagtacccataaggaaccaactaatgagccagaaattcagcaacaaattaaattgaaagctcctatcatgcttgctactaaatctgatcttcttgaaactcatgcttctgatgcttgatgctatgccttggcttgcaaagatgctttcttt

SEQ ID NO: 6933 - DNA, 445 bp, Zea mays
aactaacttctgatgttaatggcaccggaacattctaattgtttttgtattaggatgcttgcgcggaaagtctaccgtcggatcgatggggggagcctaaaccaatattggtggcgcagcgcatgcagatgcagtacttccatgtgcaatgcacccggcccattatcgtctgcgtcgacctccttagatatcttccgggagagatgtgtgtcggatgacccagctgtcattttttgtcatgagatgacatgcctgtaaccatgcgctcgcctacacttccacagtgacaaattaaaatctagcggttcacatgagactcggacaggcttaatttatgtcgtgcttggataactgtgtgatgacccgttgtgcaacttgcttgccaatgggattatactgtacataattacacaggagtactatatctagtatctgatacacgtgc

SEQ ID NO: 6934 - DNA, 382 bp, Zea mays
  unsure (1)..(382): unsure at all n locations
agctttaccaaacacctttagaagggngattatttttttgatatcattttctcttggctgcaggaacatcaccacgtcatcagtataaagagatattctatgtggtaagggtctggaagacaagggctgcaataatccttcattctcagctttagaaactagaaatcccaaaacatccatcaccaagataaattacataggggacagagggccaccctgtcttctaagctgtattcttgaccctggaattctattaagaaggatctgtgtggatgaagtggccancagcccactcaaaatgtcgctccaaatctgtccgaaacccaatttctgaaggacctctaatagaaaaggccaagagacagtggcaaaggcctataaa

SEQ ID NO: 6935 - DNA, 364 bp, Zea mays
ttgggcggccgcggactcgctgcgcacgggcaaacggcgacgagctaactccggtgaaatgtggaaggtgcccggaagggtgtaatccaagcctgggagggctttataagctcgggcgcgggccaccgcgcgggttttgctcgggcgcggcgcggggcaggcggtgacgcgcgcgagcgtgctctggcgcgggcagaaggcgtcgaacacgtggcggtgagtttcttccaatgttcaaacgcttccagagatcgcaaacgtgcgaatctcgccatgaattcggcgcagacctcctcctggcacctagggctatctcacatgtgtgagttccaagggatgatacgccctagatcgggagatagac

SEQ ID NO: 6936 - DNA, 455 bp, Zea mays
ttaagtcaccgcggctgcagcttggaagaaagattgatacatcatcttttttcttctggaaagacgctttctaaggaagaaaaacgagaagctcaatattatgcccaaaaacttaaatacccgaagagggcaatggtgtttaatggcagcggagaagaagattttttgtactgtttcccggataacaaagagatatccgttagctgggagataagaagaagcttctgatttccgaagctagaagacggcctctcagtattgtcaaaggatgaattggctgatagtttaacatataacaacataaaggtgtgaaaatcaatttttgtatttaaaaacgaactatttcatttgtttatacttaatactatactcctcttgcagggcttgatccttagcaatgccctcagggcaaagaaaaatatcgaagatgaagggtgcacaatggctctgaacaa

SEQ ID NO: 6937 - DNA, 445 bp, Zea mays
accttgattcctaaaggccagcatatccttgagagtcttttttctttaacgggtaagacttgcgaaagtacactccgtattcagggttttcaaacccatgttgttgtaggtgatgaaacggctgagttctgctatttctgttccaaggtggttcccaagcaggaggatgaaaactaagacttatttgggaaaggtgttttgccttcctatgatgtaataataagtttacgcactccagtacccagatatgtaataaccaactctttctatattttacttatgaatgtaaactatgttattgtaatccttttcgtttactctggtgatgagtaatgtctgtgtgatgggttaagcgctcttggcgatgtgatggagatacaaataaccgaacttgccgagtcattgtgcacacctgcatgactttttgaggccttacgacaggata

SEQ ID NO: 6938 - DNA, 291 bp, Zea mays
tcaaagaagacgcccatgttgagcaacctcccggctttgaagaaagtgagtatcctaaccaagtctatcagctctatggagcgcgttaaggacgtaatcaagccccaagagcatggtatgaatgccttacagaattccttatggtaatggcgtaaagaaagaagggcgaccctactttattcactacaactcttgacaatgatttgctttgatgccacatttatagtgatgatattatatctgggtctactaacgaatccaaacgtgaagaaattagtaggctcatgacac

SEQ ID NO: 6939 - DNA, 446 bp, Zea mays
ttaaccgctgcgagaccttccccgtctcttctatctattttaatgcaatatcgcatgtcatatgctatgcatgtgtaatctactcgttctcttgtatggagtactgttggtttcctaaattccatggatggatgtatgtatgtttgtactcgtatagagaacgatccggttgaagagcccgatgaactcacaggagaagcccctgagcatcaatcggttggtggaggcaagtgtcccttgacctatctctatcctattcattctttaattcacctcccgcattacacaggtatacctaaggattgactagcttgtgctatccatgtccttgtatacctatctgggtaggattattatagcttagtcttatgctatcgctcaactctaatctatgaacatgatgagattatccatgagacgctgtctctccctcttcttatgatgat

SEQ ID NO: 6940 - DNA, 300 bp, Zea mays
tgctatattgagaaaaatatttaaaagcattatgggaaacaagtgaaagaatgggggtattattaagtatgccggggccgacatacttattttgaataagtattcccattttcagcccctggcgtacctcattttaagaacatcttgtaagcttatacccacatacttctcatattgagctgtatgtcagattagtcaaaattatggaattgtaatcctctgctcttaatcttctagtactatttgggatcaatttggtgcaagctagcaaacacttacttgctactatgatatagtaat

SEQ ID NO: 6941 - DNA, 453 bp, Zea mays
taactaaagtcatctaagagtcggctagctagaacaacgacatcgcccgctagacagcatacacgtcggcttgcctattattatcacaattcgagacaccacatacactacaacatttttataaacattcatattcacaagtattttcgcacaccgaccaaatcatacgaatcgtagactactagtctccaactcacaatcaccatgcatttacttcccaatcatgaacacatacatgtttatcatacgaacagagcatttcaataattatcctaaaacaattaactccattacacaactcataccacaaacctacttgacttgattgaagggtctactcgaatccgtgagcacaatcacacattatatgcgaagcataatttaacgaacacaaaatacgcatcgactcgattcgacttataaatattgagaaagcgatgactacttcggcat

SEQ ID NO: 6942 - DNA, 367 bp, Zea mays
  unsure (1)..(367): unsure at all n locations
agcttggacccctgngtggaagcctttttgtgtcgagttctctggtgacgttcttgttgttgagctcgaagagcttggaattttctcttgaggtgccctttntcttcctcttttgctctttccacttggatagctttgttggagaggtgagagaagctgtggaagtcttggctggcgaggatggtcttcagctcgggtcttaaccctctcagaaaacgggccatctttctggactcagtgctgacatcctcaggcgcgtagcgggccagctcggtgaacttgtgcacatactcactgactgaccttccgccttgagttaactcccggaattcatcctccttgagttgaactatcccctanggtacgt

SEQ ID NO: 6943 - DNA, 454 bp, Zea mays
  unsure (1)..(454): unsure at all n locations
ntctcaccatatatagcatgcttaatgaaacttcgtttaatgatgcagtttaatacgaaaacttggtcatcaagctgactgttgaccttctgaccagtcggcactaaagtaggtcggctgcctttctgatagatgtggttaagtcggctttagaagcattggaaactagacttcaagagctttccaaaaagtacttatgggccttcatagcttttgggaatcaaaagatatgactgtttcttttggacggttctgttgcgctggactgactcggatatagctcttcttgctgattcgcccttgatatgttttgtccttcctctttggtgaacctaagtaatatcaacatacacgacttaggtagcataaaattctcattagtgtttaaatgaaattcataaagtagcgcgtgcacctcttgctgtagcttcttagctcggctacgtgtaattgg

SEQ ID NO: 6944 - DNA, 382 bp, Zea mays
  unsure (1)..(382): unsure at all n locations
attgaatgcacttttgtgagttctagacttatgagttacatgattcatgacggtgaaactggcatgctcaacacatgtttgctaattaatggtactaacctggtacacaaaaattcacaggtcaaactggaccatataatactatcagctaattaaaacctatttgtcatgcatgaggggaaatgttgttgctggtcttctctataaatattcctcgtcacagaaaagagtacttgtttgaacaaacatgggccccaaaacaattttgctcattatatatgtggaaaaccaaattaattgtgatattaggtgcatctcaagacanattatgcatactatttcatataacaaatctaaatatattacgcataacatgtgacaa

SEQ ID NO: 6945 - DNA, 227 bp, Zea mays
gggaaagtgaaactaggtgttcactacaagcattaatgtttgagtctttacacctagtacaaatgtcaacatgtcctacacaagaattggatttgttagccacttctaatgtagcatctaaatcatggctgacacctttcatagtagaaatgggtgcatgaccaggcgatagttcaaaagaaagcatttcgtttctcggaacttctaaagcatatgatttttgggcc

SEQ ID NO: 6946 - DNA, 458 bp, Zea mays
  unsure (1)..(458): unsure at all n locations
actcagcttctaagggagagcacattttatgattaacaaatgttcatttttataaagacaggatttgtagcgcatgccacgcggggaagcaagttggagtccatcatccacacaagaacatcatgacgaccgacaggccgcttgagctactccacatggatctattcggcccgattgcttacataagcatcggcgggagtaagtattgtcttgtaatagtggatgattattctcgcttcacttgggtattctttttacaggaaaaatctcaaacccaagagaccttaaagggattcttgagacgggctcaaaatgagttcgccttaaggatcaagaaaataagaagcgacaacgggacggagttcaagaactctcaaattgaaggcttncttgaggaggagggcatcaagcatgagttctcctcttcctacacgccacaacaaaatggtgtagtggag

SEQ ID NO: 6947 - DNA, 450 bp, Zea mays
  unsure (1)..(450): unsure at all n locations
ttacaggcaaatatatgtgaagtagtaatagtgatcagtatatcagtaaaggagctgagtttggacgcaagcaataaacatcttcaataggtgcttatataactttttttctttttgcaaatgtgaaagaaggtacgtacaggactgcaagctgagaggcgcaagtagcgcagaggaatgatctcactggccgcggcattttcgcaaacaccttgggctcgctgcccagtacacgccagttacacggcacaccggcacctgctacgtggctctgacaggcacggccaaagcaccctatgaaaatcacggcgtctccgtgaccactgttcgcgctctccccttccagcgatgtgttatgtaccttgcangctcgcaatcgtggggtcgtctgttccgcctctcgagagagcgtacataggtgtagcgcgcgcgagttgtgacatggcgcgt

SEQ ID NO: 6948 - DNA, 251 bp, Zea mays
ttccgaagagacaacacttcatctcgatttgccttgtgccttatcacgatattctctctcccaaaatatattccgaaggtgaatactgtgtccccttcttgttccacaagcattatgctgtatgaagcttatgctatgcaaaaatgatgtgatgatgttatgttatgcacaaagatatttgtgccgcagatacatatacctgtgataaagcacacacactttctatatcagacttttcgctgtgagcctcc

SEQ ID NO: 6949 - DNA, 180 bp, Zea mays
tagcttatgcctcaaggcagttgcgccggcatgaggaacattatccaactcatgacctggagttagctgcggtggttcatgccctaaaaatatggcgtcattatctgctggggaatgtctgtcacatttatacataccacaaaaagttgaagtacatctttacccagtcagagcttaata

SEQ ID NO: 6950 - DNA, 378 bp, Zea mays
atttaattctggtattttagcttcagcttccgccagtaagccttctgttgtctggagctcgaagtctttcttttcaataacagttgattgctcttttattttgctctctaaattttcaattataacctcgggtttcttatcttccaagacttgctgcatttttaaagctttgctcagcagcatactctgcgcacaaacaaccttcgttagaaaacatcttcgttataaaaacaataaaagctaaagaaaagttgttaccttgaaatggaataaataaactaccgataatgtgtgtcgtcggtagcggtgaatctgttcaagctttggaactgaactctttgataggtaccataaccttcgaccagtctgatccggacg

SEQ ID NO: 6951 - DNA, 457 bp, Zea mays
  unsure (1)..(457): unsure at all n locations
ttgttgagatcagtagaatcaatgcacattctccatttactcttggccttcttcaccataacagtgttggctagccattctaggtattttactcttctgatgactccagcactgagaagtcttttcacttcattccgagcacctttggctttgtcatcagacattttccgaagcctttgctttctgggtatgaaggatggatcgacattgaacgaatgttcaatgacatccctgttgacaccacatagattgttggctgaccatgcaaaaacatatttgttgttgaacagaaaccttgttagagttttttcctgttcctcagacaattgagatccaagcaataccttntgctctactatatcttcacataaaagcatgggcttcggctgatcggccgaaacaaccttctcccttctgtacttgtactgctcacaagcttctgctccatctatattat

SEQ ID NO: 6952 - DNA, 447 bp, Zea mays
  unsure (1)..(447): unsure at all n locations
agctntaccctaaatagggattaaaggggtaaatctctttccaaattgagaaaacctaaatactttagggtaatagttataaaatatccccaaaaataaagttaaaccacatttatacccctgggataccagaaaccctaattggaaccctggaaaaccctaaatccaaaccctaggggcttatgtgcaaaattagtccacttttggactaaagtgcaaaaaccaagttaaataagtatcttaagtcatttgggtcacaagtatgtgagttttcaagttaaaccctgagatttggacttatgtgcaaaagagccacactctttctcaaatgcctaagtctgatttcagtgatactggctcaactttggagccttgtaactttcaaactatagagtttttgccctatgtcaccacatcaaaattatagcccaattataggagaacaag

SEQ ID NO: 6953 - DNA, 452 bp, Zea mays
ataaatactcaagcttctcgtgattcaccaagcatcataacagctagttggccattattaattggcgctaaaagaactatgtaaagaataagcaagagaggtggaagcagtgaatgtagtactcggacccggcgattgtaaaaaaatatacgtgaacggcggttggctttctaagtatttgtaccttgtcctaaagcacatgaattttctgtcatagccacttccaagaaaatgttcggggtgggatgcaagtgtgtacatttttcattcatataagacagtgataattctatgtctctagagttgtattctgtttggaaactatgacaacattgaattggatctacttagttgctttctgataaaagtacaatagttcaagctcgatcaaagtattctgtagactaaataactaatagctagcacacgttaagttattcacatgacgtcaa

SEQ ID NO: 6954 - DNA, 435 bp, Zea mays
cgcagctgcaacttggagggggaaaactcccgaagtgttattcactgttttaccaaccttccaagcgagcgaactcccatccttatagcaaagcctaaacccagtccgccagttccctcttgaactgactgaccatcatgcctaactggggctcactgcacgacacccaactcaagatagatagaaggtatgtgttttctctctcgattcttgtcttgtcgtgtctggaagactcaagggcaaattgcaaaccctcacaaagtgcataccgcacaggtgcatgggcattcactgagctagccttctcaaccaaagctatcctagcgtttctctctgctagctcagactgcaagccaggacaaacggtacacacacccaacaggatagacttagatctcaactccgcgcactcatctaacaaggtggagtacttgg

SEQ ID NO: 6955 - DNA, 460 bp, Zea mays
tgttcgataatctagtgcatatgctgatctttggatcacatctattatttgtttgatcattgaataacctcaatcttctaatcacatatctctcttgaaatgcactaagtttaaaaggagaattcacgggacattgctacaacctgtgatctacttgatatgtgataactgtgtcttatcaaaagatcactagttgtagaactctctcttgtgcaaaatatttccatatattgtcttaaatataggtcttaagtaaccaagactaaggacaaaacacattggagagagcgtctctatgagaatgggcataatggtaaaactgctacctctcatttacacatgtacctcattattcctatacattctttgcataacttgtataaaatgaagagaaagcataggtatgcgttatcccctgttcatacccagtagtacctattaaaaattcttgcattaatgc

SEQ ID NO: 6956 - DNA, 439 bp, Zea mays
  unsure (1)..(439): unsure at all n locations
ctaagtcacctgcggctgcaagctntcaaaaagacctagattgatatttttggatanttcattgaagagttatgattaaaacaagcaactgctgtattgctgtccaaaaatctgcaactgcgcatttgattgttttgttcacctgttggctaaaaatgcttagttagcacttagcagacatagacttgtaatgtctaaacttaggataacatgtgttccatgattgctgtgtttgcttgagtagataattgtggataggaattcctcctctattgaactggagcttgggatgcttttgtgtgataaacaaaagaataatgaaaagccgcagcaggttaaatagatgctcgtacttatgggggcggatttgcgttgcgtaaatatacaaaatgttcgtcttctttgagaggtgttactgttatgcgctcgatgatgcgta

SEQ ID NO: 6957 - DNA, 446 bp, Zea mays
  unsure (1)..(446): unsure at all n locations
taacaatgtcccaaatacttgcgtggagtgaggttaggttatgctcttattntatcactccacatgcaataatcctcaccatcaaaatatggtggtttgcctaatggaacggaaagtaaaggagcgcgcttggaaatacggggataatgaagtggcatcttactatacttcttgcgctcatgacacttanaagtgacggacgtggcgtcggtgccggatgtggagggcgacgaagagtcggtctcgtggtagaccacttttttcatcttcttcttcttgtcgccactctaatgtgacttgacgcggggaggggattcctccttgcctttagcgccggactcccttgatggagccttctcgtggcttgtggccttctcgccggattccatctccctcttggcagatgctcttgacatcacttcgagttgttagactctaataaagta

SEQ ID NO: 6958 - DNA, 324 bp, Zea mays
ctttcgagctcttgcgccttggatgcttttttctttcttgattctttattgcgatcaaactcacttgtaattgaggcaagagacaccaatcttgtggtggtccttgtaagaactttgtgttccaagtgattgagaagagaaagctcactcggtcccacggacccgtttgagagagggaaagggttgaaagagaccccgtctttgtaccacctcaacgggagtatgttgcgagaaccgaacctcgtaaacaaatcacgtgtctactcctatcacttgctattgtttgacccctctcgggactcattattttctacgctacccggc

SEQ ID NO: 6959 - DNA, 402 bp, Zea mays
cagcggcccaaagatcttttttctgtcctcagacccgcgcggacaaccctctctaagaaggccctggttctcccttttatagtccgcaggagaggatccaggtgtaccatggggggtgtagcagagtgctacatgtctagcggagggagagctagcaccctaggtacatgccaatgtcgcatccggagagatctgcgcaccctgctggcgtgatgtcctggctgtcggaggtgcggcggagcctagcggagggacagctgttggagcggtcgagtccctgctgacgtcgttctgcttgcgtaagagagctgggggccgccgttgtcatagagcttgtggagcgccatcatagcccctccggaggaactggccagatgggacgccggttttggtcttcgagac

SEQ ID NO: 6960 - DNA, 411 bp, Zea mays
agcttgtgaagattcttcatcccaacatgtgtctagtcggtgatgccaaaggcaactcatatcagtcttagcaattaagcaagtatcgagttcaactctattaaaatcaactaagtatagctgaccctctaatactcccttaaatgctactgaatcatcacttcttctaaagacagtaacacctatatccgtaaaaagacagttgtaacccattttgcataattgagataaagaaagcaaattgtaatctaatgaatctacaagaaaaacattggaaatggaatggtcaggtgatatagcaattttaccaagtcctttgaccaaaccttgatttccatcgccgaatgtgatagctcgttggggatcttcgtttttctcataggaggagaatattcttttctcccctatcat

SEQ ID NO: 6961 - DNA, 453 bp, Zea mays
  unsure (1)..(453): unsure at all n locations
ntaccttgattcccaaaagccagcatatccttgagagtctttctccttagacgggtaagacttgcgaaagtacactccgtactgagggtttccaaacccatgttgttgtaagtgatgaaactgctgagttttgctgcttctactcgaaggttgtcccacagcaggaagaagaaaactaagaactacctatggaaggtgtttgccttcccgctatgtaataaggttaagcactcgaacccagttatgtaataatgactctttctatattgtacttatgaatgtaaattaagttattgtaaccctttatgctttactccggtgatgtgtaatgtttgcgttatgggatgaacgctcttgggcgatgtgaaggagatacagaaaactggacctatcgagccattggacgcacctgcacgactatctgaggtcttcaggacaangacatgtgtgggt

SEQ ID NO: 6962 - DNA, 409 bp, Zea mays
gcttgtgaagattcttcattccaacatgttgctttcggcgatgccagagccagcccatgttagtcttagcaattaagcaagtgtcgagttcagctctatcaaaatctaccaagtatagctgaccctctaacactcccttaaatgctattgaaccatcacttcttctaaagacagtgacacctatatcagtgaaaagacagttgtagcccattttgcataattgagatacagaaagcaaattgtaatctaatgaatctacaagaaaaacattggaaatagaatggtcaggagatatagctattttaccaagacctttgaccaaaccttgatttccatccccgaatgtgatagctcgttggggatcttggtttttctcgtaagaagagaacatccttttctccctgtcata

SEQ ID NO: 6963 - DNA, 445 bp, Zea mays
  unsure (1)..(445): unsure at all n locations
ctgtgaaggttcttcatcacaacatgggcaagtcggctattctatatccaacccatattagtcttagaaatcaggcaagcgtctagtttatcattgtcatcagtgaaatcaactaaatatagctatccatttaacactcccctaaatgctcgtgaatcatcacttcttcaaaagacggtaacatcaatatcagtaaataaacagttgtagcccatttttcataattgagatatagaaagaagctgtaacctagagattctacaagaaaaacattagaaatggaatggtcaggtgatataacagttttacccaatcctttgacctaacattgattcccattcccgaatgtgattgctccttagggatcatcatcntntctcatatgaggagaacatccttttcttcctgtcatgtggtttgtgcacccgctgtcattatccaactt

SEQ ID NO: 6964 - DNA, 410 bp, Zea mays
  unsure (1)..(410): unsure at all n locations
tacttatcatcctcacttaatgtaagccatcattggacatggatgctatccttacatttctttnctactgatgcaggaaatgaaagaccaatgtgatcaaaaaaggtacacatttcatgaatgctatcttatccattttataatttgcgcttcccctcccttgaaatatttcttccctttcagagtggaatatgaagccatgcgaacagcctatggggagaaaggagggcgatcgaggcacctaaataatgaatcattctcattgggacaactgcaaacttcatttcttgagtaccaagaagaggcggcattgtttatttttccctcgaaaacactaaagcaaaggcccattttaaggatnttgacacaggctgctcctcatcatgcttctcacgtagcttaacatgtct

SEQ ID NO: 6965 - DNA, 402 bp, Zea mays
  unsure (1)..(402): unsure at all n locations
tccactncactccatcgaaatgactcatccttcgccgtctgtccttatcactctccgtctgtggtataatcttcactcatattattgattgccacagagggagaaagtagttataagggctcatatttcactcaagtatccgcttttggtgattcatgccaaagggggagaaagtattacccccaagcaaaaggaccgcaccaccaccaatttttaaaatctgagataagaaaaggttttgaaataatgaatttttcaattggcatcttagttgtaatagaacctcaaattgggttcccctcttcagaaactagcatctaaaaccctcttgaacactaagaggaggattctattgacgtggagttttgtttactcacagaaaacacaagtgaaacaggggga

SEQ ID NO: 6966 - DNA, 311 bp, Zea mays
agctctgtgaacatacttgggggagaagtatcttgtcatgcataacctcacctcttggggggggagaagactgtcatttgttcagcttctgaagataccttccagctctcattcgtgtaaagcagaagggatacttgtaattgtttatcatattgcccagaataaaattttagatgaataccccgattagttatacgactgttagtaatgtgcctaaatcccattaaagacacgatggcgaagcgaactacacattatgttactctaattaattagctagggtgtcacataccacccttatggttgcacta

SEQ ID NO: 6967 - DNA, 386 bp, Zea mays
cctttcaatattagttttagcatataaatactcttggaagcacattagtcttagctttggcacaagaagaataagaaatatgcatttgtaccaaatgaaagagatataatattatcaagatataaaaatgagcaatatgtgcaagatttcaatcaaagttccgagaatctaagatgtttagtttattcctaagcttgctaatagtcttttcatctaggggcttgatgaagatattgactaattggttgtgggtgctaacataagcaattttgatatcccccttttggtggtgatctctcaaaaagtgataccagatgtctttgtgcttaatgcggctgtggtcaacaggattatccgccatgcggattgcactctcattgtcacat

SEQ ID NO: 6968 - DNA, 337 bp, Zea mays
ccattattctcaagggaataatggttcatggaccaaggacgttaacatttaacactttattttgccttggtcttaattcatagcacttgagaacaaatctccaacattggcgcccaccttcggtgaactcacttccactttttaagctgatggcttttttcaatgaccaagctgaagctgcttcagacccgaagctggtactcccgatcacaggtggtttcgcctcagaaccagctaacaagaaacaaaagaaggaagcacagagaagggtacagcatgttggggtgcaaggacccttcatcaagtcaagatggtctcacattcctattaccttctc

SEQ ID NO: 6969 - DNA, 475 bp, Zea mays
  unsure (1)..(475): unsure at all n locations
catcacggacacataaaactaagctaggagtatagccaatatctaagattcgtttacggtcgtaatgtgagcttccttanggtcggcttggaatcttgcacacatgcatacggaaagcataatatccggtcgagatgcacataaatagagtaaggaacctatcatcgaccggtataccttttgatccacggacttacctcccgtgtcgaggtcgagatgtccattagttcccatgggtgtcttgatgggcttggcatccttcatcccaaacttgtttagaatgtcctgagtatacttcgtttggctaatgaaggtgccctcttggagttgcttcacttgaaatcccaagaagtacttcaactcccccatcatagacatctcgaatttttgtgtcatgatcctactaaactctttacatgtagattcgttagtagacccaaatataatatcatcaacatatatttggcatacaaac

SEQ ID NO: 6970 - DNA, 368 bp, Zea mays
gcttcggcttcgctgctgatccactcaattgggtctctaagatcgcctcttatgaagttgtcttcactcgagtacgcgcccacgttggcgaaactagtttttatctttttgacgcattctacagatttttcaaaacatctttcttttgatgagcgaagctctgcaactgttttttcaaaataaattttccagtaatcactggcatctcagtcagcttcggcaatagcacatttcaatttggcttcggccagttgtttttgaagattttcaatctcattcctttggatttcagattgagccttgaagttagcttcatccccctttactttgtccaccaatgtaagtagaattttgtctttttccaaagc

SEQ ID NO: 6971 - DNA, 466 bp, Zea mays
  unsure (1)..(466): unsure at all n locations
tactaagctgacccgggaccctcgtcaccggaatagcccaatcgcgctcatctgagttcaagaacccgccggcgcacgtggaccgggtgagcccctgcaccgttttccaattctttgcgcgcatggcctctgtgtcaccccgtgaagctcctcgtgcaccctaattgaactataccgccgtggtttggccggagcaggagccgccgacgacccccgccgcctgtgctcgtggccagggtagctccgaccacctccgacaccgacccgcacaccgacatgaccgtcgcaacctcccggacgtcactgaccaccccgccggagctctactgccgccggtaagccccaccgccgtaaactatgccgcgggtactgtttcagccggtcagggagcgcgggttagattttagttaagtccagggggctntgcgcaatgtcagtgacccaagccaatagtggaccaatggct

SEQ ID NO: 6972 - DNA, 441 bp, Zea mays
gcttcaacacaaaccaataaaaagatctatatttttggttcaaataaaaggagcaaaagaaaccgaagataaccttggtctggtgcaccggactgtccggtgcaccaccggacagtgtccgatgcaccagggaccgtacaagctgaactcttcaccttcgggtttctaaagagccgctccgctataattcaccgaactgtccggtgggtcaccggactgttcggtgtgccagcggagcaatggctaggaagcgcaacgatcgactccaacggtcgcctgcaacgtgaacagtgcatggacagtttgcgtagagttagagcagcgccagaaggcgcaccggacagtgaacagtgcttgtccggtgtggcaccggactgtccggtgccccaagatgtcagagcttcaacggtcaaaaccatcataactctaacgggttggtga

SEQ ID NO: 6973 - DNA, 455 bp, Zea mays
tattgtctttctccggagactccattttcctttaatgagactattattataatagactcgaaaacagatattagtctaaaaaacttaaattatagagtaacccccctataagtgtgcatacaagttttgaatacttgtaggagacatgcactttgatttgatatcaagaggggcaaattgtctataatctgagctttggcacatataagttaaatgataccaattgaatatcaattgaagcacaattgaagtattataccacttgaagagtatatatggaaataccaattgatgtatcattttcttaggagtgttaaatgagctatgcgtggcgcttaactaaacattgtaagccatgtaggctcgctcaagagtatgagttgaaagtgagcaattctaccatatgattgacctagtgtaatatcccaaacaaatgtttacccaaatagtgatct

SEQ ID NO: 6974 - DNA, 433 bp, Zea mays
  unsure (1)..(433): unsure at all n locations
agcttctaaaaaatagaaacgattgtccttttatgagattntacaccaacacccacataattaaacttataattatgtggaggcccttggtttttgcacataggtccctgggagcccgtttttaatttaaaatagtcctaaattttatttttgttatattttctttgttctagctccgattttagtggttattgagtctacagattcgtatcaacgtatagatttattttatgtatatgttttcatttcttagcgcattgttattctcttgcttgcttgtatgcatgtgggatttanaagaacatttatttgagggattagaagatcaaacccgcgaagactccagtcagcatgatcttgcaatagaaggcaagttgtgtcttgatcacgtttatttggtcctatgcaaccttttattttatgttatcaccga

SEQ ID NO: 6975 - DNA, 443 bp, Zea mays
ttgggaggaggtatgttccaagccgagtatgccactggttcatcaacatttgaaactttacccctgaggatcatttcaagtcggcttaccaagtctacagaaggaattctcctattggtaacccgagttgagtcagccagccctcgatacagatatgccggataggccctatctttcagtggctgaatgttcttaaaaacaaagtcagtgaccaccgcttcagcagttagacctctctctttcagcagtccaacttcagccagcaacacacctgcctcagccacttcctgatccgtgggagactcagtccaactcggagtgcgaacatatggctgtcttcccgaccgggaagggagagaatttccataattatcaactataaaccactctagacgccaccccttaatactatccttgaggggaatctcaagatactcagtttt

SEQ ID NO: 6976 - DNA, 377 bp, Zea mays
  unsure (1)..(377): unsure at all n locations
agtcacatctcatatactcggttttagtcctgcttattctaaatccttttgactctagggtctgatgtcataactttctatttacttcttcccggctttcatctactagaactacatcgtcagcgaaaagcatagaccaagagatatctccttgtatatccctcgtgacctcatctatcactaaggcaaatagatagggactcaaagttgaaccttgatgtagtcctatgttaatcggaaaaacatttatataccatcagttgttcggacgctagtcacaaccttgtcatacatgtccttgatgagcttaacatactntgttgggactntatacttatctaatgcccaccacatgagattcctaagntatttatcat

SEQ ID NO: 6977 - DNA, 454 bp, Zea mays
  unsure (1)..(454): unsure at all n locations
taaagccatggtaagtagcataagcaagtaatatgcatattgactcaagcctagctacgggtgcataggtttcaccgaaatctaaaccttcgacttgtgaatatcccttggccacaagtcgggctttgttccttgtcaccacaccatgctcatcttgcttgttgcggaatacccacttggttcctacaacattttggttaggacgtggaactaaatgtcatacctcattcctcgtgaagttgttgagctcctcttgcattggcaacacccaatccgagtctcttagtgcatcctccaccctatatggctcaatagaggacacaaaagagtaaagttcacaaaaatgagcgactcgagatcgagtggttacccccttatgaatatcgccgaggatgtagttcacggggtgatctctttgaatcgcttggtggactctngggtgtagcggtctttg

SEQ ID NO: 6978 - DNA, 378 bp, Zea mays
  unsure (1)..(378): unsure at all n locations
agcttgtgcttgccttgtcctcctctttttgttaatctggnggtacccagagaagcaatcgaggagggacatgacctcgcagcctgctacactatcgactattttgtggatccgcggcaaggggaagttatccttgggacaagccttgttgaggctcgtgaagtctatgcacatgcgccacttgccactcttcttttgcaccatgaccacgttggcgagccatgtgggataagcgattggttcgatgaatctggcttccaatagatggtgcacctcgaccttggcggctttctcatctgacattttccgcagacgttgcttttttggtcgcaccgaaaagtcgatgcccacgctgtgctcgatgaaagagcgactagc

SEQ ID NO: 6979 - DNA, 442 bp, Zea mays
  unsure (1)..(442): unsure at all n locations
ntatcaaatggacgtgaaaagtgccttcctaatggacctatcatgaagaggtctatgttgagcaacctcccggccttgaagatagtgagtaccctaaccatgtttataaactctctaaggcgctttatgggctcaagcaagccccaagagcatggtatgaatgtgaaagggaattaggcttacacctatttcctaaatgattttggtggttgaattgcccaacacaaataattgaactaactagtttactctagtgtacaagttatacaggtgccaaaggttcacacttagccaataaaaagaccaagtattgggttcaacaaaagagcaaagcgatatccgaagtgtgccctattctggcgcaccggactgttcggtgtgccaccggacagtgtccggtgcaccagaggactccaagccaaactcatcaccttcgggaaaa

SEQ ID NO: 6980 - DNA, 273 bp, Zea mays
  unsure (1)..(273): unsure at all n locations
ccctcagccgaaaggagacgaccaaaataaaaagatggccgaagccattatggacgaagtcgtcaatcggctcctgaatgaggctgcagaagttgttctgagagaaaaataaatactattgtaaattaaacttctgaaatgtaatatatcgtaacattttgtaatcctgaatgtaatatacccgtttctattgctcaactctttacgatgcatgaaactttacaccgaccgctgttgagtcttnacnaanaaacaccttctccttcttttatg

SEQ ID NO: 6981 - DNA, 386 bp, Zea mays
  unsure (1)..(386): unsure at all n locations
aactggattgctggccggttggagaaaaaaaccacgcgcgtagattaagatcaaggtggccccaaaaaaatatcccatcggcggctgataagcatccgaggaagaaagcggaaaaatcagaagggagaagatgagctcgacgctaagaacgacggtgggtttggggaagaagcctatgcgtgaaaagataaggccgatggccagtgacgtggaaaaaatatcanggcagcggctgcagtagatctttttccattctttttttaaaccgagaatcctagatatttccgatcacggtttttagccattattatagggtcgattatacttgcgacacagttcgggtcgattcaaaatcctgataatttacctgccgtctaaacatctgg

SEQ ID NO: 6982 - DNA, 351 bp, Zea mays
agcttctaaagggatatcatgttatatgtttaactaaggggaccttcgaaaaagatagaccttgtgcagcttgtcaagcacgtaaacaagtgggaggagcgcatcacagcaagaatgtgatgaccacatcaacacccctggagctgctgtatatggacttcttcggacctgtcgcctatctaaacataggaggaagtaagtatgggttagttattgttgatgacttttcccgcttcacttgggtgttctttttgcaggataagtctgaaacccaagggacccttcagcactcctaaggagagctcaaaacgagtttgagctcaaggaaaaaagataatgagcgacaatggg

SEQ ID NO: 6983 - DNA, 437 bp, Zea mays
tgtgaagattcttcatcccaacatgagcaagtctgttatattagagccaacccatatttgtcttagcaattaagaaagtgtctagttcagcattgttatcattgaaatcaactaaatatagctgaccatctaacactcccttaaaagctattgaatcatcacttcttctaaagacagtaacaccaacatcagtaaatagacagttgtagcccattttacataattgagaaacagaaagcaagttgtaatctaaagaatctacaagaaaaacattaaatatggaatggtcaggagatatagcaattttacccaaacatttgaccaaaccttgatttccatccctggatgtgattgctctctggggatcatcatttttctcatatgaggagaacatccttttctcccctgtcatgtggtttgtgcaccctctatcgatt

SEQ ID NO: 6984 - DNA, 215 bp, Zea mays
tgaaatgggccacctttgttaagcggcccacaaccacccagaggaaacgcagcccgcccgggtaccaggtaggccaactatgaaatccatcccgatctcatcccacttccactgaggaatccgcaatggctgcaacagtcccgcgggcctctgatgctctgctttggttctctgacagctatcacagatggcgacatattctgcgatctcccttt

SEQ ID NO: 6985 - DNA, 388 bp, Zea mays
gagctccgcacggtggcaataccaccgtccgcgacaagctatttggtgaggacaaccaagctatataagagggcgaggaatggcgattgagtgctaagcagatgagagacacgagtgtgcttgatagaatggagcgagcgcggctggagctcgccgacacgatggggacaaggtgcggcgcacgccacgacgtgagctccacgcatccatgcgagcgacacctggatcccaatctgcccgagttgcagacgcgatataggcagaaggatagctcctaagcatcgtccacatcagcccgaattgcttcccctctctaccggctacaactttgctatatggtctatggtgatgagactactggagtttgattaaagactccaacttgggt

SEQ ID NO: 6986 - DNA, 360 bp, Zea mays
tagaggtcctcatgctaattacccctttatctttaatctctataattatcttgactaaagagacttccttagacaagacatctagcatttcactcttattgggaatcaactcttgaagctctaggtttctctccctttcaaggataagcaagtcttcttgattagggatggcaattttacccgcgggttcggatattcgccagatatccgacccgtctggtacggtttcaggcactaaatttgacccgtgggtcttacccgtacccgacccgattttattacgggtcgggtacggagttgattcttacccgcgggaccccatggatatccgacaatagaattttatatttttcacctacc

SEQ ID NO: 6987 - DNA, 459 bp, Zea mays
tataagattcttcatcccaacatgggctagtcggcggtgttctagccaacccatgttagtcttagcaattaagcaagtgtcgagttcagctctataaaaatctaccaagtatagctgacactctaacactcccttaaatgctattgaatcataacttcttctaaagacagtgacacctacatcagtaaatagacagttgtagcccattttgcataattgagagacggaaagcaaattgtaatctaatgaatctacaagaaaaacattggaaatagaatggtcaagtgatatagcacatttacccaatcctttgaccaaaccttgatttccatcctcgaatgtgatcgttctttggagatctcggatttctcgtacgaagagaacattttcttttcccaatcatgtgggttgtgacccgctatcgatatccaacttgtacccctggatgctaaacctaca

SEQ ID NO: 6988 - DNA, 309 bp, Zea mays
  unsure (1)..(309): unsure at all n locations
agcttcaaggacgtgaaaggccttctaacggaccatttttgttatgcagngagcacctcccgcttgaaaaaggagtatccaccatgttatagctcttaagccttatgggctcagcagccccaaacatggtatgaagcctaagattcttgtgtatggctcaagcggcaggcgacctacactttataaactttgacatgattgttgagccaattatgtgagaatatattgggctctacaattacttggagaatatagcatgacacaaattcaatgctatatggggatgagattttagatcagtaacactca

SEQ ID NO: 6989 - DNA, 312 bp, Zea mays
ccacacaagaacatcatgacgaccgataagccgcttgagccactcacacggatctatacaacccagatgctgacataagcatcagggggagaaaatattgttttgaaaatgcggacgagtattcccgcttcactggggagtgctttgggcaggagaaatctcaaacccaatagaccttagagggattcttgagacgggcccacaatgagcttggattaacgaacaaaaacataagaagcgacaacgggacggagaacacaaacacttaaattgattgctgttcttgacgaagagggcatcaagcatgaggtc

SEQ ID NO: 6990 - DNA, 358 bp, Zea mays
  unsure (1)..(358): unsure at all n locations
gcgtgtggaatggaaagacaacgaagctagggtgattatgtgcttgagtgaaggccccgtggaacggatggaaaacgggaggaggcgcgcggcgactggcggcaaggctgttcagccttgcgtctgggctgaaaacgaggtgttcgccatggcgcacgggccgaaaacggaggctcgggcacgaactcgaaaataagctaagttcaagcatgtggaaagacaccgaacatacagtgtatgtctttggtgaagggcacagtggaacggagggaaaacgacacggaggcacgcggcgacgggcggcatggctgttcngccttgcgtttgggctgataacgaggcgttcgccatgtcgcgc

SEQ ID NO: 6991 - DNA, 442 bp, Zea mays
agctctgctttggttcgcgtggccggctatctcccgtacgtcgattcgtccaaggaaaaaacaaattggcatgagaataagatgcctatatgtcaagtttatctgcgttgtttttttataatcaaataaagttttatgacctaggaggcttctatctacaaacgtgttctctgtgtgtactacatatagagatatataggcataataaaagtgcttttttgtctacataaacattatatataactaggtttatgtagtatacctagatatataatagtacaacttattggtgcttaactatataaattggagggaaatgatatatgtttgacaatctacgctttgtttggatcataaccgagttattatattctagattatgcatataataatgggaaacgatgtgtttacaatctatgctgatgtagattataataatggg

SEQ ID NO: 6992 - DNA, 353 bp, Zea mays
tcggatcgacaaaccctcgggctgtatcatatacacgtcctcatctaggtttacattaagaaaagctgttttgacatccatctgccgtatctcataatcgaaatatgcgtcaatagctagaatgatccgaatagatttaagcatcgctactagcgagaatgtctcgtcatattcaactccttgaacttgtcgaaaaccctttgcaacaagtcgagccttatagatgtgaacatttccatccatgtgtttcttcttcttatagatccatttgcattctataggtctaacaccatccagcgcggcaaccaagttccaaacttgaatttctctcatgtgatctatctcggatctca

SEQ ID NO: 6993 - DNA, 388 bp, Zea mays
ttgggtgaaatattctaggctgtcatatttagtccacttatatcacttgaagtgcttacatgggtggtcacaagaatcatttacaggactaatggatctgctatctggtattcctggagctaatctacccaagacatactatgaagcaaagaaaatcatctgtgacttaggtcttgattatgagagaatccattcttgccccaaagattgcattctttttcgaggtgattttgctaaacaagatttttgtcacgtgtgtgagagctctcgctggaaagttgataagaaggattcaaatgcctctgtagtgaaatctaaggggaaaaggaaaccagccaaagcgttgcgttacttttcattgattcctaggatccaaaggttattttca

SEQ ID NO: 6994 - DNA, 391 bp, Zea mays
ggacaaagtttgatgcctaaaccccaaaaccctaatcttctagtgatgcctgcccaaggaactacaattgtgactccaaaaaccctaatttcctggagtgccgagaaggaaaattgtattctaaacctaagataatataccttcattatctttgcattttcataagcattacatgagcattcatgtgtgtatatatgatatatatatagaaaacgaagaagaagtagaagttgaagaagctagagctacaccaccaccacctgaagatccacctgccgggagctgcgtttattttgatatttgtggagcaaagcccgactctcctataacacaaggcaaagccccggtgcatttgccatcgtcttgctatattaaaatctttctcacttac

SEQ ID NO: 6995 - DNA, 410 bp, Zea mays
acatgtgctaagcggcgatgccacagccagcccatgctattcttatctattaagcatgcatctagaccagcctcttcttttgcaaaatcaactaaataaagttggccggctaatacacccttaaaagctagtgaaccatcacttcttctaaagacagacacatctacatttgtaaatagacaggtgtaccccatgttgcataattgactaactgatagcaaattgtatcccaaagactcaactaaaaacacattagaaattgagtgctcattagaaattgcaattttacctaacccttttaccttgccttgattcccatcaccgaatataatagaatcttgggaatccttattcttgacgtaggaggtgaacatcttcttctcccccgtcatatggttggtgcatccgct

SEQ ID NO: 6996 - DNA, 163 bp, Zea mays
  unsure (1)..(163): unsure at all n locations
taaggagaggcgcaagacgcttctgatcgggcggtctgttgcgctatgaggcgcggcatatgcggattgtggacaatggcagccatcgtgctcacacccanagaggagggagggtcgtgcggatctgggcgcctagcaatgggaggcgtgaccatggggcgac

SEQ ID NO: 6997 - DNA, 245 bp, Zea mays
cccttggccgaaggatcttattcaaagataagctggatgaagaattgcttcaaaggcattgagagtaccacgaccaatgattgcattgtaagggtattccatgtcaacaatatcaaatacaacttgttcagtccttgtgttgttaatgaatccgaaagttattggcattgtgatttttccaagtgctacgaatcgtgccttcctttccgtagcccacaaaggggaaatgtgtgtgcatccatgga

SEQ ID NO: 6998 - DNA, 211 bp, Zea mays
atacatattacctttgggggttttcccacccgtggacataacttagttccggggccatgccccaaactttggttttcggcccttgcgcattggcgacaaccttttttcggcccaactccaagccgaacagcatagccgccgtcatctactgcctttaaccaggaaacgtacaaatttgtggccttgccacccttgacttgcttttttttgg

SEQ ID NO: 6999 - DNA, 432 bp, Zea mays
cggaggcatcaattgggagcctataggttggtgtatgctcttccttcttttcttcaattgccttgaatgcaacgggttgtacctctggtgtggagatggcaccttgctccaagatgacaatatgttcggagtctttgaccataagttcaaagctcacaaacttgtcaatcacctcctcgggagacatttgcttatacctatgattctcacaaattaattgcacttgagtgggattaccaaaaacaagatatcttagaataacctcgaccatttcatggtcatcccacttggtgcgccccaggttgcgaacctagatcatcatggtcttgataccggtgtacatggcttgatgatgaacctaccgagatcttcatccaatggttctcgcttggtgaacttggtacttaaccccctcatgcgccggcttgaaga

SEQ ID NO: 7000 - DNA, 429 bp, Zea mays
agcttgaggctatgcatagattaccgccctcttattgcggtgactatcaagaacaagtatcctttgcctcgtattgatgttcttttcgatcaattggtcggagacaaagtattttccaagatagaccttcgctccggctatcatcagatcaagatacaggcaagtgatattccgaagatcgccttttcaactagatatgggctatatgaatttttggtgatgtcatttgggctgactaatgcactagcatacttcatgtatctgatgaattctgatttcatgcctgaactggacaagttcgtagtgggtttcatcgatgatatcttggtgtactcgaagaacgaagaagaacatgccggtcatttgcatgtagtgcttcaacgtctgcgagagcatcgtctttatgccaaattgtcaaaatgtgctttt

SEQ ID NO: 7001 - DNA, 424 bp, Zea mays
gtgaaaaaccctactaataacatgttaaggaactgttgcacacttgctcctcaatctatcaccctcgttgcccggaagaagccaagccgcgatgagatgtacagatcttgtttcccttacgggacaacacaatagaaaagagtatacaggagataaacacgtagctgattatataatccttttttatttgagatggcactcttcttattatggaaaagtataaatctatatatagcctcactaaagagatattggatagagtttacaacttgatagttccattcaattcatttgttggttctagttgctcagtggttttggcttgcttcacactgccctacaattagggtattctcaatgggtagttcatacacatttaacagtgtgccacatcagaaggtttgatgatatgccataacattta

SEQ ID NO: 7002 - DNA, 373 bp, Zea mays
agcttatataaaacattaacatttataaaatcagctaaagtagatatcaaaaattatttttaaatttaatttttaatgctataaatgttaatattcttttatacaaattttattaaatttagaacgagttggttcacaaccattaaaaatctcttatatcgcattatatacttttcttttcacatataaattgaaagggtgtgtttgagactgttctaagttccagttttagcgtgaagttgtagattatatataaatataaattatctttaaaatattttaatataaatgatacataaataacttgtaatgtttctaaattataatcacttatattttaattctgattttaactgatatacaggctggagcg

SEQ ID NO: 7003 - DNA, 428 bp, Zea mays
  unsure (1)..(428): unsure at all n locations
tgtgagcaatacaagtttagaagagaacaatctgcttctgctgatcagccgaagcccatgctcttatgtgaagacatagcagagcagaaggtgctactgggatctcaactgtccgaagagcaggagaaaaccttgataaggtttttgttcaacaacaaatatgtttttgcttggtcagctaatgatctttgcggagtaaacagggatgttattgaacactcgctcaatgttgatccatccttcagaccaagaaagcaaaggcttcagaagatgtctgatgacaaagccgaaggtgctcgcaacgaagtgaaaagactcctcagtgctggagttatcagggaggtaaaatatccagaatggntggctaacacttgtatggtaaagaacgccgatgtgtaatggagaatgtgatcgatttactgatctca

SEQ ID NO: 7004 - DNA, 344 bp, Zea mays
gagcttgcaacccgacgacagtactcctactctctcctcacgggagaagacggctccggtacttatatgcacgggaaaaagacgccgagattgcgaggacccggactcttcccgtgagccgcggtataagccttccccgcgcggaacctgcggcgtccggtgcgttttgcccgcatacaggcggcgtgcgtggagttcggtagggagagagatctggccactgggccatcggtgggatgatgtggacgacacggggaaaaaaagggtgggactgccagcctggacccagacgtcggccacaacatcacgggcactcccggatgcgatgatatgaccatgcgggc

SEQ ID NO: 7005 - DNA, 243 bp, Zea mays
  unsure (1)..(243): unsure at all n locations
tgggcaattttggcagaaaacagtgcaatagcaatgaatgctgtggtaacttcacacctacctgtctgtttatatagtgccgcaggtgggaaagtaaatcatcaactcttttgcaccggacaaacagccgcccacacccactataacggtgggccacaaagcccgagaaggtgaatcgccaggacacgtgtaactgctgcatggcggggccacctcgcgctcggattattttaatcgnttctc

SEQ ID NO: 7006 - DNA, 471 bp, Zea mays
  unsure (1)..(471): unsure at all n locations
ggatcttaagtcactgggctgcagctntttaacatggaagagataagtagtacccgttgttggtgacttgttctcaaatgctatgaattaagaacaaggcaacacaaaaagaggttaatggttaatgcccttcgtccttcaaagcattatttcccttaggatataacgatcttcggatgaaggccatgatagacgttccttcatcatcacagtatacatgaaagaagaagcatatgaaacatgagagataacatgaataatcatatgacatcatttatatatccttattatataatcatggaagaataagaataatattgaattacatttgtaccttcgtcttgacagaaggcaaaagtacaagcgtgacgtacgagcgagtacaagccagcgtgaacagtaaaggggtactgttcacctatttataggcacgggacgcaacccggtcaaaattacatttatgtccttgac

SEQ ID NO: 7007 - DNA, 384 bp, Zea mays
gcttggtatcagtcttcatcaacatcaccctaaaaaacatattattattgagaaacataataagagaaaacctgaaataaaaacatgaaagtaaagaaaattgtcatactttgccaatcaaagctcgagcttcgtctccagcaatctctcggccgcccttagtctagatctgggtaataaatatattacccacacttctagcttcggctaggatattaactaagttgacagcaagaggctgaaggttggtttattaatagtccttacgtgattgcacccagccttggagaaagcagcagctgtcccacgagaagccactagcacgcaaaaatcaccatgaccaattataacttcgtcaaggacatcaatttccttctcaataca

SEQ ID NO: 7008 - DNA, 377 bp, Zea mays
ataggggcctccatcaacacgatattttttgtcttaagaaccacgtgtaagtatataaagaaaccaagacttcgctaatggacttaagacaaattatcaaagttaattacctttttgtaagtgaagtaaaattacattgcatacctctgtagcaacacaacacaatgtgacaataacactaataatgcaatcaggatgttactatgtgaattaatatgacttatgaaggatactgcttccaagacagctgcttcattgagaagatagacaaggcacagaaagacaatgaactcgttgaacttcatgcccatatcttcatttatatcgcaagcttcaaagagatcacatatcttctcctctgtgatgagatatccagc

SEQ ID NO: 7009 - DNA, 368 bp, Zea mays
  unsure (1)..(368): unsure at all n locations
cactatananactccagctgtgacgactagatcatccaagcctataagtgtccggattattattggtcacccaagccttgtcgatgaagcactacaagagcactcaggaacggaccatggataagttcgcaagacaaacgcttgtgtgttggcatccatgcttcttcaataagctagctgccaagcaaaagctaaaagcctgaagatgatccttgagtatccagaatcatgcgttgcaatcggcaaccatatgctcctgacaggccagattttgntgaagttccatctcctcgaagagtctgcacagcgaagatatgtagctgaagtaaagctatacccataacccttctaagccgaatctcgaggac

SEQ ID NO: 7010 - DNA, 440 bp, Zea mays
agcttatctaaataattccacaggtgatgtttatgcactcatcatatcaaatcatcggagtgatattgattggctcattggatggatattggcccacgttgttatctccctcttctggatagttgatagaaatttactttgctcacagttcacactgtttagaattatttggattaactaataaatcgcacgaggctccttgtttctggtcatgttcagcgttcagggtgccttggaagtacacttgctgtcatgaagaagtcatccaagttccttccagcgagttagttcatatgtatatttctgtaacatgtagctgtacaatttatatgcacatcaaagttctgttgattttaatgtaggttttaataaaaactatattgtggcataactaaacaatgtaaacaaatgtattttggagtagagacttgcttaactag

SEQ ID NO: 7011 - DNA, 450 bp, Zea mays
  unsure (1)..(450): unsure at all n locations
cttgtacacggactaaacatcgccatatcactgggcgttttatactgatggtgtatggagattctctggtagtcatcagccagataaacaaggaatgggattgttcaagtgattcaatgggaaaatactgcgccgtcgtccgaaagctagaagataaattccagggtctggagtttcatcatatagaaagagatcggaacacggcggccgatgtactgtccaagctcggatccggtcggactcaggtcccgcccggggtcttcgtgcaagaaattcttcagccgagcatctcgacggatcanatagaagagtgcaacatcatagatcaacccgagtcagactctgatgactggagacaaccgattattaagtatataaagaatgaagaagaaccagatgacaagaactcggcagagcgcattgcggacaatcagctcactatcactcatt

SEQ ID NO: 7012 - DNA, 460 bp, Zea mays
  unsure (1)..(460): unsure at all n locations
acctgcngcatgcaagcttctgccatgacgtgagtgtccctatcttgagagaatagtaccatgtctgggccacactttggactgccatgacgaaggactttgccatgacagcagcgttgcctccatatgaggatattgttgcctcatagctcatcaagaattgctttgggtccgagggcccatcgtacatgggcaactaaggtggcttgtaggattgtggccatgggatagcctgcaattctactgccaagggagaagcatcatcaaaagttaagttaccatgatgaaagtcatcgtaccattcatttttgttgaatgagctctcttgacaaagcttcctgtgctgaggccttcggtcctggtcatcttgagagagatgacgcatttcttcaacgggctcatcaatcttcttctgaagagtggcgagacgaaacatactttcctttttcctcttaacctg

SEQ ID NO: 7013 - DNA, 375 bp, Zea mays
  unsure (1)..(375): unsure at all n locations
atgtacaccacccaccacggcacccgncatgtgtaagatgcgtctcaaacacattatgccgccactagtacgctaagtgagcctatgtcctaatgctatgaattcattcacgagcatcaagatatacatcatgcgacaataatgcagctcaagacaccgaaaaaactagaaagaatgagaggggcttgcataatgcgcccacctctgtggatcaaggaagctgccattagcacctttcgacgaactagatcacgtgattggatgaccaaaaccagtgtcactatcttctgagagcattctacatacgccacacccacatgaaaagcacacaatgataagcctacgacctagcctctcacaagctttatttaaaca

SEQ ID NO: 7014 - DNA, 431 bp, Zea mays
gcaactcttcaccaacctccacgacgactcctactttctttttgcctcatggcaaaaggagatatggtaactttatttagtgatgatttctcaaatgatgatgatgaacaaattgccatgaaaaataatatgattaaagaatttggtcttactggatataatgttatcactaaattaatggagaagctattataaatataagcaactcttgacgctcaagaagatttgctcatccttgagaaggagagaaacctacagcttcaagaattgctactccatagagatgaaatgctagaagccttgactaaggaagtctcttttatcaagataactatacaggataacgagaaagaaatgaccaatatgacaacctctatagttaatcttgcaatgaaaatgatgcacttgaatcaagcatgttaagcttgaca

SEQ ID NO: 7015 - DNA, 476 bp, Zea mays
  unsure (1)..(476): unsure at all n locations
cattacggacctataatactcagctgcaatgaggagatggcgctcgtcatcaagagcttccgttttatcctcaaacaaaggagggggaaagactacaaatcccgctccaagaaggtttgctacaaatgtggtaagcccggtcattttattgctaaatgtcctatgtctagtgacagtgaccgaggcgacgacaagaaggggagaagaaaggagaagaagaggtactacaggaagaagggcggcgatgcccatgtttgtcgggagtgggactccgacgagagctcaagcgactcctccgacgacgaggacgccgccaacatcgccgtcaccaagggaacttctcttcccaacgtcggccacaagtgcctcatggcaaaggacggcaaaaagaagaagttaaatccatctcctccactanatatgaatcgtctagtgatgataatgctagtgatgaagaggataatttgcgtattctc

SEQ ID NO: 7016 - DNA, 341 bp, Zea mays
tggatcagtttatttcttttcttgggtcacataataaaccgagagggattggctgttgatcccaagaaggttacaactattttgtactgtaaagcaccaaaagatgttcgaggaatcaagagtttcatcggaatggccaattattatcagtgtttcattgaaggtgtctccaaaattgcaaggccaatgacagccttgttggcaaagaaggttgaattcaagaggagccccgcatgctataagtcctgtgagacattgaaggagaagttgacaacggcaccagaactgattctgctagatgttcacaaaccattctcagtatattgtgatgctatgtatac

SEQ ID NO: 7017 - DNA, 293 bp, Zea mays
tggagaagacttttggcaacattactaccttaagtgtctgagtgagctggtaaaattatggctgactggtgactcctaatactgaaaagtctcttagtaagacgaagagtgctgacggagctccaaccaccatttttgccaggtgaccctgacagctgactgccttagctggcgaagaccatatcgttgaaccttggctctgctcagagaacaaggcaagtttttgatttaattgacgatgccattccaagactgcgaaaaccactagaccgacaagtcacgcatgagaagtc

SEQ ID NO: 7018 - DNA, 463 bp, Zea mays
  unsure (1)..(463): unsure at all n locations
tctcagtcacctgcggcatcaagctttagcgttggttccaaccttggcttctctcagcccatacaaaaatccccattcttataatagcttcgggagtgagttgatgaaggtagatctggaatgttttctgtacctcaacaacaaaattgttcagggggaatcgaagcccatctttgaggaggcttctgaaaattacaacttcatcctcttcaggggtgggagaagtcttttccccggcatcagctctcacaatagatatgtctcggaagtatcgccccctcatattgtcaatgtgactctgcttgatggttggtttcccaaaaactgagtgacttggtcgccatggtcgatcttcggcctcttccccatcactttccacatcatagctgtcgctgtcatcagtatcttcggacaaaccttcgagaatctncttcgaaattttctctgtattactctctgccat

SEQ ID NO: 7019 - DNA, 412 bp, Zea mays
  unsure (1)..(412): unsure at all n locations
gtggaggttcttcatccncacatgtgctgagcggctatgtcacagccagcccatgcaagtcttagccattaagcatgcatctagaccgacctcttcttttgcaaaatcaactaggtaaagcttgccgtctagtacacccttaaacgctagtgaaccatcacatcttctaaagacagacacatctatatttgtaaacaaacagttatatcccatattgcataattgactaacagatagcaaattatatccaagagactctactaaaaacacattatagatagagtgctcatttgagatagcaatattacctaacccttttaccttgccttgattcccatcaccgaatattattgaatcttgggaatctctgtttttgacgtaagaggtgaacatcttcttcttccccgcatat

SEQ ID NO: 7020 - DNA, 427 bp, Zea mays
  unsure (1)..(427): unsure at all n locations
aacccactatggaggatgctttgtgtcgaccaacnccttcggcccttctggcgacttcccgactaccatgataagcgatgggtccttgatccgaaggtatcttcatgcaaagataatcacgatgaatatatgactcgaaagcatttgggggccacgaccaataattgcatctgaaggggcattccatgtcaacaatgtcaaacacaacttgctcagttctagtgctattgatgaacccgaaggtcactaacatggtgatctcgcccaaggctacaatctgtctttctccgaagccaaaaagaggatgtgtagcatcatgaatcttaccttccggctcctgcatatgtccgaaggccttagcaaatatgaaatcagctgcactggctgtggcaaccaagacattgggaccatcaatcctctgaaacac

SEQ ID NO: 7021 - DNA, 384 bp, Zea mays
gagcgggaactggcttcgtctgaaacccttgatatctgttgaccagcatgtccttcaacttttgccatgatgtgattgttcctggccgaagagaggagtaccacgtttgtgcaacatttttgactgccatgacgaaagatttcgccatgaccactgtgttgccgccataagaagatattgttgcttcgtaactcatcagaaactgcttctgatctgagtgtccgtcatacatggggagctagggtggcttgtaagacagaggctaatgtgtagcctacagttctgctgacagaggagaagcatcatcaaaagcgaaatttccatgatggaaatcctcataccagccatcctcggtgaagaagccctcttgatgaagctctctgt

SEQ ID NO: 7022 - DNA, 117 bp, Zea mays
cggctggcagtgctattatatattgttggaaactggctggcctttatggtaatgctcatttcgactactgaaaatagccaggcaccatattttcttaaaaaaactttgtgctcgctg

SEQ ID NO: 7023 - DNA, 415 bp, Zea mays
  unsure (1)..(415): unsure at all n locations
gcgagggaagactcccaccatgactgagctggtcctctcaacagatggggaccatacaggactttctccctatcatcgcactgagcgcgttgtaactcccgctccacagtgtgcatccagacttcagcatccatggggtcagacaagtgagccaaccgttggtgaatgacctctcatgaactcagcacgctngtctctgggcatctgaggcatctgaagctgaggtggaacctactgctgctgctgctgctgctgctgaatggcggccacagtctgaccgatggcttgatactgcccgagtctgcatcacaaacatttgctcgatggacactcggggcggtggcagcatgtgctgttgctaaggcaccttactctggtgagccggtcgctcctgctgagcacgccttccttctct

SEQ ID NO: 7024 - DNA, 405 bp, Zea mays
cttcatccccacatgcgctaagcggcgatgccacagccagcccatgcaagtcttagccattaagcatgcatctagaccggcctcttcttttgcaaaatcaactaagtaaagcttgccgtctagaatacccttaaaagctagtgaaccatcacatcttctaaagacagacacatctatatttgtaaacaaacagttatatcccatattgcataattgactaacagatagcaaattatatccaagagactctactaaaaacacattagagatagagtgctcatttgagattgcaattttacctaacccttttaccttgccttgattcccatcaccgaatattattgagtcttgggaatccttattcttgacgtaggaggtgaacatcttcttctcccccgtcatatg

SEQ ID NO: 7025 - DNA, 320 bp, Zea mays
  unsure (1)..(320): unsure at all n locations
actaacctatgtctgttttgagaaagacagaccttgngcagcatgtcaggcacgaaaacaggtgggaagcactcatcacagcaagaatgtgatgacaacatcaagaccactggagcttcttcacatggatctttntggacccgttgcctaccttatcatcgggggaagtaagtatggtcttgttattgttgatgattattcctgcttcacttgggtgttctttttgcaggataaatcagaaacccaagggatcctaaagcgctttctaaggagggctcaaaacgaatttgagctcaaggtgaaaagatagaagcgacaac

SEQ ID NO: 7026 - DNA, 415 bp, Zea mays
gaaactatcctaaaggggaaaagactgcttagtcctcgacagcttaccttttggctaagactaaatgtcatggacatgaatgtaattttgcccaagctgtgtcctgtgcctataaatagatgaacagtaacaccgtacggttcacgctgatttgtaatctctcgcgcgtcactcttgctttttcaccttctatcaagccgaaggtacaaatgtaattcgaatatcattgatgtttgttctcgttcatataatgaaggaaatatgaatagtctaatgatctgaaatgatgattcatatttcctttgcatttcatatgtcttagtttacatccttgcttattgaaatgaagaaggtacatccttcatgaccttcgttcgaagatcattatatcctaaaggagataatgtttcgaagg

SEQ ID NO: 7027 - DNA, 468 bp, Zea mays
  unsure (1)..(468): unsure at all n locations
tgattatgctgcacattgttgaagttatgaagtgtntgatttgtttcagttntagtcttaatgcacatctgaacatttgaaaaggggtctgtagtaatgtacttttcacattgaactgagttgttttgatggtcgtgtgcctaggactgttgtcctttgttcctgaactttgagctacatttgtctattcagaccactcacatgattatgaaaaatgacaaattaatggaatcaatttggttatcgatttttgtgtcatcaatattaatcatcatttgatatattacatttaatatttatatatatatctactaactactaaggcaatagtgtagaccatctcctgtgttcccgcctcccccctctacgcgcacgcccccatctttcccccgcgaaagctgcaaccaccacgccgagaaacctgccacgcccccaacagttgtcatccagtcccatcccccattcacg

SEQ ID NO: 7028 - DNA, 199 bp, Zea mays
  unsure (1)..(199): unsure at all n locations
catctcgatcctttttgtcttntctcaatgctcctcaggctcttgctcatttgggaatatataagaatatcatcaatgaacactacttctaactggtcgaggtagtccatgaacacactgttcatcacgtacataaagtaagctggcgcatacttcaaccgaatgacatgaccgggaactcataccggccatactttgg

SEQ ID NO: 7029 - DNA, 478 bp, Zea mays
  unsure (1)..(478): unsure at all n locations
tcagcgatgacaacaaaggttcttcattctcagataggcagaaatgtgctaacttatgttgatgatatcattgtaaaaagcacgaagcaagaaaatcacattactgatttgcaggagactttcgctaattntagacaggctggtctaaaactgaattcagaaaagtgtgttttcgaagtgaaggggaaattccttggctgcctagtttcaacaaaagggattgaggctaatccaaataaaatcgaagctatccttcgaatggaaccaccaagcacaaagaagggggctcaacgattgacaggaagactggcatctctcaacatattcatatctagatcagcagagagaaatttaccatttttcgaagtactgaagtcagtcgaagtttttcaatggtgaccagttcagcagagagccttcgaagagctgaagcaatatttgatagacttaacgacgctaactccaccaacgccagagg

SEQ ID NO: 7030 - DNA, 408 bp, Zea mays
caggacatcagccgccgcgtgccgatctctgtctatattatgaatctccagaccttcgaatgtatgttatacctttcggacggcggcgcagtattataccattgaatcacttgaacaataccattccttgtatatctgactgatgactaccaaagaatctccgtacaccatgagtctcttgactaccagcgatatggcgatgtttaattcatgtttcatagcttcatactccgctgcattgttataggccgggaatagcaactgtagagcatacttgagatgttcgtctccacgtgcggtgaagagaattcctgcttctgcttcctgcaacttcagcgagccatgcatatacatgtcgcatacttgtgtggtttctggattattacgcacttgctgttctgtgcactc

SEQ ID NO: 7031 - DNA, 442 bp, Zea mays
caacttccatcgccaacctttggaacatgtctttgtttataagtcttacactcgaacggaccggagttacaaattttagcaagtccctttgtgatccgcatggaaacgctgtgagctgcatatcatacagtcagcaccctgcaatcagtgcaacagcagatcaggttttgaattgcctcacgccacattcaaatctggaggagcttaacatcaagggttataacggatccttatctcggtcatggttaggatggctgcccttggacaggttagcttctattgaactgaaagactgtctgaattgcaaagaagtaccgccccttggctgcctaccatcactgaaacacattttgatacaatcactgccaagtgtgaagctgattggtccagagttctttggaaatgctggagataccacttctaacattaggaacagaatctg

SEQ ID NO: 7032 - DNA, 277 bp, Zea mays
ttaactagtaagcaagtgccggtcgagccctatcaagatctactaatcatagctgaccctctaacactctctgaaaagctaatgaatcatcactgtttctaaagacagagacacctacatacgtgaaaagacagaaggagcccattgtacacaattatgacactgaaagcaaggtatagatctaaagaatctacaagactaacattggaaatggaatgcgcaggtgatatagctattttacgcaatcccttgaccaaaccttgacttccatgcccga

SEQ ID NO: 7033 - DNA, 444 bp, Zea mays
  unsure (1)..(444): unsure at all n locations
agcttcagctccatctatgttatggattgtttntgagtcattccaattaccttcggcctttctggcagctttctgacttccatgtatagcgatgggtccttgatccgaaggtatcttcatgcaaagataggcgaggatgaaaaaattgcttctaaagcattgagggtgccacgaccaataattgcattgtaagggtattccatgtcaacaatgtcaaacacaacttgctcagttctaatgttgttgatgaacccgaaggttactgacatggtgatcttgcccaatgctacaatctgtctccctccgaagccacagagaggatgtgtagcatcatgaatcttatcttttggctctcgcatttgtctgaaggccttagcaataatatatcagttgccctgcctgtgtcgaccaagacattatataccagaaatctttgataacaca

SEQ ID NO: 7034 - DNA, 373 bp, Zea mays
taagcctctgcgtcgatccgtcctccgtccgagcaggcgctgcgcccttccactggatcatccctgggaagcgcgtgcagcccctcgggcgactcgacctcccagtctgcttctggacaccctccaacttccgaagggagaccctgacgttcgaagtggtcgggttccgaggaacctaccacgccgtgctatggaggccatgctacgcgaagttcatggccgtccccaactacacctacctgaagctcaagatgccgggccccaacggggtcatcaccgtcggccccacgtacaaacacgcgttcgaatgcgacgtggagtgcgtggagtacgccgaggccctcgccgagtacgaggccctcatcgccgacct

SEQ ID NO: 7035 - DNA, 415 bp, Zea mays
acctgaggcatcaagcttgccatacctgtcatagcaacatcttatgctaccacatcagctacagaccataccagttacttggcctttcgcatgctggggattggatatgattggacctttcaagaaagctcaaggaggatacacccatgtattggtggcaattgacaaattcactaaatggatagagttccagcccattgcctctttaacctctgctaaagccgtggaattcatacaaagcataatattcagattcgggataccaaacagtatcatcactgacttgggatccaacttcaccagttcagaattctttgacttctgcgagcaaaagagcattcagattaagtacgcatctgtagcccatccgagagccaacgggcaggttgagcgagccaaccgaatgatattggag

SEQ ID NO: 7036 - DNA, 353 bp, Zea mays
  unsure (1)..(353): unsure at all n locations
ggcatgaagcccatcactggtgtcagacgtgtcacttgttattataagcacaaatgtaattcaccacgccaactggcctatctttattgatgtctggctaacatgcgatatattatctttattgttgactggctaacatgataaatgcacatatttttcccagatactgnttgtcatctctaagccagatgtgttcatgagcccgaactcaaacacatacgtcatattctgcgatgccaaaatcgaggaccttagcttccagctgcagacccatgccgcagaacagttcaaggcccctgacttgagccagatcacgagtccagagacttctggcccgggccacgaagacaatg

SEQ ID NO: 7037 - DNA, 439 bp, Zea mays
  unsure (1)..(439): unsure at all n locations
agcttcngctctatgttcttcggcttcgtcatcctgtacatatcaaagcgttataaggaaaattcaagtttcaaggaaaaggtaagcacaaggtatgatttcattaccggcttgaggtgacttcgagcttcgtcaccatctaggcttcgcccacccttcgtccatatttactttataaatctgtttcctatgcttcgagctaggctggggatatcaatcagatctgctggtgataaactgaagtttggtctattaacaatcttcccgtgtgtgcaaccagacttcatgaaggcaacagttgtgccccgagaagctagcagggcacagaaatcaccatgtctggctataacttcatcaagagcatcaacttcgccctcaatatgctcgaaggtccctgacaggtctttaaccaaaggactgaattttttagagctggctc

SEQ ID NO: 7038 - DNA, 432 bp, Zea mays
acagatcgataaagagtgtattcatatgaattttgaaactctagctatgttaggtttacagaggctgttcctgtttgcctggcaaaaaccgagtaggtctgttcactggtgggttttatatagtaaattgccgaattagctcttccaactatggagacttttgtagagggataaaagttcttactgtcagaaaaattccataatttttggttgagtagtctgggagatatcgaattataaatttaactatgctgctgtctgaaatagattcagtcagttatcttgtcggatgttttagaacttatagattgcaaaatttaattatccattgaataccgaaattgtagagtattttgtgtagatatcaccactgttataattttaaagatacaaaattaacaaacagcgctgctgccgtttgacatgtgtgtt

SEQ ID NO: 7039 - DNA, 459 bp, Zea mays
  unsure (1)..(459): unsure at all n locations
acctgcggcatgcatgcttcttgaacagacagtggatggggggcttattcctcctactcctttcctactcgatncaacgcaacagcacaactgctgaaatacctcgagaaccctccgggcaaatcgctgctatcgtcaccactaaagaaacgagttcacgatgcgtagggaagcgcgagaacgagtgcaaatctaaggaagaaaaggcgagatctgagagcaggagaagggaattgaagcagattcgtgatgtgcccgcttaccctgtccgaagtgccggtctctcatcgcgcctcgctcgcggcacctcgccggatccgagtgctcacctcctcaagcagtggatttggggaacgactcggatcagtccagtgaagaaaatcttattctcgttgacgtgtgggtcacccacggacagcgggctgtttaccgtgtctgctctccgtgaagaaaatctta

SEQ ID NO: 7040 - DNA, 389 bp, Zea mays
gtcaagcattacttggtactcatctcttgatgggtccatcaaggttagtcaacaaagatctaggaacccaaatgtcctttgtgttagcattaggtaaactcattacctttctagcacaagttgcaattttgggttgcctagttacatgagaattaattgacaagctaggagtggaattgttaccaatgggacaatccttgcattaatgtcccttctttcggcatgtgtagcataggcgtttttcaagttttgaagctttcttctttccttgtttgttgcttgctacatggttagtaaaaattttcttttctaaccctatgcctttttgttttaaatggggacaagatctaagcaagtgtcccttcttggagcatttaaaacaaagtcta

SEQ ID NO: 7041 - DNA, 442 bp, Zea mays
agctttgtttacaccagtgtagactacacacattctccatttccctcctttctttctcacaagcacagggttggcaagccattcgggatggaatacctctttgacgaaccctaccgccattagctcgtggatctcctcgcctatggctctgcgcttatcttcgtcgaatcggcgcagaggctgcttcacaggtcgggctccagctcggatatccagcgagtgctcggcgacatccgccggtatgccgggcatttccgagggactccacgcgaaaacgtctgtgtttgcgcggagaaagtcgacgagcactgcttcctatttgggatcgagctcggagccaatccggatctgcttggaggcgtctctgctggggtcgagagggacagatataaccgtcttgctggctcgaagatgccggcgtggcgctttacgtctggcgcct

SEQ ID NO: 7042 - DNA, 385 bp, Zea mays
cttaacacccccccacccgcgagacctatataccgttctttcttaccataatgaatgcgatatcgaatgtcatacttgaggcatattcactttatttgttcccttgtatgatgtactgtttggttcccaatttgaatggatgaatgtatgtatgcttgcaatcgcataaagaacgatccggtcgaagagcccgaggaactctcaagagaagcctctgagcagcaatctgttggaggaggcaagtgtcccttgacctatctctgtcctattcattctttaaatcacctcccgcattacacatttatacctaaggattgactagttttgttatccatgtccttgtctacctatttgggttggaatattatatgttaaccttatgcta

SEQ ID NO: 7043 - DNA, 446 bp, Zea mays
  unsure (1)..(446): unsure at all n locations
agcttatgttgatgatgtggtgatcaaaatttatatctcanaanacttcattgaagatgtgcagctggtcttcaacagcctgaggcgataccggtggaagctcaatccaaaaaaatgtgtctttggagtaccaccagggaagttgctcggattcattgtcagccaccgaggaattgaagctaacccggaaaaaaatcgaggctatcatgagaatggaagcaccacgatcatagaaaaaagtgcaaaggcttactggatgcatgacagccttgagcaggttcatatcaagactaggcaaaaaaggcttaccattctacaaattgctcaagaaggtggacatgtttcagtggatcgcacaagcatatgaagctctcgatgcattgaagaagttcttgaccacgccaccagtactgaagccaccactccgagccacgccggatcagcca

SEQ ID NO: 7044 - DNA, 461 bp, Zea mays
ggatccttgagtcacctgcggcatgcaagcttctaaagggagaacacattttaggactaacaaatgttcattttgagaaagacaggatttgtagcacatgtcaagcaggaaagcaagttggtgttcatcatccacacaagaacatcatgacgaccgacaggccgcttgagctactccacatggatctattcggctcgatcgcttacataagcatcggtgggagtaagtattgtcttgttattgaggatgattattctcgcttcacttgggtgttctttttgcaggataaatctcaaacccaagagaccttaaaaggattcttgagacgggctcaaaatgagttcggattaaggatcaaaaagattagaagcgacaatgggacggagttcaagaactctcaaattgaaggcttccttgaggatgagggcatcaagcatgagttctcttctcctacacaccac

SEQ ID NO: 7045 - DNA, 257 bp, Zea mays
  unsure (1)..(257): unsure at all n locations
caatgaatgctgtggtgacttcacacctacccgtttgtttatatagtgtcgcatgtgggaaggtgaatcgtcaaagtctctcgcaccgaacaaacagtcacccgcactcgctgaacggtgggccacagggttcgagaatgtgaatcgctggggcgcgcctaactgctgcaagatggggccaccgcgcgtgcaccgaatattttaatcgcttctcgccaacgagctcanggaaggtgtttttcggatcttctgtgtcc

SEQ ID NO: 7046 - DNA, 451 bp, Zea mays
ggatcttaagcacctgggctgcagctttaaggagaacacatttggactatcaatgttcattttgagaaagacaggatttgtagcgcatgccaagcaggaaagcaagttggcactcatcatccgcataagaacataatgacgaccgacaggccactggagctcctgcacatggatctattcggcccgatcgcttacataagcatcggcgggagtaagcactgtctagttattgtggatgattattctcgcttcacttgggtattctttgtacaggaaaaatctcaaacccaagagaccttaaagggattcttgagacgggctcaaaatgagttcgccttatggatcaagaaaatatgaagcgacaacggaacggagttcatgaactctcatatcgaaggcttccttgaggaggagggcatcaagcatgagttctcttctccctacacacctc

SEQ ID NO: 7047 - DNA, 269 bp, Zea mays
aattctgtgcagtcatggaattcaattcagaaacagcaagtcatattgagtccttgtttcgccatggctttcttgccctttcttttcatttacccccatgaattgaaatcgaaggtgcctgaataacctgtgcgactacagatatacgcatggggaatggggatctagaaccaaccgcacatggcaatgaagcagccggctgccgacaatattgccccgcaagccggccggcgtctagtttcaaaaatggcactccagatagcaatgaa

SEQ ID NO: 7048 - DNA, 339 bp, Zea mays
tatatgcatatatttactaataccaatatgggcaaaccaattcacgaatcctcctatcgtattcacttttggtggaccaatcctcttaatcaccttaacctctaagatgatcattgaacgccgcctagaggggggcgaatgtgaaatatgtcaacttattcacatctacctattggcttagcgttagaaataggaccaactcctatagagacggtgaaacacgaacttgatgcgaatgaataccgagacacagtgatttgttttaccgaggtgcggactttgcaaacctactccccggtgaggtggtcacaaatacacgctctatttcaacaccttccc

SEQ ID NO: 7049 - DNA, 444 bp, Zea mays
  unsure (1)..(444): unsure at all n locations
gggagtgaaacacgtgcctacaaggtacacaccaactnttccctcccagaacaaagtcttggtgagactacatatatgaattagagcatctcagttaatactaactaaataaacgacatatataaataaccttgaaagcatttggttcgcttgaaagcgttaagtaacattattgtgactaacatatgtcttatagagacaatttgagctaagtcaagataatgataattgcttgggaaacaaatggttttcatgcttggatttatttaggtttttaaaggatgaatgataagtttaaggacaaatgaggttcatatgtttagagttgagagaccctagataattntaaactttgttttttttgtttgaccatattgtaaggagggtatgaacttatagcttgacctangttnggtatagtgtatacttgttaaatacagtact

SEQ ID NO: 7050 - DNA, 357 bp, Zea mays
tccatagggacatgcggatagactggatccccgcctaatttttccctttggaaagaaaagaaccactggcctttgtgtccatactatgccggttaacaaccatcgactccagagcatatgctcacttaaagctctcaaaataagcgggagcatggggctggattacgggctgggaacaactgttggggcacccacaccccaaagcttatgcgggattttgatcgctaagaaaaggctttacggttccacaaacaaaggacaagccacagcttaggtctccggaacattggcggaaacagtttatcgctggcggtggtccgggccaataaagatactccacctatgcagaacaggagc

SEQ ID NO: 7051 - DNA, 425 bp, Zea mays
  unsure (1)..(425): unsure at all n locations
ctcagctttgcacacatctgaatntagttcagcttatcatcccgtttacagatggccagaccgaaagaaccaatctaattcttgaagacatgttgagagcctgtgcgttgcaagatcagtccggatgggacaagagattgccttatgcagagttttcctataacaacagttatcatgccagcttgaagatgtcaccatttcaggcgctctatggaaggagttgtagaactccgttgcaatgggatcagcctggagaaaagcaggtgtttgggccagacattttgcttgaagctgaagagaacatccggatggtccgagagaatctgaagatagctcaatcaatgcagcgaagctatgcagacacaagaagaagagagctgagtgttgaagtcggagactttgtctatctgaaagtgtcaccgatc

SEQ ID NO: 7052 - DNA, 395 bp, Zea mays
  unsure (1)..(395): unsure at all n locations
gctatctcctaacttgacccgaagcaacagccagaagggcaccctcacgctcaacagcagcgcggcttctgggaggagtccaaagctcgcacagtaaaaccattgtgcctaagtccaagcctatttactaaagaataccccactcctgggggatccttatctctcctaccatactattttntggatgaaaaacaagccccgaaagactgaattttgaattcatgtaataattgcgcctgcatcaatgagtaaaatgtgccgttctaacagacttccgaagctcagaagtagtccctaacggagcaccaagtaactttcaaactcaaagttgctccttaaggagcatagaataatgtctgaatctaaaagtccttccttaggagcgcaaagaagtt

SEQ ID NO: 7053 - DNA, 419 bp, Zea mays
cagctttccagctgccaccacctcagcaccgacgacggcgttcatctgcccaccaacaccgtaccagcgggcgccgagcgccccaaagcgcaccgacaggtcctcactcccgtcctcgccacgaaaatgagaatgggaccgtcccagaacacgagtaccgcccacgcggcgtatgacgtgttgggagacccccggtgcggctggccaccgtcgcccggacgaaggacggaatgttgcaccctggctgggcagcaacagttcgccttccccggcatggctggagggcgcctcctccgcagagctggaggatggtttccaccctcaaaagctggaggaagaagcgggacgccagcccacgtgaagggaggacccgggtcgcctcgccttcgcccagcaaggatgatgaaatccttgaactg

SEQ ID NO: 7054 - DNA, 452 bp, Zea mays
  unsure (1)..(452): unsure at all n locations
gcccggatcttagcactgngctcactgggcctggaaacaaatcttgtgtcttgattgcaaactgcttgccattgtcaactgttagttcggacggtacgccgaagcggcaaacgatgttctaccagaagaaattttgggcagtctttgatgttattgtagaaacagcccgcgcctcgatccatttggtgaagtactcgacagcgacgaaggcgaacttaaggttcccctgagcggtgggcaggggcccgacaatgtccaggccccagcgctggagaggccatgtatgggcgatcagctntgtatactgcgaggggctgcctgaccgaggagaaaacttctggcaggcttcgcaggaccgtgtgacccgatttgcggcgcagatcattgcgggccagtaaaaaccctggcggatcaccttagcagctagggcccttggccctgcgtgtgagccg

SEQ ID NO: 7055 - DNA, 468 bp, Zea mays
taaatactcagcttgagattctcattccacatgggctagtcgcggtgccagatccaacccatgttagtcttagcaattaagcaggtgtcgagttcatctctattgaaatcaactaagtatagctgaccctctaacactcccttaaatgctactgaatcatcacttcttctaaagacaataacacctatattcgtaaaaagacaattgtagcccattttgcataattgagaaactgaaagcaagttataatctaaggaatctacaagaaaaacactagaaatagaatggtcaggtgatatagcaattttaccaagtcctttgaccaaccttgatttccatccccgaatgtgatagctctttggggatcactggttttctcataggaggagaacattcttttctcccagtcatatggtatgtgcaccgctataattattcaacttggcccccaatgcttaacctacaaac

SEQ ID NO: 7056 - DNA, 472 bp, Zea mays
atcttaagtcacctgcggcatgcaagcttttgaaaagttaattcgtagcaggtctgggaattgaaacgcagcagaaaccaatgaaaagctcaaaagtagcaatgtcgtcatgacggtacggtgtccaatacacagtgacggagagggggtgcgtgcagtgtactatcatcacgtgtaggcgatagacggatggatggatcggacatgatcggccgaggtaacgataaggattctttatgtgcatgcgagaggtcaattcctggtcctgtgggagctaggaatcgtcagacaaggaccggcggacaggttccaatacaatgggttgtccgttgccggtgccgttgccgttgccggcaagcataaagaatccttatcagtcagatcagttcattttttatatattactacaacaagcctccgccctccgttgtccgatgatggatcgaaacgagagtgctctagtatatagctg

SEQ ID NO: 7057 - DNA, 371 bp, Zea mays
acttacatactcagcttcgagaatattctccgaagctataacaaagatgtatgttgtctctcttatgaagctacacttcttctcaattcattacgattttctctttttcaaaacattctccgaagatcaatactgtatccccttcttgttccacatacaatatgttgtatgatgcttatgttatacaaaatgatgtgatgatgttatgttatgcaaaatgatatttgcgccgaagatacacacatccctgcaatagagcacacaatctttttatatcagcgctgacttttcgctgtaagccttccttaggagcttcttcgccttttactatgagcggaatcagcgtttatttttctgtgtaagcctccctt

SEQ ID NO: 7058 - DNA, 456 bp, Zea mays
ttaagtcacctgcggcatgcaagctattatagtaggggtattcgaaatttattgtatccattacccggttcaatcttcatttcggccaggtatcgaaggttgcagtcatcaactgatcttctttcttggtataattaccaagtatttcattgcacatggtatcaatcatctccaaccattcttggcaagggtttttgaattgtttttcaagcttaaagtgataggggagtcgtacaagctcatgcttctttccatcttattttcccttcggcattccccaaccactagaagttggatatgttctatttgataagtactcttgcactaagtccctagtactgatgtgcccagccaccactctaaattctacttcggccaattggcaagggaccctaattgcatgttgcacaagggtccagtcatgctgaagttcaccttcagggactcataccatac

SEQ ID NO: 7059 - DNA, 457 bp, Zea mays
  unsure (1)..(457): unsure at all n locations
taagcaccgcggctgcagcttggaccgggggtcgctntagaggtcatcgtcccctctaaccaaattgtgggctctgttgatggcactgagttggttcctgctggttcgttgcaagctgcttcaggtggcggcctcacgcccggtcatcaattgatctctcatgacttgggggtcccttcattcttttccaacctccaggtactgtggcatacttcagcttgatttttacaccgcatgaactgttgtcattacactcatctgctctccttatcaggctttggtggacgggatggctagccagctgaggttacagggtgctcctgttccagaagtagcttcgtctcttgcacgttggaatccagtgttacttcaacatcgtgtctctgacttggaggcgaccaacgctggttagtgcttttttgcttctctttgtcttcactattaaactgcttttaca

SEQ ID NO: 7060 - DNA, 361 bp, Zea mays
cagcgcgctatgctaacgcggagcaaccacttcgctgattatgtacactctctataaacttagaacaagtcacgccctcgtcaatccttactatttcgggaggagaccgaacaaccatccgccttggtttacttgtgaacccctacacaacaacctagagaggtcgtcttgcctacttcagtagtgggatccgattctggcgggtggcaaagtgtgccctccttgggaaatctttacaactatcaatgttgtaaggaggaagctgacttctctgggtctgccatccgtgaatctgtaccggaccgtcgctttatgagtctacacctgtccgacactcacgcccaccgtcgtacatttgcgc

SEQ ID NO: 7061 - DNA, 469 bp, Zea mays
  unsure (1)..(469): unsure at all n locations
atcttaagtcacctgctgcatcaagcttaatcagttgcttttatgtggccttgtatttattacttanaaagccaagttctagcaatagtcccaagttattacccaaatggcactccctctaagaggaaataccagaaaccataactaaaatcatcaacattaagcatcatcataaagatattgaagcgtcctgatccttcggggctcaaatgtgatacaattaatagtctcaggaggctagtaaccacattccttacttcaaatagtataaagtttgagtaaatgttattacaataccagggtacaagctcgagagagccagaaatataaagcgcagtggaggataaactatcccaagccacacgcagaactgggtgaagacacaacccccctcaatcaagcatagcaaaaaagaagtcttcagctgctaaaaaacataaataaatctgggtgaatacactaggtattc

SEQ ID NO: 7062 - DNA, 358 bp, Zea mays
gccaagccctcggacccggccggacttcaccggaggcccgagatcgacctcatcggacttcggtctttcgccgccgcgcgtggaccgagctatccagtgagtctccgaccaattccttgcacccatatcttctctggcatcccgtgaacctctctgacccatccaattgctctatctcgccgtgactaggccggactcctcgccgtcgacgagcatccccgcctgcgtgcgtggaccgaccgactccggccatctccgacggcgacccgcacaccgttgtgatccccgagacctccccttcgtcctcgaccacttcaccggagcaatctcgccgccggtaagcccctccgcccttttt

SEQ ID NO: 7063 - DNA, 448 bp, Zea mays
agcttgtgaagattcttcatcccaacatgggctagtcggcggtgccagagccaacccatgttagtcttagcaattaaacatgtgtcgagctcagctctatcaaaatctactaagtatagctgaccctctaacacacccttaaatgctattgaatcatcacttcttctaaagacagtgacacctatatcagtaaaaagacagttgtagcccatttgacataattgggaaacagaaagcaagttgtaatctaatgaatcaacaagaaaaacattggaaatggaatggtcaggtgaaatagcaattttacccaaacctttgaccaacccttgatttccatccccaaatgtgatagctcgttggggatctttgtttttctcatatgaggagaacatccttttctccccggtcatgtggtttgtgcacccgctgtcgagtatccaacttgaac

SEQ ID NO: 7064 - DNA, 398 bp, Zea mays
gtggaggaccagatcatcatagcatataagtttctagattagaagtggtcacccaagctttggtgatgaagcaccagaagaccaatcaaggaaggaatccatgtgggagttcgcaagagaaaggtttgcgtgttggcatcgatgcttcctcaataagcttgctgccaagcgaaacctagaagcctgaagatgatctttgagtagccagaatcatcgtttgcaatcggcaaccagatgctcctcaaaggccagaattcgttgaagttccatcttctctaagagtctgcaaagtgaagatatgtagctgaagtaaagctatacccataacccttctaagccgaatctcgaggacgagattcattttaagtggggtagatttgtagcattccaaaaattca

SEQ ID NO: 7065 - DNA, 407 bp, Zea mays
  unsure (1)..(407): unsure at all n locations
agcttcataactcctaatggtacctattgttttccttcggatgcctgaggggctcaagaatgctggaggaagcttcagcagaatgactgccaaggttctccactctcaaattggtaggaatgtgctgacttatgttgatgacatcatattaaaaagcacaaagcaagagaatcatgttgccgatatgcaaaaaacgttcgccaattttaagcaagctggtctcaagttaaacccaaaaaaatgtgtttttggagtgaaaaagggcaagtttcttggttgcctantatcaacaaaaggcatcgaagctaatccaagcaaactcgaagctatcctttggatggagccaccanattaaaagaagggggctcaaccgttggcaggaaggctggcattgttgaatatattta

SEQ ID NO: 7066 - DNA, 378 bp, Zea mays
cggctatgggtcaaattttggcagcaaaacagggcaatatcaatgaatgttgtggtaacttcacacctacccatctgtttatatagtgtcgcaggtggggaggtgaatcgtcaagtcttctgcaccggacgaacggtcgctcgcactcactgagtggtgggccacagaacccgagaaggtgaatcgccaggatgcgtttacccgctgcatggtgggaccatctcgcgctcgaaattttgtgatcgtttctcggcaacgagatcagggaaggtgtttttcggatctttggctctccgaagcctatgagaacttttcacggatcaagctcattacgaaaaacgatctaacaccgcgaaggggctacttgtgggggtatgc

SEQ ID NO: 7067 - DNA, 400 bp, Zea mays
  unsure (1)..(400): unsure at all n locations
agcttgtcttataaaagcattgataaggatcttcctcatcaaaatatgaatccataaaaacaaaacgcttattcttcaaatcaacaatgaacaaaaaccaatggttcgcatggcacactggaaaatacagctganaaaacagattgaggtgaaataagaacaagacataaatgtatggcacattaaggctgctgtttggaccaaaaaaattacaacaaactaagcaaacaaaaaaccttgttagagcggtgcaacttcaaagcaaaattagcccctaaaaacgatttccttaaatcttcaacttcataatggctattgtattccatcatcgaatgctggagtaacaatagaaaattgtaaaaaaatgaaaaacaataaaaaaaattacagaaaaccaaac

SEQ ID NO: 7068 - DNA, 343 bp, Zea mays
  unsure (1)..(343): unsure at all n locations
tgacatctttgtccttgtcctcattctgttctcaaagtacttgatgccgaagctcctgtcacacttagaaacacattgacaactcgtggctaagtgtgtttttttagcaccttcgaaagacaaagactcccaacaacatgctcgactgattgctgctcgctcgcaggggcgaagacgtggagcagacaaaggcaagcagagtggcggaggccccattagaacctctagagctaatagtcactgcacttttaaagtgagagtttcttcatgcgatgttctcccacgcatgccctccctacatgcgattgcgaaatggaaaataaaaaanaatggtgcatatatt

SEQ ID NO: 7069 - DNA, 461 bp, Zea mays
atccttaagtcacctgcggcatgcagcttctaagggagaacacgtgataggactatctaatgttcaattcgaaaaagatagaccttgtgcagcttgtcaagcagggaaacaggtgggaggctctcatcacaccaaaaatgtgatgacgacatcaagacccttggagatgctgcatatggacctttttggacccgtcgcctatctgagtataggaggaagtaagtatggtctagtaattgttgatgacttttcccgcttcacttgggtgttctttttgcaggataagtctgaaacccaagggaccctcaagcgcttcctcaggagggctcaaaatgagtttgagctcaaagtaaaaaagataaggagcgacaacgggtccgagttcaaaaaccttcaagtggaggagttccttgaagaggaagggatcaagcacgagttctccgctccctacacaccacagg

SEQ ID NO: 7070 - DNA, 324 bp, Zea mays
  unsure (1)..(324): unsure at all n locations
cagcttacacaagaagncaaggctaaatcgatccatgtatgtgacctggtatggaagaccgtcttgcctctaaagagcaaaggccaaaagtttgggaagtggtcgccaagctatgaaggcccttacaaggtaacacaggtaatgtctggtaaggcctacttgttgcaaacatcacaagcaaaagacttgtccaagacattaaatgggtgtttcctcaagcagtatcatcctagtatgtggcaagatgcataaaaaacgatgtgatcacatcgttttagttgcttttggttcgctcaactccgccaaaaggcaggggagcatatg

SEQ ID NO: 7071 - DNA, 469 bp, Zea mays
  unsure (1)..(469): unsure at all n locations
atcttaagtcacctgcggcatgcaagctntatcacatggacgtgaaaagcgtcttctttaacggactaatcaaggacaaagtctatgttgagcaacctcctgcctttgaagatagcgagtaccctaatcacgtatacgaactctctaaggcgctgtatgggctcaagcaagccccaagagcatggtatgaatgcctaagagattaccttatcactaatggcttcaaagtcggcaaggacgatcctactctattcactaaaactcttgacaatgatttgtttgtatgccaaatttatgttgatgatattatatttgggtctactaacgaatctacatgtgaagaatttagtaggatcatgacacagaaattcgagatgtcgatgatgggggaggtgaagcacttcttaggatttcaagtgaagcaactccaagagggcgccttggttagccaaacgaagtatattctaga

SEQ ID NO: 7072 - DNA, 489 bp, Zea mays
  unsure (1)..(489): unsure at all n locations
acacttgaatctaagcttccgtgttcgacgcgagctggcatccgggggcgcgctcatagcacgcccgtgcgcgaacccccgcgcacccgcgggcgcccgtgaccacgcccgcgccacggctataaagcccgccccagtgcttggctgccttccccgttacctcctccgtacctcgccggactcgcccgagccagccattaactccggcgacctccccgcgacccgccagtgccgcccgagagcaaccaccgtggccagcccctctcccgtcctcctccgttcgatccaagcccttagagagcttcctggtgaagccgtgagtcttgctcaagcttgacccanggacccgcgtcaccggaatagcctaatcgtgctcaccggagttcaagaacccgccgacgcacgtggaccgggtaagcccttgcaccgttttccaattccttgcgcgtatggcctctgtgtcaccccgtgaagctcctcgtgcaccct

SEQ ID NO: 7073 - DNA, 365 bp, Zea mays
agaacacattgtgggactattttatgttcattttgacaaagacacgcattgtagtgcatgtcacgcacggaagcaagttggtgttcatcatccacacaagaacatcatgacgactgacatgccactcgagctcctacatatggacctaatcggcccgattgcttacataaacatcggcgggagtaagcactgtctagctattggggatgactattctcgcttcacttgggtgttctttttgcaagaaaaatctcatacccaagagaccttaaagggattcttgagacgggctcaaaacgagtttggcttacggatcaagaaaataagaagtgactacgggacggagttcaagaactctcaaattg

SEQ ID NO: 7074 - DNA, 472 bp, Zea mays
  unsure (1)..(472): unsure at all n locations
tctctggacaagcgctgcacttaccgctgagtgcgaagttgctacatataataacaaaggagcccctggcattggtggagtcaatgttgttagatctattaaatactgttttagctcttcaaaggccttctgttggattggtccccattgaaagacttcggctgacttcagcacttcgaagaatggtaagtttctctctgctgatctggatatgaatctattgagagatgccaatcttcctgtcaatctttgagccccccttttttgtagttggtggctccatccgaagtatagcttcaattttacttggattggcttcaatcccctttgttgaaaccaagcatccaagaaatttccccttctttactccgaagacgcatttttctggatttaacttcaagccagcttgcctganactggcgaangtctcctgcagatcagcaatatgattctcctgccttcgtgctttgac

SEQ ID NO: 7075 - DNA, 409 bp, Zea mays
  unsure (1)..(409): unsure at all n locations
catgcagcttgctctgtgtcttcaaaattttagcttattatttgaacggcggtccttaaaactgattcccaggntatttctggtcatattgacaaaagttataaagcaagagatccgaagcttgaaaaatatttatacaccgtccgaaagattgaggcttcctttgaatggttctctgttaaaaatattcctcgaggagaaaatgaacatgctgatttattagccaagtcagcagcacaggggctgcccttaccttcggaagtatttttcgaaacaataaaagcaccttcggtcgaactttttgagaaagcagtcctcaacatatctcctgtctatagtgaacactggagaactgagatcatctctttcctttcaggtaactttctttcagatgacgaagcttataaca

SEQ ID NO: 7076 - DNA, 424 bp, Zea mays
  unsure (1)..(424): unsure at all n locations
gaacacgtgataggtctaaccaatgttcaattctaaaaagatagaccttgcgcagcttgtcaagcanggaaacaggtgggaggagcgcatcacagcaagaatgtgatgaccacttcaagacccctggagctgctgcatatggacctcttcggacccgtcgcctatctaagcatagggggaagtaagtatggtttagttattgttgatgatttttcccgcttcacttgggtgttctttttgcaggataagtctgaaacccaagggaccctcaaacgcttcctcaggagggctcaaaatgagtttgagctcaaagtgaagaagataaggagcgacaacgggtccgaattcaagaaccttcaagtggaggagttccttgaagaagaagggatcaagcacgagttctccgctccctacacaccacagc

SEQ ID NO: 7077 - DNA, 443 bp, Zea mays
  unsure (1)..(443): unsure at all n locations
agctntagtgattagcgagagagatttgtcttgttcttttgagctcttgcgcttggattgcttctttctttctcacttgttcttgtgatcaaaactccattgtaaccaaggcaagagacaccaattgtgtggtggtccttgcggggaagttttgttcccagttttgatttgagaagagaagctcactcggtccgagggaccgtttgagagagggtaagggttgaaagagacccggcctttgtggcctcctcaacggggagtaggtttgcgagaaccgaacctcggtaaaacaaatccgcgtgtcacactcttcattcgcttgcgatttgttttccgccctctctttcggactcattattatttctaacgctaaccgactcgtagttgtgtttatatttgtaaaattcagtttcgccctattcaccccccctttaggcgacttt

SEQ ID NO: 7078 - DNA, 455 bp, Zea mays
  unsure (1)..(455): unsure at all n locations
gctgaatgaggagatggcgctcgtcatcaagagcnttcgtcttatcctcaagcaaaggagagggaaagactacaagtcccgctccaagaaagtttgctacaagtgtggtaagcccggtcactttattgcaaaatgtccattatcaagtgacagtgacagggataacgacaagaagggcaagaggagagaaaagaagaggtactacaaaagaaagggcggcgatgcccatgtttgtcgggaatgggattccgacgaaagctcaagcgactcctccgacgacgaggacgccgccaacatcgccgtcactaagggagcttctcttcccaacgtcggccacaagtgcctcatggcaaaggacggcnaaaggaagaaggtaaatcaagatcctccacttaatatgaaacctctagtgatgaaaatgctagtgatgaagaggataacttgcgtaccctttt

SEQ ID NO: 7079 - DNA, 448 bp, Zea mays
agcttgagaagatatttccacccggcttcttttattcaatgcagcagttgattcttcatctcccctatgaggcacgaatggggggccccgtgcagggacgttggtgctatccaatcgagagatgtctaaagactattcgaaagaaatgtagaaataaatgcgaaatcgaggctttcattgcagaggcatacattctagaggaggtctcaaacttcacaacaacttattatggtgacaaactgccgagcgtgcataatccacccccttgttacaatgatggcgacaatgaatcgaaccttaacatatttcgaggccaactcggaagcgcaagtggctctaccaccaagaccctgacacatgaagagtggtggcatatcatgctatacgtattgaccaaccttgaagaagtgacgccatacatggaacaatttcttcatgaatattggcg

SEQ ID NO: 7080 - DNA, 379 bp, Zea mays
  unsure (1)..(379): unsure at all n locations
tgtgagggtcttcatccncacatgtgctaagcggcgatgccacagccagcccatgctagtcttagcaattaagcatgcatctagaccggcctcttcttttgcaaaatcaactaaataaagtttgccatctaatacacccttaaaagctaatgaaccatcacttcttctaaagacagacacatctacattagtgaataaacagttatatcccatattgcataattgactaacagacagcaaattatatccgagagactcaactaaaaacacattagatatagagtgctcggatgaaatagcaattttacctaacccttttaccttgccttgattcccatcaccgaatattattgaatcttgggaattctttgttttgacg

SEQ ID NO: 7081 - DNA, 415 bp, Zea mays
  unsure (1)..(415): unsure at all n locations
agctngtgaaggttcttcatccccacatgttttatacggcgatgccacagccagcccatgctagtcttatcaattaagcatgcatctagaccggtctcctcttttgcaaaatcaactaaataaagtttgccgtctagtacacccttaaaagctaatgaaccatcacttcttctaaagacagacacatctacatatgtgaataaacagttatatcccatattacaaagttgactcacagacaacaagttatatccaagcgactcaactaagaacacattagaaatagagtgctcggatgaaatagcaatatttcctaaccctttcaccttgccttggttcccatcactgaatatgaatgaatcttggggatccttgttcttgacgtaagaaaagaacatcctcttatcccccgtca

SEQ ID NO: 7082 - DNA, 358 bp, Zea mays
gctacacaatggacgtgatgagtgcctagctcaatgttttctttctatgaagacgtctgtgctcgccgacctgccggctttgaagatagtgagtatgctaaccatgtgttacaaactctctaaggcgctttatgggctcaagcacgccccaagagaatggtatgaatgcctaacagattttcatatcactaatggattctgaggcgatgaagccaatcctactgtatatactaaaaccatcgagaatgatttgatcgatgccaaattgatgttgatggtatcatacttgggtctactaacaaatatatttgtgaagagtttatcacgatcgtgagacacaaatatgagatgtatatga

SEQ ID NO: 7083 - DNA, 368 bp, Zea mays
tatatgaaaactccgctaatggcaaacattcatcccatttctgtgggaattccaaaacacatgcccggagcatatcttccagtattgggtttaccctctcagtctgcctacagggttgaagatgatacgccgaactgtggagcaacttacttcccagggatttatgaagttcttcccaaaatttggatacgagttgcgatccatgatccgacactatggtcttcggaacaccgtgcgaacttagaatacgaaccatggacaattgggcattgacagtacctgggaattggtctgactggcagaaaatgaaaaattttcgtaagccgatcaatattaacccagatagagtcatacccttttgtggtcct

SEQ ID NO: 7084 - DNA, 413 bp, Zea mays
gacctatgatactcagctatctatcggtatggatgacgtgcggttctatgctatgtgacatggagtcgagcgacaccaaggcgccagtgtcagaatgcctggtcccgatgttaagctgcgccataaccgtgtcaaatgaatttggtttgagttcacactttcccagaatgtgttcgacgtaatttggcacgactatgatatttggatcttctggctatgagttttgaaaagcatagaacacagatgatctttgagaagatgtctgaaattcacaaattcagaaatctgaatttctctaagggttcattgatcaagggctgatttggggatttaattgagttattttggctcaaccttctcaaacattctcgctgcttaacaattataacgcaacttatatgattggctcaact

SEQ ID NO: 7085 - DNA, 379 bp, Zea mays
cccatagtagggctagccattaagcaagtggctaaggcaccattgttatcattaaaaccaactaaatttagctgatcatctatcactcccttctaagctatcgaaccatctgtgtttctaaagacagtgacacccacatcagtaaatagacagttgtaccccattttgcataaatgagaaactgaaagcaaggtgtaaggtacagcctctacaagaatagcattataaatggaatggtgaggagatatatcaattctacccaaacctttgaccaaaccttgatttccatcctcgaatgtaatcgctctgaggggatcatcatctttctcatgagaagaaacattttttctctccctggcatgtggtgtgtgcacccgct

SEQ ID NO: 7086 - DNA, 449 bp, Zea mays
ttaagtcacctgcggcatgcaagcttcttatctatttgattgaggcaacattttatattatacaaccatgctctctatctcaaaatggaaagttaacacatgtaactgacaatgatatgattatatgaatggtaagtatggctaatgagatattttatagttttcagggttaagaagactggtttaaatatggtgaataattagtagagcgcctacccaaacttgcattctctttttccatctcaacaatacaagctaatctatcatgaacctgtcaagaacatattgccagtttagctccatagcaaaacattatcataaaaaactatgacagtctctcacatctaaaagtttttgtgctgcttcttgtttgaacttcttgtcgtacatgatataatatagaaattaacctcctaaagatgcaaatgcttacagacttatgccatgct

SEQ ID NO: 7087 - DNA, 438 bp, Zea mays
  unsure (1)..(438): unsure at all n locations
ttaggaccttgaaactcagctggatgtgttttcctccatcattnttagatatgcttgtacacctaatcatacatctcgnggatcacataaaaatattagggccactatatttacatcatatgtttcagttggagcgatacctgcgagtattaaaaggttatgtgcgaaatcgcgctcacccagagggttcaatcatggagggatacactacacaagaagtgattgagagctgtatagattacatcagtgacggaacaatgataggtgtgcctgtacctaaacatgatggtaaactatgtgggagagggagaatgggcaagaaaactattcgcgttgaggattacaagctagtacattgtgctcatggtagtgtactacaacatttcacgatagccgagccttacatataagaacacctggatgagcttctaaaaaaaa

SEQ ID NO: 7088 - DNA, 285 bp, Zea mays
agcttactcctccctaggaaggggcgttcattatcgccaagaaattgaagcccaggacatacaagctggccaacgaacaaggcgaggtctacaacaacgcttggaacatccaacaactatgtcgcttctacccttaagagtttaagcggtcatatcccgtctctttaaacataaaaagtaccgcagaagaacctgcggaacccactccgggaaagagacctcggaaattctaaatacaacattggcttccaatataacaacgcacgaggcctacgagcacaccag

SEQ ID NO: 7089 - DNA, 450 bp, Zea mays
agtcacctgcggcatgcaagcttttcaaaaagtcttgaatcaatcttttgtgtggtctgaaggttaagttataggtgtttaaagtgtgaagactgaatctgtccaaatctgaacagcaaagccttcgtagtgtattttgcccttgatacatattaaaccaaccagagatgtttataaataatttgtagaaaatttaattagctttccagaatgtcttgggtcaattgatttggatgcctgagtctctagttaggaatttttgacgtcgaaagtctgaatctgtccaaatctgaacagagctgtcgtttgtcacgatttaaccttgttaagtgtctaatcaaattgagacaacagtaccaaatttgtagaccatttcttaaactttctaaaaagtatttgatcattatttttggattaatatcgtgtatgttataactgaaacgatcaact

SEQ ID NO: 7090 - DNA, 457 bp, Zea mays
cctgctattaggacctatgaatacaagcttcggcttcgcactcttcagcttcatcatcctgtacatatttaagtattataagaatcattcaagtataaagggaaaggtaagcacaaggtatgattctgttactggcttaagatgacttcgagcttcgtcaccagccatgcttcgaccacccttcgtccatattagttttataaacctgtttcctatgtttcgggcaagattgggaatatcaactagatctgctggtgacaaactaaagttgggcctattaacaatatttccatgtgtacaaccggatttcatgaaggcgacagctgtgccccgagaagctaccatggcacagaaatcaccatgtccggctataatttcatcaaggtcatcaatttcaccctcgatatgttcgaagcccctagcaagtcttcagccgaaggactaaatttttcgcaac

SEQ ID NO: 7091 - DNA, 405 bp, Zea mays
aagcttgccaggcttaaaccgaggactcctccaccggaaaagcgcaatcgtgctcgccggagttcaaaaccccaccggcgcatgtggaccaggtaagtctctgcgccattttccgattcaatgcacagatagcctctacataaccccgtgaagctcatcgtgccatttgattgaactagatcgccgtggtttagcaggaacacccgccgctgacgagatcacccgcctgcgcacgtggaccggacgattccggccacctctgccgttgagccatacaccgttgtgaccgccaggacctcccggagccgaccccgcccctcgccggacctctctcgccgccggtaagccgcgccgcccttttcttttccgcggatactgtttaaacctagggagggaccgcggggg

SEQ ID NO: 7092 - DNA, 353 bp, Zea mays
gatcttaagtcacctcggctgcaagcttgcccccggatatgcggcctttttctatgcttgattgatacggaccagggacataccgactccggatacccaaaacattgtgtggcgcacataatgtgctccatgtgtctaagaagaagaaatgtgttctggttcccgatcgatccattgaagtaacagatgttgccatagaaccagacttgacatatccggagcatcctattcgagtcttaggtaagacggatacaataacccgatgaagaactgtcatggtttacaagatacaggggagaccacatttataatatgaggctacatgggaaactcaagactcttttgaaaaacat

SEQ ID NO: 7093 - DNA, 404 bp, Zea mays
  unsure (1)..(404): unsure at all n locations
cttcatccccacatgtgctaagcggcgatgccacagccagcccatgctagtcttagctattaagcatgcatctagaccggcttcttcttttgcaaaatcaactaaatacagtttgccgtctaatacacccttaaaagctagtgaaccatcacttcttctaaagacagacacatctacatttgtaaacagacagttatatcccatattgcacaattgactaacagatagtaaattatatcctagtgactctactaaaaacacattagagatagagtgctcattagaaattgcaattttacctaacccttttaccttgccttgattcccatcaccgaatatgattgaatctngggaatccttattcttgacgtaggaggtgaacatcttcttcttccccgtcatat

SEQ ID NO: 7094 - DNA, 485 bp, Zea mays
  unsure (1)..(485): unsure at all n locations
gacctataaaactaagcttgagggttcttcatccncacatgtgctaagcggcgatgttacagccagcccatgctagtcttagctattaagcatgcatctagaccggcctcttcttttgcaaaatctactaaataaagtttgccgtctaatacacccttaaaagctagtgaaccatcacttcttctaaagacagacacatctacatttgtaaatagacagttataccccatattgcataattgactaacagatagcagattatatccaagagactctactaaaaacacattagatatggagtgctcattagaaattgcaattttacctaaaccttntaccttgccttgattcccatcaccgaatacaattgaatcttgggaatctttattcttgacgtaggaggtgaacatcttcttctcccccgtcatatggtttgtgcatccgctgtcgataatccagcttgaacccccggatgcataaacctg

SEQ ID NO: 7095 - DNA, 409 bp, Zea mays
gcaagcttcacggccttctagtggagctattctttgcttggatcgagcggaggagggcgggaaagggttctgtcacagtggttgccctctggcggctctggcgggtcgcggggaggtcgccggaacttttggcgagcttgggggagtttggcgtggtacagaggaggcaacggggaagctatccgggcactggggagggctttattgccatggcacgggcgtggtcacaaggcggccaccggcgcgtgggggttcccgcaccggcgtgatctgatcgcgcccctagtgtcagccctcttcgaacacgtgtgggtttgcgtttatcatgggtcaacggccgatttgagcgccttatcatcagatcttggcaaaacacccgtgtacgggctcttccctgcccaaatcctac

SEQ ID NO: 7096 - DNA, 240 bp, Zea mays
ctccggagtctagtagagcgatattcacgctaccagccaatggggacgaagatggaagtattgcctccatccagcttcatggcctcgaacggcccataatgatatcgtgaggggcctgaggggctcaaaattggtggaggaagcttatatactatgacacctgatagttcttcactttcactatagcggaaatgcgctaatgtactgcggatgacctcatggggttctgccccactcacg

SEQ ID NO: 7097 - DNA, 214 bp, Zea mays
cccaacctggcccgttggaagctccctgcgccaaataagatacgcggagtgtgtctcattattggacagcatcacctaacaattctacctgtacaccgaatgccgcgctgcagatcctatacaatgaacttatataaagaaactctaccccatatgacaacttccaaaattccgtgcaacctgtataaagtcgacacatagccgctatcgtgac

SEQ ID NO: 7098 - DNA, 357 bp, Zea mays
accttcccatgtgtttatatatagcctcatgcgggaaggtgaagcgacaaggattattgcaccgaacaaacatccacccgctctcgctataccgtgggccacaaggtccgataacgtgaatccctagcgcacgctttattggtgcatagtggggcgcgcacgaccattattttaatcgttgcttgccaacgacgcgttatggaaggtgttttctaggatctgcggtgtcctgcagcctataatacttttttccggatcaagctcgtttcgaaaaacgatctagcaccgcgatggggctaccgttgggggtatgcttcttaacccaagatcctacgtataacatcttcgaaaagtctt

SEQ ID NO: 7099 - DNA, 455 bp, Zea mays
acctgcggctgcagctttaaggaatctagacaaagccatgttttatccatggccttttccaacggacacaagaccatgacaaatacttgcaagcctatgtccgaagattcctctgactttaagctcaagcaccaacggctgctgctgcaactgaaactaccagccttttttaactttgcgtcgcacgcatcgtccttgttttcgaacatgtttgttgcactcgcgcctacgcagatcgccactagcacagcactgcatgtctctgttgagtgacgacacaagaaggcaaggcaagatcttttgatcgaatgatttttaccccacgtacggtccaaaggcggctgtaaagtggtaacacgaccaaaaggtgaaaacccgggggactgctcgatccatcattaggtaccagatgggatagttacttaaaccatgatcaaggtgatccgcccaggacc

SEQ ID NO: 7100 - DNA, 382 bp, Zea mays
tagtaatgcacccataggacccactaactggtaccttttatcctttgatttacgcaacaggacctgcaggacttagaccaggaagccaatccgtgtgtccggaccccttggatcacaactccaaatactatggcacccgtcgcagagtggtggagcatgtaggcttacggtacgggaccaggctaagcggctacacagctctggaccaccccaggggacgtgtgtccgttctctagaaccagaccccaggttgctggacccataggactatagttccaaatactagggtacccatcacagagtggtgaagcatgcatgtttatggtatggaaccaagctaaacggctacacagcttctgaccaccctatgagacaagtaccc

SEQ ID NO: 7101 - DNA, 443 bp, Zea mays
  unsure (1)..(443): unsure at all n locations
cgatcctcttagtcacctgcggcatgcaagcttgtgaacattcttcattccaacatgagtttatctgcgatgccnacccagcccatagaacncctagcgatctagctagcgcctggttcagcattggtctcattaacaataactaagtatagccgaccatctaacactcccttaaaagcgaaagagacatcgcttgttctactgacagcatcaccaacatcagtaagtttacagctgaagcccattttgcattattgcgaaactgaaagcctgttgtgatctcttgcttctacaataataacatcataaatggaatggtcaggatatatatcaattttacccaaacctttgaccaaaccttgacttccatacccgaatgtaataggtcttcgcggagcattattgttctcataagaagatacatctttacctcccctaggatg

SEQ ID NO: 7102 - DNA, 408 bp, Zea mays
  unsure (1)..(408): unsure at all n locations
atagccacacaacttgattaagtgttagcacaatttatatctgtggctaagaaccgagctcttgtgaaacacaatagtcacaaagaanacaagcacaagagacacgatgatttatcccgtggttcggccaagtataactgaaagggaaatatgcccttgggccatttctaagtattttggtgatttagtgtccaacacaagtgcctaagtgtaaaatggtggacaaagtacaaatcaaggataaaggtatgtttctccgacttagtacatatgtttatggactaatgtattgtgtccaagtgctggaaacacgaaaaataccaattggaaatgtcttggctcgagcaaccaagactctgctcagtctgggagcctcggacaatgtacgggggtgccctgaaaatgtac

SEQ ID NO: 7103 - DNA, 458 bp, Zea mays
gaccttaaaactcagctgggaaggcctttcggctatgtcgaaagatgatcttgctgatatccttgcgtacaacagtataaaggtatagaagttaactttaaagttggaaatgaagtatttcattgtcatgcttaattctttctttctctttgcagggcttgattcttagcaatgccttgagggcacaaaagagcatcgaagacgaaagttgtacaatagctctcaacaaccttctctcagaggtaattgagctgagaaacgaaggtctagagaaagacacaattttaatttcattggtgagtaaaatgaaagaagatgaagctaagtacaatgctcaggccgaagcccacaaagccgaggttgaagaccttcggaaacaactggccaaagccaaagaaaattgtgaagtcgcgaggtcagccaaaaataagtgaatggtggaaggcaagctggagaaa

SEQ ID NO: 7104 - DNA, 296 bp, Zea mays
  unsure (1)..(296): unsure at all n locations
agcttatcacaacgaattaccttcaatacttactatggaggggtgaaggtaaaaccatttanatgactttggcgaggcggaacgcgttaatcatggggagatcacctgaaaagagaaaacgtgcctctacatgagcattgtacacctatttatagggagacgacagcttacaactttgtttgagattacattaatgcccctaagttctatacacacggtatacacaacctactaagggagatatggtatttttctccccagacgtgttgtgacacctctttcactctccttcatat

SEQ ID NO: 7105 - DNA, 400 bp, Zea mays
cttcaccacgtgttcgtagatatcttgaggaagttgagcatggcatcttctccttaattgtctttgtttcttgttcccaagcaatttcctttttgaccctacaacttgttgctcattcaaacattcgcttccttttgagcgacagggattagcacatggtgatatattatccaaatgtgcacgtgtgcaaaaatgaggttcacatgagtttaagctggtaattactacctcatgagcaatatcaagcatgatatggtcatcaactaatttattatgagaatatgataacttatcatactcttcacctagagcaagttagtctaaagttatcatttctacttgactgctaagcatagaaatttcaagatttatgttgagcaacattagataatacatcatg

SEQ ID NO: 7106 - DNA, 438 bp, Zea mays
tgcaacttgcaagacgtctcccttcttaccaggtctacggtgcaaccagaccccgatgtgactacgtccctcctcgtcgaccaaaaggtactgactaactcccatcttacgttatttcgactcggcctcaacccgcctagcgaccttgctttggcgggcgctctcattgaggcgagtgcaaccccactggggtttcgtatgcggtcgccttgggaccggttgacggacgtctcaacctacgggccctctgggtccgaggaagatgacgatcccaccatctgttgggatttctctggacttggcaaccccagtgccatgcgggacttcatgaccgcatgtgactactgcctctccgactgttccgaccgtagccgcatccttgacgacgagggttgcggcccacaccgcgaatgttccacatcgagctatgggatccct

SEQ ID NO: 7107 - DNA, 282 bp, Zea mays
gcttgattgctggaaacttcaatctttataatattatgacacacattcaaacttaagttattggtgatatatatataggtataacgggagccctgagctttcaatagttaaaggaagcccaggctgaccaccatgtgttcgaaccataaatgagcaagcggacggtccggccctgaggccggacggtcctctgtccggactgttcgtgcctatgggacgggaggtccgcgcgtgcacacaaaacattaaggttccgagctatgtgctacagttgtcaactat

SEQ ID NO: 7108 - DNA, 422 bp, Zea mays
agcttccctccgcgtcaactccctctccatacacctagagcctgaatattccgagggccggaccttgaatgcccggataggaggtatcttgctgaagcctcgtctcgttttttgggttcgatctcttttcctagccacggcttgatgtcctcgtcctcttttcaggcctcgagaaggatctggaggccgcaacccaaacctctcggactctgtctaagaccatggagcagaaggtgactgagctgagggagctgtccgatgtggtggcggagctcttccaggacctcgacgtggtggacgtcccctagggtggaccccagtgaccctgtatgcaagccctgagtgcctacatacggggtaaactccgtgtcgctgtccacctcgggtgaaatgagcgctggtcatggtcgccttccactacg

SEQ ID NO: 7109 - DNA, 431 bp, Zea mays
  unsure (1)..(431): unsure at all n locations
tacaagctttttgcacttggctctaagccctggctctttcagcccatacgaagattcccattcttattattgcttcaggggtaagttgatgaaggtaaacttgatatgttttcagaacttctaccacgaacctgcttatagggaatcgtaacccagcttttaaaaagcttcgaaagataacgacttcatcatcttcgggagtcggcacagtcctctctccatcatctgccctcacgatggatatatctcgaaaatatctccctctcatgttntcaaggtgactttgcccaatagttgattttccgaagactgaatggcttggtcgccatggtcgatcttcggaatcctcacccacactgtctgcatcataactatcactttcaccagtatcttcagataacccttttccaaatctcctaagaatttttctg

SEQ ID NO: 7110 - DNA, 436 bp, Zea mays
  unsure (1)..(436): unsure at all n locations
agcttgacactgaactctattagattgtgtgactaaacaatatctctagtacataaatgggttttgaacatgacttccatttacaagagacgggcaacacaagaaactgcatgtaagtgtgagaaggatattgtancttacaaaccactccatatacaaatacatttttagggggtgttctattaagtaaattatattaaaattatagctctcgctactacatagcttactttcactacctgttcctaatttaaaatataaaataattaggggtccttaaaaacctgcagtgaaggttcatatcactgttggctcaaccaacaaaccaacgatgatatatcactaccagtttaagttgtgaaactacagtgatactgaggttatcaagctagcagtgatatgccattgtcagttcgttgcttgacacgatagtgtc

SEQ ID NO: 7111 - DNA, 439 bp, Zea mays
ggcgtcagatacacctttaaatgctactgaatcatcacttattctaaagacaattacatcaacatttgcaaataaacaattgtaacccatgtgacataactaactaacggaaagcaaattacacccaagcgattctaccaaaaatacattagaaattgaatgctcggtagtaatcgctattttacctatcccctttaccttgccttgattcccatctccaaagaggatcatgtcatgagaatccttgttcttgacatatgaagtgaacatgtttttctcccccgtcatgtggtttgtgcatcagctatcaatgatccagtttgagctcccggatgcataaacctgcaagatatttaggcttgggatttaggtactcaacttgtgttgggtcatgtcacgttagttacataagaatttggaacccaaatggaactcttac

SEQ ID NO: 7112 - DNA, 474 bp, Zea mays
  unsure (1)..(474): unsure at all n locations
ctcagcttccgttgaaaacagttctttagcgttttcgaagatgtctgattataaganagctgctgctgagatgaagctgagtctcgacgaagagaagaacttggggtttcttatagcgatgtcgaagacgaatacagaaaaaatcaccaaggagattctggaaggtttgtctgaagatactggtgacagcgacagttatgatgtggacagtggtggtgaagactccgaagatcgcccttggcgaccaagccatgcggttttcggcaaatcaactatcaaagaaaatcatcttgttaacatgagaggaaggtatttccgggatttgtccattgtgagggccgacgaaggggataaaacttgtccacaccctgaagagaatgaagtcgtagtgtaccgaagctttttgaaagctggactacgatttcctctgagcgcagtttgtgtagaggtgctgaanatattcgaagactatct

SEQ ID NO: 7113 - DNA, 154 bp, Zea mays
caaaaaaatacgagaccgattagggagaaacagaacagcaccccaacaccgcaaagcggacccagagcgacagcacgggagaacaccgagaaaactcagaacgcaaacgcgggaacaaaaccaaggggagaaattggggaacaagaagagagct

SEQ ID NO: 7114 - DNA, 463 bp, Zea mays
tagatactcagcttgtagattcttcatcccaacatgcgctagtcggcgatgtcatagccagcccatgttagtcttagcaattaagcaagtgtcgagttcagctctatcaaaatctaccaagtatagctgaccctctaacactcccttaaatgctattgaatcatcacttcttctaaagacagtgacacctacatcagtgaataaacagttgtagcccatttgacataattgggaaacagaaagcaagttgtgatctaaagaatcaacaagaaaaacattggaaatagaatggtcaggagatatagcaattttaccaagtcctttgaccaaaccttgatttccatccacgaatgtgatagctcgttggggatcttggttttctcatatgaggagaacatccttttctccccggccatgtggattgtgcacccgctgtcgagtatccagcttgagcccccggatg

SEQ ID NO: 7115 - DNA, 451 bp, Zea mays
ggatccttaagcacctgcggctgcagcttggacaataccgtcacaagtttaagctgcttcggccgatcaaccgaagcccatgctcttatgcgaagacatatgcagagcataaggtgctgttgggatctcaactgtccgaggaacaggagaaaaccttgatatggttcctgctcaacaacaaatatgtttttgcatggtcacctaatgatctttgcggagttaacagggatgttattgaacactcgctcaatgttgatccatccttcacacccagaaagcagaggcttcttaagatgtctgatgactaggccgaaggtgctcggaatgaagtgaaaagactcctcactgccggagttttcagagatgtcaaactcctaaaatgggtggctaacgctgttatggtaaagaaggccaatggttaatggaggatgtgtatcgattatactgatct

SEQ ID NO: 7116 - DNA, 410 bp, Zea mays
  unsure (1)..(410): unsure at all n locations
tttccacgtctcacgcaacttaatcgtcattgttcttattgattgaccatggctctctagagcttaaggaagaccctaaatagatcgactaggtacacaccataattcatggcttactgagctaaggcaatcctccccatcgacctagagtatgacgctctcaaggtaaggctatatgcgaacgaagaaaacgaatcgaacctcggagacacattggactatctcgacaaagcccgcgatgtggtgcatctatggttggaaactaccaatagaagttgcgaaggtaccataaccaccacatacagagtatgactctataagtgggggaccttgtgctccagtgagtccaaactaacaaggatcgacacaagctgtcccaccctgngagggttataaatggagaggtactc

SEQ ID NO: 7117 - DNA, 423 bp, Zea mays
  unsure (1)..(423): unsure at all n locations
agcttgtccanaggatgagagtgcactcctctatatttattctctaagagatgcaggatctgcgtcagagctcatgagtctattagatcgtcattcacgctgccatcaaatctggatgaagaaagaagattacccaaaaaccagtttcttaacccccagcggcacatattgttatcttcggatgcctgaggggctcaagaatgctggatgaatcttcaatagaatgacagcgaaagtccttcactctcacattggcagaaatgtgctaacatatgttgatgatatcatagggaaaagcacgaagcaggagaatcatattgctgatctgcatgaaacatttgtntattctaggcacgctggcctgaagttgaatccataaaaatgtgtgttcggagtaaaaaagtgaatattcctttgttgtct

SEQ ID NO: 7118 - DNA, 397 bp, Zea mays
tactcaacttggtgagtagatcggctgaagttactcctaaagaccttatatattgtcttaactctctggtggttctcgcggcttggactatctggaggcaccgtaatgactgtgttatcaatggtgctcagccttctatagctagattgcttacctcagccaatgatgagttccatatgtggcgttttgcgggggccaaaggtttgacccgcctttctgacctagcttttgtgttcaaccccggttaaaaaggggttattattactagagatgattgtgtgtgtgtttgtgggagtggtgtttatggcattgtaataattatcatacttcttttaatgaaatgatacgccgctctcctgcctggtccgaaaaaaaccatgcctccagacttctattt

SEQ ID NO: 7119 - DNA, 461 bp, Zea mays
gatcttaagtcacctgcggcatgcaagcttcgtcatctgaaaggcaatcaccttatataaaagatataatcttagtcctccaatcttcactatgaacaggagatatatcgagcactgctctttcaagaagttctactgaaggtgctcttattgtctcaaagaatacttccgaaggtagaggcatcccttgtgccgctgacttggctagcagattaacgtgctcgttttctcctcgaggaatattcttgacagaaaacccttcgaaagaagcttcaagccttcgaactgtgtccaggtatttctcaagcttcgagtctcttgccctgcaactcttgtcaacatgactagaaataacttggtaatcagttttaaggaccgcccttcttatccccattgcctttaacttccaaagccccaaaagcaaggcttcgtattcagcaatattatttgtgcagctgaaa

SEQ ID NO: 7120 - DNA, 467 bp, Zea mays
  unsure (1)..(467): unsure at all n locations
taaaactcagctgaaaacctgcaattagcaatatcccgacttctatttataacaacacctcccctctctgctagcttgtgctaaattcatgagacaacaagaactgttgaaaaatatacctaaggttatgatgaagatctattttcataataatatgtcgtttagggcgcagaatgatatggtgatagatacaggcgtgacctgggcgacccctaaggcaatatgtgatacgacatatagggatccaacccttcatggcttaaacgatataccaccaatcacaatgggatgtgtacaatctactaagagaacatatgatcacattgctaaatactgcttatgtacataaagcacctgtcttctgtcattttataagacgcaacactacatgtattaatgctaccagatacatacgtancagtgtctacaaaggccttataaaaataatatgtaagattcacaaaaga

SEQ ID NO: 7121 - DNA, 407 bp, Zea mays
agcttcggctccatctatgtaatggattgctttagagttcttccagtttccttcggcccttctggcagattcctgacttccatgaatagcaatgggtccttgatccgaaggtattttcatgcaaagataagcatgatgaataattgcttctaaagcattgagggtgccacgaccaataattgcattgtaagggtattccatgtcaacaatgtcaaatacaacttgctcagttctggggttattggtgaatccgaaagttattgtcattgagatcttgcctaatgctgcaatctgtcttcctccgaaaccacaaagagggtgtgtagcatcatggatcttatcttctggcttttgcatttgtgtgaaggccttatcaaatataatatcaggtgcactgcctgtatcaa

SEQ ID NO: 7122 - DNA, 374 bp, Zea mays
  unsure (1)..(374): unsure at all n locations
tacggaactataaaactcagctcttagggagaacacgtgatatgtctaactaatgttaccttcgaataagatagaccttgtgcagctcgtcaagcacggaaacaggtgggaagctctcatcatgccaaaaatgtgatgacaacatcaagacccctggagttacttcatatggacctcttcggacccgtcgcctatctgagcatangaggaagtaagtatggtcttgttaaaatgatgatatatcccgcttcacttgggtattctttntgcatgataaatctgaaacccaagggaccctcaagcgcttcctaaggagagctcaaaatgagtttgagctcaatgtgaaaaagataaagagcgacaacgggtgcgag

SEQ ID NO: 7123 - DNA, 445 bp, Zea mays
  unsure (1)..(445): unsure at all n locations
gctatgaagattcttcattccaacatgatctattcggcggcgccacagccaacccatgttagtcttagcaattaagcaagtgtcgagttcagctctatcaaaatctaccaagtatagctgaccctctaacactcccttaaatgctattgaatcatcacttcttctaaagacagtgacaccaatatcagtaaaaaaacaattgtagcccatttgacataattgagatacggaaagcaaattgtaatctaaggaatttacatgaaaaacattggaaatagaatggtcaggggatataacaattttacccaatcctttgaccaaaccttgatttccatccccgaatgtgatagctcgttggggatctcggttnttctcatatgaggagaacatccttttctcccctgtcatgtggattgagcacccgctgtcgaatatccaacttgac

SEQ ID NO: 7124 - DNA, 469 bp, Zea mays
  unsure (1)..(469): unsure at all n locations
gattgactgttcctttataaatgcagtacatcttttatatctatgttcattgtattaccaattggcaacttattgcatatagttagagactaaagaacctatgctattgttagttcttgggacgctgcttaatttgctgaaaacttgcatatagtttctgtaagatgtatgggtcttctacttgcaacacattagtaaatctcatggttcacttggatatggcactctttttttttctcagtaatattgtaactatgtgcttatgtgttcgtcagaagaagaaaaaaacactgggttctttaatgctttgattcatntgtgatacgtattactctatttttcctagtcgattactaatggcacattgcaaataggcttaattctgcgatggttgtgttcagatacacgtttgctgcaatcacattacctgtctagatgagataactcanggcttgantcatgaactgat

SEQ ID NO: 7125 - DNA, 443 bp, Zea mays
gcaagctgccattttgtaaagcacagcattttccagcacagcaactgcagaccatacccgtaacatggccatttgcgtgctgaggactggacatgattggacccttcaagaaagctcagagaggctatactcacatgttggtcgccattgataaattcaccaaatagatagaatactaacccattgcttctctaacttcagccaaggcagtggaattcatacaagatataatattcaggtttgagataccaaatagcatcataaccgacctggaatccaatttcactagctctgaattctttgatttctgcgaacaacggagcatccagatcaaatatgcatcggtagcacgcccaagagccaatggtcaggtagaaagggctaatggaatgatactggaagcactcaggaagaaagtcttttacaagaatgaaaagttcgta

SEQ ID NO: 7126 - DNA, 367 bp, Zea mays
taaccctaatgcacctcttggcttacaatgtgctttcttacttagcttttgacgggtatactatactcgaccacacgatataataaagtcaaggtaattatatcttggctacttcatgataccaggctacatgaaacattgtgatcatcattctaaatatgagaaatgtttgttgttgtacccaaacacgaatccatgggatataatgcttggcatgaacctctgggggaccatatataatgctgtagttatgtgttgtgcgccattactattcagtaacatggcatatgcagatgcgttccaggcattgagatttttccaggagaacccagaggtggcctgagacatttttctgttctgtctatgt

SEQ ID NO: 7127 - DNA, 319 bp, Zea mays
  unsure (1)..(319): unsure at all n locations
aaagggcncagctgccatggataaagatagggagggctattttttgtatcctgcaaactatcttgtgcactaaattacgcgaacttctgtctgaaaaccccattgtgtctctcatcgagcctaaatgtatctatgccgacgctgttagctctaggcatgcaacctgataacaacacgcctcaaatgaaaactggtaattggtaatatgaacagagcatttcattgaacacttcttgggcgtgttttgtgctaactaacgaatcaagctaagcacctcgccaatattttggggacaaacgcaagagtccccatacttgtg

SEQ ID NO: 7128 - DNA, 97 bp, Zea mays
taacgttttgacacacagcttcggagatgtacccacgaaacattacaggcgagagcctcttcataaatatgtggagacatggctctgcagccattca

SEQ ID NO: 7129 - DNA, 435 bp, Zea mays
agcttcttcttcccttgacccactagctcttccaactccagaccctccatctcttggccatccacttgcatcctcaggccattcacgccatccactacggctatcatgtccaaaaccaccagtttcatggcatccccaccctagttccgcctcctctgtctctacctcatcatcatcatccacctgtctcccctcctgtgtctctacctcatcatcatctcccacctatctcccctcctctgtctctacctcatcatcaacatttcccacgtgtctcccctcctctgtctctaccccatcttcagactcatcctacaaacattacattgcattgcaaaacaaatattatattaataatttagttatatgaactcatacaaatattacattgcaaaacaaatattggataccctattcctatgaacgccaactgtt

SEQ ID NO: 7130 - DNA, 390 bp, Zea mays
tcacgctcggaggcaacaattatgagccttgtggttggcgtggactcctacttttctttggtgccttgaatgcaacgggttaagcctcgggtgtggagcaccttactccaagatgataatgtgctttgagtcttctgaccataagttcaaagctcacagacttgtcaatcacctcctctggagagatttgctcatacataagattctcacagactaattgtacttgagtgggattacgagaaacaagagatcttacaataaccttgaccatttcatggtcataccacttgatactctcgagggtgcatacttttttcaccatggtcttgagccagctgaatatggcttgtggaacgtcaacctttgttatggccgatggaccaccctcat

SEQ ID NO: 7131 - DNA, 423 bp, Zea mays
  unsure (1)..(423): unsure at all n locations
agctttatcaacgtagaataatgttgaaactattggtacaaatattacaagttattgctacgaatattggcacacttgtttatcttcttatatatttcttagttntggtttcttgtaacaaatctatttggtggacctacatgtgcttgtacttagatgcaatatatgaaatcttgtgttataaccttctgcttgtcattttttaccttagcacaaggtggttgttgatcattgtcttgttttagttgcttcatagcagattacctgagtggccgatgagcatttgattttactgcatatgatggatttgttcaatgtttaaggcttttaagttatgtaaaaattcttaattcttaaaaaatgctaacacgaacataaaatgacaactagtattgttgaattcaatttattttatcataacat

SEQ ID NO: 7132 - DNA, 443 bp, Zea mays
  unsure (1)..(443): unsure at all n locations
aacttcgacattattttcaagcatatcatatatttgttccttcgtcgcaacctttgaaatacataatgaggaatagagaagctactgggaggatcggaaaatgggctgccgagcttaatgaattttctattgactatgtacacaggtcctcaattcaatcccaggcgttagcatatttcatcgctgattggacgccaggggctcaggaagaaaaaacaaagatgccgaaacctgtacagtcttctgtggtggttcttggggaaccttcggcgcaggagtcgctgctatcctagtagcgccctctaaagtcagaacatgctatgcagcaagacttgattgtagttggacaaataacattgctgaatacgaagcccttctgttggggcttttgacactaaaggcaatgggaataagaagggngatctcttaaactgactcccaag

SEQ ID NO: 7133 - DNA, 486 bp, Zea mays
  unsure (1)..(486): unsure at all n locations
actcagcttaggcagcagcaaagctcttttccgccgccagcgccaatgggcatatgtgctcagggcttcnagggaagatttggggatcagccaagaaaaatctactgcctattctatggtgaagacaagggccataccaccaagatgtgccatgttaccatccagaagcaaaaggagatagcagaagctgcagcacaacagagtcagccgaagcaggtcatgcatactgcttcgtaccattcgccttacattccagaatatgtaggcaatcactttgcagcttctgttgcttcggcaagccaaccccaagcatcttggcaacagcctccaccggcaccaccaacacaacaaggtcagcagccagaagggagtcagcacactcaccttcagcgggacttcagagaggagtccgaagctcgcacagtcaataacactgtgccagagtcgaagcacatttactgacaaatatcctacctcgacagcagc

SEQ ID NO: 7134 - DNA, 415 bp, Zea mays
  unsure (1)..(415): unsure at all n locations
acctgcngcatgcaagcttctatagtcgacacacattctccttgttccatctttcttggacacaaatagaactagggctctccatggagacgaactggggtggataaaacctttttctataattcttctatttgtttatttagttcaattaaatatttgacatccattcagtaagctctttttgaaattgttgcaattccgggtaatagttcaatagaaaagtctatatcatgatcaggtggcatacctggtgttggggacttgttctcaaatgctatgaattaagaacaaggcaacataaaaagaagttaatggttaatggccttcgtccttcgaagcattatttcccttaggatataaccatctttcggacgaaggtcgtgaatgacataccttcatcatcacagtttacttt

SEQ ID NO: 7135 - DNA, 265 bp, Zea mays
tacgtcgatatcgaacaatgttaaaacaaattgggttgagagctataagcgtatatgtcctgttatcaggttgatttatatagaacgagaaggtttacgacctttgaagatctcttatatcgcattgtattctgtgcgttccacatataaagagaaagggtgtgtttgagagtgctctatggtccacatttaccgtgaagatgactaggattatgtaaatatcactgatctgtaatagatcttcttattggagctgaaacatgaa

SEQ ID NO: 7136 - DNA, 389 bp, Zea mays
  unsure (1)..(389): unsure at all n locations
tctaaagggagaacacgtgataggtttgactaacgtacaattctaaaaagatagaccttgtgcagcttgtcaagcaggtaaacaagtgggaggagcacatcacagcaagaatgtgatgaccacatcaagacccctggagctgctacacatggacctcttcggacccgtcgcctatctgagcataggaggaagtaagtatggtctagttattgttgatgacttttcccgcttcactttggtgttctttntgcaggataagtctgaaacccaagggaccctcaagcgcttcctcaggagagctcanaatgagttngagctcaaggtgaagaagataaggagcgacaacgggtcggagttcaagaacctctcagtggaggagttccttgagg

SEQ ID NO: 7137 - DNA, 323 bp, Zea mays
ttctgcgaaaaaccctctctctgaatatagggtgtttaagcatccctaaaaaactaaatactggcccacggggcctacttaattagccacataattccccccattattcctaaggcctctcgtcctaagcttaacggtctagtcctgaccatttcgaagcagtttcctaatcaagctttacattttgaaaactggtatccatggtttattgcccttctgtggaggaatctgctcccataccaattgggcggaaccacccgactcattcccgctaagtgcctaagtcacccccaagggccggatcacccttaaatcggataacc

SEQ ID NO: 7138 - DNA, 351 bp, Zea mays
  unsure (1)..(351): unsure at all n locations
tcccactatatagcatgcttctagcacatttaaaatcttcattttctaagacatgctcattaatcttagcactaagttgagctatgtgatcattttgctttttaattagagctaggtgatcatgaatagcattcacattaatgtctctacatctattgcaaatagtaacatgctcaacggtagatgtagagggtntgccagtatttaattctacaatcttaacatgtgaaaaagcatattcatctctaagattggaatattgaaacgttgtcaacatttaaacctttagccttagcaattaaactttcattcttaagtttaacgctagagagagatgcattccatttggct

SEQ ID NO: 7139 - DNA, 405 bp, Zea mays
gctgcaacttctcaacaaattaaactcctatatagtatggattacattttcccttggggggaaaaagagaactgtgtcttcagcatttagcgaaatcttgtggtgtagtggtttagaggagagaggtttgaactgcccctcctcatcagctttatccacatggcatccaaggatgtccatctctaaaataaaaagcatacgagagaggggatccccttgccgcaaccctctcttgtggtgaatgatggcccccggaacttcattgagcacaacttgggtggaggaagttgctaaaagcccacttaagatatctctccagaattgcccaaattctatttgttggagaactttcagcatgataggctaagagactgaatcaaatgctttattgatgtcgatcttcat

SEQ ID NO: 7140 - DNA, 467 bp, Zea mays
  unsure (1)..(467): unsure at all n locations
gtggaggttcttcatccncacatgtgctaagcggcgatgctccaaccagcccatgcaagtcttagccattaagcatgcatctagaccggcctcttcttttgcaaaatcaactaagtaaagtttgtcgtctagtacacccttaaaggctagtgaaccatcacatcttctaaagacagacacatctacatttgtaaataaacaattatatcccatattgcataattgactaacagatagcaaattatatccaagagactctactaaaaacacgttagagatagagtgctcatttgagattgcaattttacctaacccttttaccttgccttgattcccatcaccgaatattattgaatcttgggaatctttactcttgacgtaggaggtgaacatcttcttctcccccgtcatatggtttgtgcatccgctgtcaataatccagcttgaacccccggatgcataaacct

SEQ ID NO: 7141 - DNA, 436 bp, Zea mays
  unsure (1)..(436): unsure at all n locations
agcttatacacaagcctaactaatcctactctatatctaganacaccctccagcctcaggaacacctcgagtacttcttatcacctgcaataacatgggttcgaaaaccttgagtacggagtgtactttctcaagtcttacctaactaaggaagaatgactctcaaggatattgctggttaaaataggaatcaaggaaaggctcgagcaagaatcaacttagatactcttgcagaaatagcttactaaagtgagtccttactttcaatattttaacaccggattaaatattaatagactctagttgcatgtagtctaatttcaccatctcatcaatacaacatttattttattcataatggttacattcctgacctacgttgcaagggcagaaatcaaatctccactgtccgaggttataatagcggatccgaatc

SEQ ID NO: 7142 - DNA, 409 bp, Zea mays
  unsure (1)..(409): unsure at all n locations
gacacatagaaactcagcgggctagctcctaagctctatgcctgtagacaaatgagtatgataagcgtanggtcagcagtatgcctcctagcggcgcattaacaaaactgcctacatgtgggggtatgatgtccttttgacacggcatatccctggtgcacccctatatataaaagccattgcctgctgccttcttccctctcaccagacacaccataccgcaagtagcccagctctgcgctcatcttccctgcaccaaacctcctctcgatcagaccatgaagctcggaggacgacaagggaggctcaacagagccttgagggagaaaagggctaggttctacattttccgccgctgcgtcgtcatgctgcttcgctggagcgactagaccgatctccatcactccat

SEQ ID NO: 7143 - DNA, 446 bp, Zea mays
agcttaagagaactttttcacggatcaagctctttacgaaaaacgatctaacaccgcgaaaggggctactgttgggcctatgcttcgtcgccgaaggtcttctaagaagaagcggctttcggctgaagctgtttgtataagatggccgaaggtccctcttcatgaagcttcggtattacaaaccgacttaaagatagaatgaccttttagtccataaaggtctgagtcaatgttgtaaacttttataaggggcatacttgtaatccctcacaggctgcgccctgtgcctataaatagtgaacagtattcctttactgttcacggattctagtaactgcaatcgcatattctggaattcaaccttttgacaaggcagaggtattattgtattcaatgattggatttattaaggaaatataatataattcgtctatgacttgtttacc

SEQ ID NO: 7144 - DNA, 328 bp, Zea mays
ctcaccggagatcaagaacctgctcggcgcacgtggaccgggtaagccccttgcccgatttccaattccttgcgcgtacgggctttgtgttaccccgtgaagctccttcgtgcaccctaattgacctatgccgccgtggtttggccggtacatgaaccgccgtctaccctcgccgctgtgctcttggcatggtgctcgacccctccacaccaccgccattgggtgccgtgtgactcccgacgtactaccaccccgcggacttactgcgtcgtagcccccgcgaaaatgacgggcctgttaccggaggactcggtaattagtaatcagg

SEQ ID NO: 7145 - DNA, 431 bp, Zea mays
aagcttgaagctggcctctgcgctatgacaaaggacaatcttgtatatagccttgcatataatagtctgaaggtatgaaaattgtatatttggaaatctataatttttaaattattcttttattcttatactaattcttttcatatagggtttaatacttagcaacgctttgagagcgcacaagaatgctgaagacgagagctataatattgctttcaacaacctacgaacagaggttattaagctgaggaacgaagctttgaacaaagataaaattctgcttacattggtggataagataaaagaagacgaagcttcttctaaaacttaagctgaggctcagaagcgcgaaattgaagatctttcaaaacagttagccagagctaagaagagcgcatacttgaagagacgaaacgagaacttagcgatca

SEQ ID NO: 7146 - DNA, 390 bp, Zea mays
  unsure (1)..(390): unsure at all n locations
gacactatagaaaccaagcttctcgtttttctaaacaatgaagatattgacataatgttttatagaacaaattggtatataatacgaggagaaaaagttgccccgctggcagcttagatcgtaaataattgactattgttataagttctctcttagaattataatacctgaaaatgttgcataaatcgaagcccaattttagagtggtatgagtaattaagtaaaccatgggcaatgataaaacgagctagactatacatctctgcatataaaaatctcttcttggcagtattgtcctaatgacgtacactttactaccattatatgtgcacacattntccctatatgcttggaagcgcaatgcaaccagtgaatgtccttgtgagcact

SEQ ID NO: 7147 - DNA, 305 bp, Zea mays
tgcctaaagaatgcactctacgtgtgtcaaacatatgcaatgccgatgcttatgatgccaagctcatgttttatatacagtgacaccaagggtgttacattcttccccccataaaagaatcctcgtcacgagattataaagttctatggaaagtaattggaaaggaaacgcggaatacttctatatccttatttctggtacaaggcacgggagatgtggcggcacttctctattcacagctatacagatttacatttacatgaggctaaaagcctgggaaatctttttagataacttgagttcca

SEQ ID NO: 7148 - DNA, 374 bp, Zea mays
gggtgactatacagtatacacgtttagaaaaaaatgttttctgggactaccatatagtttttatgctgtatggcggaagtgccgaatgttatagttggtgtgataaaatactctggcaaaattgatgaaattgagcattaatgaaattgtctgttttgatgtaacatagaaagtaacttgcaggattgcatatgatccacgctagtttattctgcgctctaagtgaatagggatcaaggatatcgtacacaacagttaagtaggagcactttgatgctgcctttaatcttttaattctaaacatgataagggtttatgatattggtttctgaaagtatagtatattttgtcttgaacaactaaattgggttttc

SEQ ID NO: 7149 - DNA, 453 bp, Zea mays
  unsure (1)..(453): unsure at all n locations
ctgtgtcaaggttcagggttgtatcattcctaggttcaacttttccatttcttgacatanggtggtgtcaggggtccttattgtaaaacaatgacaggaaactttacgactcaatgcatcggccaccacattggcttttcctgngtgataatggatttccaagtcataatctttaattagctcaagccatattctctgcctcatgttcaattctgactgggtaaagatatatttcagacttttgtgatccgtatatacatgacatatattccccagtagataatgacgccatatcttgagggcatgaacgactgcaggtagttccaaatcatgagttggatagtgctcctcatgccggcatagttgtcgtgatgcgtaagttatgactcggccctnctgcattaagacacatctgagtccactgcctgatacacatcanaagggttttcaatg

SEQ ID NO: 7150 - DNA, 423 bp, Zea mays
  unsure (1)..(423): unsure at all n locations
tagctcgagacnggaacaaccgaggtatgcttcttttctctttgaagaaaacgtcaaggacttgaggattgtcatgagggaaaaacgaatgatgaaattctatacctcctccaaaagccataaccacgccttcacaaaaggtaactttcaaggtaatggtccagccacacttcacattaagaggtgtattgaatgctttgaaaaggggcacttgattaggtcatgtccctacattaaaaatggcttgattattaacaaggatgatagactttgttctaaatgctccaagaagggacacttacttagatcttgttccattaacacaaagagcattaggttataaaataaacattcactaccatgtagcagcagaaacatgaaggagaaatcttcaggcctgaaatcgctatgctcatatgctga

SEQ ID NO: 7151 - DNA, 429 bp, Zea mays
tgtatcaggttcttaattccgatagcagacaaacttgcatcattatagggttcttcagcattatagcaggttcagatgatatgcaagaattgaatgcagtgtggtaaaaaaacattcactctctctgcagttgtttatagttatacagtaacttcccaacaagtaaattaggcgggtgctaggtaaacaccaaaaaatgtgttgtgtctggtttagctgaatatttacattgggtaccacaaaaacatcaatagaggtctgttatatagagtggatagcgtatttacaatatggtaagaactaataacaactaaatgaacgatctcttcttgccctaaaaagactactttcctcatgcgcataacagtgcaacaaaaacatttaactgatatccatcatcccagcttgcatgcatgcaatcatgctaac

SEQ ID NO: 7152 - DNA, 453 bp, Zea mays
  unsure (1)..(453): unsure at all n locations
agcttcgagtttagatctgatatttatgcttctattttcttncagaagccttcggctgcctggagctcaaagttctttttctcaaaagcatctgattgctcctttatatttgtttccaaatttccgattataatttcatgctctttatcttcaagatcttgctgcatttgcaaggctttgctcaataacatactctacacaaacacaaccttcgtcagacatgtttttattagaagcaataaatgttaagagacaagtcattcaccttgaagttggagtaaaataaactaccaacgacatgttgtcgtcggtagcggctgatgtctgtttctagcttccggaatccaatactcttggacagagtactgataactctggcccctgtttggtcccgaatacactctaatttctcgtcatcaacgcctccgaagaggagtgccccacagttgtatc

SEQ ID NO: 7153 - DNA, 437 bp, Zea mays
  unsure (1)..(437): unsure at all n locations
tccgcatcactggtttctggtaacgaagctactagggcaattgtggtgggagtttctacgtatgtgctgcactgctgctatttcagtaaaggtaccatgtggtgtatgagcgactgtatgaaggcataaatggcgaaggagattaagacgacttccattgaaggtgaagagctttccttttccttacgacacgatgctaaaagccaagcctgagtttttcttcagtagctgagtaaaacactacaacctccatttttntatttgacgttttgtagttcaattttacacaatttaacgtcaaataaaaaggacggaggtagtacatactcctcgatcgagtaaaatntagaatgtatgagatcacacagctactttcanggagaatgagtcgagagactgaaattatagtaacctttacccaagaatacactacccat

SEQ ID NO: 7154 - DNA, 386 bp, Zea mays
taacatagattttctatggataaactcaacacaagagatggcattagtagcacaagcactagtttcttattcagcaaccctttatatgcgaaagacaagcgtgttgctaaaaatagagaaacgtcataatatggactaaatttcccttgagcccttaagcacaatatattttgaatgatatggataatatgcatggttattcaatgaagtctaaagggctaacttaatccatattatggtgagtgtctaatatggaataataaaatccaaattaactagatagaaaatacgttacataattttggattgttgaccatatgacaatattcattcatcttccaattagacctttatttcataataacaaatgatgtatatcctcaagt

SEQ ID NO: 7155 - DNA, 347 bp, Zea mays
  unsure (1)..(347): unsure at all n locations
acacncgcangtggtcgtaggaatgggctgtgccgtacaaggcaaagtgaggtgtatggtggctcaccgccttcgagggaagaccgttgatgagatgagtggcaatatgaagggcctctgcccactangtggcaaggagagacgcctgaaagagaaagcagcggatcatgttggtggtggtgcgaatcatgcgctctggccggccgttctgagcagatgtgtatggacactagagacgcaactggatgccgtgagtgatgaaaaaagaacgagaggcgttgttgtcgaacttgcggccattgtctcactgcatggcacagaccgggcgtctaaacttggtggatacc

SEQ ID NO: 7156 - DNA, 399 bp, Zea mays
  unsure (1)..(399): unsure at all n locations
agcttaaaaggcacttttggactgtgcattttctatttctagccggagctaatggcactgaattcttcttgtctatactttacatgttggggcttgaggttttccatttttttataatntgatatatcaaacatatatatgcatgttgatgtttgactacaattgtgtctgctctcttttcagtgatgacaaagataattaggtgctggtgtaggaacatggaacttttgccttcacagttgcagccatgtgtaattcagggttatcatctatttctacttttcttaagttattgtatatgttagttggatggcggagatatggtacatacttttgtccgcaacatcgctaacggtttgcctacacaaacctaccaaggtacatgtcttttatcttata

SEQ ID NO: 7157 - DNA, 445 bp, Zea mays
ttccaagagtcttagtttactatttttggatgaatatcttgtgagttatgagcaaaaccgttgactgctgaatgctgtccaaaaaatctgtaatggggtatttggtttgattcctgtttggctaaatacgagtaatcagtttttgattcttgagtgatgaagacttgtgacatttgaaatgtttatccaaatgtctttttgcacatggttgagattttctttcttaatgtgtgctttaaacctattacgttgggaattaatactttgatgaatttattggaactagtagttaattagaccttgtgtggttataatgaactcaataatgcgaagaaggtttagtagacatacatatctagatttatgaattaatttggtcgccttatagttataagcatgatgttaatgcccgatgattgaggagtaacagttacaattgaagtgc

SEQ ID NO: 7158 - DNA, 419 bp, Zea mays
tagcttgcctacttggtgagatgacctatgttctctttacgggtctaccggagaggacatttgattgatggaactatagtactgagtgtgcggaccatgatgcgactgtaggggaggattccaatactctataaccttcactgatgatatcagtacatatgggtatgtctacttagtgaaacacacgtttgaatccttacacaagctcagagagtttcataatgaactagaatatcagcgaggccagagaattaacgcactgcgatcagatcgtggcggtgaatatttgagtgatgagtgcagccatcatctaaagagttgtggaagtgttccacagcttacgcctgctgtaacgccttatacgaatggggtgtatgagcgacaccattggactttattagatatggttcgatcaatga

SEQ ID NO: 7159 - DNA, 448 bp, Zea mays
tcaactctatctatgctatggaatggcgtggaatctgtctaattcccttcggcccttctggcagcttctttagtcccatggacagcaatgggcccttgtttcgaatgtatcttgatgcataaatatgctggatgaagcattgcttcgaaggcatagagtgtccctcgaccaatggttgcattgtagggatactccatgtcaacaatgtcaaagataacttgttcagtccttgcgttgtggacatagccgaaggtaactgacattgtgattttgccaagtgcgacaatctgccttcctccgaagccacaaagagggtgtgtagcatcatgaatcttgtcttttggctcttgcatctgtttgaatgccttaacaaatatgatatccgctgcactacctatgtcaaccacaacattatggaccagaaatcccttgatgacaaaatatatga

SEQ ID NO: 7160 - DNA, 321 bp, Zea mays
agctgagaacacacactgtgtggcattgtttttattttagccttctgcactccgaagcgacgcacaatattacgccccaaaaatttctgaatagtgaccgaagttgttgaggctaagggcttactctcaatccacttataaaagaattctaccgcccccacaacatattttagattttcttgcgctggtggcagtgggcctagcaaaatcacgcccctgctttgcaacgaccatgtgggctatataaactaaggtagagacgaaggctgtttctgatctctcgcgcatttgtgtgaggcttcacccttttgaactcactct

SEQ ID NO: 7161 - DNA, 456 bp, Zea mays
gcataacggacactttaaactaagctacgccggtgcggtctcaatggactgagcaccttgatgtgaatagattcggtctctcacactgtatagacgtctctgtgactgacagcaacgcatagcgtagaatgagtcataccgaaatctgatctggattgggctatggagccacaacccatctcttcttcaaagcaaatatatttggatcacgactgccgtggctattttctaaagctcctgcattctagcgaacgatactaacatactgtctgctcacaacactaacaattctttgtctctgttgccctgtcaggccctcgattaacactgcataggcatggtattcaaagggaaagcatacatgacccgattaatgcttggtatggacaaagataacgctgcgcccttagatgatcttcactatcacgtatggagagctgatgtgccatgatcaat

SEQ ID NO: 7162 - DNA, 411 bp, Zea mays
  unsure (1)..(411): unsure at all n locations
agcttggacccctgggtggaagcctctttgtttgatctctctggtgacgctcttgctgttgagcccggagaacttggaacttcctcttaaggtgccctttctcttcctcttttgccctttccacctggatagccttgttggagaggtgagagaagctgtggaagtcttggctggcgaggatggtcttaagctcgggtcttaaccctctcagaaaacgggccatctttctggactctgtgctgacgtcctcaggcgcgtagcgggctagctctgtgaacttgtgcacatattcactgactgaccttccgccttgagttaactcccggaattcatcctccttgagttgaactatcccctgnggtacgtggtgttcacggaaagctgcttcnaattcttgccaggtagcatctc

SEQ ID NO: 7163 - DNA, 447 bp, Zea mays
tctgcgcgtcgatccgtcctccgtccgagcaggcgctgctctcttccacgggatcatccctgggaagcgcgtccagcccctcaggcgactcgacctcccagtctgcttcggaacaccctccaacttcctaagggagaccctgacgttcgaagtggtcgggttccgaggaacctaccacgccgtgctagggaggccatgctacgcgaagttcatggccgtccccaactacacctacctgaagctcaagatgccgggccccaacggggtcatcaccgtcggccccacgtacaaacacgcgttcgaatgcgacgtggagtgtgtggagtacgccgaggccctcgccgagtccgaggccctcatcgccgacctggagaacctctccaaggaggtcccagacgtgaagcgccatgccggcaacttctagccagcggagaatgtcaaggccgt

SEQ ID NO: 7164 - DNA, 361 bp, Zea mays
ggatccttaagtcacctgcggcatcaagcttggcatctttacttgcttctttctttgagcccctggcgtccagtcagcgatgaagtctgctagcgcctgtgactgaatcgaagatctatgcacataatcaatgttgaactcattgagttccgcagcccactttccaatccttccagtagcttctctgtttctcataatatccttcaaaggctgtgatgaaggaacaattatatggtatgctttaaaataatgtcgaagcttcctggaggccattaagacggcatacaacaccttctccaattctgtattagttttctttgataaactgagaacttcggagacgaagtatactggagcctgc

SEQ ID NO: 7165 - DNA, 454 bp, Zea mays
  unsure (1)..(454): unsure at all n locations
tgaggctatggccaacagaatgtgcatatggtcgtgctatacattgttntgcactatagactacattgagtgaagtttgaaatgagagatgataatgagtaagctgttggacagctggggatagcataaaaggttgctttgaactcgtgacctagtgattcggtgaggcaactctcaccactgcatcaggactgagaggctgcttcgaacatgtgacctagtgactcagtaagacagctctcaccactaaaaagtgcaccaaaagattctaacagctatttgaatggacagatattatcatcatttaacatcatgcacattntgaggttgaacaaacaacatttgctcggagaaaagaaaaaagataaaacagcttgtgaatagtagtaaattgtgtgttcagatattaccacgtgcgaccttaaactgcaaccgtttacatgctgtcttttat

SEQ ID NO: 7166 - DNA, 392 bp, Zea mays
  unsure (1)..(392): unsure at all n locations
agcttactcccccctgggaagggccgttcattatcgccaagattntgaagcccgggacatacaagctggccaacgatcaaggcgaggtctacaacaacgcttggaacatccaacaactacatcgcttctacccttaaaatgttccaagtcgttcatgtacctcattttctttacatacacaaataaagtctaaccatcaaggaaggatcagccttgcctcggcaaagcccgaccctcccttgggggctagaaggggggaaccccctctgcgtcaaaattttcctcgaaaaagttttctaccaagaaaggttttctgccaaaatgactttcgtgctttccgactatatcgataacggaatcctgcaaacgagtgagagtgcacgtaagcggca

SEQ ID NO: 7167 - DNA, 358 bp, Zea mays
  unsure (1)..(358): unsure at all n locations
tccnctgcacaacgatactatgcagatctcggatgtcagacacaagaagattgctccagcagcaaacattagtagctccaagcactgcatccgttatgttcctgagcccacatgtcagggctcattacccttgtacgtgcccccttagttataaaaggggaggcatgcaacgacacacagacggactgaaccgaggcatagactcttagctctcaagcttccacagcaatccaacacacagtggagtgngttattatcctctggcgttccaaccacttaaaatcacggttgcgtgagagttctcttctatcacctacaaccgaacgctaaggtccctcctaattaagattatatcggg

SEQ ID NO: 7168 - DNA, 390 bp, Zea mays
  unsure (1)..(390): unsure at all n locations
atgaagtctgctaatgcttgggactggattgaggatctatgcacataatcaatggtgaattcattaagttttgcagcccattttccaatccttccaagagcttctctgttcctcataatatccttcagaggttgtgacgaaagaacaattatgtgatatgcttgaaaataatgccgaagctttctgggggccattaacacagcatatagcaccttttccaattctgtgtaattnttctttgacggactcaaaacttcggagacgaagtacactggagcttgctttttgacttggccatctagcttcacctgtacaagtgccgcacttactgcagaatgtgaagctgcgacatataagagcaatggagcccctgacgaaggtggagttaac

SEQ ID NO: 7169 - DNA, 462 bp, Zea mays
  unsure (1)..(462): unsure at all n locations
ggatccttaagtcacctgaggctgcagcttacatgtctcgtatgattcagaattatactatgtttaaagcccatcagaatgaagcttcttcatgcgattctcacttatatgacccaaacgacagtgccacatgtaggtaggacttaaatcattaggccgaggccttttagcactaatattacagataggtgcatcatcaagatttaaaatgaataacccattcataatggatgcaaaagccacaaacatgccattcttagagatcacacaaccattgttttcactcgcaaatgaataaccatccttcatcaaacatgaaggagacataatgttntgactcatactaggaactagataacaattatttaactccaaaataaatcctgatgggaggtggagttgcatcgtcccgacggtcaacgcagcaactcttgcattattgcctacccggaaatcaacttc

SEQ ID NO: 7170 - DNA, 450 bp, Zea mays
  unsure (1)..(450): unsure at all n locations
tctaaagggagagcacattntaggattaacaaatgttcattttgagaaagacaggatttgtagcgcatgccangcagggaagcaagttggagtccatcatccacacaagaacatcatgacgaccgacaggccgcttgagctgctccacatggatctattcggcccgattgcttacataagcatcgacgggagtaagtattgtcttgtaatagtggatgattattctcgcttcacttgggtattctttttacaggaaaaatctcaaacccaagagactntaaagggattcttgagacgggctcaaaatgagttcggcttaaggatcaagaaaataagaagcgacaatgggacggagttcaagaactctcaaattgaaggcttccttgaggaggagggcatcaagcatgagttctcttctccctacacacctcaacanaatggtgtagtgga

SEQ ID NO: 7171 - DNA, 426 bp, Zea mays
  unsure (1)..(426): unsure at all n locations
agctngatgtancaacctcatgtgatgactttgtttctgaagagccaactagtctacatgctgaattgactggaaaagttgaagtcctgactttaaacaaccaaaaattgaagaattacttgactgatgcaactactagaggaaaaagtgctattgagaacaatgattttaacaatgagttggcagtggataatcaaaggcttaagaatgaggtcaagaaactaanaagtgaanatgaacatcttgcaacaagtgtgcaaaagttcaacaagggtcaatacctccaaaatgagctgcttatgaacactgttatgaaaaataacaagagtggtattggatacaatgctttngtgcaaaagaaagctatcactcaatacaagccaaagcagactcacaagcctatcanatgctttgagtgtggaaatg

SEQ ID NO: 7172 - DNA, 458 bp, Zea mays
  unsure (1)..(458): unsure at all n locations
tatacttagcggtaataaatagagatttagactattcatctgtatttgatgaaacattngaattaatgatcatgacaaccatagtttaaatagtagctagatataagttatctaatgatccttagattgtgtgcctcttaaaaattattatagtgccgtgatgtagatttgcaaatgaaaaaattaaaaaggaaatataatccatgtgcttcccgatagaaatataataaataactagttaattatctggattccataaaggttgagctagtgttatatttacgtattnttaaatgaatctatgtagtgtgtttccatgattaatttaccatatagtcttttctatgaaaatggtgaaactaaataattagtaagtcatgtcataagccaatagaatgattaccggtgtattttaattcatattatagttacaaataaagatatgtgtttggatgttt

SEQ ID NO: 7173 - DNA, 394 bp, Zea mays
  unsure (1)..(394): unsure at all n locations
ttgaagatattccagatctttnttcatcagattacccccgaagctataattaagatggggatgtttgtctgggctataagaagccagggcctggagccaagtgcgaagtgcttctgcaatatgcacaagctattatacaagacaaaggctactggcaaacaacagtaccagaacaacttcggttgttatggatttatcgctcgccccaatgcaagctacccggtgccgacataccgganaagatggcccgaggcctatatggaggaatggttctatgttaaaaatgatctgataaaaagggaagacattaaggaaattatccagcgccccgtctggtctcgcttcggactccgaaagccgaaggtggatattgaaagtgatgttgaagcatgct

SEQ ID NO: 7174 - DNA, 448 bp, Zea mays
  unsure (1)..(448): unsure at all n locations
cttggcttctccgctgtccactcgatacaccctcggggctgcctcgtatgaagttgtcttcgtttgaataggtgcccacattggcaaagctagtcttcatctttttcacgcaccccacagatttttcaaaacatctttccttggacgcgcgaagctctgcaactgttttttctaaataattnttccaatatttgatggcatctcgattagcttcagcaacaacgcatttttctttggcctcagctaattgtctccgaagatcctcaatttcactcttttgggcctcaacttgggctttggaactagcttcgtcttcttttattttgtttaccaatgaaattaatattntagctntntcaaggccttcgttccttagttcaatcacttctgaacgaaagttgntcagagccattgtacacccttcatcctcgatgnttttctatgctct

SEQ ID NO: 7175 - DNA, 437 bp, Zea mays
  unsure (1)..(437): unsure at all n locations
agctntgggacaacagcaaagctctgtcttcttccagcgccaaggggcaaaggcgccaggggcttcnggggaaggtttggggatcagccaaaaaagaatttactgtctattttgtggtgaagacaagggtcataccaccaggatgtgccacgtcaccatccagaagcaaaaggagatagcagaagctgcagcacaacagagtcagccgaagcaggtcatgcacactgcttcgtaccattcgccttacatcccagaatatgtaggcaatcactctgcagcttctgttgcttcggcaagtcaaccccaagcatcttggcaacagcctccaccgccaccaccaacgcagcgaggacagcagccagaatggagtcagcacactcaccctcagagggacttcagagaggactccgaagctcgcacagtcaatagcactgtgc

SEQ ID NO: 7176 - DNA, 274 bp, Zea mays
taactgccaacatagcgagtgagaaagcttaactctggctcaaacttgataagttctatcgtttaagctttctgtacttaaatttcatttaccatgcaattgttagttcttgagatacgcatttgggactgcacttagggggagtattcacaactcaattcgttcatgaaacctctattgcagaacccacatgcaaatctcaccatttgcctatattctctataaaatatctatcctattgcacaatatcttgaaaatatgagagaaatgtgag

SEQ ID NO: 7177 - DNA, 384 bp, Zea mays
  unsure (1)..(384): unsure at all n locations
agctnggatggaggaatggntttatgtgttttattatttgaaagcgagggaagacattaaggaagtcatcatgcaccccatttggtcccgcttctgccttcgaaggcccaagatagaaattgatgagacagatgaagcatgtcagagggccttcagcactgtttgctcctttattgggacaagagatttgattcaagaacatatagcctttatggtatggccgcttgtagacagctgggaaatgccgaaggagaccaccaccgactctagcgaaggtggactagtcccgctgaagtataccttcagattcanggagaagtttgatgagccaaacgacgattggctgaagtgtatcgaagctacaagtgatgaactgcttgagca

SEQ ID NO: 7178 - DNA, 459 bp, Zea mays
  unsure (1)..(459): unsure at all n locations
tgagagggatttttcacggttcaagctcgttacgaaaatcgatctatcgccgcgaaaggggctactgttgggcccatgcttcgttgcgccgaaggtcttgcgtgaagaagcagcttcggctgaaatcgtccccaggaaatggccgaaggttcctttttatagagcttcggcgttgcaaaccgacataaagatagaatgacctttttatccatagaggtctaagataatgttgtaaacttttgtaaagggcataattgtaattcgtcacaggctgcgtcctgtgtctataaatagatgaacagtacccccgtactgttcacacgaacttggcatttgcttttgcgtcacgcttgtactttntatcttctctcangaccgaaggtacatttgtaatctgaaatcatttctatttttccatgttaataaaatagaaatgattctatgatgatgcttatatta

SEQ ID NO: 7179 - DNA, 432 bp, Zea mays
  unsure (1)..(432): unsure at all n locations
agcttgagtcggtcattttgcaaaggattatttatgctcanaaggataatctgggtatgaagcacatacgggagagaataaaggctggaacagccaaatgtttcaaggaagacgatcaaggtgtgatatggtttaataaccgcatagtagtgccgaagaatgaagaactccgccagcaaattcttgatgaagcacatcttagtcgttattctattcatcctggaagcactaagatgtaccaagacttaaagcaacattactggtggacgaagatgaaaattgaaattgcacgctatgtggctaagtgtgacacttgtagacgtgtcaaagccatacacatgacaactgccggtccattgcagtcattaccaataccaacatggaaatgggaagacataagcatggacttctgagagcacctagagggggggg

SEQ ID NO: 7180 - DNA, 459 bp, Zea mays
acgtgacctatgaaactcagcttctaagggtgagcacattttaggattaaccaatgttctatttgagaaagacagggtttgtagcgcatgccaggcaggaaagcaagttggagcccatcatccacacaagaacatcatgacgaccgacaggccgcttgagctacttcacatggatctattcgacccgattgcttacataagcatcagcgggagtaagtattgtcgtgtaatagtggatgattattctcgcttcacttgggtgttctttttgtaggaaaaatctcaaacccaagaaaccttaaagggattcttgagacgagctcaaaacgagttcggattaaggatcaagaaaattagaagcgacaacgggacggagttcaagaactcacaaattgaaggcttccttgaggaggagggcatcaagcatgagttctcttctccctacacccctcaacaaaa

SEQ ID NO: 7181 - DNA, 427 bp, Zea mays
agcttcatgcaactgctgccaaaaatgagatgtgttctgagtacctctatctgatactatcttcttcggaacgccatgcaagctcacaatctgagccatgtatagttcggctaacaccgcgctgttgtaagtggtcttgactggtatgaaatgggccgcctttgtcaaacggtccactactacccaaatagagtcataaccagtacgagtgcgaggcaaaccgactataaagtccattccaatctcatcccatttccactgaggaatctgcaatggttgcaacaaacctgcaggtctctggtacatcttctcactaccagggtgtatagagtatgctgtctcatgggcttccttgagaatcagttcccggatcaatttcatattgggaacacacagtctattcttgaaccataccactccttccgca

SEQ ID NO: 7182 - DNA, 452 bp, Zea mays
  unsure (1)..(452): unsure at all n locations
tcgagaaatggcatggcattacactgcaaaacccagcattacctaaaaaggcacaaagcatgcacaaccaggtaaccaaaagtgcggtttccttcctcccagaaatgtacaaaaggataaggccaggcgtacccaaaaagcaaatactgtggggcaaccccgcttatcgatcatgagttaggaataatgacgaggcattcacaaactgcattttcttagcaccttcaaatgccgcaatttaaacgtttgctgtgaaaacgaggaattaaacgagcatcaatgtatccctgcagaccgagaatcgattaatgacgaatccaggaagaagcgatttcccatagccgccaacgggcacggcacatgcacggactcaccggaaccgcatcaagcagaatccgacccagatngaacagaacatggcgctggcgcccagaacgggagcatgcacatgc

SEQ ID NO: 7183 - DNA, 427 bp, Zea mays
agcttgaaccgagagcccacgtcatctgttaagccgaatcgcgctcaccggagttcccgaacccgccggcgcgcgtggaccgggtaaacccctttgccattttccgattcctcgcgcgtatggcctctgtgtcatcccgtggagctcctcgtgcccattgattgaactcccccgccgtggtttggccggagcaggcatcgccgtcgacctccgccgcctgcgcgcgtggaccgagcagctccgaccgccgctgacgccaacccgcacatcgccgtgaccgtcgcgacctcctgaacctcaccgaccacctcgtcggacctacctcgccgccggtaagccgcgccgccctttcttttaccgcggctactgtttcagtagggggagggaccgcgggtgagagggaaagaaaacccaggggttaagtgca

SEQ ID NO: 7184 - DNA, 265 bp, Zea mays
gattctctcctagctacgggtgcatacgatcagcgaaagctcgcaccttatgacaagtgaatatgcctcggccacaagtggggctgagcttcctggcaccacaccatgctcatgccgcatgatgcggaaaacccactaggttcctacaacaatttggctaggacgtggaactagatgccctacctcatacgcagtcgaagagttgagctccttctgcatagccactacccaatccgaatgttgaagtgcttcctctaccctgtgt

SEQ ID NO: 7185 - DNA, 441 bp, Zea mays
  unsure (1)..(441): unsure at all n locations
agctggcaaaagcactacataacttttattatcatcaagaagtgattccaggtttaatcaaatcaaacattacagtttttaaaatctgttttgacagtggacagaacacagcaaccaagttctaaaattcataactcttaaaccgtcaggcctttagttatgaaattttaacacaagcaagatcagaaaagcatatacaactttcttataatgaccatgaacagattgcaacattaaatttaacaaacaatacagtttctgaaatctgtacagaatttggacagattcagttactgaatttgtaaaaagcataactcctaaactgtcagacctatggctgtcaaattntaacacaagtaagataataaagttatctacaactntattgtgaccaccaataactaattccaagaataacttgagcaaccattgcaatctctg

SEQ ID NO: 7186 - DNA, 437 bp, Zea mays
  unsure (1)..(437): unsure at all n locations
ggtcttggctcatcttctttcttcatccaaatttggtgatagcccgagtagcagtccaataggctcatgagtttcgaagaagctgctgcatctacaagggagtctattcttggtaaagggaactcgtccttcggacatgccttgttgagatatgtgaagtcaatacacattctccatttcccattagccttcttcaccataacagtgttggctagccattatggatatgttacttctctgataacgccagcactgagaagtctctttacttcattccgagcacctttggctntatctttagacattttccgaagtcttgtttccttggcatgaaagatggatccacattgagtgaatgttcaatgacatctctgttaacaccaaagagatcattagttgtccaagcgaaaacatctttngtattgaacaaaaatctt

SEQ ID NO: 7187 - DNA, 430 bp, Zea mays
  unsure (1)..(430): unsure at all n locations
agcttctaaagggggagcacattntanatctaacttatgttcattttgagaaagacatgatttgtagcgcatgtcaagtagggaagcatgttggagttcatcatccacacaagaacatcatgacgaccgagaggccgcttgagctactccacatggatctatttggcccgatcgctttagcatcggcgagagtaagtattgtcttgtaattgtggatgattattctcgcttcacttgggtattccttttgcaggaaaaatctcaaacccaagagaccttgaagagattcttaagatgggctcaaaatgagttcggattgagaatcaagaagattagaagcgacaatggaatggagtttaaaaactctcatattgaaagatntcttgaggaggagggcatcaagcatgagttgtcttctcctacacacctc

SEQ ID NO: 7188 - DNA, 448 bp, Zea mays
  unsure (1)..(448): unsure at all n locations
cgctntatatattntcttagaggaaggcaaatcgatttcttccttctccatttcgggtgcaattataacctacagttgttggatagctcttcccccatcctacagcagcatacagctcctagttctcgatgaagaatccaattgttattattatcctgcatcggaaatgacctagcggccattgtgcctaacctggtattgttaactcccatcttagaaaaaaaacattttgaattgttctggcacaaaacagaagcctttttgtttggcttgataggtggtggtagaatgacctgctagagtgtcttatctagttttgaccatctatgagattaaaaattattgtttttctatacatggtgtaaccaagtctctatagcagtttcagcaagggagttaagtaataaatntcagaatgttcatattagagagtagtactaatatttcg

SEQ ID NO: 7189 - DNA, 406 bp, Zea mays
  unsure (1)..(406): unsure at all n locations
atgagaagtggtcacccaagtttttgtgatgaagcactaaaagaccaatcaaagaaggaatccatgtgggagttcgcaagagaaaggtttgcatgttggcatcaatgcttcctcaataagctagctgccaagcgcaacctaaaagcctaaagataattctttgagtagccagaatcagcgtttgcaatcagcaaccagatgcccctcaaaggccagaatttgttgaagctatatctcctcgaagagtctgcaaagtgaagatatgtagctgaagtaaagctatacccataacccttctaagctgaatctcgaggacgagatttcttttaagtggggtagatttgtagcatcccaaaaattaaaatcttgaaattttctcanactcgctctaaactcaaaatgaatt

SEQ ID NO: 7190 - DNA, 482 bp, Zea mays
  unsure (1)..(482): unsure at all n locations
cgtgacctataaatactaagctntacaacagttcgacccgaggacctccctatactntattctttacgcctctcctcttgccccttcagggtaaggtaatctctccctagctttcctaattacttggccaagggcgtcccattccacccttgtggtagcactgttttcccaagtggttctccatgttccaattaacaatatgatcttatcatgaataataattaaacaacaacataattggaacatgatcataataaaacattagttttccaaaactaggtagagcaatagcaaatctacccaataattcatctgtttgcaaggtgagggataaataatgctaggaaaacatattaggtcccatcaaattaatctgaacatgtcacagtgattaacagaaacattattaggtaaagaaaagtgatcaagggcacaacttgccttagacttgagattcacaggtactcacttggtcttcaagt

SEQ ID NO: 7191 - DNA, 135 bp, Zea mays
caccaaaccagtccgggggcgcaccagaccttattcccagaggcgtctgcatgaggcttgagtagcctagtgcaccggaccaattcggtggtgcaccgatccactatactagagaacgcttcaggagcgcagatg

SEQ ID NO: 7192 - DNA, 441 bp, Zea mays
  unsure (1)..(441): unsure at all n locations
ngtgagctgtgcttaattacttaatatgtaaaataatgataaatattgtataattttatagataatcagtttgtttcttagcgtttcatgatagacatataacaattcataatttagattattcataatgataaatgatatttatatatttcatatntatatactaataattcactatataatgtaattatatatatcagagtgtggctccgagccgagtcatgcctatatctccggctagtgaaatgagcgagccaccgagctgcaccgagccgagctcggctcggctcgtttctggccctacttaaagagacggtggtctctggacgagcctagntttttatttttaatcctttntaaaggaaatttttaaaaatagtcctaaccgattattttaaaaatataaatcacgcctattatcatgtcatcactaaaacacta

SEQ ID NO: 7193 - DNA, 377 bp, Zea mays
  unsure (1)..(377): unsure at all n locations
gtcatgcgtgcacactactgtgcagccaagtgatgttatgtttgaacatttggtgtgcaatgggatacttgagaattatgaccaataagattttcatggagatacttctgggcatggaaataataatatgggtcaaaatagttgtagtaacgaaagacaagttaatatgacgcacatgattcatgatacaatacaacacatgtatgataacacacctatggttgatggcaatgctcctacgaaagggtcctggttggatgcagcaaagttttataagatgattgaggaatcaaataagctgctatggataggatgcgagttgacaattctgactntactggtgcttctatttaatataaaatcaatgaacaaatgga

SEQ ID NO: 7194 - DNA, 431 bp, Zea mays
  unsure (1)..(431): unsure at all n locations
ttgaaactaagcttanggaaaagtataaatgaccccaaataacttgaatctcttttatacccttgggataccagaaaccctaattagaaccctggaaaaacctaaaactaaaccctaggggcttatgtgcaaaattagtccacttttgggctaaaatgcaaaaaccaagccaaataagtattttaagtcaattggttcacaaatatgtggacttgaaagccaaaccctaagttttggacttaaatgcaaaatggacctcatttgagttctatactaagtctgaaattcagtgttgaaggctccactttggggctttgtaactggcaaagcatatggtttttaccctatgtcaccacatcaaagttgaagaccaatcataggagaacaactttgtttaaggattcaagccatggtcttatgtgaaatttgga

SEQ ID NO: 7195 - DNA, 438 bp, Zea mays
  unsure (1)..(438): unsure at all n locations
agcttaacgacgatgagtgtgtctctcagctggttttttatgagatgangcgcgcgaagactgaagcttttaaaaaataccaagactctgcggcggcatcctatgagcagcttgatcgacgagttgatgaacttgttacacgcatggacgtattggaggctcgtcccccaccaccaactccagccccatctcactctcctgtggacgatgacgacgatgatgacgatgtttatgcaccgctgccacaacgcctcgcacgtaatcgacaaggtatgggaggtaatggtagaagtcgtcatcataatcctcaatcagaccatgatccatttgctaagattaagttctctattccaccgttcatgggttcttatgatgctgaagcttacttagactgcgagatgacggtagaacaaaaaattaattttcatattgtttctg

SEQ ID NO: 7196 - DNA, 496 bp, Zea mays
  unsure (1)..(496): unsure at all n locations
tacgcgacctataaaactcagcttcataccagctgtggcagaaccgcctgaattattccaacttaagtgtccaagttccaccttagaggctggaccacacttaaataggaataaaacgtcagttccttggatctggtctgacaaggccactaacaagatcaagtaccacgtactcactcgaaggtgaggcacagagcaaatacaataaagcataaaaccatacatcaaaggagtacttaaaattattacaacatcatcggagtttttcaaaagtagtgatcattgttcggaatacagcggaatataactaacggtaaataaacagagggatggggaagcctagcccatcactcctcatgctcctcctctgctgaggtagggtcccactcgactgtccaacccggtggcaagatgaacgaccaagtcactccaacaaccatatnctncagagaacctgtannaaattatgccacaagcaggctgagtatactaatac

SEQ ID NO: 7197 - DNA, 459 bp, Zea mays
  unsure (1)..(459): unsure at all n locations
ggatcttagagcacctgcggcatgcaagcttcctccagcattcttgagcctctcatttattctaagataacaataggtgccactaggagttatgaagctagtctttggctcatcctccttcttcatccatatttggatgatattcctgagtagcaatctagcagactcaagctctgaagaagctgttgcatctacaagagagtctattcttggtaatggaaattctgcctttggacaggccttgttgagatccgtgaagtcaatacacattctccatttgccattggccttcttcaccataacagtatttgctagacactctggatatgttacctctctgataacaccggcactgagaagtcnttttacttcattccgagcaccttcgactttatcatcagacattttccgaagcctttgctatcttggcctacaggatgggttgacattgagtgaatg

SEQ ID NO: 7198 - DNA, 434 bp, Zea mays
  unsure (1)..(434): unsure at all n locations
ttcactgacaacttccagagcacatacgtgcgctctttaacttctgngatctccgaagctgccgctaggcaacgagagaatacctgcgggactacattcggtgattgtcgaagcagtgcaccgagctgcccaacatcactgactcagatgtcatcggcgcgttccttgccggcaccacttgcctcgacctagtgagcaagctgggtcacaagactcccaccagggcgagcgagctgatggacatcgccaccaagttcgcctctggcctgtaggcggtcgaggccatcttccgaaaggacaagcagcctcatggacgccagcaggaagacgtccccgatgcgttcgctcagcgcagcatgaagaataaaggcaagaagaagtcgcatacgaaacgcgccgccgccgacgcagatcttgtcgccgctgccgaacac

SEQ ID NO: 7199 - DNA, 442 bp, Zea mays
  unsure (1)..(442): unsure at all n locations
agcttctgngcccagtgccaccatcatatttntgcacctgccctggtccacagtcaacagccagaagggcaccaccacgcttagcaacagagcgaccttcaggaggactccgaaggtcgcacagtcaacaacactgtgcctgagtcgaagcacatctattaaaggtgccatggtgattcgattaaagaatatcctaccctgatgtatcttagttttttatgccattttattttcttgcatgaaaaacaattcacgaaggattaatttctaatttgatgtaataataccgtggtcgcaccatcgagtgtggagcgcatcgcctcaacaatacttcagaaactacaaagtcgttcctaagggagcgcagagtaagttctgaagctacaaattcattcctaagggagcgcagagtaagttctaaagctacaaagtcgttcctaag

SEQ ID NO: 7200 - DNA, 474 bp, Zea mays
  unsure (1)..(474): unsure at all n locations
acggacctataaaactcagctatccttttcaacacaacatccttcaacctcttcctttttcttctttagaagctntntgagtgtccccattccaacatgtgctaacctcttatgccataactatccaagtaatgtttttgtgaagaggcaagtccttagattagcatccttagaagtgaaatccactaaatataattattgtatctaaacccttgaatatgacatgtcgatcatccactttagtaggggtgtaaatggtacgtatattatccaagcattcgaccatccgaagaggctaattattcgactggatagttttttcggatattcgtataatttttgaatttcggatttggactcggatagtacaacttgaatatcgaatacggatatgagatgagtgatatccatcggatttcggatatccagatatcttctcggatacctatccagatntcagaatttggatatctg

SEQ ID NO: 7201 - DNA, 432 bp, Zea mays
  unsure (1)..(432): unsure at all n locations
agcttgtaggaaagacgtggaaagatcttttgttgttcttcagtctcgctncgctatcgttaggaggccagctcgtttctatgacgagcacactcttggactaatcatgagggcttgtatcattatgcacaatatgatagtagaggacgagcgtgaagacgaagatgatttcaattatgatgaggtgggagaaaaggttgaagatttctcgtgacgaaacaccagaactagatgagttcatacaaaattatacgacaataaaggataaacatactcatagtaagcttcaagatgatctcattgagcacttgtggcaacatcatccagacctctacaaataaattttttatgttcatctgttctttggatactnttactttaaataattaacatacattctgtaatttcttggattatgttctagttataata

SEQ ID NO: 7202 - DNA, 444 bp, Zea mays
  unsure (1)..(444): unsure at all n locations
tgtaccanaattctatcgattattatccactcttatgtattgtgtttgcacatatatataacgtatgcatgtatgtatgtatgtatgatcaagacaaccagaggcggcacttgcattgcataaaccgtggggaggaagaaggggagtccggaggggagagaggtaaccgagcctgnggtgcaatcacatacatagtactatgctgtgcatattggaggtagagatggcaatgggtacccgcgacccgatacccaatgggtatttactccattatggtatgtatgtgggctaaatattctacccgtgggtctgttattgcgcaaaaattttcacccaatgggtaaacgggtattagaacgttctgccttcacccatacccgtttacccgtgggtataaaatacccaatataaacttatccgaagcatgaacttggactatagtca

SEQ ID NO: 7203 - DNA, 384 bp, Zea mays
agcttatatgttttatctgaatcttgttctcttcttatatgccaacacttgcgtgcccaaatttgtgttggtgcaagtgcaattctatggtcaatatggttgtgcaggaatgaaattatttttgacaaaaacgtattccattcttatttacatgtcattttcaaagcaacctactggacaaggctatggagcttcctgcaaaacaaggaaaatgggcaaattctcaaatgggcttgctgtatattggagacctttgaatagagatttttgccaatcatgggtggtgttggggaccattagcatcctaatgtcctcataaacatgtttattagtgctcttggagataatgtgtgacaggtatgtcgactatttctgcatacagat

SEQ ID NO: 7204 - DNA, 444 bp, Zea mays
  unsure (1)..(444): unsure at all n locations
ntaagctctntgacaattaaatcacttcatctagtttttacatagatgcattaaagcatgagtgaaatnttaagaggttaaactaggtatgaagcagggataaatgcaaaggacatgctttctcttccttatgtataagatatgcaaagaatgcttataagaggaagatttaggtacaagtttgaatgaaaggaagtggttttacccttttgtaccttcacatagagacgctctctttattgtgctttgtctttagtcttggttgcttaagacctatacccaatgacaatatatggaaatactttgcacaagagagagttctacaactagcgatctttttcaagttattgttagcatatatcaaatggatcacaagttgcataaatgaatcatgaaatctcctttttccttagtgcatatcaagatagatgtcaattaaaatta

SEQ ID NO: 7205 - DNA, 424 bp, Zea mays
  unsure (1)..(424): unsure at all n locations
agctntatcaaggagacaaaatagagatgtattttcaagtangagtacgaagacaaagaattcaatatatcaaggtagatattgcgcaagggtggaaatacaatggcaagacaacaaaggtataagaagtcaagggttatatagcaatattagggattagaaaactacttataatataatataatatcgccattaccgatctagtcaaaaatcttaatactaaaaaaacaatcatatcaccttagccaagaagtcaaataatagatccaggggatccataacaaaacttcttgaggagtggggataagacagagaatagggcatcgtcgatagcttcgagatggtttcttctggcaaacttcgcttcaagttccgcaatcctagcttgatcatcttgcaatgcttctcattaaaaccttctgat

SEQ ID NO: 7206 - DNA, 320 bp, Zea mays
  unsure (1)..(320): unsure at all n locations
atgaaactcagctccgatctctagcgaaccgtaagggattttttattttcagatncacgggtgaataggctggagctctattccgaaagagtttaagcattcgccaactctttgcccaacgtcttaatctcagcttgcgctctatcacgggatcctcttgctgagcacaacaactcatcgcgttcttttaaggaatcctcaagttgtttgatcttatcttccaaacccttgacggtaacttcgttattcctgtcctcgtcatcttgttgcacctttaaagctttgctcagtaacaaactctgtgaaaacaaactcaaagg

SEQ ID NO: 7207 - DNA, 422 bp, Zea mays
  unsure (1)..(422): unsure at all n locations
agcttcatgattntctaattntgtttgttgttttatacaattntaaacaactggattgcaagttcgttgtcatgtttcgtgagcatggtgtttgaaaattccagtttgtttctgaaatangttgtaacttgtgctaataacattaataggtcgtaacttgtgctaataacatgtctatgctgaatgttttgctctcggcaaaggaggtctgtgtcgatagtcctagttcaccgatagtggcactcgacaaggctttaccgagtgcccgataaattgcccttggtaaagcgtcgagcactcgacaaagtgctggattctagtagtgatatataacagtagaaacggtttatcaaacgctttttgagttggcacgattacatggtcactaagacgcacaacacagagtctaaagctatccttta

SEQ ID NO: 7208 - DNA, 453 bp, Zea mays
  unsure (1)..(453): unsure at all n locations
tctagaagcactgatcatttntatcattgataatcaggtgcccgacatgcaaatatgtgatctcctctgatgatccggaagattgggactataggcagttggataatccacgtcacttgctgcatggtattgtacatgacaatgggtttggtcaccttgttcggataaatggcagagagggtggctctagtcttctgacggggattcaactgatgggtttctgggattggctctgcagataccttagagtcaggtaaaaccgatttcctttatttctgaccacaatgtgacaacggggttagcagtttatgagttcacatgagccatacttatgattatgcactgcgtgcatgaatcanaaatcaattttcttttccaattatattcaagctatgaaatggatggacactggcagaaatagaagactgtccagtgtgctctcttcttgaccat

SEQ ID NO: 7209 - DNA, 410 bp, Zea mays
  unsure (1)..(410): unsure at all n locations
agcttatgaagattcttcatcccaacatgggctagtcggcggtgccagagccaacccatgttagtcttagcaattaagcaagtgtcgagttcagctttatcaaaatctaccaagtatagctgaccctctaacactcccttaaatgctattgaatcatcatttcttctaaagacagtgacacctacatcagtgaatagacagttgtagcccatttgacataattgtgaaacggaaagcaagttgtaatctaaagaatctacaagaaaaacattggaaatagaatggtcaggagatatagctattttaccaagacctttgaccaaaccttgatttccctccccgaatgtgatcgctcgttggggatcttggttnttctcatatgaggagaacatcttcttctcccctgtcat

SEQ ID NO: 7210 - DNA, 444 bp, Zea mays
  unsure (1)..(444): unsure at all n locations
tggctcctggttggggacttcaacttatattctccgactctgtagacagaaataagcatgggggtgatattaacctaatgctgaagttcaatgaagcaataagcaatttagatttgattgagatcccccttcacggcttagcgtacacctggtcgaacaggcagagggaacccctcctacagaggctggattggtttttcatttctcaagaatggtcgatcgtttatccggattcctgtgccagaacgttgccgagagacatttctgaccacgttccttgcctggtctcttttaagtccaagatccctaaacaaaaaaatttcggtttgaaaacttctggctagaattggacggcttcttgaatctctntcaatccacgtggactgggctcccttgccttcctgtacaggctaanaacctgactgctaagtntaaatgtgttcg

SEQ ID NO: 7211 - DNA, 312 bp, Zea mays
  unsure (1)..(312): unsure at all n locations
gtggtatcctaaccatgtttacgaactctctaaggcgctttatgggctcaagcaagccccaagagcatggtatgaatgcctaaagagaatttcttatcactaatggcttcaaagtcggaaaagccgatcctactctattcactaaaactctcgacaatgatttgtttgtatgccaaatttatgttgatgatattatctttgggtctactaacgaatctacatgtgaggaatntagtaggatcatgacacaaaaattcgagatgtctatgatgggagagttgaagtacttcttgagatttcaagtgaagcaac

SEQ ID NO: 7212 - DNA, 452 bp, Zea mays
  unsure (1)..(452): unsure at all n locations
attgctaactgtcccgaanatgatagtgttcattatcacgggagcaagagggaaaagaagaagcattacaagaaggccaagggcgaggcacatatcggaaaggagtgggactcggattgctcctcttccgactccgacaatgaaggactcgccgccactgccttcaacaagtcatccctcttccccaacgagcatcacacatgcctcatggctaaggagaagaaggtatgtactcgagacagtactacttatgattcttctagtgatgatgaatctagcgatgaggaaatagactactctagcttgttcaagggattggatagaaataaaattgataaaatcaatgaattgattgatgcattanatgagaaggataaactcttagagaaacaagaagatntattatatgaagagcatgantaaattgtagaagctcanagatctcatgctct

SEQ ID NO: 7213 - DNA, 438 bp, Zea mays
  unsure (1)..(438): unsure at all n locations
agcttgtggaggaccagatcatcgaagcatattattttttggatgagaagtggtcactcaagttttgttgatgaagcaccagaagaccaataaaggaaggaatccatgtgggagttcgcgagagaaaggtttgtgtgttggcatcgatgcttcttcaataagctagctgccaagcaaaagctagaagcctgaagatgatatttgagtagccaaaatcaacgtttgcaatcggcaaccggatgctcctcaaaggccagattttgttgaagctccgtctcctcgaagagtctgcttaagtgaagatatgtagctgaagtaaagctatacccataacccttctaagccgaatctcgcggacgagattcattntaagtggggtagatttgtagcatcccaaaaattcaaatcttaaaatttcctcanactcgctctaaattc

SEQ ID NO: 7214 - DNA, 459 bp, Zea mays
  unsure (1)..(459): unsure at all n locations
tgtgaagattcttcatcccaacatgtgctagtcggcgatgctctagccagcccatgttagtcttagcaattaagcatgtgtcgagttcagctttatcaaaatctactaagtatagctgaccctctaacacacccttaaatgctattgaatcatcacttcttctaaagacagtgacacctacattagtaaagagacagttgtagcccattttgcataattgagatacagaaagcaagttgtaatctaaagaatctacaagaaaaacattagaaatggaatggtcaggagatatagctattttaccaagacctttgaccaaaccttgatttccatccccgaatgtgatagctcgttggggatcttggtttttctcgtaggaggagaacatcttcttctcccctgtcatatggtttgtgcacccgctgtcgagtatccaacttgagcccncggatgcataaa

SEQ ID NO: 7215 - DNA, 395 bp, Zea mays
  unsure (1)..(395): unsure at all n locations
atcactatttaggggtaaagcctttaaccagggtcctatttgttaaacattaaaaccatacaaccttgttgaaattttttgctaatggatgcactctaggtgtgtcaaacatatgccatgcccatgctcatgatgccctgctcaagttttaattatagtaacaccaggggtgttacaacggcggcccagtccacccggatgtggtgatcctcgcagaagtccaggaactttctgccggtgaactgggtgccattgtcggtgatgatggagttcgggaccccaaagcgatggatgatgttggtgaagaacgccatcgcttgttcggacctgatgctatntaggggtcggacctcgatccacttggagaatntgtcgatggcgaccagcangtgcgt

SEQ ID NO: 7216 - DNA, 383 bp, Zea mays
tgaagccatggtaagtagcataggcaagtaatatacgaattgactcatgccttgctacgggtgcataggtttcatcgaaattcaaaccttcgacttgtgaatatcccttggccacaagtagggctttgttccttttcaccacaccatgatcatcttgcttgttgcggaaaacccacttggttcctacaacattttggttaggacgtggaactaaatgccatacctcattcctcgtgaagttgttgagttcctcttgcatagccaacacccaatccgaatcccttaatgcgtcttccaccctgtatgtctcaatagaagacacaaaagagtaatgctcacaaaaatgtgcgacacgagatcgagtggttacccccttatgaata

SEQ ID NO: 7217 - DNA, 344 bp, Zea mays
  unsure (1)..(344): unsure at all n locations
aagcacacgctacaagatgatctgatcctgcaggctcgggtcttcacgctgaagggagccgtagcaccctcggcatcgacgacgtcttcagcaaagcccgacccagcctcgggcggcgacgcggcccagggactcctctgggaatccggcccgagcaggcggctcgaccggttacccctggggcctcggtcaaccggcttccaagggcgccagcccgacccgaggcctcgactgatcgacttcngcgtcngctccgctgacggacaacacgactaggctccggccaaccaggttcccattctcgagccaacttcgcctctgttcatactgatatcgctacccct

SEQ ID NO: 7218 - DNA, 470 bp, Zea mays
  unsure (1)..(470): unsure at all n locations
tctaagggagaacacgtgatanggttgactaacgtgcattttctataagatagaccttgtgcagcttgtcaagcaggtaaacaagtgggaggagcgcatcacagcaagaacgtgatgaccacttcaagacccctggagctgctgcatatggaccttttcggaccggtcgcctatctgagcatatgagagagcaagttgttgattgtgatgatgtagatgaagaagatgttccgacggccgctatacggaccatggcgattggaaaagtacggccacaggaacaagatgaacgagatcaaccttcttcctcaactatggtgcatcccccaaccgaagatgacgaacaggtacctcaagtggaggcgcttgatcaaggtggagcacaagatgatcaagtgatggaggaagaagcgcaaccggcaccttcaacccaagttcgagcgatgattcnagggatcattccgtcgatc

SEQ ID NO: 7219 - DNA, 424 bp, Zea mays
  unsure (1)..(424): unsure at all n locations
agctnnggtaagttgattggtaagtttatttttgtgccttactgatttccctttaatttcttagtgagagtttattaaggtttcttagctgaatcattacagtggcttcttactggtgtataagtctctgtctcaaaatttaaggtttaaaaagtgagtggttctctctgtataaaattagcaaatattaaggcagagggggtgtttgaactacaactaccttttaacagagggttattttccaagacttatttttgctggcatctagatgttatataatgaccttgtacaaatntttagccactaatacccattaagttatttactatgattntctaaagtttctagtcaaaggggtgctttctactaccactatanttgaaaaatatcaaaaaatagatctctaaattttgctatcttcttc

SEQ ID NO: 7220 - DNA, 444 bp, Zea mays
  unsure (1)..(444): unsure at all n locations
tgtggcgtccttgggcgtcttgtcgcagccgatgtactctttctcccacttggaagtctcgtggtcgaacccttcgggcgtggtagcgtcgcacagactgctgataccgtgccgaatgtaataaggctacgtcccgagcctcttccagctggtccaatgaatcctctcggctggtctggttgctttggtcgttgtaagcctttgtcctcggggaaccgtattccaagtccgtgggtaagatggcctcagccccatagactagaaagaacgacgagaaacccgtggcccagctcggcgtcgtcctcagactccaaaccaccgagggtagttcttttatccaccgcttgccaaacttgttgaggtcgttgtagatcctcggttntagtccctgcaaaatcataccgttggcgcgctccacctgcccatntgtcattgggtgagcta

SEQ ID NO: 7221 - DNA, 434 bp, Zea mays
ggatcttaagcaccgcggctgcagcttatataatccaaggtgtattctttatatacctcctcataggggaaataccaaaatccatagttagaaacatcattgatagaaccatcatcatcatctgtaaccaaatccataaatggaaccatagtatctcgaaccatctgtatctctaatcaaagaggatcccaatgccgctcttaaccgtgagcacgactgatatattagtttcattcctctacagaggtcgcacactttacccatgagacgtgattctctttttgcccgaggagcgctactcccactgatcacttcctaggtggtctggcagggtatcactacatagcttttacaaagattcccctggtgtatagccacccgttagggtgcgcctatcgtacagacatagtacacctccctaaggggtgactaac

SEQ ID NO: 7222 - DNA, 409 bp, Zea mays
gagctctctggtgacgttcttgctgaggagcccggagaacttggaatttcctcttgaggtgccctttctcttcctcttttgccctttccacttggatagctttgttggagaggtgggagaagctgtggaagtcttggctggcgaggatggtcttaagctcgggtcttagccctctcagaaaacgggccatctttctggactcggtgctgacatcctcacgcgcgtagcgggccagctctgtgaacttgtgcacatactcactgactgaccttccgccttgagttaactcccggaattcatcctccttgagttgaactatcccctggggtacgttgtgttcacggaaagctgcttcgaattctgcccaggtagcatctctgacggcttcactgaaggtgtcccaccatgc

SEQ ID NO: 7223 - DNA, 443 bp, Zea mays
  unsure (1)..(443): unsure at all n locations
tcggctttttaaaacagttttttagcgcttccgtagatgtctgaagctgctaagaaggctgctgctgagatgaagctgagtcttgatgaagagaagaacctagggtttcttatagcgatgtcgaagtccaacacagaaaagattaccaaggaaattctggaggggctgtctgaagatactggtgacagtgaaagttatgatatggacagcggtggcgaagactccgaagatcgcccctggcgaccaagccattcagtttatggtaaatcaactatcaaagagaatcatcttgttaatatgagaggaaggtatttccgggatctgtccattgtgagggcggacgaaggggaaaaaacttgtccacaccctgaagaaaatgaagttgtggtgtaccgaagctntttgaaagctggattgcgattccccttgagcagcttcgtcgt

SEQ ID NO: 7224 - DNA, 394 bp, Zea mays
  unsure (1)..(394): unsure at all n locations
agcttgctagacgttgtctccacgctcagttttccttttgcagatcaccaagctgagcgcccacacatgggcacttcagcgctgggggctgaaatttgtctggccactacctatggctcatgggaaccttcagatcacctttcgtaccgactaatacttcacaaagagaaacgcggccatggcagtatccacgataacatcacacacgcgccataagtttttctggcaaaacactgattgccgattcggagtctcatgcgagctcacagtctacaacgacaaataatttgacagcctggacttcaaagatttctgcctctccattgggaccaagcccatttttacctacttataccattcgnaatgccacggtgttggcgagcacgccaacgac

SEQ ID NO: 7225 - DNA, 308 bp, Zea mays
tacactcttatgggcctcgggctgattctcggtgtctctttttattgctctccatatactcaagttcattcacctgtcatatagtctcaactatgaatctaatacttttatagatcctgtgttgcccactgtggaatgctttgagagaacaaatctggaccaggaatcagctgttacatcttgagatgtgatcactgtggacctacacaaggacactcatgatgctcatgctttattgaacaggctatggttggtctaatgtgttattgagaaatggtgaacgatacctaaatgaatatttttacctg

SEQ ID NO: 7226 - DNA, 438 bp, Zea mays
agcttctaaagggagaacacgtgatatgtctaactaatgtaactttcgaaaaagatagaccttgtgcagcttgtcaagcaggtaaacaggtgggaagctctcatcatgccaaaaatgtgatgacaacatcaagacccctggagttacttcatatggacctcttcggacccgtcgcctatctaagcataggatgaagtaagtatggtcttgttatagttgatgatttttcccgcttcacttgggtattctttttgcaagataaatctgaaacccaaggaaccctcaagcgcttcctaaggagagcccaaaacgagtttgagctcaaagtgaagaagataaggagcgacaatgggtccgagttcaagaaccttcaagtggaggagtatcttgaggaggaaggaatcaagcatgagttctctgctccctacacaccacagc

SEQ ID NO: 7227 - DNA, 413 bp, Zea mays
  unsure (1)..(413): unsure at all n locations
ccctgcggagctgccgaagcactggttgtgctggtggtggtggagtgggctggcccggcggccgtagctctggcggcaatggcgggcggaaatacgctngccggagctaaagaacggtggctggccggtgagggtgaatgcggggcgaaaagaggtgcgcccggngaggctntatatgcgcgggcgggcactgccgtgggcgtgggcgcgcggcggacttgaccggacgccggggcgagcgcgcgcgcgggttgggcgagctctggcgtgccgaccagggtcgaacacgtgtgcccgtgcgttctgcccaagctctggcgcgtgtggtcgctcatccgagcctgctcttgccttggccagtgcacgaaacctcttctccttcctacaagctaccattcttgtgtggaggtcat

SEQ ID NO: 7228 - DNA, 430 bp, Zea mays
  unsure (1)..(430): unsure at all n locations
agctttcataatctaggtattcgaagttttatgcatccattacccgggccagccttcattttggttgggtactgaaggcagtagtcattagctagtcctctttcttcgtgtagttgccaagaatttcattgcacatggtttcgatcatttctagccactcactgcatggcttcttgaactgcttctcaaatttgaatcaataagggagccaaacaagttcataccttttcccccttcctttttcttcgacatcccctagctgctagaggttggaaatgttctatttgccaagtattcctgcactaggtctctagtgctaatctcagcagccaccactctaaattcgacctctgccagctggcacagggagccaagttgcatgtggcacangggccttgtcattccgaaggacaatctcatcggactcatg

SEQ ID NO: 7229 - DNA, 444 bp, Zea mays
  unsure (1)..(444): unsure at all n locations
taagggccagnggatagctacagactatgcggagtaagtgttctcagacgaagaagacacttcgttcgatatagctgctcggctagggtctcaaattgaggctgctccaatcgtaaatagagtggtaccaagttgtttactcaatttagttctgttaattcgatgcattatgttttgttatctgcatcctaatgttttaacttgtgaatatggaaactctatgctggtatctgtgggtggacttgagcgtatctcatggaggacttcagacaccatgacactttctttactatcagtgagtatgaatgtttagaagcgaagcaaattcgtttatttgtatgttctaatctatgtgtgtaactaaactttcaattacagagggtatcgcgtcgccttcatcgtgcagcggcttcgtgtggatgtcggtccctagccagcgttgac

SEQ ID NO: 7230 - DNA, 431 bp, Zea mays
  unsure (1)..(431): unsure at all n locations
agcttaatgcccctaagaaattgtctaattttgttaagggtaagtggtggggacttgttctcaaatgctatgagttaagaacaaggcaacataaaaagtgttaaattttaaagtccttcgtccttcgagactttatttcccttcggatataatgaattccggacgaaggttgtgaaggaaaaaccttcgtaagcacaataaatgatgaagaagaattcatatgcaagataagaaaaataacataaacacttaaacattattatcaacttatttttatttacattaccatatcaacaataacaaattataaatgtaccttcggtttgaaggagagcaagggtacaagcgtgatgcaaaaagcgaatgccaagtcagcgtgaacagtacgggagtactgttcatctatntataggcaagggacgcaacccatg

SEQ ID NO: 7231 - DNA, 386 bp, Zea mays
tgtggatccatatcacattcacagtttttggcaaacttacatgagtctaccgcttctgtgattgccgacaagttggcatggcaaattggcaagaaaccaaaatctagaacttgccaacatcttcgcatcacatagggttcggaagagccaaaatttggtaaggctcatcagggtcatacaccaaacatgtcctgaatgctaataaaagtacttaagttgggcacatcatactgaaaagcaaatattccaaaggaaacataagttcagatacactaaccaagaattttttttctttaagaaaggaaacagcagtaaaaatctcgctctctgaataaagctgcagtgttgctgctagtgaagcttgtacatttgatcctaaagatgtg

SEQ ID NO: 7232 - DNA, 447 bp, Zea mays
agcttgtacaaagcccgctggaattaatcttctgagatacccgacctcgctgcaatatgacacccgaaggtccaacacaacaagcaatgagtgaattcagaattattgcagagcatatcagcacaagggacctggttcaagagtttttagcattcaaagtttttcccagtttgagagaatgggaaatgccgaagctacagggggaaaagaaagaaggtgaactcgtacgtttaccttactatttcaagtttaaaaagtactttaaagcaccttgccaagagtggctagatacgattgaagcaatgtgtaatgaaatacttggtaattattccaaaaaagaagatcaattgatgaccgcagccttcggcactcgtccgaaacgaaggctaaatcgagtgttggacgccttgggtttcgaatacccagactacgaaaatctgaacaaag

SEQ ID NO: 7233 - DNA, 447 bp, Zea mays
  unsure (1)..(447): unsure at all n locations
ttaagcactgngctgcagctgccttcgctagtcatcacccgttttcttcanattgtggaacgcgccaatggaaaaatcttcacagctgtcaaaaagatgctcctcgatgaaaaaagggcaggtggaccgatttattacccgaggcggtctgggcgctaaacaccactgaatgcagggcgaccgggttcactcctttccgccttctatatggatcggaggccatgaccccacaagaaataaagcatgggtccccacgaacagttctgtcggccatccccgacgtggacgagcccacttcgaaggatctcatcgatggagaccgagtcttcgcattgcaggctctaaataaataccaagcccagacaaaagcatggcgcgaccacacagtcatcccgagggaattcagcgaaggggacctcgtactcgtccggacagctcggacagagt

SEQ ID NO: 7234 - DNA, 454 bp, Zea mays
  unsure (1)..(454): unsure at all n locations
actcacgctttttcaccatattatcacggttatcttgagaaggttgagtatgacactttcccttcaaatgagttaagctccttcttagcattccaacttcttccttgagctctntattttcttgtgtgatagaaatataactaattcctgaaatttctagctcaatggaagattggctttcttgagagcaacatttgttagcacatgataatatagtttctacttgagtacatgtgcatatgtgaggttggtatgatttcaaattagttaacacaacctcatgagccatttctaacatgatatgtgaatccataaatttattatgagagcacacaagcatatcatgtttttcttgcaaagctagattttcaatatttagcctttctatcgtgttcttgagcatagtattttctttttctaattgagcaatgcaagataaagcatttgaagtact

SEQ ID NO: 7235 - DNA, 458 bp, Zea mays
  unsure (1)..(458): unsure at all n locations
cgccggaccttaagcactgggctgcagctgtcagatgtgaagccttatgataatctttttgtntctatggatgatactaaaaataatttgagtaattctactaatgccatgcctttagataaatctgagttgcctttggtacaagaggattgtcttggtgttccttgttgataaaaagacttttgtgatgatattactattatttctatgccacaactagagaacaaacttgatgttgttgcttctgatcctattaattgtgccaaaattagaacattcaatcctataactggcgtgcaggatgagctgaaattgttatcttctttaaatactttaggctatattaaatttgatggtctatgntatctaaataatttagaggagacactttcttgtagtgctgatttgccatggctatctnaatatacatatcatgttattggaagatataattggac

SEQ ID NO: 7236 - DNA, 372 bp, Zea mays
taagagatgagaatgggaggggagaggataaccaaatctttatgcatcttctcaaacctcacaccaaaggggctccttcaatctatttgatttgagagctaaatcggttgagagggagcgagggagtgcctttgtctcaagttaagtgagcaataagtgtgtgggcgaccatcagttatgaggagagagatgtgaggggtatttatagactctcctcaaaaagagtcgttgtgctcgaatttctgtggaggacctgttgaaccgcccctagggccggttcaatcgcccctggctgactgtcagtttgtttgccagtctgactggcagattgctggacagtctgatcaaattgacctgacactggttgaatct

SEQ ID NO: 7237 - DNA, 442 bp, Zea mays
agcttgtggaagaccagatcatcaaagcatatttgtttctggatgagaagtggtcacccaagttctgttgatgaagcaccagaagaccaatcaaggaaggaatccatgtggaagttcgcaagaggaaggtttgtgtgttggcatcgatgcttcttcaataagctagctgccaagtgtaatacccaaaatgtatacgatgaggatatagtaaatctccttatgttgtgtgccatatattcattataacaagagcatacctataattaagagtgattagttaaaataaaagatactaaaatggaatatgcatcatgctgagggtttgctttgtgtgcattttgtgacaagatagaaataatgtaaaaagaattatgttggtacccaaattggaatttgaattctaaaggaaattctataatttgagaagagaaggacaatacta

SEQ ID NO: 7238 - DNA, 437 bp, Zea mays
  unsure (1)..(437): unsure at all n locations
tcgattccncgagtaccggaattacaggccgagcgggatgcaaccggatacgatcgagcatttgctccaggaacgtcatgtcagagcgggacgccgacggcgaactttgtcctgaagccacgaaactgccgacaggcttcagagaacgccaggcgagtataaaaaagtactagtagcagcgcagaggagaaacactgtgcatgagatgagtgtgccgcactgccgcctgctctgccggtgcctcttgtccaacccctgtcctttttttttctgacgacgcacgggcggcaggatgggaaggcagcccaacgggaaaccggtctccctttctctctctctacgcggtcacggccatcacacgccatccagagggatacttactgcattgacacacatctatcggatgtatgcatggatggtgctgtaacggcgtgggg

SEQ ID NO: 7239 - DNA, 457 bp, Zea mays
  unsure (1)..(457): unsure at all n locations
agcttnctagaggccattaaaacaacatactgctatttctccaattctatataaactntctttgataaactgagaacttcggaaacaaagtatactggagcctgctttttcaattgcccttcaagcttctcctgaacaagcgccgcacttactgtagagtgcgaagctgccacatataacagcagaggagcccctggtgatgatggagttaaagttgttaaatctatcaaatactgtttcagttcttcgaaggctttntgctgagctgatccccattgaaaaactttggctgacttcagcacctcaaaaaatggtgaatttctctctgctgatctggatataaatcgattcaaagatgccagtcttcctgttagccgttgagcccctttctttgtgcttagcggctccatccgaaggatagcttcgattntatttggattagcttcgatcccttttg

SEQ ID NO: 7240 - DNA, 466 bp, Zea mays
  unsure (1)..(466): unsure at all n locations
ctaagctgtcctgctaacaggagaaatatgtgatgactcgtgtcattttttattgtaacccacactataagaaaagtatggtgtagcttttatgctattatagtattgattgtgcacttctattgtgtcatagtcattaagcacttaatgagtttaagaaaaatagaaagttacacacgaacttaaggataataatgatatgcaagtgtgacttgcacaagtactgataataaaggactatattgagttctttaagtaaaatgagagaaataagtactcccatacgaattaagaaataacttcattctacatgatgtaatcatgtggatgaagaaagtaatcanagttcttcattcacaagagttctgaatggttttcgaaattgtgacggaaaagttcatgccgcatttcaagggggaggaatgtaatattatgtaagaaagatactccatactcccctatagtt

SEQ ID NO: 7241 - DNA, 395 bp, Zea mays
  unsure (1)..(395): unsure at all n locations
agcttgaagccatggtgagcagcatttgcttttataatgcgnaatgactcatgcctagctacgggtgcataggtttcaccgaaatccaaaccttcgacttgtgaatatcccttggccacaaatcgggctttgttccttgtcaccacaccatgctcatcttgcttgttgcggaagacccacttggttcctacaacattttggttaggacagagaactaaatgccatacctcattccttgtgaagatgttgagctcctcttgcatcgccagcacctaatctgaatcttgaagtgcttcctctaccctgtgtggctcaatagaggaaacaaaagagtaatgttcacaaaaatgagcaacacgagatcgagtggttacccccttttgaatatcgccgag

SEQ ID NO: 7242 - DNA, 422 bp, Zea mays
  unsure (1)..(422): unsure at all n locations
tatctcaccagtatcctaanagattagtctagagatggtaatgtctattgcttccatggttcaggataatgaacgctacattatatatcctgctaactattccaaacacaaaaataggaagattcatgttgggaaacctcataatgtttcttaccatgcatttatgtataaaaatgatgcttctaactctatgcataccacacatgttaaaatgcctaaaaagaagattcctgctgcatcaaatgaacataatgtctcttttaagacttttgatgcatcatatgttttaactaacaaatcaggcaaagtagttgacaaatatgttgacggccaacacaaaagtcctaagacttgtgtttgggtacccaaggtgctggtttctaacgtcaaacgacccaagactgtttgggtacctaagaaca

SEQ ID NO: 7243 - DNA, 456 bp, Zea mays
  unsure (1)..(456): unsure at all n locations
cggatcttaagcgactgggctgcagctttattactgcttggggattgttattgtctagcacagcactgatccatacaatgcggcattgtgcttcaagtgtggaaaaagtaccagtgccagagcaccaccgtctcatgaggagccgagatctgcgcgaccgtggggcgtgtgacccccagcatctacgggcagatgaccgcgggcgtgactgtgagccaggggctgtaccaatacgggcctttcctcatccagctgcaggactgcaccttcgtgcgcgacaccttcacgaccatcaaccagggctactgcccggngctggagcgctacagcaagtgggtgtacgtgggcctggtgatggtctccgtggcggagatgctgtcgctcatcttctgggtgatctacgccagggagcggcggcaccgcgtgtacagcaagcagcaccagacgtacccggtg

SEQ ID NO: 7244 - DNA, 456 bp, Zea mays
tcggccttcggaggccgaaggttgaaatgaacgaatctttctaatagtgccaaagagccttcggcgttgtctgctcttttataggaacaagggacttagtacaagaacatatcgccttcagggtgtggccgcttgctgagaaatgggaaatgccacaagaaaccataaaagaggccgacgaaggtgagcttgtgagactgaagtacaccttcaaatttggagataaatttattgagccagatgatgagtggttgaaaagcattgacaatttaagtgatgagctactcgggacctactcgaaggctgaagataacgcaatgtcagcagccttcggaggccgaacaaagaagagactgaatcgggtatttgatgccattgggtttgtctaccctgattactgctatcccattcgaaggcagaagagaaaaaacacaatctctgcaaaagaagaagctg

SEQ ID NO: 7245 - DNA, 406 bp, Zea mays
agcttgatgtttagaatgacatcatcttctttttaatctttcatctcgaaattgctcgatagaagatatttaacttcctcaatcacattgagatttgatccaaagatcaagatgtcatcaacataaaggcacaacataacagactcacccccaccataccgataatacacacacgtgtcagattcatttacagcaaaaccatcagctgtaagagtattatcaaacttttcatgccattgcttaagtgcttgttttaggccatacaatgattttatcaacctgcacaccttgttctcttgaccatccgcaataaacccttctgactgatccatatagatctactcatccaactctccattaaggagagctgtcttaacatccatctgatgaatgataagaccataag

SEQ ID NO: 7246 - DNA, 391 bp, Zea mays
cttgatgatgagcgccatctcctcattgtcgagcttggttgcgtcaatggggagtctacttgatgtagactcttccttcttctcctccgtcgtcttgaatgcgaccggttgtgcttcgggcgtggaggggccatcttgctcgatgattttctttgagcctttgatcatcaattcaaagctcacaaattttcctattacttcctcgggagacattagtgtgtatctaggatcaccacgtattaattgtacttgcgtaggggtaagaaaaacgagtaatctaagaataaccttgaccatctcatggtcattgagagcacctagagggggtgtgaatatgtgatcctgtcaaaacttaacttataaccacataacttgtttgggttagccaata

SEQ ID NO: 7247 - DNA, 435 bp, Zea mays
  unsure (1)..(435): unsure at all n locations
agcttggatattcttcaccagagaagtattgtttttcttgtgatatataaaagattttcttcacgaagcatgaaaagaagggaagggtgtttttcgccgaaggctcaaaaaatggtatgtatgcaaaatatcatgcatcgtaaagaattgaactataaatagattatatattacattcaaagttacaatgtattacacatgttacattccaaatatttttacagtagcatctaatcctccttaaaaactatttctgcagcttcgttcagtagctgatcaacaaccttgtacatgatggcttcggccatttttctaatttcatcgtcccccttcgggtgggggcccggagatgcctcaatatgtctgagggaggagaagatacngctatattactattacnaaccgcgaacaaagtctggaatcaaaaattacaac

SEQ ID NO: 7248 - DNA, 454 bp, Zea mays
  unsure (1)..(454): unsure at all n locations
tcatcatctganagaaagttaccctgaaggaaagagatgatctcatttctccagtcttcagtatagacaggagatatgttgaggactgctatttcaagaagttcgatcgaaggtgcttttattgtttcgaaaaatacttccgaaggtaagggcagcccctgtgctactgacttggctaataaatcagcatgttcattttctcctcgaggaatatgtttaacagaaaacccttcaaaggaagccccaatccttcggaccgtgtctaaatatttttcatgcttcggatctcttgctttataacttttgtcaatatgaccagaaataacctgagaatcagttttaagaaccgcccttctaattcccattgcctttaacttccgaagacccaagagcaaagcttcttactcagcaatgttatttgtgcaacagaaatcaagtcttgttgcataacaag

SEQ ID NO: 7249 - DNA, 427 bp, Zea mays
  unsure (1)..(427): unsure at all n locations
agctnttccaaaaattgctaagtcccagtgcgatgacataagtgttgaacctacaactccgtcgacccctccaacagttactgatcgatcttttgatgaagacgacttgtactgccccgaagtcagtgatgagttgtacttcagcgattctgataggtctacgcgcaatagctactggaatatttattagccatgtattccagcttcagagagatgacatccttttgaacttataagtagtcgtcggcaggcaacaactcttaggttgggtgctatgaaacgacaatttagtggtcatctccatttgagtcttactggtatgatgttctcataagctagttctatgtatgaaatgcctacttaattgtagtatgaagactctnttctcattgaagttctgctgttgctactcgaanagttgatcaag

SEQ ID NO: 7250 - DNA, 467 bp, Zea mays
  unsure (1)..(467): unsure at all n locations
taacaagattcaaagactcnctttgcagnaaagcttactatgagtggatccttaaaatccatttttattatcaggttaagtagttacctgcatctagatttctttctattctagatcaagcacttggcctatactagccgtattcatgtccgagaagtaacggcgatctgaatcaattaatacccagctgaggatctccagccacatgacatatgtagcacttaacccttgcatatgtcaacacaccaccgagtttctcaagaccaaaatgggttcacgccaaccgagagcacatatactccaccgtccagcctcttgccatggagcgtacacgctactctcgccatctctccactcccattgcgtggtggcctttctggtattggtccgaccgaggcaaagcttacccatgacgaggcatgtggctggttagaagttccttgatcatcaagcctacatcgagtcag

SEQ ID NO: 7251 - DNA, 300 bp, Zea mays
  unsure (1)..(300): unsure at all n locations
ttcagtatggttaaattttttaacatcacgacagtgcaatggcaatgaatgttgtggtaacttctcaccaacccatctatttatatagcattgtacgggggaaggtgaaccgccgggtcgctcgctctccctgaacggtggaccgctcgatgcctagaatattataatcgtttctcggcaacgagctttgggaaggtgtttttcgaacctttaacattccacagcctttgtatttttcgtggatcgagctcgttacgaaaaacgatctancaccacgaacgggctactggtgggggtctt

SEQ ID NO: 7252 - DNA, 277 bp, Zea mays
tcatcaatgggtaactaatataacgaatgttctttcgctatggctctgaacgcaggtgaacctctcacgtacccatggctctgtaacttgcaggggaacgtaaccggcggtacatccattgatgaacaggtgacgtacgatgccctccaaattgtcataacatgctcagcaactcacgctgacagtgagtaatgataacctttctcatctcaaatactactgatcggtcgtggaaccatcattgtacaaagaaacatcctgctgcacaactgggctg

SEQ ID NO: 7253 - DNA, 435 bp, Zea mays
agctttatcaaatggacgtgaaaagtgccttcctcaatggaccaaacaaggaagaggtctatgttgagcaacctactggctttgaagacggtgagtaccctaaccatgtctataagctctctaaggcgctttatgggctcaagcaagccccaagagcatggtatgaatgccttagagatttccttatcgctaatggcttcaaagtcagaaaagccgatcctactctattcactaaaactcttgacaatgatttgtttgtatgccaaatttatgtagatgatatcatatttgggtctactaacgaatctacttgtgaggaatttagtacgatcatgacacataaattcgagatgttgatgatgggggagttgaagtattttctatgattccaagtcaaacaactccaagaaggcaccttcatcagccaaacaaagt

SEQ ID NO: 7254 - DNA, 453 bp, Zea mays
tacccttgaagcctggaataagctacagaaggaacctattctctcgctcagtcaaaaaggccgacagtaagaatcaaagcactgcccctgagtcaaagtaaacaggaaaagaggacagaaggagttattaccatacagagaggcaaagattcttggaaccagagaccacaaacatcagggtcattgaccccatgagagcacctagagggggggtgaataggtgatcctgtaaaaacttaaacttaaggccataaaaacttgattaagcgttagcacaataatgccaagtggctagagaggagtctaagcaaaacacaacaaccacaagaggatcaacacagatagacacagtggtttatcccgtggttcggccaagtacaaaacttgcctactccacgttgtggcgtcccaacggacgagggttgcaatcaacccctctcaagcggtccaatg

SEQ ID NO: 7255 - DNA, 377 bp, Zea mays
  unsure (1)..(377): unsure at all n locations
tatggtggcagaagggttgggcggccgctgactctctgcgcacgggcaaacgacgactagctaaccccggcgaggtgtggagtatgtgtggaagggtgtanccgaagccttgggggatttataagctcgggcgcgggccacggtgcgggtttggctcgggcgcggcgcggggcgtgcgagggcgcgcgcgagcgtgctctggcgcgggcagaaggcgtcgaacacgtggcagtgagtttcttccaatgttcaaacgcttccagagatcgcaaacgtgcgaatctcgccatgaatccggcgcagacctcctcctggcacctatggctatctcacatgtgtgagttccaagggatgatacgccctatatagggagatag

SEQ ID NO: 7256 - DNA, 383 bp, Zea mays
aaaatggaaagagagagaaccagaaggcttacaagaaggccaaaggcgaagcacaccttggaaaggagtgggattcggattgctcttcgtccgactccgacgacgaaggactcgccgccactgtcttcaacaaatcggctctcttccccaatgagcatcacacttgcctcatggcaagggaaaagaaggtaatcactcgtaatgctaatacttatgattcttctagtgatgatgaatctagtgaggatgaaattgattactctagtttattcaagggattggatagaactaagatagctaagattaatgagttgatcgatgccctaaatgaagaggatagaaccttagagaaacaagaagacctcttatatgaagaacatgat

SEQ ID NO: 7257 - DNA, 435 bp, Zea mays
tatgaagattcgtcatcccaacatgtgctagacggtgatgtccttgccaacccatattagtcttagccattaagcatgcatctagatcagcattctcttttgaaaaatcaactaagtagagtttgccgttgaaagggaaatgtgcccttgggccatttctaagtattttagtgatcaagtgccaacacaaatggtttaagtgtgaaactatgccaaatggtggatgaagtgaaaatcaacacaaaggtatgattctagacttagtacattggtttttgtgtactaacatatttgtctaagtgctagaattagagaaaatacaattggaaaagacttggctcgagcagccaagactctgctcagtctgggtacaccggactgtccggtggtgcactggacagtgtccggtgcgctaggctggcgtctggtcaactg

SEQ ID NO: 7258 - DNA, 409 bp, Zea mays
  unsure (1)..(409): unsure at all n locations
agcttatagccatggtaagtagcataggcctataatattcgaattgactcaagcctagctacgggtgcataggtntcaccgaaatccaaacctttgactttgagagtatcccttgggcacaagtcgagctttggtccttgttaccataccatgctcgtcttgcttgttgctggaaacccatatggttcctacaacattttgattaggacgtggaactaaaagccatacctcattcctagtgaagttgttgagctcctcttgcatcgtcaccacccaatccgaatcttggagtgcttcctctatcttgtgtggctcaatagaggaaacaaaagaattatgcttacacaaatgtgcaacacgagatctagtagttacccccttatgaatgtctgcgaagatggtgtccaca

SEQ ID NO: 7259 - DNA, 440 bp, Zea mays
  unsure (1)..(440): unsure at all n locations
tcgtctaccacctagtcattagttgatactgttctaacattttgttttccagagactctcatataaaacaacagtgtactctaatgtatttggtacatgcatgaaatactggattaattgttaaacaagttgcaccaatattatcacaccgtaatttaacacaaggggtacatgataacatgaacacttttctaaagattgtattcaacatctgtacatgatcttgacactgtggcttgccttctagcactccaagacacaaattgtctcatataaaaatatcaaaacccctttagacctcttatcatcaaaaattgccagctccaacaacatcaaaaaaacatgctaattgtcatataagagaactttcttactccaagtccgacatagttgttggggctaatgatntaataaanacaaatagtaatatgtgtatatta

SEQ ID NO: 7260 - DNA, 441 bp, Zea mays
  unsure (1)..(441): unsure at all n locations
agtctgaacgaagtaatgattaagaacaagtgtctctttcctcgaatagaagatctgctggatcagatgagaggagctacagtattctcacagatagatctacgattacgccatcatcagttgaagattcagactggagatatacctaaaaccgccttcactacaagatatggactatatgagtttttagtcatgtcttttggactgactaatgcactagcttactntataaacatgatgaataaagtattcatggaataccttgaccagtttgtggtggtattcatcgacgacatactagtatactctcagagtgaagaagcacatgaagatcatctgagataagttctatagaaacttcgtgacaatcagttgtatgtgaaatcttcgaagcgtgatatttggctgaaggaagtcactnctctatgtcatactatcacc

SEQ ID NO: 7261 - DNA, 430 bp, Zea mays
  unsure (1)..(430): unsure at all n locations
actaagcttgctataccttgtacgcccaaaaaggaggagctctcgtcatttatttgcttgccaaggcgagcaatcaccttggacggcgtgcaaacattctgcatgcaagacagaataccacggccggacaccatgagaaacatacttggatactaatgcctctggaagaacaggacgcaccaattaatgtgtggaatttaagtcacatttgtgcttgattgcttacttgggtggactgttccagcagcatcttgtcgaggatcggcatgatccactgctcgaacttgcagtagttgtcattgggcaccaccaggtttcctatccggttaagttctctggaccgcagcagcgctccgggcagagtgaagtaccctctgtagggtggcgcaacgcatttgatgagggcctcctctatacccncagcaatcgt

SEQ ID NO: 7262 - DNA, 447 bp, Zea mays
  unsure (1)..(447): unsure at all n locations
agctttgctnttgggtcttcggaagttgatactttggtgataanaagggcggtcctcaaaactgattcccaagttatttctggccatgtcgacaaaagttgcaaagcaagagatccgaagcttgaaaaatatttggatacagttcgaagacttgaagcctccttcgaaggggtttctgttaagaatattccacgaggagaaaatgaacacgctgatctactatccaagtcagcgacacaggggctgccattaccttcagaagttttctttgaaacaataaaagcaccttcggttgaccttcttgaaagagcagtgctcaatatatctcctgtttatagcgaagattggagaactgagatcatgtcttttctccacggcaatttcctttcagatgacgaagcttatcaaaagagaatagcggcaagagcccgtccatatgtaataata

SEQ ID NO: 7263 - DNA, 431 bp, Zea mays
gacacaaaaactcagctttaagaggcttacagcgaaaaaaacgctgattccgctgtatttatatgcgaacaagctcctaagggaggcttatagtataaagacaacgctgattcaaaaagactatgttgtttatcgcaggaatgtgtgtgtatcttccgaataaacaccatcttacacaacataacatcatcgcatcatttcgcatagcataagcatcatacatcatgctgcatatggcacaagagggggacatgacatcgatcttctgaagaatatttttaaaggggaaaatcatgctaagttgcaagcagatacactattgatcttcggaagtgtagcttcggagaacatcttcacgaagcttggatattatttatcagaacactacgaatattgttgtgacaaatgagaattattcttcacgaagcatg

SEQ ID NO: 7264 - DNA, 317 bp, Zea mays
gcagccacccgtaagagacttgtggctcccaacagctccgagaaagggagaaaagaaaatggtctcgaatacacctcttggagagaatgagagcttttatactttcaaaacattagtttgtgtcaagagcctgaccgaaatgctcgaaaaagaaagagctaaaaggagatatgctatttatcttacggatattcggccgggagccgccttctcttcggtgggcatcgatgacagaaaggtgtaggctgcatctcgggatcagaactggtgcgaaggttattggtactctttcaaagagtatcggtttctcgaagctc

SEQ ID NO: 7265 - DNA, 403 bp, Zea mays
tctcaaatgctatgaattaagaaccatgcaacataaaatgttaaatatcaaagcccttcgtccttcgaagcattatttccccttggatataatggatttccgacgaaagtaatgaaggtcataccttcataatcataataaaagataagaaaagatttatgcataaaatacggaaaataacatgattactttgaacattattattaatttatttctatttattttacttatataaacgataacaaattacaagtgtaccttcgacttggaggaaagtaagggtacaagcgagatgacaatgccgagtcagcgtgaacagtataagagtactgttcatttatttataggcacaggacgcagcccatgtaaaattacattaatgccccttgcttttatcaataac

SEQ ID NO: 7266 - DNA, 418 bp, Zea mays
  unsure (1)..(418): unsure at all n locations
agctnttaacanaacacatggaatgtgtgtattttatctaaaacagctntgtttctagtcagccatatgcaccaagaccccaaaataatgagactgttgaagcctttctttctgaatttgggcaccttcttaagcgccttcctccaccaatcagcaaatgagaattcatcaacagcaggaatgagatccccaagacacaagagaacaagaatagcatgccaaaattgcctatcaaaactgcatgtacacaaaagatgttgcactgtttcctgctcttggtcacaaagaacacaaacagccggatgttgcagccctctcctccttagtctatcagcagtccaacacttattccttatcgccagccagaggaagaactngcatnttgggggagcccaggatttccacaaacgtttccatg

SEQ ID NO: 7267 - DNA, 455 bp, Zea mays
  unsure (1)..(455): unsure at all n locations
tgttgcctttttctcaattgtgatggtggaaatcttatattatcttgtaagcttgagagggaataatagagaagagtgggatgagtagtcttctattttgtaatgtaatgcgaagaagaagatgttacttttgtggtcgaacagatgaatatttatactccatattcaaacgggtatgttatgggtgacattgtcgccctgaaagggggcactgcagccctagccaaatcaagagatagcagataaaaatttggtggctgatttggctaggtgtagtgatgtcaatcatggatattgaccatttggttcaacaaatgactaactattcttgagtcccccttaatagtacattttttcctaaacgtaagatacaacacagaaaaaaaatntaaaaccattgagtcaacaaaaccatctttagtaattanggggtacttcgacctgtataacatcat

SEQ ID NO: 7268 - DNA, 441 bp, Zea mays
agcttgcaccattgctacgagggctgcgataccctgttcaacaacctacatggcagatatattaaatagtgtggttgggatttcctcaaggaatccgatacaccagctgttggggacttgttctcaaatgctatgaatcaagaacaaggcaacacacaatgttaaatattaaagtccttcgtccttcgaaacattatttccccttgggtataatgaatttcggacgaaggttatgaaggtcataccttcataatcacaataaaagattaagaaaagatttatgtacataatatggaaaataacataactactttaaacattacttattgatttatttctattcgtttttcttatataaatgatgacaatattacaaatgtaccttctgcttgaaggaaagtaagggtacaagtgtgatgccaatgccaagtcagcgtgaac

SEQ ID NO: 7269 - DNA, 433 bp, Zea mays
ttacgtgacctatgaaactcagcttataactcctagtggcacttattgttatcttcggatgcctgaggggctcaagaatgctagaggaagcttcagcagaatgactgccaaagttcttcactcccaaattggtagaaatatgctaacatatgtcgatgacatcatagtaaaaagcacaaaacaagagaacgatgttgccgatttgcaagagacatttgccaatttcagacaagctggtcttaagttaaatccagaaaaatgtgtcttcggagtgaagaagggcaagtttctcggctgttaggtatcagcaaattggaagctatcccaagcaaaatcgaagctatccttcgaatggagccaccaaattcaaaaaaggggctcataggctatcaggaaggttggcatcactgaacagattcatttcaagatcagc

SEQ ID NO: 7270 - DNA, 422 bp, Zea mays
  unsure (1)..(422): unsure at all n locations
agctngaagtgggtgatttagtgtggttgcacttgataaaagatagatttccagagttaagaaagtctaaattgatgccacgtgctgctggtccatataagattttggagaaaataaatgataatgcatataaacttgagttgcctctcaagttccgggttagtcctacatttaacattgcagatttgaaaccgtatttgggggaagaagatgagcttgagtcgaggacgactccacttcaagagggggaggatgatgaggacgtcactcccatggatacaaacaacactcccctagttgatgatcaaggtccgattactcgctcacgcgcaagacaagtgaatttgcaggtgagctcgttcctatgtacttattcttgtgcatttgagaatagtgtgctacctacatgaataattggtcct

SEQ ID NO: 7271 - DNA, 405 bp, Zea mays
tgccaatacttgtcaaagcaacaacatctgccagcacatcaactgcagaccataccagtgacttggcctttcgcatgctggggactggatatgattggacctttcaagaaagctcaagggggatacactcatgtactggtagcgattgacaaattcaccaaatggatagagttcaagcccattgcttctttaacctcagctaaggctgtggaattcatacaagacataatattcagattcgggataccaaacagcatcataactgacttaggatccaacttcacaagttcagaattcttcgacttctgcgagcaaaagagcattctgatcaagtatgcgtctatagcacatccaagagccaacaagcatgttgagcgagccaacggaatgatattggaagcactc

SEQ ID NO: 7272 - DNA, 409 bp, Zea mays
  unsure (1)..(409): unsure at all n locations
agctngccaatacttgtcaaaacaacaacatctgtcagcacagcaactgcagaccataccagtaacttggcctttcgcatgctggggactggatatgattggacctttcaataaagctcaaggaggatacactcatgtattggtagcaatcgacaaattcactaaatggatagagttcaagcccattgcttctttaacctctgctaaggccgtggaattcatacaagacataatattcagatttgggataccaaacagcatcataactgacctaggatccaacttcacaagttcagagttcttcgacttctgcgagcaaaaaagcattcagatcaagtatgcatctgtagcacatccaagagccaacgggcaggttgagtgagccaatgggatgatactggaggcactc

SEQ ID NO: 7273 - DNA, 446 bp, Zea mays
tctgtatggcctcacaaggtgattcttcatttcctgcagtgtcattagaaacatgcccttgcgagccattagactcatcaaatgtcatgtctatcgctatttcaataaggccagtggtattgttgaaaacacgatatccatgcgcatttgatgcataaccaagcaagaagccctcgtccactctaggagcaaactttgagctcttgactttcttgttaagaataaagcatttacaaccaaatactctaaaataatcaactttaggtttgttaccagtgagaagctcgtaggcagtcttcttgtagatcttgtgaagataaaggcggttgattgcatgacaggcggtgttgaccgcctctgcccaaaagttgtcaggggtcttgtactcatccaacatggttctagcggcttcaattagagttcagttcttcctttccacaacacca

SEQ ID NO: 7274 - DNA, 419 bp, Zea mays
agcttggcgcacggagtacgtgtcccatattgtggcagtaactccggtgagctacggagggttcagagaaggtcatggcgacacggtgaaagtgtagagccacgcggcacccggccgagaggcggcggtcgacggcgagtacttaccgcgggcggtgagccaggggggaagaacgtgccgtggccgagcggggtgacttccagctcaccgccgttgaggacacgtatcggtagtgcttatccaaagaccaccgagcacgaatcgtgacgagtcgcgatcaacggcggcggctaccggcggtgaggacgaacccgatcttcttcagttaagcggtcactgtaccatgggaataccggttcagagtgactgagagtccagtttccagagcccataacttccaattttatgcagcaactcga

SEQ ID NO: 7275 - DNA, 450 bp, Zea mays
tctactgaagcttcggctcaacaagctgaagctgaagctgggccttcagagccctacaaggagcaaccttttgaagccgaagcaataaaaattccagaaccagtattagttgaagaaactgacaccgccatccccgaagcacctgccagcatgcgtgattacatgatacgacatgcttcggggaagaagctatctgaagaagaaactcatgaagccatccattatgcaaaggaactaaaatatccgaagggggcagtaatattcaatggaacgaatgaagatgacttcttatactgcctgcctgacaacaaagagctatctgtctgccgagaaatggccagaagtattggtttcccgaagcttgaatctggattaagcgccatgacgaaagaagatctcgcagacagtcttgcgtacaacagccttgaggtataggaattaaacacttga

SEQ ID NO: 7276 - DNA, 432 bp, Zea mays
agctttacatcatacagtggagtagggtgttacgctccggcggcccgaaccactctaaacccttgtgtgttcttgtgttcttcccactttttcaactaacaagcaaaacgcttaggcccctcctcatcttaggatttagggcgggtgcactccgccacctggccggagatctgctctccgacatttggcgcgccaggtagggggctaggcattaggtttttgcttgtttccttgcccaaggatgatggtgcaaatcgttgaacaccacaccgagacttccacggatttcctggtggaagaagctgtttcttccgcgccacatgtttccaaccgcccaatgccgggcgccgctgctgtgcatgctgcacggcagcatatgcctgcgcagacctcacggactccgtcgagcgcggctccgggagcattgtcagc

SEQ ID NO: 7277 - DNA, 444 bp, Zea mays
  unsure (1)..(444): unsure at all n locations
tgtgaagccaatcacgagtttgttgaagaatgacattatgttcaattggtcttccaagtgtaatgaagcctttgaacaattgaagacactattgaccactgctccggtattggctcaaccggacatcactaaaccttttgatgtatattgtgatgcatctggcagtgggctcggctgtgtactgatgcaagagggccgagtgattgcgtatgcttcaaggcagttgcgccggcatgaggagcactatccaactcatgatctggagctagctgttgtggttcatgccctaaagatttggcgtcactatctgctgggaaatatctgtcacatatatacagatcataaaagtttgaagtacatcttcacccagtcagagttaaatatgagacaaagacgatggcttgagctcattanagactatgaactggagatccattatcaccc

SEQ ID NO: 7278 - DNA, 435 bp, Zea mays
agcttgtggatctcctcgcctatggctctgtgcttctcttcgtcgaatcggcgcagaggctgcttgacgggtcgggctccggctcggatgtccagcgagtgctcggcgacatccctcggtatgccgggcatgtccgagggactccacgcgaaaacgtcagcgtttgcggcggagaaagtcgacgagcactgcttcctatttggggtcgagcttggagccgatccggatctgcttggaggcgtcgttgctggggttgagagggacggacttaaccgtctccgctggctcgaagttgccggtgtgacgctacacgtctggcgcctccttggagaggctctccaggtcggcgatgagggcctcagactcggcgagggcctcggcgtactccacgcactccacgtcgcattctaacgcgtgtttgtacgtggggccgac

SEQ ID NO: 7279 - DNA, 335 bp, Zea mays
tcacatagaacatatctaaatttagcgcaggcaattttttttccagctccacaggtggataggtgaaaatctgtctttcatgcacagaagaaatcttccaaaacaaaatggtgcaccatcgttgcaaagatataacttaacaacctgggttccttcagttctagatcgagttccttctccgattcctttagctgcagatccacaggaaaaatatatattgtttgagaaattcgaatccaggagatgcagacaaaaatggactaacctctttgaccaatcttttagagctccagataagagcaccctacagagtatacaatacaaactacctttca

SEQ ID NO: 7280 - DNA, 447 bp, Zea mays
  unsure (1)..(447): unsure at all n locations
gcttgcacaccacgtccactcccgaaccaacgatacttactcttgttagctttctaggatcacatattatcctcacagaccaacacgagtcttttatatgcactttgttctcactcacgcgcacctgagaaaacttctctatcggtcactcatctcaaattgctccaagccaagcacgcttaacttaaaggttctttcgagataggcttccaaaaaaatataccttgttaatataagtactctattaattttattaagcagatatcgccatccccggggccaggatattataaagtcgaccctacttttgatcgattgctctccagatacattagcaagaaggtcgttctacgcgatctgccaacaaagaagccacgagcacccgctaaatcaaaacgatcgaataaaatagcccanaaggcgacacaccaagcatcgcctattcct

SEQ ID NO: 7281 - DNA, 376 bp, Zea mays
agcttattttcggggtcgagccctggcctctatttttttgtccgtgcgccatgggcgaacccctcattttcggcccagacgcaaggccgaacagccatgccgcccgtagtcttgcgcctccgtgcctgattccctccgttgcgtcatgcccttcacccatgacatacatattacctttcgtgtctttccacacgcttggacttagcttatttccggggccatgcccgaacctcggttttccgcccctgcgccatgggcgaaccccttgtttcggcccaaacgcaaggccgaacagccatgccgaccagtcgccatctctgcccttcacccaatgcatacgtcgcagcttcggtgtccttgcacacgcttggacttg

SEQ ID NO: 7282 - DNA, 415 bp, Zea mays
tagtgcaagcgtgtggaatggaaagacaacgaagctaatgtgtatgtatggtttgagtgaagggcacggcggaacggagggaaaacgggaggaggcgcgcggcgaccggcggcaaggctgttcggccttgcgtctgggctgacaacgatgtgttcgccatggcgcacgggccgaaaacggaggctcgggcacgaactcgaaaataagctaagttcaagcatgtggaaagacaccgaacatacagtgtatgtctttggtgaacggcacagtggaacggaggtgaaacgacacggaggcacgcggcgacgggcggcatggctgttcggccttgcgattgggctgaaaacgaagcgttcgccatgtcgtgcgggccataaacaacctgttcggtcacaggctcgaaaataagctaagt

SEQ ID NO: 7283 - DNA, 450 bp, Zea mays
agctcgaaccgagggcccgcgtcaccggataattcttatcgcgctcatcggagttcaagaactcgccggcgcacgtggaccgggtaaaccccttcaccatttcccgattcgttgcgcgcacggcctctgtgtcaccccgtgaagctcctcgtgcaccctaattgacctatgccgccgtggtttggccggagcaggcaccgccgtcgatccccgccgcctgtgttcgtggccaggggagctccgaccacctctgacgccgacccgcacatcgacgtgaccgtcgcgacctcctgaacctcaccgaccacctcgccggacctccctcgccgtcggtaagccgcgccaccctttcctttcccgcggctattgttttagttgagggagggactgcgggtgagacggaaagaaagtcaggggggtaagtgaaaagtcagagactcaagtgaatag

SEQ ID NO: 7284 - DNA, 454 bp, Zea mays
  unsure (1)..(454): unsure at all n locations
tgtactactactctacaattaattatatatatatatatgatgttcataatattgcatatgcatttcgttattcgactaaatctataggaaaataacaatatttatgatactaatttgagtctaaaatcataaaccctgtgatagatgtggttctactacttgtatatatgatgtccaatgcattgcatatatgccatagtgtcgttgatatacctgtggatgtcagccattgtgctgctacttttatttgcaggttttggaaacctcctcgtgcaggggaggtgctgccggattttttgtcgatatatgttacaggatggaagatcgtgagtggattgtacacgagccgtgtatgaaggaatgatgtcacccctgaatggattacaanaaccgatgatttcgtggaacgggcatatgactaagctgctaaaggagcgagcctttgtccatgacc

SEQ ID NO: 7285 - DNA, 369 bp, Zea mays
cgtgcgagcttctcatgactacttgcgcatgttcattagtattttcttattcataaggagcaaatatacatggcatgatgttgcttggggacaagcaacgtgtttgctgggcggtagtgtaacacatggcttgtttatggcctggtgtcacatggcccaacccacggcccaactcggaagatgggtacaagagcagcatcatagaaatgaggatggagagaaaaaaagaatccgatcttattcccttctgtcgccgtcttccgtccggaggcgcgattcagctcgccaacgctcgacggcggccctgcggtgcgctcacgtcccggtggtggctcaccggaagctacgggtcatcacaagctcccgagc

SEQ ID NO: 7286 - DNA, 385 bp, Zea mays
  unsure (1)..(385): unsure at all n locations
ctactcaagcttgaagccatggtaaggagcataagcgagtaaaatgcgaatnggttctatcctagctacaggtgcataggtttcaccgaaatccaaaccttcgacttgtgaatatcccttggccacgagtcgggctttgttccttgtcaccacaccatgctcatcttaggcgttgcggaagaaccacttggttcctacaacattttgattaggacgcggaactaatatgcctacctcattcctagtgaagttgttgagctcctcttgcatcaccaccacccaatacgaaccttgaagtgcttcctctaccttgtgtggctcaatagaggaaacaaaagagtgatgttcacataaatgagccacacgagatcgagtagttaccccc

SEQ ID NO: 7287 - DNA, 422 bp, Zea mays
agtactttacctgaatctatatttttctaatctagagcattcacttgttctacactaactctattttagcatctttagcttcacttgttatctacaacgcacggcagagatccagtcttcatatccgagaagttcggcgatccgaatcgattaatactctgtcggtggtttgggtccgaccgcacacccggggttgcccctcaaggtgcttttatgagtatgacggtgtcgacgactgtagcaaaatggttcgtgccaatcgcacgagggacaatggacaaggtttgcaggttcgggccgcttataagtgcgtaacaccctacgtcctggtgagtatatgagcgtggttacaagaggattctctggatagaaagcacagagaatgtttgtgggtggctaagtagaatacgtcgatccatctg

SEQ ID NO: 7288 - DNA, 421 bp, Zea mays
  unsure (1)..(421): unsure at all n locations
agcttagcaacatatacccgtgttagctcatcatgtgagctactacggtcatgacactcattatgacgagacaactctttgctttagctntcacaagccaaagcccattggtgcaactgagttagagaaaagaactagatgttatctaatttttcttacaagtattgacataaccattgaaatccaaccctgctagttgcttatctgtgacttgaatttgaaaacactggtttctagtagtccagaacctctagatataatcattaatcgattcatcgtccttttgctggactgataccagataaactaaatctaactcataatccctagagaagaagtgcttatgaaacttatgctctaaatcatcctangaattaattgagttaggagataatgcaacataccaagcgaaagccgtgct

SEQ ID NO: 7289 - DNA, 455 bp, Zea mays
  unsure (1)..(455): unsure at all n locations
cgtgaagattcttcatcccaacatgggctagttggcgatgccagagccaacccatattagtcttagcaattaagcaagtatcgagttcagctctattaaaatcaactaagtatagctgaccctctaatactcccttaaatgctactgaatcatcacttcttctaaagatagtaacacctatatccgtaaaaagacagttgtaacccattttgcataattgagaaacagaaagcaaattgtaatctaaagagtctacaagaaaaacattggaaatagaatggtgaggagatatagcaattttaccaagtcctttgaccaaaccttgatttccatccccgaatgtgatagctctttggggatctttgtttntctcgtaggaggagaacatccttttctcccctttcatgtggtttgtgcacccgctatcaactatccaacttgagccccggatgcat

SEQ ID NO: 7290 - DNA, 436 bp, Zea mays
  unsure (1)..(436): unsure at all n locations
agcttggtgccgatggtgaagcatatatctttatagtcttggctgtcaaactgcttgccgttgtcgactgttagtttggacggtactccgaagcggcaaacaatgttttgccaaaagaatttttgggccgtctttgatgttattgtggagacagctcttgcctctatccatttggtgaagtattcgacagcgacgaatgcgaacttaaggttcccctgagccgtgggtaggggcccgacgatgtctatgccccagcgctggagaggccatgtgtgggcgatcagctttgtaaattgcgaagggctgcctgatcgaggggaaaacttctggcaggcttcgcaggaccttgtgacccgatttgcggcgcagatcattgcgggccagtagaaaccttggcggatcaccttagcagctanggccctcggccctgcgtgag

SEQ ID NO: 7291 - DNA, 439 bp, Zea mays
  unsure (1)..(439): unsure at all n locations
tcacctagagagattcacttgaaggccgcacaaagaattctaagatatttgaagtatactcccaatattggtctatggtatcccaaaggtgctcaatttgaattaattggatattcggattcagactatgtggggtgcaaagttgatagaaagagcacctccggttgttgtcaatttcttggaagatctcttgtttcatggtcctctaaaaagcaaaattctgttgctctctctaccgccgaggcagaatatatatcagcatgtaattgttgtgctcaattattatggatgaaacanactctattggattatgggatcatttttaagaatgtgcctctcatgtgtgataatgagagtgcggtaaaattggctacaaatccagtccaacactcaagaactaagcatattgatatacgacatcacttcttgagggatcata

SEQ ID NO: 7292 - DNA, 439 bp, Zea mays
  unsure (1)..(439): unsure at all n locations
agctngacatacaaatgacaatgctctattctttgcaacaccatcctcaaatgctcctcgtgctcctcctcttttgaaaatataagaggatatcatcgataaacaccactacaaacttgtcgagatagtccatgaacacattattcatcaagtacatgaagaaagctggctcattcatcatatcgaagaacatgattgtgtactcataaagcctatacatggtgatgaatgatgtcttcagtatgtccgaaggccggatcctgagctgatgataacctgacctcggatctatcttcaagaacacactgactcctctcagttggtcgaacagatcttctattctgggcaggggatacttggtcttgatggtgacttcattcagagctctgtgatctatgcacatactcttcataccatctttcttctctacaaactacac

SEQ ID NO: 7293 - DNA, 460 bp, Zea mays
  unsure (1)..(460): unsure at all n locations
tctaaagggagatcatatgttaggactaaccgatgtctgttttgagaaagacagaccttgtgcagcatgtcagacagagaaataggtgggaagcactcatcacaacaagaatgtgatgacgacatcaagaccactcgatcttcttcacatggatctcttcagacccgttgcctacatcagcatcagggaagtaagtatggtcttgttatagttgatgattnttcccgcttcacttgggtattctttntacaggacaaatctgaaacccaagggaccctaaagcgcttcttaaggagagctcaaaatgagtttgagctaaaagttaagaagataaggagcgacaatgggtccgggttcaagaatatgcaagttgaagagtatcttgaggacgaaggcatcaagcacaatgtctccgctccctacacgccacagcataatggagtggtagagatgaagaaca

SEQ ID NO: 7294 - DNA, 395 bp, Zea mays
agcttatgaatgaaccttcttattttttcaagcagcttcagccgaagctgtttcctttccgcatgaccttcggcgacgaagcatggtcccaacagtagccccttcgcggtgctagatcgtttttcgtaacgagcttgatccgtgaaaaaagtctcttaggctttaggaagccaaaggtccgaaaaacaccttccctgagctcgttgtcgagaaacgatacagttttcgagcgtgtagcggtcccaccatgcaggttcactattttggtttttgcggcccaccgcgcagcgggtgcgagcgactgtttgcctggtgtaaaaatcctgacgattcaccttcttacctgcagcactatataaacagacgggtaggtgtgaagttaccacagcattcat

SEQ ID NO: 7295 - DNA, 440 bp, Zea mays
  unsure (1)..(440): unsure at all n locations
nggagaaaaaaaagtgtctgacttgttctgcaatactgtattagtgcatagatgcgcttgtatttactgctagctcctaaggaacagcgaggtgttaaaatatatatttttactttcagtggttttctgtttgaagactaaacagcctgcactagtacttaatgtaatatattacatgtgggttccttcaaacagtgatatgacatgttaattatgaaggtgccaatgatactacttgtacttaatgtaatatatatctgaactgttgtagtaatccagacatccaattatgagtgggttccttcagatagtagtaaacttgtctagcctttntcaactaaatgtttctttcagcggagtgttaaaccacactataagtattggctcaaagcagagtgctactgagtggcatgttagatatgccgagcttgcatactcat

SEQ ID NO: 7296 - DNA, 429 bp, Zea mays
  unsure (1)..(429): unsure at all n locations
agctntatcttgttgatttcacaacatgttaagtgacgcctgagacttgtttagtggcaaagtccgacaagggttggctatggcatcaccggctagcccatgtcggtatgaggaatttggccaaacttcaaaaggataatcacatcattggactaacaaatgttgtatttgagaaagatagggtttgtggcgcatgccaagcaggaaagcaacatggagtcccacatcaatcaaagaatgtggtcacaacaaagaggccattggagcttcttcacatggacctcttcggacctgtggcctacattagcattggtggtagtaagtatggcttagtcattgttgatgatttttctcgactcacctgcgttntctttttgagtgatcaaggtgacactcaagaaatattgaagaaattcatgacgagagctc

SEQ ID NO: 7297 - DNA, 439 bp, Zea mays
  unsure (1)..(439): unsure at all n locations
tctaaagggagaacacgtgataggtttgactaacgtacaattcgaaaaagatagaccttgtgcagcttgtcaggcaggtaaacaggtgggaggagcgcatcacagcaagaatgtgatgaccacatcaagacccctggagctgctacatatggacctcttcggacccgtcgcctatctaagcataggaggaagtaagtatggtttagttattgttgatgacttttcccgcttcacttgggtgttctttntgcaggataagtctgaaacccaagggaccctcaagcgcttcctcaggagagctcaaaatgagtttgagctcaaggtgaagaagataaggagcgacaacgggtccgagttcaagaaccttcaagtggaggagttccttgaggaggaatggatcaagcacgagttctccgctccctacacaccacggcaaaat

SEQ ID NO: 7298 - DNA, 409 bp, Zea mays
agcttctaaagggagaacacgtgatatgtttgctaacgtgcaaatccaaatggatagaccttgtgcagcttgtcaagcaggtaaacaagtgggaggagcacatcatttcaagaatgtgatgaccacctcaagacccctggagctgctacatatggacctcttcggacccgtctcctatttgagcatacgaggaagtaagtatggtctatttattgttgatgacttttcccgcttcacttgggtgttctttttgcaggataagtctgaaacccaagggaccctcaagcgctttcttaggagagctcaaaattagtttgagctcaacgtgaagataataatgagcgacaacgggtccgagtttaagaaccttttagtgtgggaactcctcgaggaggaagggatcaagcac

SEQ ID NO: 7299 - DNA, 440 bp, Zea mays
  unsure (1)..(440): unsure at all n locations
tcggagcgccgaaggtctcaaanaacaccttccctgagctcgttgtcgagaaacgattcaatttccctgcgcgtaacggccccaccttgcagaattactgttcggtctctgcggtccaccgtacagcgagtgcgagcgggtgtccgcctggtgtaaaacttctggcgcttcgccttcttacctgcggcactatataaacagacgagtaggtgtgaagttaccacagcatttactgctatttgcactgttttgctgccaaaatttttaaccgtcgccgaagcttgtttgtcagaatcgaacgaagctccatcttgaagcctgcttcggaggaaaaaagtattaaagtttcacaagttcatagttaaatggccagagtccgctctaccgctagagttgagcgtgagggggacgaaactgaagcttctgagactgtccctatc

SEQ ID NO: 7300 - DNA, 432 bp, Zea mays
agcttaatgatgaattggctagtcttaatgctcaacttaagactagcaagaatgattttgataagctaaaatttgcaagggatgcctacaccattggtagacacccctcaattaaggatggacttggcttcaagagggaagccaaaaacttaacaagccataaggctcctatctccgccaaggagaaaagaaaggctcctatggctagtagtactaaaaagaaccatgcttttatgtatcatgataggagacaaactaaaaatgcttataggagttataatgcttatgatgattttgactctcatgccatgtttgcttctaattcttcctacatgcatggtaaaaatatgtctaggagaaatgctattcatcatgtgcctagaaagaatattattcatactcctaggaaagtagtgaatgaaccttctacaa

SEQ ID NO: 7301 - DNA, 431 bp, Zea mays
  unsure (1)..(431): unsure at all n locations
tcggcatcgtcatcctgtgcacaacttatcagtataaggtaaaanataatctcaggagagggtaagcaacaggtacaagtttaataccggcttgagatgacttagagcttcgtcactagctaagtctcgcccacccttcgtccaaatctgtgttataaatctatttccaatgcttcaggccaggctggggatgacagtcaagtccactcgtgatatgctgaagtttggcatggttacaatntttccgtgcgtgcaaccagccttcataaaagctacagctgtgccggaagatgccaatagggttcagaagtcaccatactcagctataactttttcaagcgcctcaacttcgccctcaatatgttcgaaggtgcttggcatgtcttcaaccaacgttcaaatttttagacttggacccactggtttataac

SEQ ID NO: 7302 - DNA, 438 bp, Zea mays
  unsure (1)..(438): unsure at all n locations
agcttatgaagattcttcatcccaacatgggctantctgcggtgccagagccagcccatgttagtcttagcaattaagcatgtgtcgagctcagctctatcaaaatctactaagtatagctgaccctctaacacacccttaaatgctattgaatcatcacttcttctaaagacagtgacacctacatcagtaaaaagacagttgtagcccatttgacataattgggaaacagaaagcaagttgtaatctaaagaatctacaagaaaaacattggaaatagaatggtcaggagatatagcaattttacccaatcctttgaccaacccttgatttccatccccgaatgtgatagctcgttggggatcttggtttttctcatatgaggagaacatccttttctccccggtcatgtggtttgtgcacccgctgtcgagtatc

SEQ ID NO: 7303 - DNA, 430 bp, Zea mays
ttttcactgcattctcgagcgaaccatcatgttgaattatctgttcataagagagagcttcgtcaaaaactgttaaaaacatcagcttcgtaaaaaccgcgaaagacgcaacagatggccagagtacgcttgactgcgagagtttctcgtgaaggagaggagacttatgccaccgagacagctccgatttccaaagtcatgagacaatcgggcttagttgtgacagagggaaccgttgaaaaaggtacttctagtgccgaagctgagcaggttgatattgaagaagaaaatgctaatgaagaagaagaatattatagcattttgatcccatcaaaacccagtcacttggattttgagaaatctactgtgtctgaagtcgacatgcccatgatgatgaaactgggatacttcggagaagctgaaaagaagc

SEQ ID NO: 7304 - DNA, 322 bp, Zea mays
  unsure (1)..(322): unsure at all n locations
ttgctgcagaatgttgagtggatgtatcatagaatcatgtacggaagttgctacttatcaataaaagtcaattggcatggtgtttagtggttacttggtatacattacggctaanaggtgtgatgactgacaagattattcatgccatctgtctgccttatcaaattaacagctgttcacataagaaaacttttcttttcttacatcataagggaatgattacatattggattcctctggttctttttcttttgaaataattggacatactntgcatttaccccacaaaataggacgaagtcaaggatagctttatctataa

SEQ ID NO: 7305 - DNA, 450 bp, Zea mays
  unsure (1)..(450): unsure at all n locations
ntgctgcgtaaggcctggcgcatgcatcacaccatcatgttgggctcnggtctgccttcctgacactctaattgtgatagggatggctggctgcttggtgcgcattacagtcaaagcgtctgaggacagaccagactctacatgccaccggtctggcctatcgaattaccaaatagctacatctgtaaactaatggtttcttacatcatagcggaactatggcggatccggatccctgcggactgacctatatagcaagagatgatatacccttgcattcactgcaatcgatcagacctattcagtgcattctatacctattatacatctcgaggatgaatctctaaaggcatctttgtgcaatgagaccccatatgggactaggtgcttacagaagcaaggacacgggtgcatcgggcgctgtaatgccacaataaatggacacacttc

SEQ ID NO: 7306 - DNA, 409 bp, Zea mays
agcttgccagtacttgccaaaacaacaacatttatcatctcagcaactgcagaccataccagtgacttggcccttcgcgtgctggggactggatatgattggacctttcaaaaaggctcaaggaggatacactcatgtactggtagcaatcgacaaattcactaaatggatagaattcaaacccattgcctctttgacctcagctaaggtcgtggaattcatacaagacataatattcagattcgggataccaaacagtatcataactgacataggatccaacttcacaagttcagagttcttcgacttctgcgagcaaaaaagcattcagatcaagtatgcttctgtagcacattcaagagcctaagggcaggttgagtgagccaactggatgatactggaggcactc

SEQ ID NO: 7307 - DNA, 434 bp, Zea mays
  unsure (1)..(434): unsure at all n locations
tctanagggagaancacatttgtgactaacaaatgttcattntgataaagacagggtttgtagcgcatgtcaagcagggaagcaagttggtgttcatcatccacacaagaacatcatgacgactgacaggccactcgagctcctacacatggacctattcggcccgatagcttacataagcatcagcgggaagaagtactgtctagttattggggatgattattctcgcttcacttgggtgttctttttgcaggaaaaatctcatatccaagagaccttaaagggattcttgagacgggctcaaaatgagttcggcttaaggatcaaaaagattagaagcgacaacgggacggagttcaagaactcttcatatgaaggcttccttgaggagganggcatcaagcatgagttctcttctccctacaccccacaac

SEQ ID NO: 7308 - DNA, 434 bp, Zea mays
agcttgaacccggctaactattcattattttacaatcgtgcactgggagtggagagatggcgagagtggctcgtaccctcctggcaaaggatcgcctaaaaagggtggtgtgctttctggtggcgcggacctgttcatgcagtggaggatccgtgggaatggtagacatgcaatgtttacgagaaacatatgtcgtgcggttagagatcctcacgtgagtaaatcgattcggatcaccgttatattccgaagagtggagacttgatctctgacctacaacctatgccaggatgtgaacctcatgaataaaaatgatgttgtattgatgagatggtgaaattagaccagatgccaacagagtctattaatatttaatctggtgtaagataattgaaagaaggactcacttaataagctatttctgcacaagatct

SEQ ID NO: 7309 - DNA, 437 bp, Zea mays
  unsure (1)..(437): unsure at all n locations
ngagcagtaagcattttagttggtcaacattttattaacaacacttgtcttactaataagtgtgaatcccaagtatcccattaaaccaaggtataagagtatatcaaaaacacttaagtgaaaccacttaagcaaaccattggcagatcatcggatctcgatttatttccatcttcaagttcgattatcatgtgaggagtccaggctgctcataaccgtgagcacggctgatatatctattttacactctgtagaggtggcacatctttacccatgagtcatgattcccttctagcccgggttagctagacctgtattcacttccgaggtgaatggccagggtctcactacgaggcttctccctagagtcctcattacgcacatgttggaaatggtcaactgcataaggtgcacctaccgtaaccaacttatagtct

SEQ ID NO: 7310 - DNA, 435 bp, Zea mays
  unsure (1)..(435): unsure at all n locations
agcttctaaagggatagcacantttatgactaaccaatgttcattntgagaacaaggtttgtagcgcatgccaagcagggaagcaaggtggagtccaccatccacacaaaaacataatgacgacggacatgccactcgagctactccacatggacctatttggcctgatcgcttacataagcatcggcgggagtaagtattgtctagttattttggatgattattctcgcttcacttgggtattctttttgcaggaaaaatcccaaacacaagataccttaaaaggattcttgagacgggctcaaaatgagttcggattaagggtcaaaaagataagaagtgataatgggacggagttcaagaattctcaaattgatggatntctcgaggagggcatcaagaatgagttctcttctccctacacacctcaacaaa

SEQ ID NO: 7311 - DNA, 406 bp, Zea mays
tatgaagattatacataccgacacgtgctagactgcggtgccagagccagcccatattattcgtagcgattgaacatgcatctagaccgacattctcttttgagaaataaactcaatagagcttaccgtctaatacaccttttaaagctaatgaaccatcacttcttctaaagacagatacatcaatattggtaaagtaacaattatatcccatatgacataattgacttactaaaagaaaatggggaccaggcgattctactaggaacacattataaattgaatgctcggtagtgatggctatttgacccaaaccttgccatgattctcatttcccaagatgattgtgtcctacgaatgcttgatcttgacgtatgaagtgaacattttcttctcacccgacatg

SEQ ID NO: 7312 - DNA, 432 bp, Zea mays
gcttctccagaagatggatgaatacatcttatctcgtaatgaatttcgacaaagaagggaagaagcctacagatactctaaaatggccaggggcttctgggagagattccaccctatgcatgtcaggtcaatccataatgccagtccaagtgacgacaggggaaaccaaacccataggcagcatcataactcccaatcatcaggggcgcaacaaagttccttcatgccaccagctccaagaggcagagggggcagaagcttcgggggaagatatggagatcagcccacgagagtgttttgtttgttctgcggtgaagacaaggggcataccacaagaacgtgccaggtcacgattcaaaagcagaaagagattgccaaagctgaagcacaacagaatcagccgaagcaggttctacatactgcttcatgcta

SEQ ID NO: 7313 - DNA, 299 bp, Zea mays
tcatccacaccttaatgccggtaagaatacatccattgtgaccgtgatgccgcgcacaccgtgtagcttcgttcaatttgacagtggtgctcgggggaggccgattggggtcacagtcgttcatctccaccgcacggtcatggcggagcacccctgcttggttggtgggggggggggggggattataataatcgataacaatcgaacctatatgagtgtgaagtaactttttttatctgaactaatactaccttggattataactttggttattaaatataaccttgcttctactaata

SEQ ID NO: 7314 - DNA, 414 bp, Zea mays
  unsure (1)..(414): unsure at all n locations
agctngttaggggcgccagcgtttttttttctcctctgtccagtcgcttccggtcaacagcagctgcgcgcgcaaattttttttggtcacagccacactctactaccgtgtgcgcagccttttatttttgtgtccggtcgctgtctgccgttttgacagctcacgcagtaactntcttgtgaccggtcgctgtgtgtcggggaccataattaggggtaccctcaagacgcctaattctcagctggtaacccccatcagcataaagctgcagaggcctgatgggtgcgattaagtcaaggatcagtccatacgagtgactcgatcacgcttcacccgagcctagcctcggactcgggcagccgacctcgagggactttcgtctcgcccgaggccccccttttaacggcggacaca

SEQ ID NO: 7315 - DNA, 461 bp, Zea mays
tctcgcacaagggatggtgagcacagtgcactgcatggcacgggcacactgtttgacaatagactggacatgtgcgccgtctgcaggatgaccctgacgtcgtctgccagcggagaggactggacgcattaaatgccgagagggcacatcgtctgtcagcatggtggcaggcggtgcgtcctctccgcaataaatgcagagacctcctagctttagaggccttacgtcaggctccgcccgttggcttatgtcacgggccacaagccacacagcagcagcgggcctccaccctcgcgggtagcacaagcacgcagggtaaggcctggacacgtgccagcaccggacccttacttattccagggtttcccctgccccgggtccttgctgtggtccggacctcactcggagggacctatggcccatccaaggaacccagcatgccttcttgggagtcccgaatc

SEQ ID NO: 7316 - DNA, 446 bp, Zea mays
  unsure (1)..(446): unsure at all n locations
agcttctatcgccaccgtgagagagggctaataatatgtctaccgccgagcctccctgtggattagtcgtcgccacgcctcttgtggtcatgctctggtgcttgctcagaccctagggaaggggtgtgtcaccataatccgggagttttgccgctgggacccttgcgattgctggccggagttgttgctccgccacgggccgcgattctccgtggtcggaccctggtgctccatcgctactggtgaggaaccctcccctcgagtttgttaggttctttattacatactaaatgagtgctcgtgcgttgcaacggaaacgtataataatacgataacttatgtacaaatgtgtgttatattgttatgagaaaatgtttcggaattcattgtgatcctacccatatantaaattggttatttaatctagctatatcaccattacattg

SEQ ID NO: 7317 - DNA, 452 bp, Zea mays
  unsure (1)..(452): unsure at all n locations
tggagggagggaagctcattgacaatntcagagaanaagcatcgttatataaatgaaatgacaccaacaggtatttttggcatgtgagtatattaaacgcaagggatctcatgtatctcgaactactaacaaaaaggttaagtcaccttatccattcctccctagtggactgagtattggttgatcagcaattatggcgttaccaatatgctacaacccttgttttgatggtctcctcagcaaaagaaaagcttccaatattgatcaacttccaaatttgcacatgggcttcccttctatcgaatnggatgtcagtttcgtactgcatgaatacatgcaacacgcacgcacagttatgctgagtagctgctcactggctgatttaaatccctgcacgcaacgtgtgccaacggtgggtgtacacgaatggaaatgatacgtctgtaagatac

SEQ ID NO: 7318 - DNA, 414 bp, Zea mays
  unsure (1)..(414): unsure at all n locations
agcttgtcgtctagaatacccttaaaagctagtgaaccatcacatcttctaaaaacagacacatctacatttgtaaacaaacagttatatcccatattgcataattgactaacagataacaaattatatccaagagactctactaaaaacacattagagatagagtgctcattagaaattgcaattttacctaacccttttaccttgccttgactcccatcaccgaatataattgaatcttgggaacccttattcttgacgtaggaggtgaacatcttcttctcccccgtcatatggtttgtgcatccgctgtcgataatccagcttgaacccccggatgcataaacctgcaagggcaaattaggcttgggacttangtacccaactcttgttggtcctacaagggtagtacaa

SEQ ID NO: 7319 - DNA, 485 bp, Zea mays
  unsure (1)..(485): unsure at all n locations
ctattaggacctataaatctcagcttgtaatttggttgctgacttgctgtaagctgngttggtggtctctgaaattgttatgtagaggcatgtccttttggtgcttgtatgttgatttggtaatatcggcctgtgaattataattttggcctttttctgaacttgaagattgtgaactagtagtgatggcctgtgaacctgtagtgttggcctttctgaacaataagtactggttgtcaatctgttgaggagaagcagtcaaatctcttcacatcgggctttctctcaacattcctgccatcggcttgagtggatgtgctggattgctcctcctccgccgccgccacaatatttcgctgccggaggggagagctagggctcgtcgttacaggagacaacaatatacctggttggcagtgattctattctctcttctacactactaactgtatttnttcaattattaatcgaatttagtgcaccca

SEQ ID NO: 7320 - DNA, 388 bp, Zea mays
agcttcggcacaaagacaaatctcaatactaaggatcgaaccgacttaaagatgaattgacttgaagacccataatgttttgtgtcattattgtagttgattgtaaaggatataaatgtaattttgcgcaggttgcatcctgtgcctataaataggtgaacagtatcccggtactgttcacgcgatcctataatcacggtcacgttacgcccagattattgttttctgccaaggcaaaggtatatatattcctaaatattatgtttcaatacttgtgtattcatataataaaacatgtgaatatattttgtgttttatatatcatttttcattgttgtcttaaaaaatatgatcacgaaggtgaaaccttcgtgataccttacttatg

SEQ ID NO: 7321 - DNA, 417 bp, Zea mays
  unsure (1)..(417): unsure at all n locations
ctgttccagtgcacgcaagaccacgaagaatacctccatgtgtatgtccaaaggttcttgcgtctgagagcatatgcgcccacaatgcccaatgaaatcgtcattgaggccatgatcaaagggcttcagccaggacctacggctcaatacttcgccaagaaaccccctcagactctggagaagctgctgcagaaaatggatgagtacatccgggccgataatgattttcgccagagaagggaagaagcttataagttttctgagatgactaggggcttcggagggagaatccaccctatgcatgtcagatcaatccacaactccagtcagagtgatgacagaggaagccagtttcagaggccacaacatagctctcagtcttcagggcaactgcagagctctntcagtccaccagct

SEQ ID NO: 7322 - DNA, 423 bp, Zea mays
agcttcttcctttctttggtggaagttattgtcagcccggatgtactcatccattttctgaagcagcttctccagagtttgggggggtttcctggcgaagtattgagccgtgggccctggccgaagacccttgatcatggcctcaatgacaatttcattatgcactgtatgcgcttgtgctctcaaacgcaagaaccttcggacatacgcctgaaggtactcctcatggtcttgagtgcactgaaacaaggcctgagcggtgactggcttcgtctgaaacccttgaaaactggtgaccaacatgtccttaagcttctgccatgacgtgattgtccctggctggagagaagagtaccatgtctgggccacactttggactgccatgacgaacgaattttgcatgacatcagcattgcctccata

SEQ ID NO: 7323 - DNA, 374 bp, Zea mays
  unsure (1)..(374): unsure at all n locations
tccacacgcttgccccagngattggctaagtatgtntgaatagctctctgataagtcgctccagcgtntttgaggccgaacgacatggaggtatagcaaaaggcaccgaatggagtgatgaacgctgttttttcctcatcttctttcgccaagctaatctggtgataccaagagtagcagtccaagaaagacagcacagaacatccagcggtggaatctaccacctgatctatcctagggagcccgaagggatcctttggacagtgtttgttgagatccgtatagtcgacgcacatgcgccaatccactttattcttttttagtacaagaacagggttggctaaccactcgggatgtaacacctctctaataaa

SEQ ID NO: 7324 - DNA, 470 bp, Zea mays
  unsure (1)..(470): unsure at all n locations
gctntctaaagctctctatgggcttattctttctctacgcgcttggtatgaaaggcttagggatttcttgctttccaaagacttcaaaattgggaaaggtgacactactctattcactaaaagaattggcaaagacttatttgtttgtcaaatctacgttgatgatattatttttggatctactaatgaattattttgtgaggagttcggaaaaatgatgtcaaaagaatttgaaatgtctatgataggagaattgagcttctttcttggccttcaaatcatacaattgaaagatggaatttttataagtcaatcaaaatatttgaaggacatgctcaagaagtttggtttagaaaatgctaagcctatcaagactccaatggcaacaaatggtcatctagacttagatgaangaggtactattggttgatcaaaactttatcgctcaataattggtagtttgctttata

SEQ ID NO: 7325 - DNA, 450 bp, Zea mays
agcttttgcattatgttcaaaccttgtctcctctctggccacacaaagatattcatccttatcattgcttcggaggtaagttggtgaaggtagatttcaaatatcttcagtatttccatgacaaaactgctcaagggaaatcgcagtccaccctttaagaagcttcggaatatcacgacttcattttcctcaagagtcggacaagtcttctctccttcttcagccctcacaacagacaagtcccgaaaatatctgcccctcatattgacaagatcattttctttaatactggatttaccaaaaaccacatggcttggtcgcctaagtcgatcttcgtaatcttcaccaccactatccacatcataactgtcactgtcaccagtatcttcagaataaccctccaaaatctccctagtaatcttctctgtattagtctttgatattgattca

SEQ ID NO: 7326 - DNA, 315 bp, Zea mays
  unsure (1)..(315): unsure at all n locations
gcttgaagctgggcatggtgacttctgcgctctgctagcttctcgtggcacaactggtgcttttatgaaagctggttgcatgcacgggaatattgtatacaggccgaactttaacttatcaccagcggacttgaatgacatccccagcctggcccgaagcattgggaacaaatttgtaactcaaatttgggcaaagggtggacgaagcttggctggtgacgaagctcgaagtcaccttaaaccggtaataaactcataccttgcgcttaccttttcctttganacttgatttaccttataacacttttgtatgta

SEQ ID NO: 7327 - DNA, 448 bp, Zea mays
  unsure (1)..(448): unsure at all n locations
cgcacgtgagcgtggtccgcgtttgaatgaatggagacgaaatcacaggttattatgcttcagagtagggaaaaaacgcaagagtacgaatgcgacttgagatcaagcagtaggagtatatttctgttgtagctggcgtgggaatgctcagcatattccctctgttaacgctacagggtttttccggttaaagttcctcaagttaaattagatttatcaactaactataattattacaaaaatctaattatatattttaaatatcaatatttggtttataatatactaagctaaaattaaaaaatattacctatttcggggactaatggagtagaatttagcgtattctataacctaggtccggtgtggatacatncgggttattagaaactggttttataaagcttgaagtctctaacatgtcaaatttattcngggtctatattaa

SEQ ID NO: 7328 - DNA, 166 bp, Zea mays
aagagcaacaagaaacacaagtgatcctctcatgagtcctaatgcactagaattgaattgtggactttgatcggagcgtgggctttgatttgtgtcctgaagtgttgaactttgctcttgtattgaatggagagtgatgaatgcttggatggttggagtggacgtg

SEQ ID NO: 7329 - DNA, 437 bp, Zea mays
  unsure (1)..(437): unsure at all n locations
aagccaatcacaagtttattaaataattacacttagttcaatgggtcttctaagtgcgatgaagcctctgagcaactaaagacactattgaccactgctccggtattagctcaaccggacatcgctaaacctttngacgtatattgtgaagcatatggcaatgggctcagctgtgtactgatgcaagagggccgagtgaatgcgtatgcttcaaggcagttgcgccggcatgaagagcactatccaactcatgatctggagctagctgctgtggttcatgccctaaagatntggcgtcactatctgctgggtaatatctgttatatatacagatcataaaagtttaaagtacatcttcacccaatcagaagtaaatatgatgcacagacgatggcttgagctcattaaagaatatgaactggagatccattatcacc

SEQ ID NO: 7330 - DNA, 240 bp, Zea mays
atgctgttgtgcgcttatttgagagcagagaggccgctgtatctcgttgtctgggaacaggagacaacttgatacggctctgttcgacaacgaagatggacttgcttggtcaactaactcatctgtgtggtgttaacagagatgttattgaacactcgctcaatgtttacccatccttcatacccagtaagcagacgcttctgaagacgcctgatgacaaggccgatcgtgctcgaaatg

SEQ ID NO: 7331 - DNA, 495 bp, Zea mays
ggatcttaatcactgagctgcagctggttcccccttgggatgagtgttgtgtatttatgaaacctaacgggcggctacagtcccggtgaatctttgtaaatgctacgtagtggtgccctgctgggtcaccttggtagtgatcaatggagagtcatgatctccgggcagaaagggaatcacggcttgtgggtaaagtgcacaacccctgcagagtgtttgaaaactgatatatcagccgtgctcgcggttatgagcggccaacggagctccagtgattagtggtacttgatcagagatgttcggtttgcatgtggcaatgagatagatggttcttggttctgactctggtaatggtaagtggtaccctctccgtttggaaaggagtacgtctgggttaataacgtgggataactctaaaacttggctctctctactagtaataataatctgaccaactaaaagcaacatctcgacttatccgcacataaagctagt

SEQ ID NO: 7332 - DNA, 422 bp, Zea mays
agcttctccagaggttgtggaggctttctggtcatatattgagctgtaagtcctggccgaagccccttgatcatggcctcaatgacaattttattgggcactgtaagcgcttgtgctctcagacgtaagaaccgtcggacatacgcctgaaggtactcctcatggtattgcgtgcattgaaacaaagcctgagcagtgactggtttcgtttgaaagccttggaaactagtaattagcatatccttgagcttctgccatggtgtgattcttcctggccgaatagaagaagtaccaagttgtgctacgctcttaactgccatgacgaaagatttcgccatgactgcagtattgcccccatatgaagatatggttgcctcatagctcattatgaactgcttcgggtctgagtgcccatcatatat

SEQ ID NO: 7333 - DNA, 451 bp, Zea mays
  unsure (1)..(451): unsure at all n locations
agcttcttgccatcttctgacagacatattatctccttgctgtctgggagacaatacaagaagtcttcttctccgctgccattgaatatcaacgccccttttggatattttaatttctaggcataatgatgagcttctcgcttttcctcttcagatagcattttgcccgaagcatgtcgtacaatataatcaggtaatttggaagatgcttcgggagttgaagagagaattttttcagacagaatttgctttatagcttcctttgtagtttctccttcggtttccaaggatttctctttggcagactctgaagatccagtttcgatctcagcctggtgctntgtagcttcagctccagaggctatngttttaatctgtgctntntgagcttcgngcaattttctcagagtagagcctgaagactttattgtctncagtacatctagaacat

SEQ ID NO: 7334 - DNA, 476 bp, Zea mays
  unsure (1)..(476): unsure at all n locations
agcttcggatctcttgccttgcaactcttgtcaacatgaccagaaataacttgagagtctgttttaaggactgcccttcttattcccattgcctttaactttcgaagccccaaaagtaaagcttcgtattcagcaatattatttgtacagctgaagtcaagccttgctgcataacatgttctgactttggaaggtgcaactaggacaacagccgcacctgcaccgaaggttccccaggaaccgtcgcagaacactatccaagcttcggcatctttatttgcttcttcttcctgagcccctggcgtccaatcagcaatgaagtctgttaacgtctgggactgaattgaggatctatgcacaaactcaatactgaattcgttaagctccacgacccactntccaatccttccagtagcttctctgttcctcataatatccttcagagggtgtgatgaaggaacaattatgtggtatac

SEQ ID NO: 7335 - DNA, 416 bp, Zea mays
agcttgtgaaggttcttcatcccacatgtgttttcggcgatgccacagccagcccatgctagtcttagctattaagcatgcatctagaccggcttcttcttttgcaaaatcaactaaataaagtttgtcgtctaatacacccttaaaagctagtgaaccatcacttcttctaaagacagacacatctacatttgtaaatagacagttatatcccatattgcataattgactaaccgatagcaaattatatccaagagactctactaaaaacacattagagatagagtgctcattagaaattggcaatttacctaacccttttaccttgccttgattcccatcaccgaatataattgaatcttgggaatccttattcttgacgtaagaggtgaacatcttcttctcccccgtcatat

SEQ ID NO: 7336 - DNA, 412 bp, Zea mays
  unsure (1)..(412): unsure at all n locations
agcttgaaccgatgacccgcgtcaccttaatatctaatccgtgctcgccggagttcattcccccgccggcgcacgtggatcgggtaaatcactgagccattttccgaatcaatgcacagatagcctctacatctccccagggagctcaccgtgccgttggattggaatatgtcaccgtggtttggccggtacacccgcccccgacgaggacacccgcctgcgcgcgtggactgagcgattccggccatccccgccggcgagccgtacgtcgttgtgactgccagaacctccccaagctaaccctacccctcgccggacttctctcgtcgccggtaagccgcgccacccctttcttctctgcgggtactggttacacctgagagggaccgcangtgagaggaagagaaagtca

SEQ ID NO: 7337 - DNA, 446 bp, Zea mays
  unsure (1)..(446): unsure at all n locations
cacctgctgcatgcagctgaccaggactcgttgttcctcatatgcaatattgaaacaatgaanattggaactcttcagtgttattatcttcttcaaccttctgaaaaaggaccaatgcttctgaaggtataggcaacactccccctgttctattttgacttgtgatgtagtgaatgtcatgtttcaccgattgtagtagtggcctaaaaccatgctggattggattcctaacgctgaataactatctttgctgtaaagcttctactttatatgcttacatttcagaagaatagaaagtattttgtggtctgttattggcttgcactaatgaccggaacaaatcatgctgcagagactcgctgcatctgaagagatattgcctctcccagacatgactcgagaatgcagctctaagaataccatggaaatcaagaattcaatcgaaa

SEQ ID NO: 7338 - DNA, 377 bp, Zea mays
gcttggaacatcttaggcatatatatatgctataactataattagtgccatgtgtatgatttgacctggcactgtatcgattaatctattctatctgggctcacccgtgttaggacattcctttgaatgttgaatggcaggccctcgctgaacatggttctgattcgctgtgcgtctgtaccggacacatctactttccttcatcttgctgctgtgcctgtgcacgatgtgtagactttggggtatgggccacatacatactgtggttttggtgggccatgcaaaaacaaactcgggccaggcttacatctcctattttcacgccatacattgtacatatttataccgcatgcatggaaatgttgtcctagtctgat

SEQ ID NO: 7339 - DNA, 338 bp, Zea mays
  unsure (1)..(338): unsure at all n locations
gcttggaagcgtcgataggttgtctacttggtgtatactcctccttcttttcttccatcgccttgaatgcgacgggttgagcttccgatgtggtgggttcgtcaagctcgttgattttcctcgagccttcgatcatgcactcaaaacttacaaaatgcccgattacttcctcgggggtcattntagtatatctaggattaccacgaattaattgaacttgagtggggttaaggaaaatgagagatcttagaataaccttaaccatntcgtggtcgtcccattttacgctcccgaggttgcgcacttggttcaccaaggtcttgagccggttgtacatg

SEQ ID NO: 7340 - DNA, 500 bp, Zea mays
  unsure (1)..(500): unsure at all n locations
caagctttatgatctgtatatatatggcagatattttctctcttataatgacaccatattntaagggcatgaaccatagtagctaattctaagtcatgagttggataatgttcctcatgtcggcgcaactgtcttgaagcataagctataactcggccctcttgcattaagacacatccgaggccactgcctgatgcgtcacaatacacatcaaaaggtttttcaatgtccggttgagctaataccggagcagtggtcaataacaccttcaactgctcgaaggcttcattgcatcttgaggaccagttaaattttgtatcattctttaataagcttgtgattggcttcacaagtttagagaaatccgggataaatcggcggtaataaccagccagtccaaggaaacnttgaacttgatgtacagtggttggcgggttccactcttaaatatccttgaccttgatgggatcaaccacaatcccattcgtagagagtacatg

SEQ ID NO: 7341 - DNA, 455 bp, Zea mays
  unsure (1)..(455): unsure at all n locations
acatcatcatcagatatttattacgactcgaaaagaatattttgatattntttctgattgccatacagggtcacaaatcattgtgtctaagtcagtattaaagccatctttgttttcttttaggattatataattcaacctatagattatataagcatctaataacttgtttatggataatcataatataggtatctagattatataatccacataacaatccatgttatttgtttgtccctcgacttatttaaactggattacataatctataggataaacaaacatggcttaagaccaagtaggctcgttttcacttgattagaacaggtcaaaatcagaactatagtttatattcttacttttaatagatgattgcaccacggttctatcaacctctatactctccatctcccaacttgaagcctaagtgtcttagctgggagacacatatg

SEQ ID NO: 7342 - DNA, 436 bp, Zea mays
  unsure (1)..(436): unsure at all n locations
atcaacacgatctgaagataaagatcgttcaatgagatcgtgggggagtactatgtgcgacataccaagtatggccaggtcccaagacctttcgtgaggttcctaagataaaatggtattgttgcccactattcaacacctagcgaaccacaacagaatggggttgctgaaatgcgtaacagaacgctaaatataacactgtgtattaccaagttatgcaagtattaggtggtactccttgtttgtccattccatcattttgttgctacatgacgcatttcaagattgttttacagaatttcaccttagctctaccttcatttgatgtatgcgtttgctattcatatcanagaatgcagccccttgcagaccttcattcatgctattctgaacctgaagatcatgattcaacagagcctgatccactcaatacaga

SEQ ID NO: 7343 - DNA, 480 bp, Zea mays
  unsure (1)..(480): unsure at all n locations
agcttatcgtttttgctaagactcaatctatgcttgagtntaatcgtgatggttctattagaaattgggagtataatgctgaatctgcgcgtattgagttgtgtcgcatgattgctaggttagatttgcctcttgtactggcaccctgcccacaccccttttctgcgcagttccctctccctcacgcctcacatccgcagtgacccacatagagccgccatcaccaagccccatcacctcgtcttccgcaccgatgccccactcgcgtcgagcctacgtcgttgtccgtcgtgccgcctcccgaagcccgtccccatccacgcctcgccgagatgtaagcatttctctttggattgngtgagatcctttgtgttctcatcaaagggtctataaaaagcctacacttatgatccaccacaatntggcatcaattgtacgaaaaataatgactcatgcaagtttccactgtgcaaaatgtgt

SEQ ID NO: 7344 - DNA, 447 bp, Zea mays
  unsure (1)..(447): unsure at all n locations
ccctatacttctagccatcttctgtctgacatataactctttggtggccgggaggcagtataaaaagtcatcttcgtccgtgccattgaatactaaagctcctttcggatacttcaattcccggtcatagtgattagcctaaaaaatctcttcttcagataatctttttccagaagcatgtcgtataatataattgatggcctcggaagatgcttcgggggaagcagtgtcagtttcttcaaccaaaattggctctgtcctttttggtttttcggcttccaggggatttatcttcgtaagttctgaaggcccatcttcactttaggttgttgctgcgaagttcaacagcaagggtttcaccaggcacttcaagagtntcaatagtcttctttggagttatgcttgaagatttaattgtctccaaaacatctagcacattaaccattc

SEQ ID NO: 7345 - DNA, 390 bp, Zea mays
gatcagccaaaacccatgcttctatgtgaagatatcacagagcacaaggtgctgctgggatctcaattgtctgagcagcaagagaaaactttgataaggtttctcttcaacaacaaagatgtctttgcatggtcagctaatgatctttgtggagtcaacagggatgttattgaacactcgctcaatgtcgatccatccttcagacccaaatagcagaggcttcagaagatgtctgatgataaagtcgaaggtgctcggaatgaagtgaaaagactcctcactgccggagttatcatagaggtaaaatacccacaatggctggctaccactgttatggtaaacaaagcctatggtaaatggaggatgtgtatcgattctactgatctcaac

SEQ ID NO: 7346 - DNA, 388 bp, Zea mays
  unsure (1)..(388): unsure at all n locations
agctntaagagattggagttcattggtggttcttacattgtgggtattcgtagtaggtcagagcgaagccagatctgtcgcccgttgccgaacgacttttgttgttcctgtccaccttgaagtcagccagggatttcacatttgcttcctggatcagctgctcttggcgctcctcgaataggagctattcttcagccggcaaggtttcccatgttggcttgatgatattgctggtggaaacttcagagctatcctttgaaccggccattgagggccgatctcgataggtctgtatgaaatcttccccagcgaagtcgccaaaagtatgttgacacctttttcgggcgccaatcactcaacacaaaccgtggcggtgctctctgcacaa

SEQ ID NO: 7347 - DNA, 422 bp, Zea mays
  unsure (1)..(422): unsure at all n locations
agcttcgcatctctgaactaactcggctgtatcgttcttcgccgacggccaatataatactggcctgaagaccttcccgactagtgttttggatgctgcatgtactccacactgtcccgcatggacttcctccagaagttgctttccggtggacgggagaacgcacttcatgaggacgcctgacgcgcccctcctgtacaatacctccccaatgagtgtatagtgagctgattgtctggcgatgcgctctgccaagttcttgtcgtccgagtcttcttcgntctttatatacttaataatcggtcttctccagtcatcagaatctgactcgagttgatttatgatgttgcactcttctgtttgatccattgagatactcggctgaagaatttcttgcacgaagaccacgggcgggacctgag

SEQ ID NO: 7348 - DNA, 399 bp, Zea mays
  unsure (1)..(399): unsure at all n locations
cataatagattctagacatattgtgtcaatctagacgaacttatctgtagctcgctttctccggtgtatgtaactatatttgttctgttctagctaaacttaatcaatcctagctattcaatccatttcaacttgtatctactagagagtagagtaagaccatgtttgaaacctctagagctaatagctagctgctaaaattagatgtagaggttctaaacatctctagctaataccctagctaattgttaattcgttatttaactcacagctaataattagttcattaagtggctcaatccagctaactagccatacnctccattagtggtagcaacatctatagaggaagctagtttngtagttcttaataacctacacttatatgtacttattgtc

SEQ ID NO: 7349 - DNA, 447 bp, Zea mays
  unsure (1)..(447): unsure at all n locations
agcttcgtattcagcaatattatntgttcatctgatatcaagctttactgcatagcatgttctgactttggaaggtgcaactaagacagcagctacacctgccccgaaagttccccaagaaccgtcacagaacattatccaagcttcggcatctttatttgcttcttcttcctaagcccctggcgtccagccagcgatgaagtctgctaatgcctgngactggatcgaggatctatgcacataatcaatgctgaattcgttgagttccgcagcccactctccaatccttccagtagcttctctgttcctcataaatcataatatccttcacaggctgtgatgaaagaacaattatatggaatgctcgataatagtgccgaagcttcctagaggccattaagacagcatacaacaccttctccaattctgtataatnnttctttgata

SEQ ID NO: 7350 - DNA, 234 bp, Zea mays
tgaacagtacatattcttattggtattgcagcttcagcaaatcaggcgaagcccatgctattgtgtgatgacataccatatcaagatgcgctgttgggctcgctattatctgaagaccaggaaaagaccttgatgaggttgttattcaacaacaaagatgtttctgcatggaccgctaatgatctctgcggagtaaatcgggatgctattgaacattcgctcaatggtgaccca

SEQ ID NO: 7351 - DNA, 224 bp, Zea mays
attccccggcacccagttggccatcgactccggcaccgcatcgaacatgaccccaggtaaccgatgaagctcccagacccgctgtcgagtctctactgacgacgtacccgtgattcattcgcagcggatctcgtttccccatatgtggcgagcccatatctctgtctgaaccgtcaacccgagttaagttgaacgggggcacgacgctcgacatttatagcacg

SEQ ID NO: 7352 - DNA, 482 bp, Zea mays
  unsure (1)..(482): unsure at all n locations
tgcaagcttgaccncacctgtaggctcgcatcctcccctgagatgggcccaggggccactgtcggtaccctaaaactagggtaccccttagtacagtatgaagaagcagtacccacgtggctatctttattcgcgtggtaaaggagctgtgcgtggggccaggccgtgactcgccccagcctcgggtgactactctgggctagcaacagcatccgaccccaccacgtgggcagctctatggccgccacgtggccaaagaaggtgatgtactccaaggcatcgacagtgagtccggacccccatgggagagtgccggacccctggatatacggtcaggacctccaggttggtgcaagaccctcacgtgtacggatcggacccctaaaatgggagccggacccaatacggtgggttcggaccgcccatagtgggatcccaagaccttacttaaggcccacgcggnggtctggagctgacacgtg

SEQ ID NO: 7353 - DNA, 506 bp, Zea mays
  unsure (1)..(506): unsure at all n locations
gctttcacttgtgatttgacacatcacctatgtctatattntaagaagcaccaaatggcgtggcgtacctgaacttgtcaataaatgatcgcgaatacaaatttcggtgcccaactccagcaacaacattaaaagtagagttgcagtgaaatgtgccaaaacatggaggacaccaataatggctcttctcatccttgatagtttggatggtttgaatgaatatgacgccatcagtaaagtaagacttcctactgaagagacataagactgccaaaaaatttgaggtatagcacaccatattgtgcctgagaagctnttcagacgcccagaccaagtttcttcatttaagatatgaacaagattacactggataagatagaanaaagtcaagaatatgaatacaaatcaatctgctctgcctcccaataacaaaatgccagagcacacataactcgactgacgagtcgatgtcgatgcgcacaaaggaatcatacagagtgaatatg

SEQ ID NO: 7354 - DNA, 473 bp, Zea mays
agcttatgaagattcttcatcccagcatgatctttcattgttgccagagccagcctatattagtcttagcaattaagcaagtgtctagttcagcattgttatcattaaaatcaaccaagtatagatgaccatctaacactcccttaaaggctatcgaatcatcacttcttatagagacaataacaccaacatcagtaaaaagacagatgtaacccatttcgcataattgagaaacagaaagcaagttgtaatctatagaatctacaagacaaacattcgaaatggaatggtcagaagatatagcaactttacccacacctttgaccaaaccttgactttcatccccgaatgtgagtgctctatacggatcatcatttgtctcatatgaagagaacatcctcttctcccctgtcatgtggtttgtgcacccgctatcgattatccaactagtcctgccggatgcataaacctac

SEQ ID NO: 7355 - DNA, 486 bp, Zea mays
  unsure (1)..(486): unsure at all n locations
agcttatgttcgacggctcccaacgaagccgtcgaacttaagcgaatntaagcaccaaaaccgaacgcgtagttttattccagacatttgcccacccgcccacgacgctgccgcccaccggtgctccacccgcccctcgccgtcgctggtgctacacccgcctcgccgccgccgactcgccccgacccccgccccatctacgccagaaccgccgccgctaagtgagtattttttatttggagtattattttgtaaatgtatatattgctttggagttgtcatttctgagtattaaatagtttgtatgttaaatattggttagcttgttatgtccgacgaatcggaattgattatgatgagatacaattatgatatgatgctttacattctggttatgattatgaacttgtcatattaaaggaggctcgggcgggttcctgagaacttgtccgtagggacctgtcgtgtatgagcacccggaaatag

SEQ ID NO: 7356 - DNA, 266 bp, Zea mays
agctgtctggaagctcacaactgcaagaaggtggtatgcttggtggacgacaacttgccgagtccagagacttgatcctgtaccacgcgcagatcatcgcgatgatggttcatgtcagcatagtcaagcgatggctcctctccaggatggtgcaagagctactagcatctcgatgcacgctgtctacatcacaagatgcaacgagtgcttgttcctcctcctgcaagcaagaacaacactcatcattgtagcaatgagatctgagc

SEQ ID NO: 7357 - DNA, 451 bp, Zea mays
  unsure (1)..(451): unsure at all n locations
agctntatcatatggacgtgaaaagtgtctttctattggaccaatcaaagaagaggtgcatgttgagcaacctcccggctttgaagacagtgagtatcctaaccatgtctataagctctctaaggcgctttatgggctcaagcaagccccaagagcatggtatgaatgccttatagattttcttattgcaaatggattcaaagtcggaaaggccgatcctacactctttactaaaactcttgaaaatgacttgtgtgtatgccaaatttatgttgatgatattatatttgggtctactaacgagtctacatgtgaagagtttagtacgatcatgacacagatattcgagatgtcaatgatggtggagttgaagtattttctatgattccatgtcaaacaactccaagagggcaccttcatcagncaaacgaagtacactcaagacattcta

SEQ ID NO: 7358 - DNA, 450 bp, Zea mays
  unsure (1)..(450): unsure at all n locations
agcttaaccctctgctccatggaggtgtctgttggattgcacctgcccatgttgcactgctctacaatcttggctgcataagacctctggcaaatagtgatttcatttgtcccttgccttacctccatacccaagtagtaactaagcagccccagttcactcatactaaaagtcttcttcatctgttgcttgaaatctacaatgtcacttgcagaggggccacaaatgataaggtcatccacatatactcctataatcagcatggacttcccaactccccttctgtagacagcatgttctactttgcatcactntgaatctagtctaatgttccaagctctgggagcttgttctaagccatacagtgctatattcagtttgagcaccaggtggcccttctctgggttctgaaatcctggaggttgtgttacatagacctgtatctcaatg

SEQ ID NO: 7359 - DNA, 410 bp, Zea mays
  unsure (1)..(410): unsure at all n locations
gtagcctatattgtgtgtgaatatgctacacctgaaattntccactaaaaacttctaaatagtgtcaaattcaagttgcactggtgcaaaccggttcagttgattctgtttacaactgaacaagtttgaacctgctcaacttagattagataaacaattaaacaaatgtgacaaagtatttagagattatgctaaagtcttgccctagagaaaatccactcgaatagatgaatatgaaccaaccaacaaattaaagcactcaacaagaacacacaagaacacgctatttatcccaaggttcggcaaccaccacaaaggtgtcctactccccgttgaggagcccacaaagggccgggtcttttccaaccctaatccttcacaagccgaccaccaaagtcgaggcaatcttt

SEQ ID NO: 7360 - DNA, 288 bp, Zea mays
ccaaacaagtgtggagttcagcactatcaaaatctaccaagtgtagctgaccctctaacactcccttgaatgctattgaatcatcagtgcttctaaagacagtgacacctacatcagttaatagacagatgtcggccatctgacataattgggatacagaaagcacattgttatgtaaagaatctacaagataaacattggaaatagtatggtcaggagatatatcgaatttacccaatgcttggaccaaaccttgatttgcatccccgaatgtgataactcgatggg

SEQ ID NO: 7361 - DNA, 389 bp, Zea mays
  unsure (1)..(389): unsure at all n locations
atctatgttgtggatagcctttttatatgtccaactcccttcaacccttctggcagcttcttgacttccatgaacagcaatgggcccttgttccgaaggtatcttcatgcataaatatgctgcatgaagtatggcttcgaaggcattaagcatcccttgaccaatgatagcattgtatgggcattccatgtcaacgatgtcaaagacaacttgtccagaccttgtgttgtggacgtaaccaaaggcaactaacattgtgatttaccaagtgccacaatctgtcttcctctgaagccacaaagagggtgtgtagcatcatgaattttgtcctctggctctcgcatcagcctgaaagcctttgcaatatgatgtncgttgcactgctgtgt

SEQ ID NO: 7362 - DNA, 334 bp, Zea mays
  unsure (1)..(334): unsure at all n locations
gctttaaagttntctatagtatatatggtgttntatatttctcttaagtaggttacattatttagagtctgacaaaattggtttgaccaaatttggatgatttaaacagaagttatgcattttcaaagtttctgtccaaattaaaaacagatttaataaaagttttctggaaaaacagtttacaccgaggtccctgggtttaaactaaatccaccttcgcaaatctacccccacgccactattcccctgtgtctctgacatttcacaaaacccccttgacttctcttcctctcacccgcagtccttccccttatgtaaacagtaacccgcggaa

SEQ ID NO: 7363 - DNA, 373 bp, Zea mays
  unsure (1)..(373): unsure at all n locations
tcacaagtttattgaagaatgatactaaatttaattggtcctcaagatgtaatgaaacccttgagcagctgaaagtattattgaccactgctccggtattaactcaaccggacattgaaaaaccctttgatgtgtattgtgacacatcantcagtggtctaagctgtgttctaatgcaagaaggccgagtaatagcttatgcttcaagggcagtgcgccggcatgaagaacnatatccaactcatgaaccttgagtagctgctgtggttcatgccctanaaatatggcatcattatctgtnggggaatatcctgtcatattatacagatcataaaagtttgaagtacatctttacccagtcacagcttaatat

SEQ ID NO: 7364 - DNA, 414 bp, Zea mays
  unsure (1)..(414): unsure at all n locations
agcttatgaagattcttcatcccaacatatgttctttctgcggtgccagagccagcccatgttagtcttagcaattaagcaagtgtcgagttcagctctatcaaaatctaccaagtatagctgaccctctaacactcccttaaatgctattgaatcatcacttcttctaaagacagtgacacctacatcagtaaatagacagttgtagcccattntgcataactgagaaacggaaagcanattgtaatctaaggaatctacaagataaacattggagatagaatggtcaggagatatagcaattttacccaatcctttgaccaaaccttgatttccatccccgaatgtgatagctcgttggggatcttggntnttctcatatgaagagaacattttcttctcccctgcatgtgg

SEQ ID NO: 7365 - DNA, 380 bp, Zea mays
agcttcagcggagaatgaagatgattgtcctttatcttaagacaccatagaagggaccagacttcaagccatagagcacatcatttagttccataccgaaacaataatatggcgtgatagaaaagttcgattgaaaaatatcaaaccaggtcatttggtgctccgaaggatagccaacccagatacagtggggaagctacaactgaaatgggaaggttcttttctggtagtatgttcgtcaagacccgattcttacagatagaatgatatagacggcaacgacatacccagatcttggaatgcggatgagcttctgcgatattatgagtaactgatgtaatctttgtattgtttaattttactatggcacccttttcctt

SEQ ID NO: 7366 - DNA, 379 bp, Zea mays
ggatctctaagtcacctgcagcatgcaagctctgacctgaatcatgcccatcagtctctatgctagcgctgatggtgattaccacccgagtttatgagtgttgggggtacccctaattatggtacccgacggtagcccccaagcctcaaagggagtgttggtacttgcttggaggctttgtcgcacttttttgcaaagggaccgacctttctcggatacattttgttccggtgggtgtgcgcgagcgcacccgccgggtgtatcccccgaggcctcggaagagtggtttgactcctccgagttcttaatgcccttcgcgatgccttggccggtctggttggtccctcatgcgatccgatggtagtccgggtgcatggtc

SEQ ID NO: 7367 - DNA, 411 bp, Zea mays
  unsure (1)..(411): unsure at all n locations
agcttatgaagattcttcatcccaacatggtctagtcagcggtgccagagccaacccatgttagtcttagcaattaagcatgtgtcgagttcagctctatcaaaatctactaagtatagctgaccctctagcacacccttaaatgctattgaatcatcacttcttctaaagacagtgacacctacatcagtgaaaagacagttgtaatccattttgcataattgagatacagaaagcaaatggtaatctaatgaatctacaagaaaaacattggaaatagaatggtcaggagctataagcaatttacccaatcctttgaccaaaccttggtttccatccccgaatgtgaatcgctcgtggggaatctggttnttctcgtaggaagagaacatcttcnttctccctgtcatg

SEQ ID NO: 7368 - DNA, 261 bp, Zea mays
agaatgctcaagatctaagagaaagactttgttgagaataaaagcgaagtctagaaattgattgaggaaaagaacaaagctatggagtttaaaggaacaatgaatgccaaaatctcgaagcttgaaatggtgaactcgtgataagacgagtgcctttgtgcgctcgaagctgagatgaaacagataagggagagtcacgaagctgaaatcaaaaagctgaggaagttgctaagcgaaagtaactttgaacttgaatatttt

SEQ ID NO: 7369 - DNA, 483 bp, Zea mays
  unsure (1)..(483): unsure at all n locations
agcttagcacgatgattagaaaggattcattggccttattatccactgagggcaatgatgttcattaaactatagaatntgctcacatgggagaagcacataatagccactcaatgatgcataagttcgagtattggttgtactaataaatgaaccatttacttgaaactattcagcaatactgattatgtagtttgcaattaaacaataaccgaatagtgataagcaaatattataagcatgttcatcccatgaataaatatgactgaagcaaattatagcaagaatcattactaccaacaaatgaaatacttcgacttcatgtaagcagcaacatatcacaactatccatatgcataataattcggttgcactcctccataatataaatacgcatatggagcanaatgatgccatgaaggataaccgaacataccttgtgacgacatatatggcacaactaanaaatatggacagttcaat

SEQ ID NO: 7370 - DNA, 250 bp, Zea mays
gtgcagatgaacatcttcactcgcttgcaacatatgcaaacacttcttctcacataaagcggaatgctgaatttaattgctgaacatctccattctctactcctttaacgatcaacagagtccccattgtgcaagggatgcccgcactctcgtgacaataattacagacatgctactcccacatatttcatcatgacaaacatgtaggctcatgatccgcaaattaccctatctaactaatacttacatc

SEQ ID NO: 7371 - DNA, 492 bp, Zea mays
  unsure (1)..(492): unsure at all n locations
agcttctgcttatcacaataacgatggtgaatgattattctgacctataggagaaaagactgcttagtcctcgacaactngccttatggtcaacagtaaatgtcatggacatgaatgtaattttgtctaggctgcgtcctgtgcctataaatagatgaacagtaacaccatactgntcacgctgaattgtaatcactcttgggtcactcccacttttccatcttctgtcaagccgaaagtacaaatgtaacataaatattattgatgtttatccatgattatgaattaagaagataaataatctaatgatttggaatgttgcttatatctctgtcgtgtgcatatgtctttatttacatctatgctcactgaaacgatgaaggtatgcccttcatgaccttcgtctgaagatcattatatccagaggagataatgcttcgaagaatgaaagtatctaattcgtaacactgtgttgctttgatcttggtgtat

SEQ ID NO: 7372 - DNA, 433 bp, Zea mays
gcttaatctactaaacatagattaaacaattgtcttattataaaaatatgggttatgacaaaactgttattgcatagacaatgttattacgaagccatcacagctggaacgggttaaatcggagctaaaacagagaagttatgttttgtctaaaattcctagattaatctttttacacctttaaagattatcagcttatttccctaatttatttattttatttatctgagaaatggacggcggacactatttctatgaaatccatggtttactctgtgaataccacgacctaattgtaatgaatttataaagggataggattgcgagttcgttttcccagaaacgaagggtttcttataaaaatggcaaggccgacagtggccgccagatgtgagatctatggctcgttttactctacacgggtgatgcatta

SEQ ID NO: 7373 - DNA, 483 bp, Zea mays
  unsure (1)..(483): unsure at all n locations
agcttgccttcgcttcagtctatcattcgctgtcttacggngtcgnggagcgcgccaatgggaaaatcttcacagctgtcaagaaaatgctcctcgatgaanaaaaaaggcagatggaccgatttattacccgaggcagtctgggcgctaaacacaactgagtgcagggcgactgggttcactcctttccgccttctatacggatcggaggccatgaccccgcaagaaataaagcatgggtccccgcgtacagttccgtcagccgtccccgacgtggacgagccaacttcaaaagatcttattgacagagaccgggtcttcgccctacaggccctaaacaaataccaagcccagaccatagcatggcgcgaccacgcagtcatcccgagagagttcagcgaaggtgacctcgtactcgtccgaacagctcggacggagtccaggggaaagctggagcccaagtgggatggccccttcatagtc

SEQ ID NO: 7374 - DNA, 358 bp, Zea mays
  unsure (1)..(358): unsure at all n locations
actcagttggagccagcagtgaaaaattcaccccctcagctgaagatctaccgaaaaccttcgaacatattgagggggagattgacgagctcgacgaagtcatagctgggcatggtgacttctgtgcctgggtggcttctcgaggcactgctgcagctntcctgaaggctggctgcgatcatgcaaagattgtcaataggccaagatttactttatcaccatcaatcctggatgatattcctgatctcgcccggagtatctcgaatagatttgtaaaaatgatatggacaaaaggtgggcgagaaanagctagagacgaagctcgtatccatcttgaaccagtaagaaaccatacctt

SEQ ID NO: 7375 - DNA, 431 bp, Zea mays
atgccacaaccagcccatgctagtcttagcaattaagcatacatctagaccgacctcctcttttgcaaaatcaactaaataaagttggccgtctaatacacccttaaacgctaatgaaccatcacttcttctaaagacagacacatctacgtttgtgaataaacagctatattccatattacagagttgactcacagacaacatagtatatccaagcaactcaactaagaaaacattagaaatagagtgctgcgatgaaatagcaatttttcctaaccctttcaccttgccttggttcccatcaccgaatatgattgaatcttggggatccttgttcttgacgtaggaagagaacatcctcttttcccccgtcatgtggtttgtgcatccactgtcgataatccagctagagcccccggatgcataaacct

SEQ ID NO: 7376 - DNA, 481 bp, Zea mays
  unsure (1)..(481): unsure at all n locations
accttaagtcacctgaagctgaagcttcgagccaatcactcagcttgttcatttctcagctcagaaagtggaagtgagttcaccggcggtgggcaccaatgttgggtacttgttctcaaatgctatgattaagaacaaggcaacacaaagatgttaagtataaatgcccttcgcccgctgaagcgttatctccccaaagatttaatgagcttcggacgaaggtcatgagtaaaatatcacgaagattcaccttcgtgatcatatttgtaaacaacaacaatgagaaaggaaatataaagataaaatatagcacatgttttattatatgagtatataagataaaacatattatttggcacatttatccttcccttggggaagcaaaattaagctaacgtgccatgatacngatccgtgaacaggccggaactgtcacctattttaacacngatgaactgccaaatacattatgtcttacatc

SEQ ID NO: 7377 - DNA, 508 bp, Zea mays
  unsure (1)..(508): unsure at all n locations
agctntacactaataacctgtccaacatctttcactcatatcaattctttaattggggtgtcatccaaaccaccaaaaaccacaagagagcttttcagttagacatggcggcgccggagttgtgaacaaataagaaaggcgactgagaacggagatgggtggatggagagagagacgtccgggaggataaatttaaaactttggcacttggagagacaggcagagggagagagagagctcggggagaggcagaggaatggagagatggacctcggggagagacgagacggaggaggacgaaccctataagatctcaaaacctagtagaggtttaatggagaacgctaagccgtagggaggggcagcatcgtccacgcacatatcttaatgaatctcacgcacactataagcagcacaatgtcgttgtgcgaagaagtagatgttgcattatgctatttagtgtattatctctgagtgatgtcataccagcaaagtggcgcgatgggag

SEQ ID NO: 7378 - DNA, 364 bp, Zea mays
  unsure (1)..(364): unsure at all n locations
gaattcatctgaggcatgtcaggtcaatccataactccactcacagtaacgacataggaagtcagtctcagatgtcacaatatacctcacaatcttcggggccacaactaagctctttcaggccaccagctccaaggggcataagcgccatcggcttctgacgaaaaattggggatcaacctaaaaggatctactgcttattctgtggagaagacagtggccatactacaagaatgtgtcacgtcaccattcagaagcaataagagatagctgataccgaagctcggcaaaatcattcaaagcanggtcttgacacttgttcgngtcactctccttacatacagagtatgtgaacaatcattct

SEQ ID NO: 7379 - DNA, 304 bp, Zea mays
  unsure (1)..(304): unsure at all n locations
atccaacacaatgtatgcattttctcaatgcttatctgttgaacgtgttggcttccactacgcattggcgcctctggatgtgtttgntggatatacaaaccattctaaccggtgttgggcaagctttcttaatcggtgctccctaacctatcacatatatatagttctaacccgacccttttgttggcataatccacacatgatgcattcctaatgctatctgtgacggttgcttctgtggccacatttgaccgacattagatgtttacgcggcttaaacttgtttaactatggatatcgatgc

SEQ ID NO: 7380 - DNA, 441 bp, Zea mays
  unsure (1)..(441): unsure at all n locations
agcttctccgctggtttgcattcgaagttcttcttctttgctgaagctaccgacttcggctcgcaccttcgctacttgctcataaatgtgaagattctttatatgttgctttggccaaaggtcagcttcgtccgtcaatagaagtatacctaaaacacacttgtttttgctgatgtgaaggttgaatgaggatcttcatcataataggcccccaacagtagccccttgcgggatgagtttgttcttttgtgacgagattagatcgcacaaaatagaattgggaggccttgtgtcgaagattcgaaaacaccttcccaaagctcgttatgaagaagatagattgatttaataaaaacaagtgatctgagagttaaccatgacgggagaagctgaaagtaatgcgtgggaatatttntagtggctcgcgtcgctcttcaccca

SEQ ID NO: 7381 - DNA, 330 bp, Zea mays
cactccaaaataacgatgactagactgtgatccaccgcgaaccccctggcagaaaatacaagtccaagaaagcggatctcttccagccagaaggcgcactaactgaattaagcatatacagggagctctcttaagcgcatcaacacgatccagaaatgccgagcatgcacttctgcattctaggaatagatcaagacaccgaaaaagaataccaccacaaacttatccagcccaggcatgaataccgaggtcataatataggtgaagtgcgcacaagcatatgttagtccgaacacataaccagaattcgaacaaccataccacgaggaa

SEQ ID NO: 7382 - DNA, 441 bp, Zea mays
  unsure (1)..(441): unsure at all n locations
atcctcacagtgacctgaagcatgcaagcttgtatgatgtacgatagtatgcgtcatgcatgcattgttccagatggaaagtngngttgcactttagacattggcaatgacaggggtgattgtggtgattctcataaagcgaagggtgtaacataattacataattttcacagagatttattaacttgatgaaggggcttctctatgatggctgaatggctctgagctctccagtgcaggacacactgtttgctccatttgtttcctccacttccacactgccatcatatggacaaggaatggatagctcgtgtatattcttttgtgggaaggcattatgctaggcgccagatttagtttgttaagaagtactaaaagttacgcaataattaaagaggcttatcctcccgggagaagtatcttatcccctagaatatctgt

SEQ ID NO: 7383 - DNA, 449 bp, Zea mays
  unsure (1)..(449): unsure at all n locations
agctngattcaataagagatgtgtgctgtccatattcatagccaggcatagtacaagatgctaacagactcaaccctacctctaactgaccttatccctaacttaatctaatctcttagcaagtcaaatccaaataatcaaactaatctgcagacactcgaacaccttgacagttgtacaacagaagaacataataaaaaacagttgtggcttgtttggctgcagtgctgcactccaatccattccattccacgtgggttggaagggattacagtaaattgaagtgcagccaaacaagcactaagtggaatattttgccccatctctgtgctttgtctataagtaattaaaatccttaacttctcaacaaaaaggagaaatggtagttgaaaatgaaaagaanatctagaagatatgatcttgagaatgctcctttacaggtacatcat

SEQ ID NO: 7384 - DNA, 323 bp, Zea mays
  unsure (1)..(323): unsure at all n locations
aatagcagtaaatgctggggtaacttcacacctactcgtctgtttatatagtgccgcaagtaagaaagcgaagcgccagaagttttacaccangcggacacccgctcgcactcgctgtacggtggggcgcaaagactgaacagtaattctgcatggtggggccgccacgcgcacggaaattgaatcgtttctcgacaacgagctcaaggaaggtgttttttgagaccttcggcgctccgaagcttaagaaactntnttcacggatcaagctcgttacgaanaacgatctatcaccgcgaaaggagctactgttgggtccatgc

SEQ ID NO: 7385 - DNA, 501 bp, Zea mays
  unsure (1)..(501): unsure at all n locations
agctnggaggcgtctataggttgtcgacttgttgtatactcctccttcttttcttccgtcgccttgaatgcgacgggttgagcttcggatgtagatggatcatcaagctcgttgatcttcctcgagccttcgatcatgcactcaaaacttacaaaatgcccgattacttcctcgggggtcattttagtatatctaggattaccacgaattaattgaacttgagtagggttaaggaaaataagagatcttagaataaccttaaccacttcatggtcatcccactttacgctcccgaggttgcgcacttggttcaccaaggtcttgagccggttgtacatgtgttgtggctcctcccctttgcgaagccggaaccgaccgagctcccnctcgatcgtttcccgcttggtgatcttggtgagctcgtctccctcgtgcgcgggtntgagcacatcccaaacctncttggcgctcttcaacccttgtactttggtatactcctct

SEQ ID NO: 7386 - DNA, 444 bp, Zea mays
  unsure (1)..(444): unsure at all n locations
agcttctatatatgtcgaggtgacaaatgattatggtgaattantagttacgaaggtcacagctaagcaacttcgtcggttgcccatcattcctcggctttcaaggttgttcctcaacaaggaaatagctctgcatatgacatggccaaagaatggtgtacgtctcgtcactgttccagacataatggtccatccgtcggacggtgatgcgtggaaggcatttgacgagtctgantcccgaattgcaaacgaccctaagagtgtacggcttggtctatcgacggacggattcacacctttcaataccagtgcaagcccttactcgtgttggcctgtcttcattgtgccatataatcttcctcctgatttggcaataaagaagagttcatgttccttgcactagtcatcccaagccccgagcatccagtgccaaagctgaatatg

SEQ ID NO: 7387 - DNA, 391 bp, Zea mays
  unsure (1)..(391): unsure at all n locations
gatctctaagtcacctgcggctgcagctttacttntgtatcactccgatattattatgttaaattttgtaacttgtgaaatttggtaataagatttccgctgcaaaaatattggtgtgtgatttgtgtttacttaatcccgcggctctggttgtgagtggtttatccgaggtccttgggggcactcggacggatcctgttaagttatttggtgcacatgcatagccgtctgatgtctttgagacaaggacaggtgcatgtaagcccaataacttgtgaggttctgccacatacacgactatggngtcatnctcaagcagctgctttccttccaatgcacgcatcctggccatccaaactggacggtctctctaaaagggcggaaagaatct

SEQ ID NO: 7388 - DNA, 394 bp, Zea mays
ctcttgcgctaggatagctttcttctttcttgagtctctcttgcgaacaaactcacttgtaattgaggcaagagacaccaatcttgtggtggtccttgtatgaactttgtgttccaagtgattgataagagaaagctcactcggtccgacggaccgtttgagatatggaaggggttgaaaaagacccggcctctgtgccctcctctacggtgagtagtttgagagaaccgaacctcggtataacaaatccgcgtgtctcacttcactattcgcttgcgattcgttgtgcaccctctctcgcggactctattatatctctaacgctaacccaggctgtatgtgatgttatattagtaaatatcagtttcggcctattcaccccgctctatgcgac

SEQ ID NO: 7389 - DNA, 367 bp, Zea mays
gcttatatgcgataaacatactaactcttattgacacactagtcttttactgaagtatcaagaaacatgcaagctttctcctaatccttattagaacccagtcaagggaatgcccatgtgaggccaaccactcgatttggtaactccataaatagccatgagccttctatatgtgcaagtgtggcctcccccaaatactcctagcttgctcgactatcaagtttctagccaaaacacaacaatcctcgttcccttcactacatgatgtcgaccgcaccacaaaaataagtaatgtgatctttgtagattacaagctctcctggtacaacatacgatgacacactcaaacattcaagtgataaatgat

SEQ ID NO: 7390 - DNA, 298 bp, Zea mays
atcttgtagattacacaacttattattgtgacgcctgagacttgtctagaggctaagtcccataatggttggctatgtgcatccccgctatcccatgtcagtatgaggaatttggacaaacttccaaaggactatcacatcattgtactaacaaaaggtgtacttgacaaagattaggtctgtggcgcatgccaagcatgataacaacatggaagtccacatcaatcaaatagtgtgccacaacatagaggcctttggagcttcttcacatggacctcttcggacctgtggattacat

SEQ ID NO: 7391 - DNA, 340 bp, Zea mays
  unsure (1)..(340): unsure at all n locations
aaaaatctggaatatatctgncgttattaccagccagtccaaggaaacttcagacgtggttggtggtttccactccaaaatatcattgactntgctgggatccaccgcaatccccttggcagacaataccgtgtccaaaaattgaatttccttcagctagaacgcgcatttactgaatttagcatatagttgatgctcccttaagcgcgttaacacgatccgcatatgccgagcatgctcctcttcattcttggaatatatcaaaatatcatcaatgaacaccaccacaaatntatccaactcaggcatgattaccgagttcatcagatatgtgaaatgg

SEQ ID NO: 7392 - DNA, 330 bp, Zea mays
tgtcacgatcatcctctctgactcggactactcggcactcttacggacataagctttcttttattatgctcaccgcttgagcattgtggtgcacatcatgcatcatttccggagatgtctcttctccgtgggcgggcttatgcatacctatattgaccatctcccaaagacttggatgcccaccgattaaatgcaacttcatcttatcgggccactcgtcctaattcaactcactaagagttggtaactttccaagtgaggcggaagacaagtatggacaaaaatttctagaacaatcaaattgaaccttattgaactcagtacctttac

SEQ ID NO: 7393 - DNA, 454 bp, Zea mays
  unsure (1)..(454): unsure at all n locations
tggacgtgaagagtgccttgctctatgtaccaatcaaggaggaggtatatgttgagcaacgtcccggctgtgaagatactgagtaccctaaccatgtttataggctatataatgcgcttcatgggctcaagcaagctacaacagcatggtatgaatgccttatagatttccttattgctaatggcttcaaagtctgcaaggccgatcctactttattcactaaaactcttgacaatgatttgtttgtatgccaaatttatgttgatgatatcatatttgggtctgctaacaaatctacatgtgaataatttagtaggatcatgacacaaatattcgagatgtctatgatggnggagaagaagtattttctaggattccattcgagcaagtctagagggcccttctttgtcacacaacatactcaaacatttatcgagttggatgaagatcctag

SEQ ID NO: 7394 - DNA, 485 bp, Zea mays
  unsure (1)..(485): unsure at all n locations
ctgcaagcttgacattgtctccctttaggaagccaattgtattctttatgccagagtgtctcccattataaagcatactacgagaaaatntaaatttttcattgtctaattcatgctcggcaattgtagcatctagtttagctatatgatcattttgttgtttaatcatagcaatgtgatcatggatagcatcaacattaatgtctctacatctagtacaaatagtaacatgatcaacgctagatgtagagggtgtgcaagcatttaatttatcaatcttagcatgtaacatagcattttcatttctaagattggaaatagaaatattgcacatacttaaatctttagccttagaaaatagtttatcattctcaatcttaaggctagaaattgattcattcaacttgtcaatcttagcaatcaaactagcattattagttttaatgttgacaagagaatcatcacanacacttgatttatcaacc

SEQ ID NO: 7395 - DNA, 497 bp, Zea mays
  unsure (1)..(497): unsure at all n locations
agcttgcacccttatacatnggtctgtntcctattcttgatcagtgtggaccagtggcataccgactccaattactcaaaacattgtctgcggtgcacaatgtgttccttgtatcccaattaaagaagtgtcttcgggttccaaatcaaaccattgaggtgttggatgttaccttggaaccagacttaacatattcaaaacgtcccattcgagtcctggatcaaaaggacatgatcacccgaagaagaactcttaaattctataatgtacaacggaaccaacatactgaagatgaagctacctgngagactcaagacttcttggaaaagaattttcctatgtttttagcttcatgtaacttgtgagataggtacatntgtttgtaaaaatggaatagaccccataccacccnctgctttgtaagacagatgttgtgggccttcgtcttccgaanggtcctcaaaacatgatntaacaatgttntccgagtgtatata

SEQ ID NO: 7396 - DNA, 311 bp, Zea mays
  unsure (1)..(311): unsure at all n locations
gcttctaaagggagaacacattntatgacttacaaatgttcatttngagaaagacaggatttgtagtgcatgccangcatgaaagcaagttggagcccatcatccacacaagaacattatgacgaccgataggccgcttgagctactccacatggatcttttcggcccgattgcttacataagtatcggcaggagtaagtattgtcttgtaatagtggatgattattctcgcttcacttgggtattcttnttgcaagaaaaatctcaaacccaagagaccttataaggattcttgagacgggctcaaaatg

SEQ ID NO: 7397 - DNA, 481 bp, Zea mays
  unsure (1)..(481): unsure at all n locations
agcttcaattctatgtctcttaagcttggggtctccttcatgtgacantttgagaatgttccaaatgtcacgagcatcctctctgccttggactttccggcactcttccggacaaaggcttccttttattatgctcaccgcttgagcattgcggtgcacatcatgcatcatttccggagttgtctcttctccttgggcgggcttatgcatacctatattgacaatctcccaaagacttggatgcacaccgattaaatgcaacttcatcttatcgggccactcgtcatagttcaactcactaagagttggtaactttccaagtggggcggaagagaagatgggaataaaatttctagaataatcaaattgaactntattgaactcgttacctttacntttgctggatgatccttcggtggtgagacttaccttgctcatcacccttgacaccaaaagttctaccaaatcatcattgtattca

SEQ ID NO: 7398 - DNA, 472 bp, Zea mays
  unsure (1)..(472): unsure at all n locations
agcttctaaagggagagcacattntaggattatctaatggttcatttgagaaagacagggattgtagcgcttgccaggcagggaagcaagttggagtccatcatccacacaagaacatcatgacgaccgacaggccgcttgagctactccacatggatctattcggcccgattgcttacataagcatcggcgggagtaagtattgtcttgtaatagtggatgattattctcgcttcacttgggtattctttttgcaggaaaaatctcaaacccaagaaaccttaaagggattcttgagacgggctcaaaatgagttcgccttaaggatcaagaaaataagaagcgacaacgggacggagttcaagaactctcaaattgaaggcttccttgaggaggagggcatcaagcatgagttctcttctccctacacaccacaacanaatggtgtagtggagaggaagaatagaactct

SEQ ID NO: 7399 - DNA, 429 bp, Zea mays
cacctgcagcatgcaagcttcttaccgggttaagatgactttagtctttttcacccgccatttttcgcccgccatttacccagatttgagtcatgaatctatttccaatgcttcgggccaggcttgggatgtctatcagatctgatgctgacaagctgaagtttggtctaatcacaatatttccatgcgtgcagccagccttcataaaagcagtagctgtgccctgagaagctactatggcagaagtcggcgtgtccaccaataacttcgtcaagagcatcaacttcgccttcaatatattctaatgtactgggcaggttgtcagctgaaagtgtaaactattcagagctagctccgatagaatgaaacacatccttcagccactgcacgcatcggctgccgaagcttaaacatttctcttgaagttct

SEQ ID NO: 7400 - DNA, 375 bp, Zea mays
  unsure (1)..(375): unsure at all n locations
gctcttgttgagatcgttntgtaatgttatacaacgtgcaatntgtgcttttctaccaggttatggaccatgcaaatgaacacgaactctagttaaactacctttgtacgatttcttgcaatgtttacactgccactcctttgttccaccaacattttttccactcggaacaccaataatattaatttcatctagaagtggatgtctcataccagtagccgcaaccccatcttcgtcaccgctgtctgtgtctgcaccgccatcttggatatctacaggcacctcttggacgacttgcacatcatcttctttttcatccgcacactctattttgcttgaagaactgaaaaccatgtctgcgttgaggtttgagtt

SEQ ID NO: 7401 - DNA, 355 bp, Zea mays
  unsure (1)..(355): unsure at all n locations
caagaacacacaagaacacgcgatatatcccgaggttcggcaaccaccacaaaggtgtcctactcctcgttgaagaacccacaaatggccgggtctttttcaaccctaatcctccacaagccgaccacaaaagtcaaggcaatctcttctcaaatctgctcaaagagcgggtgatacaaacttcttggggtcgtccacaaatttggagactcccaagcaacctctaaccgtcaaggaacacgatgntccaagagtaacaaatccgcacacggtcaagtttgcaacgagctcaagaacaagagaaagggagaatcaagatgaaatngacagcgagttcgatcgagttcacctcaca

SEQ ID NO: 7402 - DNA, 370 bp, Zea mays
  unsure (1)..(370): unsure at all n locations
ggatcttaagtcacctgcggcatgcagcttacaaagtcttgggaagctattaatggcttggtgaagatgacgtctttggaatggctgaccaccgtgaccgacgctcgggtggctcgggccggtggtgcacatctcaccggagctaagggggtatgtcttgccactgatggttaatgtggagtgaagtgaagcccgtctggtggtggtcttaatggcacgggccagcacagccgatgggtgtccgtgttttgggtccgaccgcacaccccaggttgcccctcaacggtgtttttacgaataggacngtgttgccgactgtatctcgatggttcgcgaagggcacacgaaaaactgtgaacaatgatgtaca

SEQ ID NO: 7403 - DNA, 434 bp, Zea mays
ttacaaatggacgtaagagtgtcttcctcaaggatattattgaagaggtctatgttgagcaacctcccggctttgaagatagtaagtatcctaaccatgtctataaactctctaaggcgctttatgggctcaagcaagccccaagagcatggtatgaatgcctaagagatttccttattactaatggcttcaaagtcggaaaggcggatcctactttatttactaaaactcttgacaatgatttatttgtatgccaaatctatgttgatgatattatatttgggtctactaacgaatctacatgtgaagaatatagtaggatcatgacacaaaaattctagatgtcgatgatgggggagttgaagtatttcttatgatttcaagtgaagcaactccaagaaggcaccttcattatccaaaccaagtatactcaa

SEQ ID NO: 7404 - DNA, 380 bp, Zea mays
  unsure (1)..(380): unsure at all n locations
atttgtgtaacgatcgctttctttctatgtctcccaatcgatgcggtactgccaatcgtaaactggtgaccggggaatgagagctccatacaccatgattcatggagtctttcctcttcgttttaagttggttgggtatatacccaactgtaggtcacctatgtgaccaatcctcaccattggtttcacagcacttagtaagcatacgtttgaagaccgagttggttgatttggtctgtccattcgctctaggaggggctcgacttcctttgagctatgagaaatgggagcgccttcttcttttttttcanggatctccttggctacaaagagagctatggagcctatatgaaagcttcgacaggcctatttagtgtatt

SEQ ID NO: 7405 - DNA, 467 bp, Zea mays
tcggctccatctatattatggattgcttgtgacattgtttattttccttcggcctttctggtagcttcctgactaccatgaatagcaataggcccttgatccgaaggtatcttcatgcaaagatatgctgaatgaagaattgcttcaaagacattgagtgtcccacgaccaatgattgcattgtaggggtactccatgtcgacaatatcaaacacaacttgctcagttcttgtattgttgacaaatctgaaggtcactggcatcgtgatcttgccgagggctacaatctgccttcctccgaagccacaaagagggtgtgtagcatcatgaatcttatcctctggctcttgcatctgtctgaaggccttagcgaatataatatccgctgcactgcctgtatcaaccagaacattgtggaccagaaatcctttgataacacaagaaataaccatagcatcattgtgagg

SEQ ID NO: 7406 - DNA, 416 bp, Zea mays
  unsure (1)..(416): unsure at all n locations
cccatgttagtcttagcaatttagcaagtgttgatatcacctctatcaaaatctaccaagtatagctgaccctctaacactcccttaaatgctattgaatcatcacttctcttaaagacagtgacacctacattagtgaataaacagttggatcccatttgacataattgagatacggaaagcaaattgtaatctaaggaatcaacaagaaaaacattggaaatggaatggtcaggagatatagcaattttacccaaaacctctgacccaaaccttgatttccatccccgaatgtgatcgctctctgaggatcttggtttttctcatatgaggagaacatctntntctccccagtcatgtggtttgtgcacccgctgtctagtatccaacttgagcccncggatgcataaacctac

SEQ ID NO: 7407 - DNA, 441 bp, Zea mays
gcttacctagagagattcacttgaaggccgctaaaagaattctattatatttgaagtatactcccaatattggtctatggtatcccaaaggtgctcaatttgaattaattggatattcggattcggactatgcggggtgcaaagttgatagaaaaagcacctccggttgttgtcaatttcttggtagatctcttgtttcatggtcttctaagaaacaaaattcggttgctctatctaccgccgaggcggaatatatatcggccggaaattgttgtgctcaactattatggatgaaacaaaccttattggactatggaattattttcaagaatgtgcctctcatgtgtgataatgagagtgcggtaaaattggctaccaattcggtccaacactcaagaaccaagcatattgatatacggcatcacttcttaagggatcatg

SEQ ID NO: 7408 - DNA, 388 bp, Zea mays
agcttaaagccatggttagtagcataggcatgttatatgcgaattgactcaagcctagctataggtgcataagtttcataaaagtccaaaccttcaacttgtgaataacctttggccacaagtcgagctttgtttcttgtcaccacaccatgcttatcttgcttgttgaggaatacccacttggtaccgacaaaattttgattaggatgtggaactaaatgccatacctcattcctcgtgaagttgttgagctcctcttgcatagccaccacccaatccggatctcttaatgcatcctccaccctatatggttcaatagaggacactaaagagaaatagttactaaaatgtgcaaccttagatctattggttacccccttatgaatgc

SEQ ID NO: 7409 - DNA, 299 bp, Zea mays
tagaatggtttatatatctcttatggaaaggcttcaccctttcaattattgtagttaagttatgcacttcgagtactatcaggacttgtaataaatacgtctctatctaccatgtaaaacttgagttctggaatgtaaagtgtactttgtaaaagtcttccgctctatctccaatgtgtgtgtatcaaatgtgaatactcgaatatacctaatatgtaggagatctttgggatgatgagttccagtttgcgaactcgatagccttgttaagttacccggtacacatgcacaaccatcaa

SEQ ID NO: 7410 - DNA, 450 bp, Zea mays
  unsure (1)..(450): unsure at all n locations
gcaagcttggtcaataagaaagaacacctattctatttgaagaggccgccacagctctccatgataagctgaaagcttataatgcagtgctggagaaacagcgagacaagcaggctgcggctgaggcgaagttgcagcaggagcttgccgacaaggctagtgacattgctcgcgctgagggaaacctcaaggcgagggaagcttccctggtgaaacgaacaactgacctcacttggcaggaggaggacctcgctttcagggaggagatgtgggcaaggcggaacaagctgctggatgagcttgagctcgaggcaaaggagaaagggaagcgtctggaggggaaagtgtggacactggaggagcatgtccgtcagttccaggcggcgcatgcgacgcagacggccccgggctcccaggcggtggaggtgatgaggaagacactngatgacc

SEQ ID NO: 7411 - DNA, 372 bp, Zea mays
tcgcatctctgaactagctcggctgcatcattctttgttgtggtcaatagaatcccgacctgaaaaccttcccaactaatgttctggatgctgcatgtattccgcactgccctgcatggacttcctccagaagttgcttcccggtggacgggagaacgcacttcatgaggacgcctgacgcgcccctccgatataatacctccccaatgagtgtgtagtgagctgattgtctggcaatgcgctctgctgagttcttgtcatctggctcttcttcattctttatatacttaataatcggttgcctccagtcatcagagtctggctcgggttggtctatgatgttgcactcttccctttgatccatcgagatgc

SEQ ID NO: 7412 - DNA, 415 bp, Zea mays
  unsure (1)..(415): unsure at all n locations
nagcttctgaaccggaagatcgtcaccgagatcgttccagcgaagaggttctatagagcagaagagtaccatcagcagtacctggagaagggcggccgcttcggcttcgggcaatctgcagccaagggctgcaatgaccccatccgatgctacggatgagccaaatggacctctacgtgcatggtgtgaatcgtaactgaataagggatgcatcaaagccagattttatactgctttcctaggtttggtttgccactattgaacggctgtaagagtttagctatatactaccatggtactccaatcatcgtgtacaaaaccatattgtattacatgcaagtgcgagtgagatttaagcgtaaacagattgttgtagaattcgtacgaattttacagagcagaaacaatgggatgc

SEQ ID NO: 7413 - DNA, 411 bp, Zea mays
attcaatgaatgggcgtcatctaaggaggcagaaacccgagccagatcgatctgaccttgggagcacttttcttcgagttcagagcaccatcgggccatatctaatgaaaaacggttgaagaagggcacacagtttaaaacagactaatcaagtagccaaggaagaagcaaagacactaaccagcatttgccattttcaaatcagatatctgtttctgaagcagcaacggattccactacgtcagggacagagctccttccgggacagaggcaccttgtgatctcaattgaccagccatcccgtcaaccaaagcctgatattacaaacaaatgagtacaaagatatcattttaccaggagtatagccagaacaggacaaactaagttacctaaagattagagaagaacggc

SEQ ID NO: 7414 - DNA, 384 bp, Zea mays
cctctataccgaccccctccttttgcaaaacctaccaaataaatgttggcgcctaatacacccttaaaagctattgaaccacttcacccttcaaagacagacacatttacatttgcgaataaacaattgggtcccattttacaaaggtgactcacggataacagattatatccaagcgactcaactaaaaacacattataaatagagtgctccgatgaaatagcaatcttccctaacccttttaccttgccttgggtctcatcaccgaatatgaatgaagtttgggaatccttgttcttgacgacgaggtgaacatctttttcttccacgtcatgtggcttgtgcatctgctgtcgataatccagcttgaacccccggatgcat

SEQ ID NO: 7415 - DNA, 482 bp, Zea mays
  unsure (1)..(482): unsure at all n locations
cggatccttaagncacctgcggcatgcaagcnttgatcacatacaaagttaggagaataataagctcaaacttgtgttgtcagtcactctactgactgaatttaggtcaccagtgtcattggccaaacttttgggtcaaattagagtaagatctattgctcgatcgagggtagttgctatagcagaattgtagctggtatgaagggctacaagtttgctacagatgtattggcaagttgttgcacaaaaatctgagatctaggcattgcaattcggcctgctaggcgctctgaatcgggttttcaatgatacagtgaccagatcagtacgccagctcagataactcaccgtcggcgaccgtgcacccggattcgcgcccgccacggtgattcgtgttcagcacagttggataacggcaagggggtaagaaatatcacaccgtggatggactctgtcggggctctgtctcaatgctatgagtt

SEQ ID NO: 7416 - DNA, 222 bp, Zea mays
tagggcgcaagataataccctctttatcttcttgtactgagagaacattcttcacataaaaccactctgacatccaatctccgggccatgtcttccgaaaggttggcaccgggcagcttgacccggaccgggaaaccaagctttaacacccaaaattattatggtactgttccttacccccaagctttgcctcatatgataattcgtgaaaatcgcacaaac

SEQ ID NO: 7417 - DNA, 392 bp, Zea mays
  unsure (1)..(392): unsure at all n locations
ntatgggaatagtcataaaatgttctcaattatgaacttgaattacattcatacccctgagataccaaaaaccctaattggaaccctggaaaaccctaagtccaaaccctaggggcctatgtgcaaaagctgtgcacatttggactaaagtgtaaaaactataatgttaaaacatataaagtcacatggttcacctttgggaagatttacaagccaaaccctaagttttggattcatatgcaaaaaggaccccaattgagatttcactctaagtctgaatttcagatttgtgggctcaactttngagccttgtaactttcaaactctagggtctttgccctatgtcaccacattaaagttgtagaccaatcatagtagaacaactttgctat

SEQ ID NO: 7418 - DNA, 399 bp, Zea mays
  unsure (1)..(399): unsure at all n locations
agcccgctggaattaatcttcggagaaaccctatctcgctgcaacatgatacccgaaggtccaacacaacaagcaatgagtgaattcagaattattgcagagcatatcagcacaagggacctggttcaagagttcttagcattcaaagtttttcccagtttgaaagaatgggaaatgccgaagctacatggggaaaagaaagaaggtgaactcgtacgtttaccttactatttcaagtttaaaaagtactttaaagcaccttgccaagagtggctagatacgattgaagcaatgtgtaatgaaatacttggcaattattccaaanaagaagatcaattgatgaccgcagccttcggcactcgtccgaagcgaaggctaaatcgagtgttggacgctctg

SEQ ID NO: 7419 - DNA, 466 bp, Zea mays
agcttcggcttgataacagagaaggggatcttacttatagatgaaaaggcaaattacacctcgaagaattactatagagttattgataaatgtaaagggcacaaatgtaattctacacgggctgcgtcccttgcctataaatagatgaatagtactctcgtattgttcacgctgatttggcattcgcttttcgcatcacgcctatacccttactttccgttgatccgaaggtacatttgtaatttgttattctgaatatgataatgaaaataaaaataaattgatgataatatctatattattctttgtattccatatatgaattcttccttatcatctatcgagcttacgaaggtttcttccttcataaccttcgtccggaattcattatattcgaagggatataatgtcttgaaggacgaaggacttttatatttaacaccttttatgttgccttgttcttaac

SEQ ID NO: 7420 - DNA, 388 bp, Zea mays
  unsure (1)..(388): unsure at all n locations
ttttcaaagctgggcttcggttccccttaaatagatatgtggttgaggttttaaagatctatcaggtctaccttcatcaaattactcccgaagcaatcataagaatgggaatcttcgtctgggccgtgagaagccaaggcttggagccaaatgcaaaaagtttctgcagtatgcacgaactgctatatgagacgaagccctagggtaaagaacagtatcataacaattttggctgctatagcttcgttgcccgctctggctcaagctccccagtgccgacttttcgaaagagatggcatggagactggatgaaagaatggttctatgtgaaaaatgatntaaaggcatgagaagacattaaatagataatcatgcgccctatctggca

SEQ ID NO: 7421 - DNA, 439 bp, Zea mays
  unsure (1)..(439): unsure at all n locations
gtacctctcattcttatctttctaagaggggnntttgatcctcgttaccccatcataacnnacttagctgcacttacccatactctaataacaccttttcatatttcnttaatgccaagactaaagagtattcaagtttatacaaaccaaatcatacgtatattgaaagggaattggattcctcggcgaagacataggcttacacttcgaaacacatgcattgccattacttcgaacaactttttcttctatgggggagaaatgaccataaggaaaaggacttcattcttgcgggagaaagtacagctcaaatgcctaaggacttcgccttgagatatacttactcacttattaagaccaaagggaagattgctcttcagagggttaaatgatttcattattggcgatcatgccaaaatggggaagatgacccaaacaa

SEQ ID NO: 7422 - DNA, 404 bp, Zea mays
tcacacactctctaatgtatatgtgtcctatctatatatgctcttacctattcctgttctccttaggacacaagatgatattgattttgtggctggtatcattcgttggaatgctcttcaactttcttacgctcgtctacattggtgagttctgtaaagtatttctggataaatgtttggatgtattggtcttttatgatagctcaatatgcatagtccatactaaacttaccattgttttctagatataatgctttctctgttgcgtaaaccattctacgaacattatcacgatcaagttgatgaaaaggctggcgtttgttcttgagctggacttgagctatccaatgccctccttccctttcttcttgtcaaagtccataggcaatggtgtgcagtccctc

SEQ ID NO: 7423 - DNA, 475 bp, Zea mays
  unsure (1)..(475): unsure at all n locations
agctttaagataatcaactctacgccaagttctgttaatgcgagttttggattggcgaggtgccatttcctggacatatcatttctaatggagggatatcagtggatcctgctaaagtaaaggagatagtggtgtggagcatacccactacggttacggagaaccaaagtttcacgggatttgcaggatattatcgaagatttattgaaggattttctaagattgctaagcctatgacttcgcttttggagaaaggaagagaatttaagtgggacgagaagtgccaagacagctttgatcaattgaagaagaaattgatgtcgccaccagtattggttatgccagacctacagaaaggatntgatatctattgtgatgcatgtggccaaggcttaggatgtgtgctcatgcacgaaggacatgtgattgcctatgcttcttgtcagttacggaaacatgaattgaactaccccat

SEQ ID NO: 7424 - DNA, 422 bp, Zea mays
  unsure (1)..(422): unsure at all n locations
ctaagggagagcacattntatgactaaccaatgttcatttttgtaaagacaggatttgtagcgcatgccaagcagggaagcaagttggcactcatcatccacacaagaacataatgacgactgacaggccactggagctcctacacatggatctattcggcccgattgcttacataagcatcggcgggagtaagtactgtctagttattgtggatgattattctcgcttcacttgggtattctttttacaagaaaaatctcatacccaagagaccttaaagggattcttgagacgagctcaaaatgagttctgcttaaggatcaagaaaataagaagcgactatgggacggagttcaagaactctcaaattgaaagcttccttgaggagganggcatcaagcatgagttctcttttcctaca

SEQ ID NO: 7425 - DNA, 297 bp, Zea mays
gccaaaacaaatcacaagcaaatgaagagtgtgacacggtgatttatattaccgaggttcggttcttgcaaacctactccccattgaggtggtcacaaagaccgggtctctttcaactctttccctctctcaaacggtcacctagaccgagtgagcttctcttctgaatcaatcgggacactaagtcctcacaaggaccaccacacaattggtgtctcttgccttgattacaattgaggtggtcacaagaaagaaggaagaagaaaagcgattccagcgcaagagcttaaatgaaca

SEQ ID NO: 7426 - DNA, 392 bp, Zea mays
  unsure (1)..(392): unsure at all n locations
tctcttggacaagtgccgcacttaccgctgagtgctattctgccacatataacaacagaggagcccctggcgttggtggagttagcgtcgctaggtctatcaaatattgcttcagctcttcgaaggctctctggtgaactggtccccattgaaaaacttcggctgacttcagcacttcgaagaatggtaaatttctctctgctggtctagatatgaatctgttgagagatgccagtcttcctgtcaatcgttgagcccccttctttgtgcttggtggttccattcgaaggatagcttccatcttatttggattagcctcaatcccttttgttgaaactaggcagccaaggaatatccccttcttcactccgaanacacacttttctggattc

SEQ ID NO: 7427 - DNA, 381 bp, Zea mays
taatgcccctcctaaaagattgtctaactttgttaagggcaaggctcccatggttcaggataacgagggttacattttataccctgccggttatcccgaacacaaaattaggagaattcactctaggaagtctcactctggctctcatcatgcttttatgtataagagtgaggcatccagttctaggcaatcaacccatgctaaattgcctaagaagaaaactcctattgcatcaaatgaacataacatctcatttaagacttttgatgcttcctatgtcctcactaataaatcaggcaaagtagttgccaaatatgttggggccaaacacaagggctcaaagacttgtgtttgggtacccaaggtgcttgtttctaatgt

SEQ ID NO: 7428 - DNA, 491 bp, Zea mays
  unsure (1)..(491): unsure at all n locations
ggatccttaagtcacctgcggcatgcaacttctacagcattattaaggctcactgtccatagcatgaatctcatcaagatacaatgtatgatatcttccatattatgttcttctgaggcgggttaagcattcaattgaacataaatgaccaattgtcaactgaaaagaaggccaggatagaaataggatgtgtcatcctctggaagcagtcaatctcaaattctcagtctcaataaatctgcccatgagacacaattgtaaaatcaaaataataagcagcaatgccaagattatctgcaatgaaatcaggcttgttgatgtttttttntgtgttctgcaacagcaagcactcagtttaagtaccaccacacaggaatcgtggtgtatatgcaccagaagacaaataaatgagataacacgaactgagacaagattcaggtgtcaaaccatcatattgctatgcaattgaagtgtagattcttctcaaccac

SEQ ID NO: 7429 - DNA, 381 bp, Zea mays
tttctcttgcctggaatgcactttcttctcatcttttgcgaacactaattgtcaccgacgcaaaagacaccaaatgtgtggtggtccttgtgggaacttaatgctccgtttgattgagaaaagaagctcactttgtctaagtgaccgtttgagagagggaaagggctgaaaaagaccccgtctttgtgaccacctcaacagcgagtacgtttgcaagaaccgaacctgataaacaaatccttgcgtacactctttatggctcccgatttgtttacaccttctttctggactcgttcttattctaacgccaaccccgcttggatatgtcccaatatgtgaaactagagttgccttattaaccccccccctctagcgactttc

SEQ ID NO: 7430 - DNA, 379 bp, Zea mays
tggatatcctcgaaatatccatcccgtctctgtctctgtgctggtctgcacgcacctgcgatcaatgcgttatatttgcactccgatacatcttctatcattattaccacagaatgacggtcataaaccacttatatctcacagttgactctagaaaatcacactgcagcggcaacacacctcccacataagtaccgtatccgctaacttaatataaccagcggccgattgaactataaaaaaagatggtctttctttttaacgcctactttttagcattccaactaagatcaacttgaatattcgctctcatcgcttaatatatgataatgccaccgtatgtttacatttaatatcaccttcttataaatatccatat

SEQ ID NO: 7431 - DNA, 433 bp, Zea mays
  unsure (1)..(433): unsure at all n locations
agcttggtcattntattgctaactgtcccgataatgatagggaccagganaaagagaacaagagggagaagaagaagaattacaagaaggcccagggcgaggcacacatcggaaaagagtgggattcgaattgctcctcctctgactcagacaatgaaggactcgccgccactgccttcaacaagtcattcctcttccccaacgagcatcacacatgcctcatggcaaaggagaagaaggttgtactcgagacagtactacttatgtttcttctagtgatgatgagtctagcgatgaggaaatagattactctaccttgttcaagggattggatagaaataaaattgataaaatcaatgaattgattgatgccttgaatgaaaaggatagactcttacaaaagcaagaggatttgttgtatgaagaacatgat

SEQ ID NO: 7432 - DNA, 461 bp, Zea mays
agctagccttcgcttcagttatcatccttagtccaacggggtcgtggagcgcgccaatgggaaaatattcacagctgtcaaaaagatgctcctcgatgaaagaaaaggcagatggaccgatttattaccggaggcagtctgggcgctaaacacaactgagtgcagggcgaccgggttcactcctttccgccttctatacggatcggaggcaatgaccccgcaagatataaagcatgggtccccgcgtacagttccgtcagccgtccccgacgtggatgagccaacttcaaaagatctcattgacggagaccgggtcttcgccctacaggccctaaacaaatatcaagcccataccaaagcatggcgcgaccgcgcagtcatcccgagggagttcagcgagggggacctctgactcatccggacagctcggacggagttcaagggcaagttggagcccaagt

SEQ ID NO: 7433 - DNA, 362 bp, Zea mays
  unsure (1)..(362): unsure at all n locations
ttattngatgattaaagcccttgggtaaagtttggtattctttggacattgtttggtcccaaacccaagatactagcttccttggatataagtgtctaaccctaatagagtactaacctaggaaactctagtgactagtgtgtaccgtgaaggaaagttgtattcaagatacaacttaatgtgcttctattataactgcatattcatagcatcacataagcattcatgtatatgtattgttatgtatagaaaacgaagaagaagtggtaatcgaagaagttaccccacaagctgaaatttcacctgtcgagaacaacttctactatgatatctgtgggacagaccctgaagcctctataaca

SEQ ID NO: 7434 - DNA, 449 bp, Zea mays
  unsure (1)..(449): unsure at all n locations
tagctatcctctgggatgggtgctaccaccagagtttcagtttggattgcatcagaggaatcttcagctcacatatccagcatggcacttatctccgcgtcactcggattcaaaggcacctcaaaatgaacctgcctctcgtcgtcaggaatctctccgagtgaggcaaccaaagcactaacttcttcgggagagggtcgtactctaaggcccaaaccgctatcatcagcaggaggatttgacacgaaactgataaaggcctgtgagggaggcaaattctaggccaagtatgcaacaggagcgccgatgttcgacaccttgcctctgagtatcatctcgagccggttcaccaagtccacagtaggaattcttctgttggtcacccgggttgaatcagccaagcctcggtacanataggccggatatgctctgtctttcaatggctgaat

SEQ ID NO: 7435 - DNA, 468 bp, Zea mays
  unsure (1)..(468): unsure at all n locations
agctntatcaaatggacgtgaaaagtgcctctccttattggttcaatcaaggaagaggtctatgttgagcaacctcccggctttgaagatagtgagtaccctaaccatgtgtataaactctctaaggcgctttatgggctcaagcaagccccaagagcatggtatgaatgcctaagagatttccttatcactaatggcttcaaagtcggcaaagccgatcctactctctttactaaaactattgcaaatgatttgtttgtatgccaaatttatgttgatgatatcatatttgggtctactaacaaatctacttgtgaagagtttagtacgatcatgattcagaaattcgagatgtatatgatgggagcgttgaagtatttcctaggatttcaagtgaagcaactccaagagggcaccttcatcagccaaactaagtacattcaagacatactcaccaagtttggaatg

SEQ ID NO: 7436 - DNA, 389 bp, Zea mays
ttgatgacaagcgccatttcctcgttgtcgagcttggatgtcgtctatgggtgttctacttggtgtagactcctccttcttctcctccgtcgccttgaatgcaaccagttgcgcttcggacatggagggaccgtcaagctcgttgatcttccgtgagcccttgatcataaactcaaagctcacaaaattcccgattacttcctcgggagtcattagtgtatatctaggattaccacgaattaattgtacttgagtagggttaaggaaaataagtgatcttagaataaccttaaccacctcgtggtcatcccatttcttgctcccgaggttgcgcacttgattcaccaaggttttgagccggttgacatgtcttgaggctcctccccttg

SEQ ID NO: 7437 - DNA, 473 bp, Zea mays
  unsure (1)..(473): unsure at all n locations
gcttggccacaatatcatcgactntgcacctacatgcctctcggacacctgctgtagctgccccttgatggcctcaatggcgcttgcgatgtcgcggcgagccttggcatctacgaacagcttgcccatcctcttcacagcgcctttgagccttccttgtcaccactgggctcagggcgcccctctacgcgaacgaggaaggagtcgaggatgtcctccatgtcgtacgatgcctctctgacttggcgagcccagatcttgacctgctcatccagctggtccggtggcacggcagccaccttgcggagggcgccatggatgctctccagctcctccgaaagaaactggatttgatgcctcactcccttctgcaggttgtactcatcttgcagaagctggaggagcttgggggcgagcttgccaatcgccccagacaccagatccatgctcgcgagctctcaagatctgtgttg

SEQ ID NO: 7438 - DNA, 274 bp, Zea mays
tcaaacgttcgctgctggggcaatattctcgtgccctgactcttattatctgcgtatactcgacgtgtaggggaagcttctcgtataagggatggtgagcatagtgcgccgcatggcacgaacgcactgtttgtcaatagactgggcaggcgcgccgtctgctggatgaccctgacgccgtctgccagcggagtggacaggacgcattaaatgctgagagggcacgtcgtctgtcagtgtggtggcaaacggcgcgtcctcttcgcaataaatg

SEQ ID NO: 7439 - DNA, 378 bp, Zea mays
tctggtatgtatctgcgattattttcttctagtccaagaaaactccggacttgatgaacagtggttgggggtttccactccagaatatctttgaccttgctaggatctaccgcaatccctttagctgataacacgtgccccaaaagttgaatttcttcgagccagaacgcgcacttgctgaacttggcatatagctgatgttccctcaggcgcgttaatacaatccgtagatgctgagcatggtcctcttcatttttagaatatatcaagatatcgtcgatgaagactaccacgaacttgtccaacttgggcataaacaccgagttcatcatatatgtgaagtgggcaggagcatttgtgagccccaaagacattacc

SEQ ID NO: 7440 - DNA, 429 bp, Zea mays
tggctgtcaggctggtttcattctaaaattcagatatttattgttacaaagtcagctttgagtgtgaattcaaccatgatctagtgatcaaatgagctcagtcactatagtcgaaatataggtggtatatagctctacaactttgttgcaggtcactggatgtgttgccatttgaaattaagagaaaatgtgacctaaacttgctctgtcagttcatcagaatgaccatcgccatggtacagtaaatattaaactgaagaagatcccgatcccacccctgcttgccgccggtgagctggatgccaccccgcccagccgtaatccctttcccttgctcaccgcccgtggataaaggggctcaccggcgtcgtgccatcgccgttgtccgccgcgtgtctctgttcatctaccgtgttaccatgactccct

SEQ ID NO: 7441 - DNA, 426 bp, Zea mays
agcttctaaagggagagcacattttaggatttttcttatgttcattttgacaaagacaggatttgtagggcatgccaagcagggaagcaagttggtgctcaccatccacataagaatattatgacgactgtcagaccactggagctcctacacatggatctattcggcccgatcgcttacataagcatcggcgggagtaagtactgtctagttattgtggatgattattctcgcttcacttgggtattctttttacaggaaaaatctcacacccaagagaccttaaagggattcttgagacgggctcaaagtgagttcggcttaaggattaagaaaattagaagcgacaacgggacggagttcaagaactctcaaatcgaaggctttcttgaggagggcatcaagcatgagttctcttctccatac

SEQ ID NO: 7442 - DNA, 302 bp, Zea mays
tatgaagattcttcatcccaacatgggctagtcggcggtgccatatttaacccatgttagtcttagcaattaagcaagtgtcgagttcagctctattgaaatcaactaagtatagctgaccctctaacactcctttaaatgctactgaatcatcacttcttctaaagacagtaacacctaaatctgtaaaaagacagttgtagcccattttgcataattgagaaacagaaagcaaattgtaatctaaagaatctacaagaaaaacattggaaatagaatggtcaggtgatatagcaatttta

SEQ ID NO: 7443 - DNA, 489 bp, Zea mays
  unsure (1)..(489): unsure at all n locations
atccttaagncacctgcggcatgcaagctttcatgtcaacatcaaggccactgtttcttcttacatggatttattnggacctacaaattatgtcagtgccggtggcaacctctactgtctagtgattgttgatgacttctcaagatacacttaggtgttctttctccatgacaaatctgaagttgcatctatattcaagaagtttgccaagaaagcacaaaatgaatttgattgcaagattaagaagattagaagtgacaatggcaaagaatttgacaacaccaacattcatgagtactgtgatgaaattgggatcaaacatgaagtatctgccacatacacacctcaacaaaatggagttgttgaaaggaaaaataggaccttgatcactcttgcaagaacaatgattgatgagtataacacaccggagaggttttgggccgaagctgtcaacactgcttgctatgcatcaaacaggctatttcctca

SEQ ID NO: 7444 - DNA, 370 bp, Zea mays
ttccatgaatagcaataggcccttgatccgaaggtatcttcatgcaaagatatgctggatgaagaattgcttcaaaagcattgagtgtcccacgaccaatgattacattgtaggggtattccatgccgacaatatcaaacacaacttgctcagtccttgtattgtttgacaaatccgaaggtcactggcatcatgatcttgccgagcgctacaatctgccttcctccgaagccacaaagagggtgtgtagcatcatgaatcttatcctcttgctcttgcatctgtctgaaggccttagcaaatataatatccgctgcactggccgtatcaaccagaacattgtggaccagatatcctttgataacacaag

SEQ ID NO: 7445 - DNA, 455 bp, Zea mays
  unsure (1)..(455): unsure at all n locations
agcttatgaagattcttcatcccaacatgtgtctttctgcgatgccagagccagcccatgttagtcttagcaattaagcaagtgtcgagttcagctctatcaaaatctaccaagtatagttgaccctctaacactcccttaaatgctattgaatcatcacttcttctaaagacagtgacacctacatcagtgaaaagacagttgtagcccattttgcataattgagatacagaaagcaaattgtaatctagagaatctacaagaaaaacattggaaatggaatggtcaggggatatagctattttaccaagacctttgaccaaaccttgatttccatccncgaatgtgatagctcgttggggatcttggttttctcgaggaggagaaattctcttccccctgcatgtggttgtgacccgctgtcatgatccacttgaccccggatgataaactac

SEQ ID NO: 7446 - DNA, 436 bp, Zea mays
  unsure (1)..(436): unsure at all n locations
gtcgacttgccatagtctacgtggccaataaccacaatgttgatgtgagacttctccttacccatggctggaggcgaagcttaaactgttaagccatacgaatcaataattagaaacactagtaaacaactcccactaacaaaatttattagacggggtcaaaactgaatctaacgttgaaaccgcagtcatcagctttaagaaaagcatcatacatatcagcagtggaaaatgtaaagcagcaaacaaaaaacaaagcaaacgacataatataaacacaaagcaggcctagaaaaaatatcaaactagcaagtgtgcgcacagaattttgagccagtaaaaattggacacaactacatanaccagatcagaaatctggtcatattttgtggttgcaactcttactgcacatgaactgcgaagacacatacagagc

SEQ ID NO: 7447 - DNA, 408 bp, Zea mays
  unsure (1)..(408): unsure at all n locations
agatacggaccaggggcataccgacttcagatacccaaaaccttgtatgtagtacataatgtgttccacgtgtcacaattgaagaagtgtcttcgggttcccgatcgaaccattgacgtaatggatgttgccctagaaccagacttgacataatctgagcaccctattcaagtcttggatcaaaaggacagaattacccataggaaaactctcaagttttacaagatacagtggaaccagcattcagaagatgaggctacatcggaaacttagaactntttagaaaagaatttcccaggctttttagcctcatgtaatttgtaaagtgtatacaattgttgtaataaaggagtgagccccataccacccctgccttgtaccaagaataaggaaataaagacatgacgt

SEQ ID NO: 7448 - DNA, 377 bp, Zea mays
tcaagtgattcgaagctccatgctgtatcaaccccagttttatttcctccaaatctcggcataacgcaatgtcagaagcctttatcgtcagacaatcggaagaaaccttgcgacttaacacatctgccactacattaactttgcctgtgtgatagagaatctccaactcataatccttcattagctcgagccatcttatatgtgtcataataagctctgactgggtaaagatatacttcaaacatttatgaactggttaaatatgacagacattctccactagataatgatgccaaatttttaaggcctgaaccacagcaactatactccaagtcttgaatcggacaatgttccttatgccgcgccaactgacttga

SEQ ID NO: 7449 - DNA, 495 bp, Zea mays
ggatccttaagtcacctgcggcatgcaagcttgtcaatacctgtcaaagcaacagttcttgccatcacaacagctacagaccataccaataacttggcctttcgcatgctggggattggatatgattggacctttcaagaaagctcaaggaggttatacccacgtattggtggcaattgacaaattcactaaatggatagagttcaagcccattgcttctttaacctctgctaaggccgtggaattcatacaggatataatattcagattcgggataccaaacagcatcatcactgacttaggatccaacttcaccagctcagaattctttgacttctgcgagcaaaagagcattcagatcaaatacgcatctgtggcgcatccaagagccaacgggcaggttgagcgagccaacggaatgatattggaggcactcaggagaagggtcttcgataagaatgaaaaattcgcacgaaaatggataagagaactacc

SEQ ID NO: 7450 - DNA, 305 bp, Zea mays
gcttccgctgatcagccgaagcccattgctttatgtgaagatatatccaagcctatcgtgttgctggggtcttaattgtccgaggaacacgagaaaaccttgacaaggattctcgctaacaataaatatgtcttcacctggtccgccaatgatctctgtggtgtgaacagggatttcattgaacactcgctccatgttgatccctccttcacacccagaaagacatacttctgaagatgtctggtgacatagccatatgtgctcggacctaaacgaaaacacttcttacttgctggcgtgttata

SEQ ID NO: 7451 - DNA, 255 bp, Zea mays
tgtaatgcatgccaagcacgaaaacaaggttgcactcaatatccacacaagaacatacatggcgactgacatgccactccagttgcttcacatggatctattcgacccgaacgcttacataagcatcggcgggagtaagtactgtctagatattgtggatgactatacacacttcacttgggtgttctttttgcagggaaatcacaaacccaagagaccttcaaaggattcttaagacgggctcaaaacgagttc

SEQ ID NO: 7452 - DNA, 430 bp, Zea mays
  unsure (1)..(430): unsure at all n locations
agcataacatactccctgcgctgaggacatcttcaaccattcctcacacacttctccgcgtctctataatttctattatattctactacattaccctaaaacatacttccccacatacagaacgtctctaataattcatcctatccagcttcccctatatactataattcagctgaggtttttcatcagtttttgaagtttcaaaaaaatcagaaactatttgtactaacataatacacatattttctaggttacaatacataaaggggttaatatcataagaaaatgaactaattaaagtgtgaggggagtagaactcacccnatatatggggatagtttcctctagaaaggtgtacgataaagaagatacatctcggtggtatgaataatctattaattctattaagcattagaccataatatcacca

SEQ ID NO: 7453 - DNA, 290 bp, Zea mays
  unsure (1)..(290): unsure at all n locations
tgacgcctttctccttgagacatcaaaatgtttcttttatgtctgaaaggaggtcngaggctttcctcgtcttgactatgatgtcatcgacgttggcctccaccgtgcgaccaatgtgttctctgaacacatggatcatgcaccgctggtacgtctcgcccgcattcctcaagccgaacgacatggtgacatagcagtacatgccgaagggtgtgatgaaagaagtcgtgagctggtctgactctttcatcctgatatggagataccctgagtaagcattgaggaaagac

SEQ ID NO: 7454 - DNA, 400 bp, Zea mays
  unsure (1)..(400): unsure at all n locations
taccacatttgaagcatgagcgcttccnctttgtcttggtcttgcttggctgccccttgcgaccctttagcgccgtcttgaatctcttgatgatgagggccatctcttcatcattaagtccggccgcctcaatttgtgccaccttgctaggtagcgtctccttgcttcttgttgccttgagagcaaagggttgaggctcgttgattggaccattcaatgcgtcgtccacgtatcttgcctccttgatcatcattcgcccgctcacgaattttccaaggacttcttcgggcgacattntggtgtacctgngattctcacgaatattattcaccaaatgaggatcaagaacggtaaaggaccttagcatcagtcggacgacgtcgtggtccgtccatcgcgt

SEQ ID NO: 7455 - DNA, 487 bp, Zea mays
  unsure (1)..(487): unsure at all n locations
tcacctgcggcatgcaagcttgtgaaggttcttcatccncacatgtgcttatcggcgatgccacagccagcccatgctagtcttagctattaagcatgcatctagaccggcctcttcttttgcaaaatcaactaaataaagtttgtcgtctaatacacccttaaaagctagtgaaccatcacttcttctaaatacagacacgtctacatttgtaaatagacagttatatcccatatgacataattgactaacagatagcaaattatatccaagactctccactaaaaacacattagagatagaatgctcattcgaaattgcaattttacctaacccttttaccttgccttgattcccatcaccgaatataattgaatcttgggaatccttattcttgacgtaggaggtgaacatcttcttctcccctgtcatatggtttgtgcatccgctatcaataatccagcttgaacccacggatgcataaacc

SEQ ID NO: 7456 - DNA, 467 bp, Zea mays
  unsure (1)..(467): unsure at all n locations
ntgggctnttcgccggtgaccatctctctcttggcgtgttcttcttacatcacttcgcgttggtaaactctaatgaagcaccgggttctaatgaagcatccagtgcgttctgactttgcaaactgacttttgctataatgcagtcagtgcagtcgaccgttgggcgaagttgaccgttgctccattgactcaccggacagtccggtgatttttagtggaatggctctgagaaaaacccgagagcggccagttcgcaagtgcttcggcctgtgcaccggacagtgtccagtgctccactggctacaccaattcttgtatgctccaaactttgtagaattccctcaagtacattttctttgtatgtttatgttgaactttatgcacctaagaaaaatagcaactaggcaaactagttagtccatgtggtttgtgatggacgtcaaacaccaaaacctgatataggaaat

SEQ ID NO: 7457 - DNA, 474 bp, Zea mays
agcttggagaagcttcacggcttcacggggaagttttccattggctggggcgaggctggggttcaataaaaggggctggccacgacggccgtgctcgggcagtgatggcgggcggtggtgcttgcttttcatggcgagctccggtgacctctggctcgggcgaggctctaggtgcgtgagtgccaacgactaaggcctctggaggcatttataggcgagggcgaggtgcatacgcgcggggcgcgcgctgccgtggccagtccgcgctcggccggtcaggcaagcgatcgaacacgtggctctttgcttctgcccgagttcaagcgctcataggatgaagatcttcgcgtatttgggcatgatcactgcacaagaattgctctcctgacatagctttgtcatttatgtgtggaagtcgagcggtttgcggctatgtatagagagtcgtcgtgtcacataggtggcagtgtcaca

SEQ ID NO: 7458 - DNA, 364 bp, Zea mays
tcacatctctatacataactggctgcatcactctatgccgtctggcattaaaaaccagacctgaagaccttcccagctagagttctggatgctgcatgtatcccgcactgttcggcgtgaacctcatctagcagttgctttccagtaactgaaggaatgcacttcatgaggactcctgttgcatcccttctgtacagtgcgtcccctatgagggtgtagtggcctgactgccttgcgatgcgttctgctgcggctttatcatccgggtcctcttcattctctatatacccgatgataggctccctccagtcattagagtctgactctggctggctcaaaacattgcattcttctgcttgatctg

SEQ ID NO: 7459 - DNA, 474 bp, Zea mays
ttgttggggctcgttcaatatataattcttttaggctctttttattataactttgatcactcgtcttatttaaattatagacatgcaaaatttgaagccaaatgtaaacaaaaccacaatgtcttttgtttgttttctataaattttttaataagacaggtggttaaagttagaattaaagaagccaaatcaattataaattggaaaggggagagtacatataataatttctgatccgggttgagttgacaaaagcttttttgggtcaaacattgtcgtaggggtgcgtgttaactgcattctctctctgctactgtatgttactgatctagtatcagagaaccgtatagccatgcatttgattaattaacgttcagctggctgtagcacgataatcatacacaggagatcttagagatacgctagtcgtagtatacgtttctaattgatagtttcatgtacgtgacgaccact

SEQ ID NO: 7460 - DNA, 351 bp, Zea mays
caacttctcatataaacagcacctaaaaacctctaaactcctcgcaggccgcatgcacgaggacaggcaaaaaccttgagaggaaacatctttgtgccaccacttcactccaaggcgtcgatgatgcgggcgacaagcgcgtccatgagcctcctttgtgcatcgaggtgccggagcgccatctccatccggatcctctgcgattcccgtgcgggcttcattcttctcttctccgcccgaggaaaccctcccgatggccctcaaagcacccaccacgtcgctcacaccgtactcattccatgcatttgcccgccgcctcttctgtgccgagatgctggaggtgaaggggga

SEQ ID NO: 7461 - DNA, 279 bp, Zea mays
actcagctttatgggctcatagaatatctaaacatagtgctactaaagtatcttcttttgagcttgtctatggataagaagcagtgttgcctgtggaaataaatttgaatgctgtcaggttcgccagacaaaatgatctaaccgtcactgattattataattcaatgatggataatattgatgaggtgaccgacaagagggtgatagctttgggagcaataaaaaaggacaagattatggtagctagggcctacaacaagaaggttaaagcaaaatcat

SEQ ID NO: 7462 - DNA, 438 bp, Zea mays
  unsure (1)..(438): unsure at all n locations
tctacagggagagcacattntangactaacaaatgtttatttttataaagacaggatangtagcgcatgccaagccgggaagcaagttagcacccatcatccacacaagaacatcatgacgaccgacaggccgcttgagctactccacatggatctattcggcccgattgctcacataagcataggcgggagtaagcattgtctcggaatactggatgattattctcacttcacttgcgtattctttttacaggaaaaatctcaaaccctacagaccttacaaggagtcttgagacgggctcaaaatgagatcggcttaatgatcaagacaactagaagcgacaacgggacggagttcacgaactctcaaatcgaaggcctccttgacgaggagggcaacaagcatgagttctcctactcctacacgcctgaacaaaa

SEQ ID NO: 7463 - DNA, 423 bp, Zea mays
  unsure (1)..(423): unsure at all n locations
cagcttgatttgaagatgatgggtgatcttgtgcctgtggaggctcttcagattccttaagccacacatccccaatggacatgttccttagcgcgatgcacagagcctcttcatcatctagctcatcaagatcaacttgctctacttgagagccgttagtctcatcaaacacaatgtcacaagaaacttcaactagtccagtggacttgttaaagactctatatgcccttgtgtttgaatcataaccaagtaaaaaaccttctacagccttaggagcaaatttagaatttctacctcttttaacaagaataaagcatctgctaccaaagactctaaaatatgaaacattgggctttttaccagttaggagttcatatgatgtcttcttgaggattcngtgaaggtagaggcgcgtgatggcgt

SEQ ID NO: 7464 - DNA, 455 bp, Zea mays
  unsure (1)..(455): unsure at all n locations
ttaacccttaagatttgaanaccaatgaattagaagattgttctatacactatgtaccttaaaattcgagtgaaataagctgtcagtgatgtgctgtagtatataattgctaagatcttgttcaagcttcgggaaaccaatgctttttgataaagtattaacaatttttgccccagcgcgagcagggatacacctaaggatctcttcgtcaacgcaaccaaaaaccacagacccgggctggtagtcacccacaatagcaaactctcttagttcaaaaaaatcttcttcagagagctgctggccgccaaggtgctgtaggtcaaaatatttgctctccaaaacatttcttctatttccttcatcttcaaagctgcaacttatacaacagtaacatcacccattcccctctcgggaaccacatgntaacaccctgtgtgtactataactaaaacttg

SEQ ID NO: 7465 - DNA, 453 bp, Zea mays
agcttctcccgagaaagaaagaaaaaacatttttctttattattgacaaaaacgaatgtaaaaaatacgtggagagaaacagaaaaaaagtggatggaatctgtggccgcatgtgctgcccacaatcgccgaaggaccacactcacacatgccaaatcaaacacaacaatcatgagagctcctgaaggctgaagcacggatctctcggcgctgactgtactcacatggaacgggagttcttatttcctgagcagattggagctcccagtcctcatttcccacagcttaccagggcatggggggactgggaggagctaccactaccagcgtctgcgctctcagcctcctctccgccctgctgcttctgcactactgcctcctcctggcaccttctgccgctgtggtctccaaggagaggacgcagtcgagaaagctcttgcagagcctcgtcgt

SEQ ID NO: 7466 - DNA, 362 bp, Zea mays
tataatttatgtaagaatggattaataatttatgttctggctatataaaaggcctcacagagtagccagcaaattaatgaaaataaagatggcacagcgttatgaaatgagcaagtccatgatgttgcatgacaaacctgtcgtagaaagttctcaagagtgccaagttttcccatagccatcgccatttgtcccatgtaatttgcaacattgccacaaggtccagcagggcccaaggatccagatgctacagtttctgcgagcgactgttgcaatgcttccatccctctggacagagcatcattagcttgttgggaggactgctgcaagttggatataccaacaatgctgctgatcaataa

SEQ ID NO: 7467 - DNA, 458 bp, Zea mays
  unsure (1)..(458): unsure at all n locations
agctntagaaatctgtagaaaattgtagattaatctttaaattgtgaaaccaattttcctagacttcttattttccatagcatttaataaaaacagttccatgatttttaagtcaaatagggaattttggggtatttaaaatagcctaaagaattgcttctagatttttagataatagatgataatcccaaaaattcccaaactttttatataagctctatgcattatttagaagccttgggtagaatttgggttgatttggaccttgtttgatacttaaaacctaaaacccctacccctgccctttgaactcctttactgactccggaaaccctaagttctcggagttccgtgaaggagagttgtattcaagacttagttaataaatctttattatctttgtactctcatgagcattacatggcattcattcttatatatatacctatatggttata

SEQ ID NO: 7468 - DNA, 452 bp, Zea mays
ttaagtcacctgcggcatgcagcttctaagggagaacacggatggaatctctttgtgcaattcgaaaaagatagaccttgtgcagcttgtcaggcaggtaaacaagtgggaggagcacatcacagcaagaatgtgatgaccacatcaagacccctggagctgctacatatggacctcttcagacctgtcgcctatctaagcatagggggaagtaagtatggtttagttattgtggatgacttttcccgcttcacttgggtattctttttgcaggataagtctgaaacccaagggaccctcaagcgcttcctaaggagagctcaaaacgagtttgagctcaaggtgaaaaagataaggagcgacaatgggcccgagttcaagaaccttcaagtggaggagttccttgaggaggaagggatcaagcacgagttcttcgttccctacacaccaca

SEQ ID NO: 7469 - DNA, 354 bp, Zea mays
tgcatggaggaagaaggttgatcttgtgcatttggatgctcttcttattccttaggacacacatccccaatggacatgttccttatcgcgacgcatggagcctcttcatcatctagctcatcaagatcaacttgctctacttgagagccgttagtctcatcaaacacaatgtcacaagaaacttcaactagtccagaggacttgttaaagactctatatgcccttgtgtttgaatcatatcctaataaaaaaccttctacaaccttaggagaaaatttggattttctacctcttttaacaagaataaagcacttgctaccaaagactctataatatgaaacatttggcttttta

SEQ ID NO: 7470 - DNA, 356 bp, Zea mays
taagcttgagtagcgaattatggtggattcaagactagcacgtgaacagaaaggacaaaatgctgatgcaacaacaaatggtgcttctgcaacaacacttgaagctacacaacctgttagtccatggggtgatgttgatcatctccttgatggatatgatgaccagcaaaaggctctgatacagaaggaaagggccagacgaataacacaacaacacccaatgttctcagcacggaagctatgcttggtgcttgatatggatcacacccttcttaattctgcaaaggtatattgatattctgtgctattactatgaggctatgagttttaggtgtgtttactatttttctattcat

SEQ ID NO: 7471 - DNA, 283 bp, Zea mays
  unsure (1)..(283): unsure at all n locations
tctcntggacaagcgctgcactaactgcagagtgagaggctgctacatataagagtaacggagcccctggcaaaggtggagttagaagtgtcaagtctattacgtattgctttaactcttcgaaagcccttttgtgagccagaccccattgaaaaacttcggctgactttagtatttcaaaaaatggtagattcctttctgctgatcttgatataaatctatttaacgataccagccttcctgtcaaccgttgagcccccttctttgaatatggcggctccat

SEQ ID NO: 7472 - DNA, 454 bp, Zea mays
  unsure (1)..(454): unsure at all n locations
agctcggtcgatgggctacattattatggtcgcgctctcctttgggccatggctcatctgggagaacgcggcnccatgagagatcacccgacatagagaaaatccatgcgctgcaacttgcttgtgaagccacaaaacctcgactggtcgctcaggagggatctcactgggggcgctagaagggtggacatcggtgtcggtggccatggacaacaggtgtctcggggtgtgaatctcgccggacttggggtcgctgggcgttgctgccatggggaattgctgcatggatgaaggtaaggaagtataccattacgttctcctgagagccctctgcgtgtagtccgtttggatccgagtaatacggccggggttcgaactttgggtggtccgccatggcgctttcatggcgggttggccgcacccgcatggcctgnngtgtgatgtggtctggtgt

SEQ ID NO: 7473 - DNA, 373 bp, Zea mays
  unsure (1)..(373): unsure at all n locations
taatgagtttctggcacttactcacgggaatcacactgttgttgcagtatgcttaggccttcaatgacatgtgtcagtatgcacgctatcatgcagacagtgatgagaagaagagggacaggttcangaggggcctcagtactaagctccacgaccgtctcaatacagtcagggccaacagctacaatgagttagtcaacatggccatttcctatgaagactgcatcacagcccgctatgcagaaaagaagaggaagacccctgtggtaggaccatcagctcagcctcagcgctttaggattgtatctgacactcagaacaggggaccccagcagcagcaaggacgttgggtgatccgaccacaacagcagca

SEQ ID NO: 7474 - DNA, 276 bp, Zea mays
gcgaacctagcaagcaatccttgcgcccccttcgcggcaatcttccaaacaacgcgtctcattaaaaaactacacgggcctcccgcgattacacaaaaaaagtcaggtcaactcacccgcctaagggaacataagcctgcgggcgaaaaaaaaaggcaaagcaacctatctgtgagggtcgacaaccgaaggacaatgcccaaaaagccgaagttacctaatgtcacacgataacgaacccaagatgagacgaaggaaagccctaaaaacaccacg

SEQ ID NO: 7475 - DNA, 437 bp, Zea mays
  unsure (1)..(437): unsure at all n locations
gcttatagactagagcaaactagttagnccaattatttgggttttttattttatctcaccaaaatcaattngggaaaaggtgtaagcctaattccctttcaatctccccctttttggtgattgatgccaacacaaaccaaagcaaatatggaagtgcataattgaactagtttgcagaatgtaggtacaaaggttactaagaatngaaccaataaattctcataagatatgcatggattgtttctttaatattttaacattttggaccacacttgcaccacatgttttgtttttgcaaattcttttgtaaatccatttcaaagtctttttgcaaatagtcaaaggtaaatgaataagaatttgagaagcattctcaagatttgaattttctccccctaattaaatgctttcctttgactaacaaaactccccttaat

SEQ ID NO: 7476 - DNA, 348 bp, Zea mays
tttctccatttcttggcataaagaaatgccacaagccttcatggaaatgcatgacagaaagccttactacttaacgcatctgccactacattagcttggctgggtgatagtgaaactctaattcataatcctttatcagctcgagccatcttctttgcctcatattaagctttgactgggtaaagatgtactttaaattcttatgatctgtataaatgtgacagatatttcccagcagataatgacaccatatttgtagggcatgaaccacaacagctcactccaggtcatgagttggataatgttcttcatgccagcgcaacttgcttgaagcataagctatcactc

SEQ ID NO: 7477 - DNA, 456 bp, Zea mays
  unsure (1)..(456): unsure at all n locations
gcttgtttgtcagaatcgaacgaagctccttcttgttgcctgcttcggaggaaaaaagtattaaagtttcacaagttcatagttaaatggccagagtccgttctaccgctagggttgagcgtgagggggacgaaactgaagcttcggagactgtccctatctccgaagccatgcaacgatccgggctagtgacttcggaaaagattcctattgatgatgcagagcaagcaatcgctgaagcagaaggagaagatgctgaggaaactgaccccgaagatgattatcaccttgccacgccaagcaaacccagccatttggacttcgggaaatctactgtttcgaagactgatctgtccaagatggtaaagtcaggcttatttactgaaaatcaaaagaagctattacgcttcggnggagaagagactaccncaaagccggaanaagatgaaattgtta

SEQ ID NO: 7478 - DNA, 367 bp, Zea mays
cgcagacagacggacagacggaaagaaccaaacagatcctagaagacacgatgagagcccgtgcgcggcaagacaaggcacgacgggacaaaaggccaccctatgcagaatacccccacaacacaaggcaccaggctagcctgaagaggacacccgcccaggcgccctaaggacggagatggaggactccgccgcatcgggaccagcctggggagagacaggcgctaggccccgacatcacgcctgaagccgaagagaacaccaaaatgggccgaacgaatcggaagacagcacaaccaacgcagcgaagccacgccgacagaaggagaagggaattgcagccccaagcgcgagaccacgcccatcc

SEQ ID NO: 7479 - DNA, 338 bp, Zea mays
ctataaaactaagctgtgaagattctcatcccaacatgggctactccgcgattcttgattcaacccatgttaagcttagcgattaagccagcattgaggtcagctctattgaaatcaactaagtatagatgaccctttaatactcccttaaaagatactgaatcatcacttcttctaaagacagtgacacctgtatccgtaaaaagacagctgtagcccattttacataatcgagaaacagaaagtaagttgtgatctaaagaatctacaagaaaaacattggaaatggaatggtcatgtgataatgcaatttacccaatcctttgaccaaaccttga

SEQ ID NO: 7480 - DNA, 243 bp, Zea mays
tctgcaagcgcgcacaggagtctctatgtggtgcaccaatcgccgcacgggcgctcgcgtgcgtcgtggatcgacgccaaactcgccacctggacagcgggcagggacaggaaaggggccggccaagcaccggccgagaacaatgtcgcggtgaataatggagctagctagagggacagcctccgaaaagaactgacaacgaaggaatgctacaaagcgcgcgtcgttcctacgaaagccgca

SEQ ID NO: 7481 - DNA, 246 bp, Zea mays
  unsure (1)..(246): unsure at all n locations
actgcgaacctcgaacggtatatatcttctntggcactccatgcaagcacacaatccgagccatatataacactgctagctgagaacccttatatgtaggccttacaggaatgaagtgagccactttagtcaatctatccacaatcacccatatagcatcatatcccctctgggtgcgaggcaatccacgaataaaatccataccaatctcttcccatttccactcgggtatcatcacgggatgca

SEQ ID NO: 7482 - DNA, 389 bp, Zea mays
gtgcacgcttgtcaagcacgtaaacaagtgggaggagcgcatcacggcaagaacgtgatgaccacttcaagacccctggagctgctgcatatggacctctttggacctgtcgcctatctgagcataggagggagtaagtatggtttagttattgttgatgacttttcccgcttcacttgggtgttctttttgcaggataagtctgaaacccaagggaccctcaagcgcttcctcaggagagctcaaaatgagtttgagctcaaggtgaagaagataaggagcgacaacgggtccgaattcaagaaccttcaagtggaggaattccttgaggaggaagggatcaagcacgagttctccgctccctacacacaacagcaaaatggtgtggt

SEQ ID NO: 7483 - DNA, 235 bp, Zea mays
cacgccaacacaactacagacggcgacatcgagaggggagatgtgctggcgtgcatggagaaaccgagacggcgactagcaccgcaggaactggcggggagaggagatctatgtcctgaggagtcccgcgaacgggctaaggcaacgggcacggcgcaggctccaaacaagagtcgcggcgacacatccaccgtcgagccacaaaggatggaggcggacgagcaggcacccggag

SEQ ID NO: 7484 - DNA, 313 bp, Zea mays
acccttgcggatgctttatatccttggcataatgttgcgtgatcggcaatttgctctactgataatagcttacctgaagcatgacgcacgatgaattccatccattcagtgcgtgcttcggcagcctaagatctggatttttaagaagcgctccatttttctatgatcatcggagcgctctacgaggagctgacatctctttgagatgggcactacatcttaagcacgagttgatgcctacatatatcccataacagcgtatagcacgctagccagtcttccttagatgggagttagttgtcggatccttgat

SEQ ID NO: 7485 - DNA, 450 bp, Zea mays
agcttgcacacatagctcttttgaatacctttgttcatatctcctttatatgctatgactaatgtgttttcaagtcgatttcaaaccaagtcataggtatattgaaaggaaattggagtcgtcggcgaagacaaaggcttccactccgtaactcatgcttcgccatcactccgagcaactctctcgtccttgggggagaaatgagcatcaaggaaaaggacttcatccttgggggagaaagtaaaagctcaaacgcaaaaggacttcgtctttggtataatcttaactcacttatttatgaccaaagggaagattgcacttcaagggctctaatgattccgtctttggcgattcatgccaaaaagggggagaaatgagcccaaagcaaaaggaccgcaccaccaccaccaaattcaaaaacttagtgctttccaaaagtctttatcatct

SEQ ID NO: 7486 - DNA, 310 bp, Zea mays
atatatgaaatgtcgtattactcatataaatgctcaggcacagaagatactaaggaatttttggcaccacacaccggtgcacttatcacttgcatttcactaattaatcaatacacacaaacacctagcagcatcttatgcttagccaacacccccacgacacttgcgttactactggaccctttaaataaagagataaccaaatgcttaagcgcttagcctacaaccactacacactagcccactacgccaacactcgcactttgctgataataatatccatgcacgaatgacacagtgttagaatacc

SEQ ID NO: 7487 - DNA, 386 bp, Zea mays
catgcaagcttctcttggatggcttaggcataggatgttttgacatgttgggatgagcacactcaagatggtatttaagaaagatatggttagaggattaaaggatgtggtatttgaaaaggacaagccatgcagtgcatgtcaagctggaaagcatgttgctaatacacatcccactatagctttcatgtcaacatcaaggccactggaactacttcatatggatttatttggacctacaaattatgtcagtgccggtggcaacctctactgtttagtgattgttgatgaattttcaagatacacttgggtgttctttctccatgacaaatctgaagttgcatctattattcaaaaggttgccagaaagctcaaatgaattgatt

SEQ ID NO: 7488 - DNA, 460 bp, Zea mays
  unsure (1)..(460): unsure at all n locations
agcttgacattgtctccctgttggaagcctatgtcatccttaatgccagggcgtctcccactataaagcatgctacgagcaaatttaaatttctcattttctagttcatgctcggcaattttagcatctaattttgctatatgatcattttgttgtttaatcatagtaatgtgatcatgaataccatcaatgttaatatctctacatttagtgcaaatagtgacatgctcaacgctagatgtagagggtttgcaagaatttagttcaacaatcttagcatgcaaaatgttattctcatctttaagatttgaaatagaaatattgcaaacatctaattccctagccttagcaattaattnttcattctcatttctaaggctagcaagagaggcattcaattnttcaatcttagcaattgaactagcattatcatttctaagattgcaattgacttatcaca

SEQ ID NO: 7489 - DNA, 444 bp, Zea mays
taaaactcaagctccttaacttgagcgggaatatcaatcttaactgaatgttttattgctccaaatggaactgccactgaatactttgggccttgggtttgcgcattcttcatctaaactggtatggcaactgttagtgatccacaagaggctaacgttatgtatcatcatttactatgacagaaatcacaggagaagttgagctcctacttggttggcattgtacatcccttacctgaaaagggatcacaaatggaactgctttcttccttgattgatcttgcattgcccgtgtgcgcccgggaaggcacgccggagttttggaccatgctggtcgtggcaaccgtacacatggaaggtgctgtgtctggccgaactctgctgctcttctattaatcgaatttttgtttattaaataggcaaagacattttaacgatgcctct

SEQ ID NO: 7490 - DNA, 284 bp, Zea mays
  unsure (1)..(284): unsure at all n locations
agcttgaaggtcaaatctattttctagcctctatatactcngngtcagaagcgcttaggttatcaaagaaaaattacacatagttggagaaggtactgtatgctgttntaatggccttcaagaagcttcggcactattttcaggcatacaatatagttgttccttctttacaaccgttgaaggatattatgagaaatagagaagccactggaagggttggaaaatgggccgcggagctcaatgaattctgtattgaatatgtgcatagatcttcgattccatct

SEQ ID NO: 7491 - DNA, 387 bp, Zea mays
cggacatataaaactaacttgacagtgcataatacttcttcttaatatctatttatatgacatgctcataagtctgtctttgaacaaactagcttgtcctaaatgtcatacatttaacaacagagggggggcttttctataataatgtgactcgctttcagaatcagttccaactggtgcagatcaatgacattcaggagcaactccaactacaaatacaaaaggcaaagctcggaactagtgtactcacctcccatattttctgaaaatgtcctcaagatcctgtgttcgggtatatggagaaatatggcccacgtacaacttggtgttacttccatgtcgaccatgacgatcatatccgttggtatggtcatatcgggcattgta

SEQ ID NO: 7492 - DNA, 177 bp, Zea mays
cctgtctctgccccccaaaacgcgagcacgccgccgtaaaggttttatttccgcccgccaaccgggagcgatacccccaccaccttgcggagaccaccaaaagcggaggaaaaagggaatgcggcatatgcaccaaaaaagggcaaccgcacgccaggaggcaacctcaggggcagg

SEQ ID NO: 7493 - DNA, 319 bp, Zea mays
tgtgaagaatatggggcctttgctgctgactccctcgattattttttgagcagagttatggattgacctaacgtgcctcgggtgaaatcttcctccgaagcccctggtcattttagagaacctgaatgcttcgctccttctttggcggaaatcattgtcagctcaaatgtatttcgccatcttttggagcagcttctccaacgtttgtgtaacaccccgggatccacaaacaccccagaatgcttctaaactacacatctaacattcatatataaaatttcgaccgcatcttctttgcgcattgcataaaccggggaag

SEQ ID NO: 7494 - DNA, 403 bp, Zea mays
gctagagccaaccatgtttgtcttagcaattaagcaagtatcgagttcaactctattaaaatcaactaagtataggtgaccctcgagtattcccttaaatgctaatgattcatcactgtttctaaagacagaaacacctatatccataaaaagacagctgtaacccattttgcataattgagaaactgaaagcaagttatagtctaaagaatctacaagaaaaacatgggaaatagaacggttagaagatatagacaatttaccaagtcctttgatcaaaccttgattcccatccccaaatgttatagctctttggagatcatcattgatctcgtacgaggagaacatccttgtctcgcctgtcatgaggtatgagcacccgctatcaatgatccaacttgag

SEQ ID NO: 7495 - DNA, 239 bp, Zea mays
catacaagctggcccacgatcaaggcgaggtctacagcaacgctgggaacatccaacaactacttcgcttctacccttaagatgctttaagtcgttcatatacctgcgcctgttcacatacgtaaataaagaataaccgtgcaggaaggaccagtcatgtctcgggaaagcccgaccctccctcaggggctagaaggggggaacccactctacgtcaaaatttatctcggaaaaggaga

SEQ ID NO: 7496 - DNA, 462 bp, Zea mays
  unsure (1)..(462): unsure at all n locations
agcctngacaacaccattgacattttacaatttatttctgatatcaagaatatntagttcattcctcaacatgcaaaagcgggtcttatcaagtggcttagtgaaaatatccgctaattgatcttccgacctcactccttctagaatgatatctcctttagcaacatgatctctaaggaagtgatgacggatatcaatgtgcttggtgcgagagtgttgtacaggattattagcaattttaacagcactctcattatcacacaacaaaggtaccttttctagaactacgccatagtctagaagagtttgtttcatatataaaatttgtgtgcaacaagcacctgcggcaatgtattccgcttcggcagttgacaaggcaacactattttgctttttggatgaccatgaaactagtgatctaccaagcagatggcatccccagaagtcctttcctatcaattt

SEQ ID NO: 7497 - DNA, 328 bp, Zea mays
cagagtccgcctgaacttatcttcggagaaacactatttctctgttacatgacaccagaaggcccaactcaacaagcgttggatgaattcacagttattgcagagcatatcactacaagagacctggctacgagttcttaactctcaggggtttccctagttcaaaggaatgggaaacgccgaacctagagggggagaaaaaagaaggagaacctgtgcggttaccttactactccaagttgaagaaatactttaacacaccttgcccacagtggctggatacaattgaagcaatgtgcaatgacatactcggcacatattccacaaa

SEQ ID NO: 7498 - DNA, 405 bp, Zea mays
atgctttcccagtattaattgtggtggtttatgttcatcacaaatattgaattaactagtttgctctagattatatattctataggtgcataaaggttcaacacaaaccaaaagtttgaagttagggatcaaattcaaaggagcaaagaaaccgagtgtgctctggtctagcgcaccggactgtccggtgtgccaccggatagtgtccggtgcaccaagaccgtacagagtccaacgagccactctcgggcttcagcaggcgcactcgctaaaaatcaccggactgtccgatgtgccagtggagcaatggctacttctcgcaatggccaactgcaaaagttcctgacgcaaggaacagtgcgcggcagagtcatagcgcatagtcataggcacaccaaacagtga

SEQ ID NO: 7499 - DNA, 285 bp, Zea mays
caagcttacaatataattgttccttcttactaccgttgaaggatattatgagaaatcgagaagctactggaaggattggaaaatgggttgcagagctcaatgaattttgtattgattatgtgcataggtcttcgattcaatcccaagcgttggcagatttcattgtgactggacgccacgggctcaagaggaagaaacgaataaagatgccgaagtatggacagtgttttgcgatgggtcttggggaaccttccgagcatgagcagctgctgtggtggtttcacc

SEQ ID NO: 7500 - DNA, 259 bp, Zea mays
ccctcacaacggacaagtcccggaaataccctcctctcatataggcacgatgaattccttcgatgcgcgatgtgcccaaaactgcaaggcacgggcgccaagggcgaacctcggagcctccagcaacaccatccacaacataaccggcgctcgcatcacaatcttcagacaaaccctccaaacactcgtcggcgaacttttccgtaccgggccccacattggataagaaaccccagagtcttctcttcatcgagactca

SEQ ID NO: 7501 - DNA, 360 bp, Zea mays
  unsure (1)..(360): unsure at all n locations
ccatccaaaccaccaaaacccacaagagagctttcatgttcggcgtcgccccgagcataatcgcactccgagcgcaagcaggatgcttcgcctctgagccactcggccttggaacgaagctctgcaagctcgcgctccttcacctcagaacaaagcagtctcgcatgcagctgctctgcctcccgctaggtggacagcaacgcctccgccctagctaccgtccgcatgaaaagacgctacaaaaggcaaaccacgcgatcaactaaaactttggtgggagggtaagaggagggacaatcggaaaggaagcagcgacccgatccttgctcactngacaccgcatccagaacatgacatgac

SEQ ID NO: 7502 - DNA, 484 bp, Zea mays
  unsure (1)..(484): unsure at all n locations
agtcacctgcggcatgcaagcttgtggttngagttatgaaatactcattatgtgttttttaatcancncccatnnctgatggcaagtacgaccgccacttcgccgccaagtacgagctggggaaggaggtgggccgcggccatttcgactacacctgctcgcgcccgcccgcaagggagacatgagaggccaggtcatggctgtcaaggtcatctccaaagccaaggtcttgctattcgcgatctcacagtgctcttttattggacgcacgccatgatcttacctgtttcaatcggctcggttcctccaccggatcatgaacaaactatgtgggatgacataattgccatcctgttgtgatcttttataactctctcttagtagatcagtatctctgaagtgccactaccacaggtgtcgcaatcataagttcatgatttgcttcttggctgacttgcatggtgatcagtnttttccccccgat

SEQ ID NO: 7503 - DNA, 470 bp, Zea mays
agcttgcaaatcaaacttttcatgtgccttctcagggcgcctcaggcggcatcctaatcgctaccgatttagactactttgacttggtcctcttaccaggctctgcagcctattcgctgtctgtccggatcatttccagattggtggatgaagtttgggatctcacgggtgtttacggcccccaaccggacaatgaaaaaaatgatattcctctctgagctcagaaacattcaaaccatggtgaggccagaatgggtaattttaggtgacttcaacatgatcaagagagcaagagaaaaaaacaaagggtcaatcaacagaagggtgatgaggcagttcaatagcacaattgatgatctgcacctcttagagctagatctcaccgatagagcatttacctggtcaaatgaacaagctaaccctaccatgactaggattgacagattcttcacgacaacagaatggcatga

SEQ ID NO: 7504 - DNA, 335 bp, Zea mays
tgtgtgatctacttcatcatcactagagacatcatcacttttttgtttatacttaggggtatctcgagcgcttacctttttctcctttgccatgaggcaagtatgacgctcgttggggaagagagacaacttgttgaaggccgaggcggcgagtccttcgtcgtcggagtcggaagaagagcaatccgaatcccattctttgccaaggtgcgcctcgcccttcgccttcttgtaggccttcttcttctccctcttcccgctcttttcttgttcctggtcattaatattatcgggacaatttgctataaaatgaccagtcttaccgcatttaaaac

SEQ ID NO: 7505 - DNA, 437 bp, Zea mays
  unsure (1)..(437): unsure at all n locations
agcttcttcaccatgtgatcacggttatcttgataaggttgagcaatgcacttcccttttagttgtgtcaagctcatttttagcctctcattttcttctttgagcttttgatatgaatcatcgctcgttcctgcaaattctagctcaaaggaagatttgcttgtcgacggacaacaagcattagcacatggtaatgtagtttcaatttgaatacatgtgcatgagtgaggttgttgggattttaagttttctatcacaacctcatgagcaatttttaatatgatatgatcatccataagattttcatgagaatagagaagcatatcatatttttcttgaaaagctaaattttcaacttttagctnttctacttggtccttaagcaaggcattcctatttactaattaagcgatacaatgtaaagcgttatcttgctc

SEQ ID NO: 7506 - DNA, 472 bp, Zea mays
  unsure (1)..(472): unsure at all n locations
ctgcagctaaccttgaacgaggataagctgcctttgttccaatgtggatggnccttaagcctctctgaaatccttaagggaaaatgcttaagatatttataacatgctttcataagtgcataaactgtcatgagcatcacacctatactatgacataaagcacttcactttctctatgatatagatttgttctcattaacctaattatgtgcacttggcatttaaggccaaaatatgtattcctctcaaggcacatatttagggagagaaatctatattatatagaactatgatcatgcttaattgatatatctcctgatcatatctctttatgtctacgactaatgtgctttcaagtgatctttatgctaagtcgtaaattgaaagggaaatggagtcttcagcgaagacaaggcttccactcaactctattggtactatttatccttcgccatcactccacactagctct

SEQ ID NO: 7507 - DNA, 358 bp, Zea mays
taaaactcagcttgattgcatgttaaatttcttgtattgcatttagggcttgtctaacctagttgagataaccgccaacaaagcgagtgaaaaagcttaactcggattaaacttgaaaagtcttatttttaagcttttagcacttgaattcttactttttatgcaattggtggttcttgaaatatgcatgaggtacagcacttatggggagtattcaaaactcaaatcactcatgaaaacccctagtgcaaggccaaaatggcaaattcaccatttgcctattttctctaaaaaaatatctagcctatggcaaaatattttaaaaattatgagaaaatatatgagggtgccaatacct

SEQ ID NO: 7508 - DNA, 300 bp, Zea mays
taccctgaaactagggtaccccttactgctggataaaaacgcagtacccacgcggctatttttagtcgcatggtacaaaagttgtatgtgggactaggccatgactctcccaagccttgggcgactactctgggccaggaacagcacctgaccccaccacatgggcgggtccggtgccgtcacgtgtccaaagaaagtgacatactctgaggcatcatcagtgagttctgacccccatgggaaggtgctggacccctgtatatatggccgggcctccaagtttggtccaggatctccacg

SEQ ID NO: 7509 - DNA, 470 bp, Zea mays
  unsure (1)..(470): unsure at all n locations
agcttgtgaaggttcttcattcctacatgtgcttaacggcgatgccacagccagcccatgctagtcttagcaattaagcatgcatctagaccggcctcctcttttgcaaaatcaactaaataaagtttgtcgtctagtacacccttaaaagctaatgaaccatcccttcttctaaagacagacacatctacatttgaataaacaattatatcccatattacaaagttaactaacagacaacaagttatatccaagcgactcaactaaaaacacattggaaatggagtgctcggatgaaatagcaatctttcctaaccctttcaccttgccttgattcccgtcaccgaatatgattgagtcttgagagtctttgttcttgacgtaggaagagaacatcttcttctcccccgtcatgtggtttgtgcatccgctgtcgataatccagcttgatcccncggatgcataaacct

SEQ ID NO: 7510 - DNA, 441 bp, Zea mays
  unsure (1)..(441): unsure at all n locations
tgtgaagccaatcataagactattgaagaatgacacaaaatttaactgtttctcaagatgcaacgaagccttcgagcagctgaaggtattattgaccacttctccggtattggctcaaccggacattgaaaagccttatgatgtgtattgtgacacatcgggcagaggtctcgggtgtgtcttaatgcaagaaggacgagttatagcatatgcttcaagacagttgcgccagcatgatgaacattatccaactcatgacttaaaattagctgttgtggttcatgcccttaaaatatggtgtcattatctgcttggaaatatntnnnatatatatatagatcataaaagcctgaagtacattnttacccaatcaaaattaaatatgaggcacagaagatggcttgagctgataagggatatgaataaaatttactatcaccc

SEQ ID NO: 7511 - DNA, 470 bp, Zea mays
  unsure (1)..(470): unsure at all n locations
agtcacctgcggcatgaagcttctatccaggttctatatgaaaacacttttacttacaacttgnttgaaatatttgcctagtgaatgcactctaggtgtatcaaacatatgcaatgccaatgcttatgatgtcatgctcaagttttagttacagtaacaccaggggtattacatccttccccccataaaagaatctcgtcccgagattaaaagtcctagggtaagtaatggaaaaagaaacgcgacatacttttatttcctaagttttggtacaaggcaggggtgatgtgggggtcacttctgtattacacagttatataggctttacaatttacatgaggctaaaaaacctgtngaaattttatctaaaaagtcttgagtttcccatgtagcctcatcttcagaatgctggttccactgtatcttataaaacttgagagtttttctccgggtaaccctgtccttttgat

SEQ ID NO: 7512 - DNA, 446 bp, Zea mays
tcgactgccgcatgcatctatggacccgtagcctatcaattgaatgtttctcccagcatgtcagctgttcatgatgtgttccatgtatctcaactgcggaaatgtgtgcgcctacccataaaagtgctacctgaaccggacattgagatataaccacacattgctttaagaagagtaccccatcaaggtattggatcataaggagagatcatcacgggtcatgtcaatcccaatgtataaggctcagtggagtcaccattcatcagcacaagctacatgggagactgaggattttctacgctctcgcttccccgactttctgcccaaaggagtctgtatgtaacccataaaactccacccccacctgccctttgaatacaactataagaaaaactcacataacacggatagtctaagctgtggatttaacttagaaagggcttcct

SEQ ID NO: 7513 - DNA, 452 bp, Zea mays
  unsure (1)..(452): unsure at all n locations
ntgggtttgaaatgattaagctgagaccgggcgggtgtactttcactacaaaggagtctcggtgtagtgtctctgtctgagtcgactaaggaccgggtcgatgtaagcctgctgaccgaggaccctttaactggtcacatgcctcgtcatgggtaagctttgcctcgggcagactaaggccacaataagataacacggaatgggcgtggagcggtggcgagagtagcgtgtaccctctgtggcaagaggctggacagaggtgtatctgtgctctcggatggcgtgaacctgatctggtcttaagaaccccggtggcgggtcgacatatgcaagggttaagtgctacatatgtcgcgtgatcggacacactcagctgagtataatcgattcggatcgccgtaccttcgcggttatgaagacatggtcactgactgatacgtagaaatccacta

SEQ ID NO: 7514 - DNA, 302 bp, Zea mays
aatcctgacctgaagaccttcccgactagtgttgtggaggctacctgtattccacattggccagcatggacctcctccagagggtgcttcccagtggacgaaagaatgcacttcacgaggacgcctgatgcaccccttctgtataatgtctccccaatgagtgtataatgagccgactgtcttgcaatgccctctgccgattcttggcgtctggttcttcttcattctttatatacttaatgatcggccttctccagtcatcagagtctgattccggttgatgtatgatgttgcactcttct

SEQ ID NO: 7515 - DNA, 357 bp, Zea mays
atctggcgagggcatacttcgtctaactcccagccatgcgccaaaggccataccccgtacgccacaaacttctcgaccaaatcgcgcccgctgctcaggccggaggcgcaccgaagggccccttcgtccgcatcctcctccgccacttcaaacggcgggtatgctgagtaataatgcgagcacatctcggacacggggagccccggatggtcttcgactgtgccctccgtgacgtagaaccaaaactcatgccagttgccccacttgttgcgggcgcaaggaaccaactcaactacctccatcgaggtcttgccggtcttcggcgtaaatgtacaggacccaaactgggcaacttca

SEQ ID NO: 7516 - DNA, 354 bp, Zea mays
gatcacaatcaagtccttcataccgttagaccgactcccaatcgcaatcaaacgtcctatgtaataaccacaaggctatcagtcgtacacacatgacacaaaacaaacttggccagcaatagagagacaggcggttgatctgccgatggccatgcccgcccagtctccaaacagatgggcggctccacctccacggcgaccggagcgaaccacatagcagccgctgccacccagaatcgatataataaagccggcgcaagcagctcagcaggggcatgctctgctcacgccaaacactcctgcatacgtaggccggcgcttgcactcactcaatgcctgtgccaccgcaaacaa

SEQ ID NO: 7517 - DNA, 433 bp, Zea mays
  unsure (1)..(433): unsure at all n locations
agcttaatgccactcctaaaagatggtctatctttgtttatggcaaagctcccatgcctcaggataacgaggtttacattntgtaccatgccggttatcccgagcacaaaattaggagaattcactctaggaagtctcactctggctctcatcatacttttatgtataagagtgaggcatctagttctaggcaatccactcatgctaaattgcctatgaagaaaagtcctattgcatcaaacaaacctagtattgcatttaagacttttgatgcatcttatgttttaactaacaaatcaggcaaaatagttgccaaatatgttgggggcaaacacaagggatcaaagacttgtgtttgggtacccaaggtgctggtttctaatgtcaaaggacccaagaccgtttaggtacctaagaacaaggcctaaacttg

SEQ ID NO: 7518 - DNA, 364 bp, Zea mays
  unsure (1)..(364): unsure at all n locations
cagcttgaatgtgtcttggaatggtattgctagctcttgtatcgaatgtgtatgagtggaatgcttggatgtgttgaatggaggcggttggggttgtatttatagcctccaaccacttcctagccgntgctccctttctgtcgacctcggacggtccgtgcccctaatccggatggtccgcccctgtacatcaacgactgaaatcgcaacggtcaacaataatggctatatcaacggctatagagcatttaatgcgtcttcagatgtcacataaagcaatcacggcggtccggtcgtgcacctcggacggtccatgaggacactataaatgaattttaccgaacccgtcacctctcggttttct

SEQ ID NO: 7519 - DNA, 301 bp, Zea mays
tgtggtgcgtttttaatgttataaacacgcgtataggaggaaggcgtgcttattatgagcgagccgctccccatgatgaggtgtcccaataacagaacctgtcgtccccgcccccgatgtcgatcgagcatatgtttttgatgcagactcacgcagttcaagccatcggtcaaactctgggcgccatttagcagcagtagtagcagctacagcagcaagcaccaccccaccctcagatgcctcagatgcctatagacaagcgtgctgaattcatgagaggtgattcaccaacgtttgctta

SEQ ID NO: 7520 - DNA, 460 bp, Zea mays
  unsure (1)..(460): unsure at all n locations
agctnttgaacgtactaagcatatgccggtttaaatggtaaccggtaaacctagtacctgatagaagccgggcgcggactttatccctcatgtgacctgagactgggtctcccatgctagctatggtgggtacaagtgcggtcactgcacagaggcacccggagtcagaggagcattgtatgccaaggcggtgaggcctgcacactaacggtgaatcgatggggacggttgtcatgtgtggggtcggagtaccctgacatgccgtgtgtttaggtctaccttgcaaggataaaactccattcgaatcgactgcttctcgaagctaatgagactgtgagaccccttgtactgcatcgagtaagaagtgaaatgaggttacataatataacttcgtgaacgaactaaatgctcgtcaccatgtatgcttataaggagcaaatctagctaagttaatgatgat

SEQ ID NO: 7521 - DNA, 377 bp, Zea mays
tgaatccatggtaagtagcataggctaataatatttttattgtctcaagcctagctacgggtgcatatgtttcaccaaaatccaaatcttcgacttgggagtatcccttggccacaagtcgagctttgttccttgtcaccacaccatgctcatcttgcttgttgcggaagacccatttggttcctacaacattttgattaggacgtggaactaaatgccatacctcattcctagtgaagttgttgagctcctcttgcatcgccatcacccaatccgaatcttggagtgcttcctctaccctgcgtggctcaatagaggaaacaaaagagtaatgctcacaaaaatgtgcaacacgagaactagtgggtaacccctta

SEQ ID NO: 7522 - DNA, 355 bp, Zea mays
ctcatgctcttgctcattttgggaatatataagaatatcatctatgaacaccactacgaacttgtcgaggtagtccatgaacacgttgttcatcagatacatgaagtaagctggcgcattcgtcaatccaaatgacataaccatgaactcatatagtccatacttggtgatgaatgttgtcttcggtatgtctgagggtcggattctcaactgatggtaacctgacctcagatctatctttaagaacacactggctcctctcaactgatcaaataagtcttcaattcgaggcagggggtacttattcttgacagtaacatcattcaaagctctataatcgatgcacatcctcttc

SEQ ID NO: 7523 - DNA, 379 bp, Zea mays
  unsure (1)..(379): unsure at all n locations
ccccccccccccgcgagaccttntcccgtttctttctatttatattgaatgcgatatcgaatgtcatacttgatgcatgttcactttatttgttcccttgtatgatgtactgtttgcttcccaatttgaatggatgaatgtatgtatgcttgcaatcgcatagagaacgatccggtcgaagagcccgaggaactcgcaggagaagcccctgagcagcagtcggttggtggaggcaagtgtcccttgacctatctatgtcctattcattctttaattcacctcccgcattacacatttatgcctaaggattgactagctttgttatccatgtccccttgttacctcattgggtggattattattgtttaactttatgcta

SEQ ID NO: 7524 - DNA, 429 bp, Zea mays
  unsure (1)..(429): unsure at all n locations
agacatttccttcaccaacacttcgcccataaaaaagatcaattctcattttcaattgcctgtttgcaagacaagtgataattgccataagtaaattataatctacatttatataatctagactaccaaacagctacatatagtagattataatctggattatataatttagattataatctagattatataagtaagagcttcctagcttttgcagagctgtatcctccacaagccggtcatgatacaacattacacacttaggtaaatttacagaagctattatagagtactgagtacttaccttatattcatcaatggcatctngagcaaaatcgatatctgtatctttttccctgaaacaacacaccaacagcaaggtcagtcagactaatgcatactaattaaacagtanaggcatattcatat

SEQ ID NO: 7525 - DNA, 350 bp, Zea mays
  unsure (1)..(350): unsure at all n locations
tgtgaatgacttgccgaacaaccgaagctgctggttgattatttacgtattctggtatatagagagagtagcacgaagcagtatgtaaaacctgcttcggctgattctgtcgcgcttctgcttcggcaatctcttttttcttctgaatggtgacctgacatgttcttgtagtgtggcccttgtcttcaccatagaataggcaatagagtttcctgggttgatccccatatcttcctccgaagcctctgccgcctctgcccctnggagatggtgggctaaaagaactctgttgttgccctgaacactgtgactatgatgtggccttgaaactgccccctttatatcaatct

SEQ ID NO: 7526 - DNA, 472 bp, Zea mays
  unsure (1)..(472): unsure at all n locations
agcttatcacaactaaacacaattttagattctatgaacaattgtatattagaattacaacacatatagttatcacgaaagacatgagcaattctttccaaacataattggttatttactaaagtagttaatactaacttgtttggaactgtgctggcacagactggaaaatccgtccaattataacactcacaatagtcatcagggagagagcagccattgacccaagtaaaacctgcttataaaaattcacaatagatacaaaatgctgaaatactatatattgttatacgcaaaaagaaaataaggcaaatcatatagttaatatccctccatccacaaaaggatgcaattctcatttttttcagaaactcgaacgatttggagtttgaccaaagttatataaaaagtactaatatctatgatacaaaataagtatgattaaattaactacaaaatatatnntagtagt

SEQ ID NO: 7527 - DNA, 438 bp, Zea mays
tgcttactcggtaagatgaccaaggcgcctttcacgggtttaccggttatgacattacatctattggaactcatacatactgatgtgtgcggaccaatgagtacgacagctatgggaggattccaatgcttcataaccttcactgatgattttagtaaatatgggtatgtctacttaatgaaacacaagtctgaatccttataaaagttcacagagtttcagaatgaagtagataatcagcgtggcaagaaaaataaagcactgccatcagatcgtggtggtgaatatttgagtcatgagtttagcaatcatctaaagagttgtggaaatgttccacagcttacgcccgctggaacgcctcaaaggaaaggcgtgtctgagcgacgtaatcggaccttattggatatggttcgatcaatgatgagccagtcggaccta

SEQ ID NO: 7528 - DNA, 483 bp, Zea mays
tcttaagtcacctgcggcatgcaagcttctcccacgatgttgtgcgttggtattctttctgtctacctgggtaccctcgtggtgcttttgggtaggatggtgtcgtaaattgtaactcgatggttcgtgccgggagcacgagaaaagaaagagtcgagcgagtttcagcaggttcgggccgcttaaggagcgtaataccctacttcttgtgatgactttgtatgtgggaggtgtttacaagtggtgtttaccaagtggtgaggtgctaatgagatgaaagtgacagggatcccccttggccttaaatacacgaccgtagggcactttccgcgtacatgctggtcacactcttccagcttatctcctagctaatagtgaacagatttcgcttatctcgaggaaaatccggcgcaatcgttctgagctattcccggcgttcaaggatgtctggcgcgggaaaagcgaacagcttcaacgggatca

SEQ ID NO: 7529 - DNA, 377 bp, Zea mays
  unsure (1)..(377): unsure at all n locations
cctctagaaagacactggtttatttcctgacaagctttgaaatattccttcatcagcttactcccgaagctatcatcaagatagggatctatatttgggccatgaggagccaagggttagaaccaaatgcaaaatgcttctgcaacatgcatgaattgtcttatgagacgaaggccaccagacaagagcaatatcacaacaactttggatgctacggttacgtaacccgctctaaggtgagcaacccaggtacaacattttaccagagatggctgggggcccggatgtangagcggttctatgtgaaaaatgatctggttgaaagggaagacatcaaggggagtatccaacgtcttatatggtctcacttcaacatt

SEQ ID NO: 7530 - DNA, 488 bp, Zea mays
  unsure (1)..(488): unsure at all n locations
ggatccttaagtcacctgcggcatgcaagcttgccaatacctgtcatagcaacagctcgtgccagcacagcagctacagaccataccagtaacttggcctttcgcatgctggggattggatatgattggacctttcaagaaagctcaaggaggatgcacccatgtattggtggcaattgacaaattcactaaatggatagagttccagcccattgcctttttaacctccgctaaagccgtggaattcatacaaagcataatattcagattcgggataccaaacagtatcatcactgacttgggatccaacttcactagttcagaattctttgacttctgcgagcaaaagagcattcagattaagtacgcatctgtagcccatccgagagccaacgagcaggttgagcgagccaatggaatgatattggaggcactcangaaaagggtctttgataagaacgaataattcgcaggagaatggataagag

SEQ ID NO: 7531 - DNA, 308 bp, Zea mays
aacataaaactcagcgtacacacacttgaacaagaagacaaagattttgttatccacgcgacaagagcaacaaaagaacacaaatgatcctctcacaagccctaaagcaccagcgttgattatagaaactaagagtggattgatcgctctgaacgtgtcacggagtgttgcactttgctcttgcaatgaatgaatatttcacaaggcatggatggctttgaatgaggcggatgggggtattaatagccccaaaccacttcctatccgttggtgaagtctgctggcgaagggcgcactggacaaccacc

SEQ ID NO: 7532 - DNA, 452 bp, Zea mays
  unsure (1)..(452): unsure at all n locations
gcttcgcacctctgaactaactcggcggtattactttntgctggtggccaatagaatcccgacctgaagaccttcccgactagtgtcttggacgctgcgtgtattccacattgtccagcatgaacctcctccagaagttgcttcccagtagacgatagaatgcatttcatgaagatgcctgatgcgccccttctgtatagtgtctccccaatgagtgtgtagtgagccgactgtctggcgatgcgctcggctgcatttttatcgtctggctcctcttcattctttatatatctgatgatcagccttctccagtcatcagagcttgactctggttgattcacgatattacactcttctgcctgatccattgagaatgctggttgtggtatttcttggacaaagactccgggtgggacctgagttcgactggatcctagctnggacaatacatc

SEQ ID NO: 7533 - DNA, 281 bp, Zea mays
  unsure (1)..(281): unsure at all n locations
gtcctgtgatatgatctatccctcagttgaaaagagcatcccctgttagaggaaagtctaacaattgatcttgctgtggaagtacaaaaaacttgtgagctggcactaagacgaatagaagagcaatagatcaattgaggtatcatttccaacgcatgcatgtaccagctcaagtttaagtntgacccatgtttataattatgacttggtttcttactaggcccagaataacacaacattgtcagagagctgattgaaattccaacccaacatattaaaca

SEQ ID NO: 7534 - DNA, 373 bp, Zea mays
  unsure (1)..(373): unsure at all n locations
caatgggaaaatctttacaactggcaagaagaagctccttgatgaaaaaaacggcagatggactgatttgttacctgaggcagtctgggcactgaacacgactgagtgcanggcgactggagttactcccttccgccttctatacggattcgaggccatgaccccgcaagaaataaagcatgggtccccgcgaacagttccgtcagccgtccccgacgtggacgagccaacttcaaaggaccttattgacggagacagagtcttctccctacaggccctaacaaataccaaacccagaccaaagcatggcgcgaccacacagttatcccgagggagttcagcgaacgggacctcttactcgttcggacagctc

SEQ ID NO: 7535 - DNA, 318 bp, Zea mays
tctaagggagaacacgtgataggattaactaatgtgcaattctaaaaagatagaccttgtgcagcttgtcaggcaggtaaacaagtgggaggagctcatcacagcaagaatgtgatgaccacatcaagacccttggagctgctacatatggacctcttcggacccgtcgcctatctaagcataggaggaagtaagtatggtttagatattgttgatgacttttcccgcttcacttgggtgttctttatgcaggataagtctgaaacccaagggaccctcaagcgcttactctggagagctcaaaatgaagatgagctc

SEQ ID NO: 7536 - DNA, 464 bp, Zea mays
agcttctaataattaccacttcatcttctttatgattatgaacatcattctctcctccggccctcacaattgaaatgtcacgaaagtatctacctctcattgcttgaatctacccttgtttaatagtcgactttctgaaaacaacatggctcggtctccatggtcgatctttggcatcttcatttccactttccacgtccaaactctcaccatcgctggagttttcagatattctagccaacatctcattggtaattttctccatgttggttttttccatagcttcgtaaaatccggccagcgccgggtcaatgatcttcttctcctcaaccgtttagacaatggttgccaaaatcccgaagctcataattcaattaaactcgacgaagcaaggaaggttaaaatggtagacacaatgcaagcagctaaaacagcatgaaaaatactcacgacacacgcttcta

SEQ ID NO: 7537 - DNA, 458 bp, Zea mays
tcaactccatctatattatggattgccttggaatcagttcttcttccttcggcccttctggcagcttcctgactcccatgaatagcaataggcccttggtccgaaggtatcttcatgcatagataagctgggtgaagaattgcttcaaaagcatttatggtaccacgaccaatgatggcgttgtaggggtattccatgtcaacaatatcaaacacaatttgctcagtccttgtgttattaacaaatccgaaggttaccggcatggtaatcttcccgagtgccacaatctgccgccctccgaagccacaaagagggtgcgtagcatcatgaatcttgtcttcaggctcttgcatctgtctgaaggctttggcaaatataatgacagctgcactgcctgtgtcaactaggacattgtgaaccagaaaccctttgatcacacaagaaatgaccatagcatc

SEQ ID NO: 7538 - DNA, 426 bp, Zea mays
agcttatgatctttccttaatgggataaatataaccgtttcgatattactcatctgtgaaggttatgaacgagttaaactcatctattgtcctaactggaaaaggaccacatatatctgtatgaataaattctaacactcacgtactatgcttagcatttttcttaatctgctttgcaaatttacccttaatgcaatctctgcattgctctaagtctgtgaagtctaggggatggagaatctgttcgctaacaagacgttctatcccccctcaaaatatggcccaaacgatggttccataatttcgatgagatttctccatcacttcgttttcttttcctgccacttctggctggatcattttctggtgtatctagtacattaacaatgtcgttgttcgaaagtaaataaagcatatctctccgga

SEQ ID NO: 7539 - DNA, 338 bp, Zea mays
  unsure (1)..(338): unsure at all n locations
cgagttatattattacagaccagactcaaagtgattttttatantaatgttatacaaaccaagggaggcacagactcctcccgataagttataaacaaaagatcctatgtggaggaccaagtcctcccgcacttaagtcttgttattcctcatttggcaccaccttggagcaaaagcaacaaaaatttgtcgcttcctcacctaaaaacaacaaagggataaaccctgaatatggaatactcagcangtcttacccgactaaggaaaagactctcaatggtatgctggataaataggaatcaaggagaggctttancaaaaataacatatacttttgc

SEQ ID NO: 7540 - DNA, 419 bp, Zea mays
agcttagcaagtgcgagttctggatcaatgaagtcctgttcttgagtcacattataaaccgagagggattgactgtagatccgaagaaggtaacagttattttggactggaaagcaccaaaagatgtccgaggaatcaagaatttcatcggaatggtcagttattatcagcgtttcattgaaggtttctccaagatcgtcaggccaatgacagtgttgggggccttcgtcttccgaagttcctcaaaaacatgatttaacaatgtctcccaagtgtaatatatgaacaggtaccttctgactcgggttaaaaccgtacatgatgtgaaaatcatggtcgagacgaaggctgatgtcgctccgaagctatgcgcaagggagcttcgactcaatggccggaaaaggaaccgacttaagggg

SEQ ID NO: 7541 - DNA, 458 bp, Zea mays
  unsure (1)..(458): unsure at all n locations
aaaaagaataagtcgtgccatatttattcttatatcaaccagntattggcctattcgtttgcctgccaaataattttctttgcaaaaaaaaatataactatattcctatatgcttctaactttcatggtcaataccaggaaaggaaagattatcacgcaacagcaaacagaaatgaatcctctaaatccttcacctgttgaaatcgatcaagtggttgctgctcaaagactggtaatacaacaattgacaaacctagtgaccgagatgcaaaatcagataagacaaggacgcgaggaaatacgtcatgtccgccaagaaataagccaagcgcggttggagagacaacgacaacaacaaccttcaccaccaccaccagcttcaccaagctacataaacatatatataacatactactatttgtangatctacgatgtactttaattagtggatgatatg

SEQ ID NO: 7542 - DNA, 313 bp, Zea mays
  unsure (1)..(313): unsure at all n locations
gttggtaagaatatgtaatctaagaataaaatctactcctgtaattntggccataccttataatatatcttaccttccatcatgttgaagtgctcgatggaacaaattgtacttgcattgaactgctttgatgtggatgaaactagcatttttgagccgaggcgaaaacaccttccttttttcgacacacgaacatgaactgctcttttttcttttgtcgaaccttattttgagccgaacatcacctgtgctgtatgtatatgatatgaccttgatgttaatgatgttataagcaatgatgatgatggcggca

SEQ ID NO: 7543 - DNA, 347 bp, Zea mays
  unsure (1)..(347): unsure at all n locations
ttggaacactcgtgtaatatgacataccctgctatagtatactgtcttccttacccacattcaatctgctccgctgcggacgagacttatctgctgagccgagagcgaaaaacaccctcgcttcgtttcgctctcaacgaagcgaaaactaatatttctttagcagcttgtcctaattctctgtaacaccttgcctttctgtgtacatgaggacgagtctatatatgtctaaatgaatgtgcctgaatgcanatgacatgatgacatgttctgcgcgtatgaatatatagacacatgctatgatccataacacagtgcttctctcgctaataatgaacaaatgtttt

SEQ ID NO: 7544 - DNA, 357 bp, Zea mays
  unsure (1)..(357): unsure at all n locations
agcttctaagggagaacacgtgataggttttacttacgtgcaattcgaaaaagatagaccttgtgcagcttgtcaagcanggtaacaagtgggaggagcgcatcacagcaagaatgtgatgaccacttcaagacccctggagctgctgcatatggaccttttcgacctgtcgcctatctgagcataggagggagtaagtatggtctagttattgttgatgacttttcccgcttcacttgggtgttctttttgcaggataagtctgaaacccaagggaccctcaagcgcttcctcaggagagctcaaaatgagtttgagctcaaggtgaagaagataatgagcgacaacgggtccgag

SEQ ID NO: 7545 - DNA, 193 bp, Zea mays
cctcggctcaaacaaaggcaagccttgtcttgcatacaactttggacaattctgcttaccagccgaccgtatttgatgcgcattctatgctgggatacgctgacaccttatccatacatgcgcgcctcattccggaaggtcgaattgaccgcagactcttcaccctttctctgtccgatatgacatgataaca

SEQ ID NO: 7546 - DNA, 83 bp, Zea mays
cactgagctgcatcgggtgctatgaggactactacttattgcgtgcctcctgccgcttcatcggaaactgcggccactgaatt

SEQ ID NO: 7547 - DNA, 449 bp, Zea mays
  unsure (1)..(449): unsure at all n locations
agctctatcaaatggacgtgataagtgcctttctctacggaccaatcaatgaagaggtctatgttgagcaacctcccggctatgaagatagtaagtatcctaaccatgtttataaactctctaaggcgctttatgggctcaagctagctccaagagcatggtatgatgccttagagattgtcttatcgctaatggcttcaaagtcggaaaagccgatcctaccttgtcactaaagctcttgcaaatgatttgttcgtatgccaaatttatgttgatgatattatatttgggtctactaacgaatctacatgtgaggaatttattaggatcatgacacacaagttcgagatgtctatgatggnggagttgaagtatntcttatgatttaaagtaatacactcctagaaggcaccttctaaccatacgaagtatcttaagatatctaacaa

SEQ ID NO: 7548 - DNA, 255 bp, Zea mays
gtggatgggccatctagctctatgactctctttgatccactgatcatgaacctctatgctcacaaagcttcctattacatcctggggagacactcatgatatctacgattacctctgagtattgaacttgtgtacgattaataaaaacacgggatcttctaataaccttgaccattccatggccataccattgtgtgctacctaagatgcgcacttggtttactatggtcttgagtcgattgtacatctatcgtg

SEQ ID NO: 7549 - DNA, 256 bp, Zea mays
tgctgttcacatagagaaagacggatctgcttgcatgccagtcaggaagcagatggccctcttcatccggtaagaacataacgcctcccgacatgtcactggagctcctgcacatggatctttccggccgatcgtttacttatacgtcggcgggagtaaggactagctagtgattgtggatgatcactctcgcttcacttgtgcattcttcttacaggaaaaataatccacccgagagaccttagcgggattcttg

SEQ ID NO: 7550 - DNA, 348 bp, Zea mays
  unsure (1)..(348): unsure at all n locations
agcttctaaagggagaacacgtgatatgtctaaccaatgttcatttcgaataagatagaccttgtgcagcttgtcaagcanggaaacaggtgggaggctctcatcacaccaaaaatgtgatgacaacatcaagacccctggagctgctacatatggacctttcggacccgccgcctatctgagcataggaggaagtaagtatggtctagttatcgttgatgactctttccgcttcacttgggtgttctttntgcaggataagtctgaaacccaagggaccctcaagcgcttcctcaagagagctcanaatgagtttgagctcaaagtgaagaagatagtgagcgacaa

SEQ ID NO: 7551 - DNA, 408 bp, Zea mays
  unsure (1)..(408): unsure at all n locations
agcttagcaagtgcgagttctagattatttaagtcctgttcttgggtcacattataaaccgagagggatttggctgtagatccaaagaaggtaacaactatcttggactggaaagcaccaaaagatgtccgaggaatcaagagtttcatcagaatggtcggtattatcggcgtttcattgaaggtttctccaagattgccagaccaaagacaaccttgttggcgaagaaggttgagttcaagtggaccccggcatgctagaagtcctttgagacattgaaggagaagttgacaacggcatcagtattgattctgcccgatgttcacaagccattctcagtatattgtgatgcctcgtacaccggactgggatgtgtgttgatgcanaaagggagagtagtggcatact

SEQ ID NO: 7552 - DNA, 410 bp, Zea mays
  unsure (1)..(410): unsure at all n locations
agcttctttcgaagggatgtctgtctataatattccacgaggagagaatgagcatgctgatttgctagccaagtcagcggcacaggtgctgcctttaccttcggaagtattctctaagacgataaaagcatcctcggtggaacttcttgaaagagcagtgccaatatatctcctgttcatagtgaagattggagaaccaagattatatcttttctccaggcaactgcctttcagatgatgaagcttataacaagacgatagaggcgagagcccgaccatatgtgataatagaaggggagttatacacacatggagtatgttctccattgcccaaatgtttatccagagctgatggtgtagaatngatgaatgatatacacgccaagcctgtgtggatctcacatcggatc

SEQ ID NO: 7553 - DNA, 284 bp, Zea mays
gctggacgaaacgttggcttaatgaccgcctgctctcttctctactcaatcggtagaaatgagctcacttatgttgttgatgtgatagtgaaagcacagaccaagatagccatgtttgtgatatgcgagagacatttgccaatgttagataggactgtgctcaacatagatgcacatatatgcgtctttggagtgaagacaggcagagttgttaaatgcctggtatccacgcatggtattgtagctaacccaagctgaaacgtagctatacttctgatggaacc

SEQ ID NO: 7554 - DNA, 441 bp, Zea mays
  unsure (1)..(441): unsure at all n locations
gctcttcgagttctacaaagctgaagaccctgatcatctgtttggtgaaggcaagtgtcctctgacctattatgtcccatttactttatatatcatcaacccgcataccatgatcaacctaaggattgacagctntgtatttaccttgtccttgattacctttagggttattattgtttagctttatgctattgctcaactctaatcaatgaacatgatgagatttatcaatgatacgcggtttcccttctttattatgatgttatatttgtgtcattcaagggggctcgagcggtttctcgagtgcctctccgtaaggacctgttcgttggatgacccgccgggaaaacagtgcaaccatgaaggtggaatggaatgcccttaactgaataattagaagaaccggtgtgtaattcgcttagccggcgtgcccttaatggg

SEQ ID NO: 7555 - DNA, 191 bp, Zea mays
caagacgtgtctgatatcttcactgaagacaatgtgtttaccaccaaatggcattgctaggcgacccattatatcgcgcatgctattgtccactgcctccacggcttgtctcttagtcatataagcctcgctccatactatgagagatgctttacgtatcaactctgctggaccactctgcttcgcgaagc

SEQ ID NO: 7556 - DNA, 439 bp, Zea mays
  unsure (1)..(439): unsure at all n locations
atcttaagtcacctgcggcatgcaagcttgtgaagccaatcacaagtttattgtataatgatactaaattcaattggtcttcaaaatgtaatgaagcttttgaacaattgaaggtattattaaccactgctccggtatagactcaaccggatatcaataagccctttgatgtgtattgtgacgcatcggcagtggtctcggttgtgtgttaatgcaaaaaggccgagtaatcgcgtatgcttcaaggcagttgcgccgacatgaggagcattatcccactcatgatctggagctagctgcagtggttcatgccctgaagatctggcatcattatctgctgagtaatatctgtcacatttatacagatcataaaagcttgaagtatatcttcacccagtcagagttgaacatgagacaaangcgatggctcgagctgatc

SEQ ID NO: 7557 - DNA, 231 bp, Zea mays
  unsure (1)..(231): unsure at all n locations
catcatccacacaagaacatcatgacaacggacatgccactggagttactccacatggatccattctgcccgatagcttatataagcatcggcgggagtaagtactgtctaataattgtggatgattattctcgcttcacttaggtattcttnttgcaggaaaaatcacagacccaagaaacttttatgagattattaagacgagctcaaaatgagttcagatcgagaatc

SEQ ID NO: 7558 - DNA, 418 bp, Zea mays
gcttgacattgtctcagtgataggaagctcttgttattcttaatgctcaggcgtctcccattatagagcatgcttctagcaaacttaaattcttcattgtctatctcatgctcactaatcttaccagttagttgagctatgtgatcattttgttctttaagtaaagctaggcgatcatgaatagcatcaacattaatatctctacatctcatgcaaatagaaacatgatcaacagcggatgtagagggtttgcttaattttaattcatctatcttacaatatagcatggcattgtcatctctaagataatagatagaaacattgctaacatttaaatctttaaccctagaaattaattcgtcattctaaatcttaaagctagcaagtgattcttcaatttataatctagcattaaact

SEQ ID NO: 7559 - DNA, 401 bp, Zea mays
  unsure (1)..(401): unsure at all n locations
gatacaaccacagtttctacaatagtcacagttgtggggcaaccagataacccatcattggctgggaaaagtggcttcatcctatggttgccctgcttcccttaaagctctctaaatggcggctcttcaccacagatgtacgcaccatcaccaaaatgaatatgcacatcaaaatcataaccagagccacaagcattcttacccagaagtccagctgcatacgcttcctgccgagctttctcaaggatgagacgctcattcacgtattcacctctaatgtagatgtaagcagctgatgccctcattccaactncaacaataatgcattctttcagaagcttgtggaggtcatggcgcatgatttctctatctttgcaatctcaggctcactctcatcatca

SEQ ID NO: 7560 - DNA, 340 bp, Zea mays
atcgtgtagacagtgaaatgggtgtgtctttatgtcttgagcttctcatcttctccacaatgtttactaatgaggaaatctgatgatacgaatgtgtcaactttgctgagcatataatcttcagattgctttaccactctgcaacataagaaagcgtctcgctggtgatcgacagcaatacgagccataaaccgcatcaagatggtgattgacgtcgtactcctatgatacagattgtaacctgccattcttactcaatgacatgacatgctgcatggagctaatgctctcatgatacagtccatgaaccaaactgcttgcatcagagaaaatcctcatc

SEQ ID NO: 7561 - DNA, 363 bp, Zea mays
  unsure (1)..(363): unsure at all n locations
ggaaagactaccagttccgctccaagaagggttgcttccaatgccgaagcccggtcactttatagctaaatgtccattatcaagtgacagtggcagggatacgaccagaagggcaagaggagagaaaagaagaggtactacaagaagaggggcggcgatgcccatgtttgtccggagtgggactccgatgaaagctctagcgactcctcctccgacgaggacgccgncaacatcgccgtcaccaagggacttctcttccccaacgtctgccacaagtgcctgatggcaaaggacggcaaacggaagaaggtaaatctaactctncactaaatatgagtcttctaatgatgataatggtagtga

SEQ ID NO: 7562 - DNA, 399 bp, Zea mays
acatgtgctaagcggcgatgccacagcctttccatgctagtcttagcgattaagcatgcatctataccggcctcctcttttgcaaaatcaaccaaataaagtttgccgtgtagtacaccctctaaagctagtgaaccatcacatcttctaaagacagacacatctacatttgttaatagacaattatatcccatattacataattgactaacagatagtcaactatatccaagtctctcaactaaaaacacattagagatagaatgctcatttgatattgcaatcttgcctaaacctttcaccttgccttggttcccatcacccgatatgattgaatcgtgggaatccttattcttgacgtaagaggtgaacatcttgcttctccccgtcatatgggtt

SEQ ID NO: 7563 - DNA, 325 bp, Zea mays
  unsure (1)..(325): unsure at all n locations
atggacgtgaatagtgccttcctttacggaccaatcaaagaagaggtctatgttgagcaacctcccggctttgaagacagtgagtatcctaaccatgtttataagctctctaaagcgctttatgggctcaagcaagccccaagagcatggtatgatgcctaagagatttccttattgttatggcttcaaagttggcaaggccgatcctaccctctttactaaaactctngaaaatgactngtttgtatgccaaatntatgttgatgatattatatttgggtctactaacgagtccacatgtgaagagttagtaggatcatgacac

SEQ ID NO: 7564 - DNA, 339 bp, Zea mays
tgtcgccatgaaatcagtaaagcatatcccctaaatgtgatttggaatgggaccaatacacttttctggtcggacagatggttaaatgggaagatgatacaagagttcccctgaagttgtctgtatggtgggcagcaaatccatttcttcaataattgttgctcatgcactggataattggcaatgggttatcgacattgtgaatcccttatctttgattgggctgcagcaatacttgcagttatgggatgctttaagtggggttgtgcttacccatgaagaggatagacatgtgtgggtgtattctggctctatgcaattatcctcaaagtcttgcta

SEQ ID NO: 7565 - DNA, 425 bp, Zea mays
  unsure (1)..(425): unsure at all n locations
gcagcttctaagggagagcacattttatgacttaccaatggtcattttgagaaagacagggtttgtagcgcatgccaagcaagaaagcaagttggtgcccatcatccacacaagaacattatgacgaccgacaggccgcttgagctactccacatggatctatcggcccgattgcttacataagcatcggcgggagtaagtattgtcttggaatagtggatgattattctcgcttcacttgggtgttctttttgcaggaaaaatctcaaacccaagaaaccttaaagggattcttgagacgagctcanaatgagttcggcttaaggatcaagaaaataagaagcgacaacgggacggagttcaagaactcacaaatngaaggcttccttgaagaggaaggcatcaagcatgagttctcttctcct

SEQ ID NO: 7566 - DNA, 393 bp, Zea mays
cagcttctaagggagaacacgtgataggtttaactaatgtgcaattcgaataagatagaccttgtgcagcttgtcaagcacgcaaacaagtgggaagctctcatcacaccataaatgtgatgaccacatcaatgcctttggagatgcttcacatggacctcttcggacccgtcgcctatctaagtataggaggaagtaagtatgtgtctgttataggtgatgactcttcccgcttcacttgggtattctttttgcaggataaatctgaaacccaagggaccctcaagcgcttcctatggagagctcaaaacgagtttgagctcaaggtgaaaagataatgagcgataatgggtccgaattcaagaaccttcaagtggaagataccttgaggag

SEQ ID NO: 7567 - DNA, 134 bp, Zea mays
attgttatttggtttatatggataaacaatatcaacaaactagttcctaactcgatctggcttatttaacttgcgagccaccatataatatgctcccactattggttaaattgaaataataatatggtatctac

SEQ ID NO: 7568 - DNA, 420 bp, Zea mays
ctagctttgattgttacacataattatatggcgccctacatatcattcttcggctcaaagcatgttgttgcatcagaaggtattctctatttagtaattagagcagtgagctgaatctcaatacaactacgttagatcaatacctattttcatgtcgaatgatacatgcagatatgatgagtgcttgtgcggagtaattaagattggccttatcccaaggaagggtacgacagtcgaccaactgtagcatacaaaattttaatgcagatcagaactatatgcgagatttcaacccaaatcattttctagtcaaacatttggggagtcatagcaaggtgcttgttattatactttaaggtgacagaatcttttgttttaattgtacgaaaaaatttacttcagttgcataagtatacaagt

SEQ ID NO: 7569 - DNA, 328 bp, Zea mays
tctccgaccggatcttaatcacgagctgcacattcgagtaagggggtattaacaactatggtgatacggagtgcaaaaccaagacatttatattatcggattagatattaatcttatctatccatttatgttgacggcatatacttataagggataacttgtactttgatgttttttcgatgaagggttttgagaactaaataaggtaatgtttaatttggccggcatatcattatccattaatgataaacaaaggatgattgaacagatagattttattaagaattacaaactttgctaacttccaaggtgataagaaatatcttga

SEQ ID NO: 7570 - DNA, 226 bp, Zea mays
ctcggtgtagtgtctccgtctgagtcgattaatgaccgtgtcgatgtatgcttgatgaccgatgaccctttaactcgtcacatgcctcgtcatgggtaagccttgccttgggcagactaatgccagaataatataacactaaatgggcgtggagcggtggtgagagtatcctgtacccttcgtggcaagaagctggacggtggtgtatctgtgctctcggaatgct

SEQ ID NO: 7571 - DNA, 387 bp, Zea mays
  unsure (1)..(387): unsure at all n locations
ccttcagacccggatcttaagtcactgcgctgcagcttagtactttgttctgtgccatcttgttgggcggagtggcctttcaaaaaaataagttctcccattatttggatagttttattaagaattagaattcctgcagaggtagcacgggtaattgaaatattgaggcctctttgcatacaagatgtttcaaagttttgaggaaatatntacccagcagctgttacagtaggcttaatccctattgtttcatcttttatacttgctccattcttttgtattcatcgcggcttagttaaaaaatatattaattaacgacaaatattaaagaagagaggtgtattatcagtaaatcataaaagagggtggagaaagtgtatcttacta

SEQ ID NO: 7572 - DNA, 225 bp, Zea mays
  unsure (1)..(225): unsure at all n locations
gggaggagcgcatcacagcaagaatgtgatgaccacttcaagacccctggagttgctgcatatggatctcttcggacccgtcgcctatctgagcatangaggaagtaagtatggtctagttattggtgatgactcttcccgcttcacttgagtgttctttttgcaggataaatctgaaacccatgggaccctcaagcgcttcctcatgagagctcaaaatgagtt

SEQ ID NO: 7573 - DNA, 416 bp, Zea mays
  unsure (1)..(416): unsure at all n locations
agcttaacacttcagagacanaatatactgtggacttgcttttattttgtccttcaagcttctcctgtacaagtgctgcactcactgtagagtgcgaagctgccacatacaatagtagaggagcccctggcgtgggtggagttagcatcgttagtctatcaggtactgcttcagctcttcgaaggctttctgttgagctgatccccattgaaagacttcggccgacttcagcacttcgaagaatggtaaatttctctctgctgatctagatatgaatcgattcaaagatgccaatcttcctgtcagtcgttgagcccccttctttgtgcttggcggcttcatccgaagaatagcttcgattttggttggattagcttcgatcccttttggtgaactaaacaaccaagaatttccct

SEQ ID NO: 7574 - DNA, 310 bp, Zea mays
gaggagaaaaaaaagaactatatgaatgcatatggcgaggcacatcttggcaaggagtgggatttggattgctcttcgtccgactccgacaatgaaggactcgccgtcaccgccttcaacaagtcatccctcttccccaacgagcgtcacacatgccttatggcaagggcgaagaatgtatgtactcgaaactctacttatgcttcttcaagtgaggacgaatctagtgatgaggatgaaatagaatactctagcttgttcaagggaattgataaaaataaaaatgataaaatcaatgaattgattgatg

SEQ ID NO: 7575 - DNA, 410 bp, Zea mays
  unsure (1)..(410): unsure at all n locations
ggggggtatatatcaccaggatgagctcccaaagatcatatctcaacaaggtgtggggaataatgtgcatgaacctcccaaaggtgggagctcattaagtgtaggctatcaacaagtagggttaaagctaaacattgcttttagtaaagtnggtcaaaatttattagcagttactaaatgtaagtagataccaaaccagagtaataatagatcaaaattaataataaaaccacaatgcaatgcaaatgataaattgaatntaatttcataaactaatcatgcgagagtcctgagctgctcatgaccgcgagcacggctagtataccagttntacactctacagaggttgtaccctttacccacaagtcatgttacccatttgacactgggttgtacgagccccatacacc

SEQ ID NO: 7576 - DNA, 356 bp, Zea mays
acgatataacgttggaacgctcatgggtgaaattttgacttttaaacgtttaaacttttgttaaacgtagttttaaacaatatatgaaaaataccaatatatcataatttcagacaataatatgaagttaaataccaaaacagagaggttagtggcttaccaaaacttcacccatgagctggattgaaccataaaagtaactaatagacatgacccataaatagctaatggtctaaaatgcataaaacactgtgttttacagtttataacgccaaaacgctaaaacgtgatttcaacctctaattagagttttgacgtttaaacgtagttttaataacactgagagcttcgcctct

SEQ ID NO: 7577 - DNA, 397 bp, Zea mays
  unsure (1)..(397): unsure at all n locations
ggaccttaagtcactgggctgcagcttgttatagctatatgaacgcttatgtgttggntatcggactccggggggacactttgtgtgagagacatatgaatggacttctcacccgaccatgtctatattaattagaccccaataaatcgggatgtcgcttgaagtaaaattactgctgagaatagatcttctttggatctaggagggctgatctacaaatacaactaccaacgtaatgcgagaagctgagacaattttgtatagaacgaacatacacattttcttgatgtacatagctaattgatggaaataatatttacttaaaataacccccgtatatatatatataggatggaatcacaagtgttgctaaactgtttttgggtgcgcttgttgt

SEQ ID NO: 7578 - DNA, 297 bp, Zea mays
tgaaatcaagttggtgctcaccatccacacaataacatcatgacgactgacatgccactggaactcctacacatggatctattcggtccgattgctgacataagcatcgacgggagtaagtactgtctagtaatcgtggatgactattctcgcttcactcgggtgttctttttgcgggaaaaatctcatacccaagagaccttatagggattcttaagacgggctcaaaacgagttcggcttaatgatcaagataattataagcgacgatgggacggacgtcaagaactcacaaatc

SEQ ID NO: 7579 - DNA, 419 bp, Zea mays
  unsure (1)..(419): unsure at all n locations
acctgaagctgcaagcttagactttccttgaccatganatgtcttatgtgggtggcgtgcgctctaagtggctctctctcgcactaatgaggcactaatcacagaattatgatttcctaatgacctgattatgcaaaggggtcttgcccactcaatgcattgaataccaaatatttgggcaacaagacacttatggctttgttctcaagccatttgctgtgcctattttccaatgatgactttatgaagatttacttccagcttttatgatctgtgtcatctgtgcagattttttctaaaaatattgacaccaattttttggcgtgaccacatcaccccttttatatgagtagatatctacaaatgctggtactgcttgagaattgcatcacttggctactgataaacaaattatccct

SEQ ID NO: 7580 - DNA, 372 bp, Zea mays
ctctaagccctaaggaagctggttggactatcggtgctatattgtatattaagaccttgtgcagtgtgtcaagcacgttaacaggtgggagcaagtcatccaagcaagaatgtgatgacgacattgagaccattggagcttctacatatggatctcttcatgcccattgcttatcttaacattggtggaagtaagtatggtcttgtaattgttgatgactattcccgctgcacttggatattgtctttacaggataaatctgaaacctaagaaaccctctagcgcttgctaagacaagctcaaaatgagtttgagctataagttaagaagattaggagagataatggatctaagttcacgaatcttcaaatg

SEQ ID NO: 7581 - DNA, 271 bp, Zea mays
  unsure (1)..(271): unsure at all n locations
acacaagaacattatgacgatcggcatgccactggagttactccacatggatgtattctgcccgattgcctacataagcatcggcggggagtaagtattggcttgtattgtggatgattattctcaacttacttgggtattcttgttgcaggaaaaatcacaaacccaagataccttaaagggattcttgagacgggctcanaatgagttcgaattaaggatcaaaaagataagacgcgacaatgggacggagttcaagaattctcaaatc

SEQ ID NO: 7582 - DNA, 416 bp, Zea mays
cttatagcaagttactaactattattgattacaggtactaatgctatgaccatcagatcgtacatatggtcatgcataacaccgtgttgtattgtagaatgcattgtttataaagtggagtttgaaatgagagaaagatgattaagctgttggagatagcttaagggatgagctacgaaaacgtgaatagcaaatagcatgctatatggaaaacagcttttcaggccttcttacgttacatccaagcatacgacaatggaaccaaatgcgacttcaagtttgagtgttcatgggtgatgactagatttggcaatcaaaccaatagcatctgacatgcacacttgacatcaagcagggcaccatattcaagaactttgagtgaaatggatatatattattatttctttcgaattgat

SEQ ID NO: 7583 - DNA, 440 bp, Zea mays
agagaagagtaccaagtttgtgcaacacttctgactgccatgatgaaagattttgccataactgcactgttgcccccatatgaagatatggttgcctcgtagctcattatgaactgcttcgggtctgagtgcccatcatacatatgaagctagggtggcttgtatgatgggggctatggggtggcctgcaattctgctgctataggagaagcatcatcaaaagcaaaaaatttgccatgatggaaatcatcataccattcatcatcgttgtacgaattgtcttgacgaagctctctatgttgaggcctctggtcttggtcatcttgggtgagatgacgcatttcctcagcaacctcatcaatctcctctgagatcggcgagacgaaacatctttctttcttcttctggacctgtttgttgggacttgtttcaaatgtatg

SEQ ID NO: 7584 - DNA, 366 bp, Zea mays
cttgcttaacactatatccagaagatgattctcacatattggctcactggcttatcccgttgttctgccaaattcaacacttgcctactccatgttgcggcgtgccaacgaacgaaggttgcactcaacccctctcaagcggtacaaagacacacttgaataccacagagtattgctttgattactatatcccgcttgcgaggaatctccacaacttggagcctctcgcccttacaatttgatgttcacacaaaatcacaggagtgatgatgagatgaacaacgcactccagacacaaatacagagcacaacacgctcacaagtgacaacttcttctcacaacacaacccgaagagttctctactc

SEQ ID NO: 7585 - DNA, 415 bp, Zea mays
  unsure (1)..(415): unsure at all n locations
tctaagtcacctgcagcatcaagcttctcttatgcctgcccgatagctttggaatanttgcattatctttgcaaaagattgttaccgcgaattgaacagtactttgtatatttatccataccttgtaatatatttttaccttttcaaccatgtacgaattgctttgctatggacgatactgtatcttttgagccaaaggcgaaaaacaccttcccttcttttcgtacacaatgaagcatgtccttgcttaaatgtgtatgtttgaaacgaagcttcttcgtgttcatcgaagcactgtcgtcgaagccggagtatttctgttcgtgcttcatgttatgatgatgatggtcctacgaatgtctaaatgaatgtatgtatgaatgcaatgaatgatgtaatgtaatgtgcacatgaa

SEQ ID NO: 7586 - DNA, 386 bp, Zea mays
tgctaacgtacatagcgtatgggcctgtttgtttatgattctggcagattctggccaccaaaagctgttgcggactgccatacgctcagcatttcaaacatcttctataatatctggtgggcagaaaccatccaaaattaacatatacacataatcgcgtgagtcgtcgtaataggaggaatccgtcactttctatattctgaaccttatgaacaactttatctttcttcacacgttatcgtaataatactcagattctccccacatccatgatctccccgcagccagatttcagataagctggtctgaataaagctgaacctaacaggccctatgttatgcgatgtggcacggtaactatgacttgaggcgaaaacccttcttcg

SEQ ID NO: 7587 - DNA, 309 bp, Zea mays
tgattcagagttcctttgtttaccattcccaggtttatcttctccatctcttgacatagagtgtcgtcagaggtcttcaccgtaagacagtgacacgaaaccttactgctcattgcatctgccacaacattggctttgcttgggtgataatgatttccaattcatagtccctaataagctcaagccatcgcctttgtctcatattcaattctgactgagtgaagatatacttcaagcttttatgatctgcataaatgtgacagatatttcccagcagatagtgacgcccatattttatggcatgaacca

SEQ ID NO: 7588 - DNA, 245 bp, Zea mays
tatatttttcttatataagttacattatgtagagtctgacaaaattggtgtgaccaaatttggatgaattaaacagaagttatgcattttcaaagtttctgtccaatttaaaaacagatttaataaaggttttctggaaaaacagtgtacaccgatgtccctgtgttttaaactaaatcaacttgcgcaaacctacccccacgccactattcccctgtgtctctgacatttcacataaacccctg

SEQ ID NO: 7589 - DNA, 311 bp, Zea mays
tcctatcaattaagcaagtgtcgagttcagctctattataatcaacgtaagatagctgaccctctaacgctcccttaaatgctactgaatcatcacttcttctaaagacagtaacacctatatccataacaagacaattgtagcccattctgcataatggagaaactgaaagcaagcttttatctaaagaatctacatgatatacattgggaatagaatgggcaggagatataggcaatttaccaagtcctgttgacaaaccttgatttccatccccgaatgtgatagctctttgggaatcatggcttttc

SEQ ID NO: 7590 - DNA, 373 bp, Zea mays
ctgaccgtcgattcctcgaagctcgtatatggatcgcagtctattcgcgacgcaaagcgaagacgaacaagcaccacccaacaaacatatacatatacataagaacattacaccatacaaaggaaaacataatcaaaacatgcaatacgaaatagagccgttactacaatcacgcgaggaaaaagaaacgtgacggtcgaggctactggcgaaaaattatcgcgtccatactaagcgagtattaatcataacatttagtttgatctaattatattaatcaatatttattaaaataaaactagagctggtgcattaatttaattagctgaccacactaacgattcttaattaataagaattaaataacacagcg

SEQ ID NO: 7591 - DNA, 316 bp, Zea mays
acttattctgtgttctctccgccgccttacacaaacttgctgatgacgcgggcgacacacccgattttatcaattatggtgctgccccgacaggcggtcgaactgtgacctgtggctctgcagcgcgacacaccctgatgccctcgaccagtcacacgctgcccgtggcatttcttcctcccggcaatctgtgtggctaagcgcctgggggctggagcccgcatatgagaactgtacgacatggggggtctcgctcgtagaaccggcagacgacactcatgacatatcgtcttttttagggaaatcctgaaaaggg

SEQ ID NO: 7592 - DNA, 466 bp, Zea mays
  unsure (1)..(466): unsure at all n locations
agcttccgagaagatgaatataagaagccatgcgcacgtcgccattggcaacacaagttgaggcaggtcgcccttatgctatcttcacctatttccttccctatttcaaacttaccttagtgtcaaacggagttatctacagtttcatgtccttattttacaactccactggggacggtcttagtacatgagcccttggattttggtacaagagacagctaanaggttgtttggttccctctaaaataccaaacaaagtgattaaaatatattctagtttagtcacttttagtccctaaaatatcaaacagagtgactaaagtaagtcttctaaataggatntctagggactaaatttagtccataaaatttaggaaggtgactaaagagatcaaacatcacgtaagagactgcatgatataacattgcgtccctagatcattaatgcagttaagacacatatata

SEQ ID NO: 7593 - DNA, 309 bp, Zea mays
ttttattcttggtttaacaaagtctctatactttcctcgtactaacactagtgatacactaatgatgtctctgatttgatgtcaaagtaggataaaatagggtaacatcgtcccccaatttttaagatcacgccgccgtctaatattactccacctcgcctccgcataaacatcattcaaacactatagaaaatgtggccgctctctttaattcctcctcgttcatccaaccaaacacatcctatatcacatatattgatctcatatgtacaagtgtagtgcgccggacagaagacgacagatcatacc

SEQ ID NO: 7594 - DNA, 392 bp, Zea mays
  unsure (1)..(392): unsure at all n locations
ggatggctctgctagccggtctactgtggcagaggggttgagcgggcgcnggctctctgcgcacgggcaaacggcgacgagctaactccngtgaagtgtggatggtgtgcggaagggtgtagcgaagcctgggagggatttataagctcgggcgcgggccactgcgcggtgcatgcgaaggcgcgcgcgagcgtgctctggcgcgggcagaaggcgtcgaacacgtggcagtgagtttcttccaatgttcaaacgcttccagagatcgcaaacgtgcgaatctcgccatgaatctggcgcagacctcctcctggcacctatggctatctcacatgtgtgagttccaagggatgatacgccctagatagggagatagacgggcgccaaatctg

SEQ ID NO: 7595 - DNA, 276 bp, Zea mays
cccttctgtccactccatttaagttaattgtaccctttattctaaaatatgcttaaggataaggaaaataaaaaatgcaacttaattaatgaaccagagagtacttctatttttgataggttacttattcaatatagttcactggaaaaatatatcataccttggtttagtacaaattaagtaggatatcttttattttaataaaacaaggataacttataataaccctacataaatgacccctatgtaaaaacacccccacccttgggataacta

SEQ ID NO: 7596 - DNA, 445 bp, Zea mays
  unsure (1)..(445): unsure at all n locations
acgtgtcagtggtgcatctctatttatatcaaggtttacaagttatgaaaaaatgcttnccccaaatgaaattgcacaataatgagaatggtccgtccgtcctcattccgcaaccttgtaggaggcgtttttctgtctaatggtcagaggcagttattggtcaagcacctaaagagatgaataaaggacttaattccttgattattcttgttgcttgggagatttggaaacacgggaacgcttgtgtgtttaagggaacccatccgtgtgttgctgaagtgtgccgggcagtggagcaggaggacaacttgtggtgcctagccagcaattcagctcttggcctgtttcgcacccggttggtggggttgcgagcctgaccaggttccttctgcttgggtcattntcttttgtgtgtgtggcacagttgtgtcggtattttttgggt

SEQ ID NO: 7597 - DNA, 470 bp, Zea mays
  unsure (1)..(470): unsure at all n locations
aatggtatagaattcatggaaatatatatactataggttattagatgatctatctccgattattttaatggtactttcttttagaaagaaaggagaaaactaanagaatatcactagtcgtaatgaaaataggtttctactagccaaaataaatgtgtcaatgagtatagcacttaaattcttaaaattagtaaaacacatgtttatgtcaaaataaccatgattatgttataaaaagccaattagtaatttatattgattcttagaatattaatgttagtagaatcatgaataaaccatttttagctatacacataagttttgtttagaaataaaaggaataaaatctattagtctattattagtaataaagaaaataattagcctttattttataaacaatgtgatacatattatactagataaaattgagattatagccacctactcgtaatttcatcaataatgac

SEQ ID NO: 7598 - DNA, 413 bp, Zea mays
  unsure (1)..(413): unsure at all n locations
gcagatgaagagggaactctacaccgctttgcttatccgtcggaaaagaagtctcctccaacaaactccgcaaatgtcagagaagcgcaacctccagctctccggagaaagatcgtctccggatagtcaggggccgagggcccgctgacccggagaactccacttctacttccccgacaaaagaatggacacagatcgcgaggaagaatgagaccaaggggaagcaagtngttctttccgttcctccgccctcaaaggagaacggaatgaaagtcaccacgacagaggcaccattctatcccgacgtcctcttcatcgggagagtggagtcgcctaccgtatctgacgacgagccgaccgcactctgagaagaaccacctcaacgagaatcccgccgactgataaaccggcgc

SEQ ID NO: 7599 - DNA, 407 bp, Zea mays
  unsure (1)..(407): unsure at all n locations
ctgaactggagatcgactcctatttgtatcgantccttatgacatatatcgctctaaaaaataccatattataataaaagcgggtaaatttctaaccgacggataatcgttttcgtgtatgccggtgcccgacctcatccgtcatggataacacacgatgtaattgtgttccttgtctttcgggaggcgcaacgcaagacgcatgctctcacgattcggacgcatataagctagagtaatatatgtgaattcatctcatccatggtattgtactagttagtgtccttttcctgcgatcgacgtgtagctaggaagatgcatcatgggtcgtggccgtcaatggatgcacgctccggggacggtccacttggcctggtgcttggcacatgcggatggcggtgtagtct

SEQ ID NO: 7600 - DNA, 318 bp, Zea mays
cttaggcaaactcatagcttcggcctgatacgcgttgaatatttcttgactagaatctctacccatactccggttggagaagcattcgtcaaatcacttcttactgacatggtcacgatattgtatatttctctggaagagatctgatacacctgcgagcgatatgcacattctgtacattaaaacccaaccacttgagctcatttactatctgatttaatccggtagacatgtcgaacacattttgatctttcctcatgagacattgcttaaatgtttccctaaatacatacaacgttgcactcttcacaattgaag

SEQ ID NO: 7601 - DNA, 426 bp, Zea mays
gacactgtgcttaatcaactcagacggagacactacaccgtagactctctttctcgtgcaagtgacactcccggtctcagctttatcatttcaaacccaatatttggttcctggcagaggtacatctcttccgatgttgaacccatcatggccatgatggattcaccatcaagttctatttaggaaaacatccctcccactttgaagcgttatcttttgagaaaacaaaacattgtgttctctagagccaagctcagcatacgagagacctctttgtgaatcatggattaacgagaagtaatctatacaatgatggtattgcacgatttgtgttatcacacaactcctatcagctaatgcattcaacatgttgagaaaatatttataagtaacaacgacgcggtaaatgcaccggggcttgcctcg

SEQ ID NO: 7602 - DNA, 385 bp, Zea mays
  unsure (1)..(385): unsure at all n locations
ttgaagcccgggacatacaagctggccaacgatcaaggcgaggtctacagctacgcttggaacatcgaactttaccgtgctnttacccttaaaatagttgaagatgttcatgtatctcggccctttacatgtataaataaaaagtctaacccgcaaaggaggatcggctttgcctcaacaaaaaacgaccctccctcgggggctagaaagggggaaccccctctgcgtcaaaattttctcggaaaagttttgtaccaaaatgactttcgtgcctttcgactatgtcgataacagaatcctaaagatgagcgagagaaaccttgacggcaaggccgaccaaccgatggactcctacgcctccgggatacggatacctcactcatca

SEQ ID NO: 7603 - DNA, 384 bp, Zea mays
tgtcgtcatgacaacactattctaccccgacgtcctcttcatcggtggagagtggaatcatcccccatctccgaagacgaactgaccgcgcctggagaagaacctcctcatcgagaagctctccgactaatgaaccgacgtcgtaatgtccggcgacatcatgaagccggagaatgggatctggcgcagcctctatcatgagacgagatctcggaggtgggagaaactccagatgaatgagtcttcacggagaggaggaattcccgccgacgtgatcgtcggcaagctcaagatcaggccgagcatgatgcgagacaatgtcgagagaaccctcttttctgacaaaacctgataccccgagttctgccgatccatgaacacact

SEQ ID NO: 7604 - DNA, 288 bp, Zea mays
tacgtggtctcatgcgccgctgagtacaacaagctcccgcaaagctgccgcttggacacggtccatagcagatgcactgtgctgtccatcgttaagcaaggggccttatggttgtcgtcaacgtagacactctcgggttgttctggacaccgtatctgacgacgacgccatcacgccgtatagctcattggccacctgaagcccaacctggcacgtaagtcgctactgaccggaacaaaattcttgtgcttgtaacatggacaatgctgacgctgtgtgagtgtcctc

SEQ ID NO: 7605 - DNA, 327 bp, Zea mays
tgacgatctctgtggttggcatgctatgcatgcatgcttgcaggtgggtgctgggcgttctcggcggtggcggccatcgaggggatcaacgcgatcgcgaccggttacctggtgtcgctgtcggagcatgagatcatcgactgcgacgcccttgacagcggctgcgaccgcgggcatatggagaacgcgttccggttcgtcttcggcaactgcgggatcgacaccgatgccgactaccccttcatctgatccgactgcacttgtgacgccagcaatgtcggtatgggtgctggcgtgctgctgctttcgcttcgtcgatcgatggat

SEQ ID NO: 7606 - DNA, 450 bp, Zea mays
  unsure (1)..(450): unsure at all n locations
ttttcgtaatatcgaatgctatcacctatgatattttgatagacaaacagtttccacaaaaaaataatgtagcttatttcatggaaacatgtgtggggtatgtaataggatactcccactcatgatcattgngcatatgtccaggatatttgccaaaaataactaaatgtgagatgtcattaatatcgaaggctaacacctatggatttctagccgataaatggtatccaccanaaaccaaataaagtggtttatgtcaatgaaacatgtgtgtggtatgtagtaggataatctcactcacggtcaatgggcatatggctaggatttttggtcgagaacgaccaaagcataagtgtcattaatatcgaaggctaacacctatgggattttttattgtanaataggtctcaccataaatgaaataatgtggtttatgtcaagtaaacatgt

SEQ ID NO: 7607 - DNA, 438 bp, Zea mays
  unsure (1)..(438): unsure at all n locations
atttgagaaagacaagatttgtagcgcatgccaagcatgaaagcaagttggtgcacatcatccacacaagaacatcatgacgaccgacaggcctcttgagctactccacatggatctattcggcccgatagcttacataagcatcggcaggagtaagtattgtcttgtaattatggatgattattctcgcttcacttgggtattctttntgcaggaaaaatctcaaacccaagagaccttaaaaggattcttgagacggactcaaaatgagttcggcttaaggatcaagaaatatagaagcgacaatgggacggagttcaagaactcacaaatngaaggcttccttgaggatgagggcatcaagcatgagttctcttctccctacacgccacaacaaaatggtgtagtggagaggatgaatcgaactcaattggacat

SEQ ID NO: 7608 - DNA, 343 bp, Zea mays
ctggaaaagtactcgggtttatcgtcagccaccggagaattgaagctcatccacaacagattgaagctatcatgaagaggaagccctccatccaaaaatgttcagcgacttactggatgttggcagctctaagcagaattatatccaagctgggagaaaaaggtttgccattttacaagctactcacgacagtggataagtttcaatggacttcaaacgcacaggaagctctatatgcactgaaaaaattcttaacaacaccaccagtactgaagccaccccggcgagctacgtcaactcaaccggctgaagatctgctactggatatctcttgcatgactca

SEQ ID NO: 7609 - DNA, 244 bp, Zea mays
attcgattaacggggagctttgtttattcaaacgaaaagcatttgaaacaaggggagaaaatttcaaatcgtgaaaatgcttctcataatcttattcatttacctttgactatttgcaaaaggactttgaaaagaaattacaaaagaatctgcaaaaacaaaatatgtggtgcaagcgtggtccaaaatggtaaaaataaagaaatcaatccatgcgcatcttatgagaatttattgattcaaa

SEQ ID NO: 7610 - DNA, 288 bp, Zea mays
tcacgcgtaaagtggattacagtatcttaaaaggttgattttacttgatcaagttgtttgctcaaaccctccaattttttgttctgattaaaaatttgtatgacttggtttttgttctgaaggtgatcttcatacaagatttgcttcggcagccttgagctttgagatcttttccttctaataagtgttcaagtatcttcacctttttccagatcgttgacaataagctcattcttcttatcttcgctctcttgctgcaactttaatgccttgcttaatatgaagctc

SEQ ID NO: 7611 - DNA, 378 bp, Zea mays
  unsure (1)..(378): unsure at all n locations
agcttctaaagggagaacacattttatgatctaaccaatgttcatttgagaaagacaggatttgtagcgcatgccaagcacggaagcaagttggtgcccatcatccacacaagaacatcatgacgaccgacaggccgcttgagctactccacatggatctatcggcccgattgcttacataagcatcggcgggagtaagtactgtctagttattgtggatgattattctcgcttcacttgggtattctttttgcaagaaaaatctcanacccaagagaccttatagggattcttgagacgggctcaaaatgagttcggcttaaggatcaagaaaataagaagcgacaacgggacggagttcaagaactctcaaatcga

SEQ ID NO: 7612 - DNA, 461 bp, Zea mays
  unsure (1)..(461): unsure at all n locations
atgaagattcttcattccaacatgtgctagtctgtgatgccatagccagtccatgttagtcttagcaattaagcaagtgtcgagttcaactttatcaaaatctactaagtatagctgaccctctaacactcccttaaatgctattgaatcatcacttcttctaaatacagtaacacctacatctgtgaaaagacagttgtagcccattttgcataattgagatacagaaagcaaattgtaatctaaagaatctacaagaaaaacattggaaatggaatggtcaggtgatatagcaattttacccaatcctttgaccaaaccttggtttccatacacgaatgtgataactcgttggggagcttgggagtngaagtgttggatttgggccacttcgtcctcgtcataatcttcattccctacgaatggtacctgtacaccatactcaacaacatcccatatac

SEQ ID NO: 7613 - DNA, 328 bp, Zea mays
  unsure (1)..(328): unsure at all n locations
agcttgtgcaaagcccgctataactgatcttctgagaaacccgacctcgctgcaacatgacacccgaaggtccaacacaacaagcaataagtgaattcagaattattgcagagcatatcagcacaagggacctggttcaagagtttntagcatcaaagtttttcctagtttgagaaagtgggaaatgccgaagctacagggggaaaagaaagaaggtgaacttgtacgtttaccctactatttcaaatttgaaaagtactttaaagcaccctgccaggagtggctagattcaattgaggtaatgtgcaatgaaatacttgggaattat

SEQ ID NO: 7614 - DNA, 471 bp, Zea mays
acggaccttatatactaagcttctgttgctgttgaaaatatgatatgtgaactgggttcctcggtcggacactatcttgttcataacaccatgtcttcatacaatctatgacatgtataactctgccaacacaacactattatagctggtcttgactgctatgaaacaagccacctttgtcaaggggtccactactacccatatggagtcataactggctcgagtgcgaggcataccgactataaagtccatcccaatctcatcccacttccattaaggaatctaaaatggctgcaacaaacctgcgggctgtggcggaactgcccgaattattccgacttatgtgcctaatccacgccttacaggctagaccacacttaaaagtggaatatcccgtcaatccctctgatctattacgaacatgccaatgacatgatcatgtaccacaatctcactcaatggtgaatcaca

SEQ ID NO: 7615 - DNA, 269 bp, Zea mays
  unsure (1)..(269): unsure at all n locations
agcttcaacaacttaatcctgtggagaatatatattntccttgtggcaaacaacgaaactattacatgaaatttaaaaaatgtcctttattacacagaaaataaaactgaatggagaagactactatcaaggtaggatatttgtcaatagatggcttcgactctggcacagtgctattgactgtgcgagcttcggactgttctctgaagtccctttggtgttgagcatattggcccccttctgtctgctggccttgttgcaacggtggt

SEQ ID NO: 7616 - DNA, 271 bp, Zea mays
cacctttcctgagctcgttgtcgagaaacgattcagtttcccagcgcatatcggtcccaccttacagagttactgtttggtctctgcggtccaccgtacatcgagtgcaagcggctgtccgcctggtgtaaaaatcctggcgcttcgccttcttacctgcagtactatataaacagacgagtaggtgtgaagttaccacagcattcattgctattttgcactgtttgctgccaaaatttttaaccatagccatagcttgactctctgaatc

SEQ ID NO: 7617 - DNA, 384 bp, Zea mays
taattccgatagcagacttacttgcatcattataggggtcttcagcattatagcaggttcagatgatatgcaagaattgaatgcagtgtggtaaaaaaacattcactctctctgcagttgtttatagttatacagtaacttcccaacagtaaattaggcggttgctaggtaaacaccaaaaaatgtgttgtgtctggtttagctgaatatttacattgggtaccacaaaaacatcaatagaggtctgttatatagagtggatagcgtatttacaatatggtaagaactaaaaacaactaaatgaacgatttcttcttgccctaaaaagactactttcctcatgcgcaaaacagtccaacaaaaacatttaactgatatccatca

SEQ ID NO: 7618 - DNA, 340 bp, Zea mays
ttaaggaaatgcttaatatatttataacatgctttcataagtgcatatactgtcttgagcatcacacttatactatgacacaatgcacttcacattctgtgtgatataaatatgttctcggtaacctaattatgtgaaattggcatttaaggccataatatgtgttcctctccatgcacatatttaaggggagcaatctatgttattataaacattgatcatgcttaatttgatatatccttttgatcatacctcttttatgtctatgactaatgtgctatcaagtgaatttcaaaaccaaatcatatgtgtattgaataggaattggagtcttcggcga

SEQ ID NO: 7619 - DNA, 290 bp, Zea mays
ctttgcgctaatctggacggcggagaagtgctctgaccctgtagaaacgttgtcgactgcgcggtccctagtccttgaccctgtatcgtgtggctggctccgccgagttaatccgatctctgtagcgtcgtggccggctgaatggcctaatcgtcgaggtggccttgatgtttgtgtcctactgacagttctttgactttgtagagagctgaggatagtcgacgtcatgggcgcatgccggtgatcatcattacctgttactggagttatttgatgtgacaccggtcctg

SEQ ID NO: 7620 - DNA, 146 bp, Zea mays
gatcctacactctttactaaaactcttgaaaatgacttcgttgtatgccaaatttatgttgatgatattatatgtgggtctacttacgagactacatgggaagagttaattggatcatgacacacaaattcgagatgtcgatgatg

SEQ ID NO: 7621 - DNA, 258 bp, Zea mays
tttttgagatgacttttacggtatactgaaatcgctgtcagaaccttccccggtgaccacatcataggactgatctcctctcactagtatcctctgaacatcgcggaaccttccggaatgtgtgcgcatgcagaataggacgatgcaggctcctagctgcccgggagggtatatggcgcaccatgtgggagcctcactgttctccttcagctgtgtcgctgcgcttgtgtggaagcatgagtaagagtctgttttgtg

SEQ ID NO: 7622 - DNA, 314 bp, Zea mays
gacatgacttccagcgggtccgctcttatgaagcacctggctcccataccaattgtaagtcgcccagaggggggtgaatagggcgaatactgaaattacaaagtaatcacaactcccaccgcggttatcgttagacacatagacgagctcgggagagagggtgacaaacagatcgcacgcacataagatgtgtgacacgcggatttgttctaccgatgttcggttctcgcaaacctacgtcccattgaggtggtcacaaagaccgagtctctttcaacccttttcctatctcaaacggtccctcggaccgagtg

SEQ ID NO: 7623 - DNA, 312 bp, Zea mays
tgtcacttaggcctcggacctcatctaatgagccttcaatagaccgaattacacagtctttctcttctatggcaccttactgttcttcagctatgatttctaagtcttgaatggtgaaatcctttcttttcagaaccagcttgtaaatttcaactacttcttcacaatctttgatgatagacttattcttctttcctcaagatactgtgcattttagcactgtgcttaataaatactctgccaaacaaccttcgtaaaaacgacttaaagtataatattaaataatgatatagttttaccttaaataacata

SEQ ID NO: 7624 - DNA, 207 bp, Zea mays
ctaattttgttttggcaaagctcccatggttcaagatagtgaaagctacattttataccctgcaaactatctcgaacacaaaattaggaagaattatgccagataacctcagattcatgctacaaaaccatacaatggtgtcaccatgcatttatgtataaatatgaagcttctagctctaagcataccactcatgttaaaatgtct

SEQ ID NO: 7625 - DNA, 183 bp, Zea mays
tgctacaagtgttggtagcccgggcactttattgcaaaatgtcccatgtctaatgacactgacacgggcgacgacaagtaaggaagataaatggagaagaagaactattacaagaagaacggcggcgatgcccatgtttgtcgggagtgggactccaacaaaagctcatgcgactcctccgac

SEQ ID NO: 7626 - DNA, 356 bp, Zea mays
  unsure (1)..(356): unsure at all n locations
cgggaaaatcttcacagctgtcaagaaaatgctccttgatgaaaagaagggcagattgaccgatntgctaccaaaagcattattggcactaaacacgactgatgcanggcgaccgggttcactcccttccgccttctatacggatcggaggccatgaccccgcaagaaataaagcatgggtccccgcgaacagtcccgtcagccgtccccgacgtggacgagccaacttcaaaagatctcatcgacggagaccgggtcttcgccctacaggccctatacaaataccaagcccagaccatagcatggcgcgaccacgcagtcatcccgatggagttcatcgagggggaccttctact

SEQ ID NO: 7627 - DNA, 447 bp, Zea mays
  unsure (1)..(447): unsure at all n locations
catgcaagcttgtaaacatgccacttcattctttattaggccatcaagaaatgggaatccctcctcttcatntactgatagaagattacggcacgcatagaagacagccgagtggaaccctgaaaggttgtctatgaacacaaaatgtccaccctgcagcacatgcaactgaagtttagtcctgaaccagtattgtaaaattcgtgactatgtaacactgccagcatgaaagttttacctgcggcaccctgattatntcacaaggaactttcatgtccttccgtgcttgctgagcgccttggtagttcatccaatcttgctgcccatatatgaaagtagtcggcactttccaatcggacgcgctgttgcatagtagaggacagtatagaatcactatacatcacagagacctcattgactccaaatgatatgatgctttcattgaca

SEQ ID NO: 7628 - DNA, 269 bp, Zea mays
ctgatcttgcatgtggattacatatcattgattgggaatgacattcgtatgctggagtcccttaatgcttcactgaagaagagtttgtctatgaaggactcatgggaagcaccatatatattgggcatgaggatctatacagatatgtcgaagatgcttatatgattaattcaagatacgtacattgacattgtttttaaacggttcatcttggaacagtccaagaaacggttcttacctatgtcacatggtatacaccttatccaaat

SEQ ID NO: 7629 - DNA, 309 bp, Zea mays
  unsure (1)..(309): unsure at all n locations
tgaagacttcaggcgtgtttaaattttttgcttgggcgaccattcactagcactttggaagatgatgttaccaagatcttgnctctctatttttgactgagacctagctagagcttttaaaacatcccggagatagttaaaggaatcaaaggcttttgaaatgtccaatagataccattttttttcttgtggaggaggctatgaataacattttgttcatatagaaaattatcacattatgcgacaagcaagggaaaataacttatatatagttaatagtggaaggagtgtctgatataaaaagcttca

SEQ ID NO: 7630 - DNA, 279 bp, Zea mays
gagatggatcttatcatctagagattgcggcttattctctagcaaatgtaagggaatgactacaaaccccgcgccaaaagggtttgctatatgtgtggtaagtccggtcattttattgataaatgtccatatacaagcgatagtgacagggacgacgacaagaaatggaagaagaagatggagaagaagagatacttcaacaagaatggtggtgatgcacacctagggtgggaatgggacttcgataatagctccaccgactcctcctccgacgatgat

SEQ ID NO: 7631 - DNA, 315 bp, Zea mays
atctatatacagttctgtatgattgaagcttcctctcaaggtgtctctgtcaaaaatattcctcgcggagaaaatgaatacgctgatctattggctaaatcagcagcccacgggctgcctataccttcggaagtattttttgaaacaataaagcaccttcagtcgagctccttgaaagagcaatccttaacatatgccctgtttatagtgaagattgaagaactgagatcatctctttccttcagggtaattttctttcagacgacgaagcttataacaggagaatagaagtaagagctcgaccatatgtcataa

SEQ ID NO: 7632 - DNA, 342 bp, Zea mays
  unsure (1)..(342): unsure at all n locations
tctgtgagctttaattcgttaatattatatcattctatacatgtgaagcatgctaagttggcaagatgaccaatgcgcccttcacgggtttacctaaaagacattggatntggtgcaattcatgcatgctaatgtgtgtatacggagtacaatagctatgggagaattccaatacttcataatcttcactgacgattttagtagatatggttatgtctacttaatgaaacacaagtctgaatctttcaaaagtgtaagagattagaatgaagtagaaaatcacctgaaataaagtaaacattgaatctgacatggaggtaatatttgaccatgagtagcaat

SEQ ID NO: 7633 - DNA, 416 bp, Zea mays
tcaatggaccaatcaaggaagaggtctatgttgagcaacctcccggctttgaagacagtgagtatcctaaccatgtctataggctctctaaggcgctttatgggctcaagcaagccccaaagcatggtatgaatgccttagagatttccttattgcaaatggcttcaaagtcggcaaggccgatcctactttattcactaaaactcttgacaatgatttgttcgtatgccaaatttatgttgatgatattatatttgggtctactaacgaatctacatgtgaagagtttagtaggatcatgacaaagaaattcgagatgtctatgatgggggagttgaagattttctatgattcaagtcaagcaactcatgagggcccttcatagccaaacaatacactcagacatctaacaattt

SEQ ID NO: 7634 - DNA, 228 bp, Zea mays
tttgtttctttttttccttgtaattcgtgtccatctttccatggatgatgtgggcaacgggttcctccgggtgaacaaattctctgctcctggcttgcatgaggtggtcttcacctatagcactggatgttgcgctatttcctgcttcgttcctaccttctcagagattttcgaagaatgctttctctccggcgaatccgctatacgatgtagagtcccttcttcgtc

SEQ ID NO: 7635 - DNA, 391 bp, Zea mays
  unsure (1)..(391): unsure at all n locations
tggtccgcaattgactttcaattggtatctttttgagactacatttagtatcatttacatgtcttctccaatatttgattagactatatttcatatcttatacttctcatgttgctataaatgcatatattgtgactcatattttgttacctttgcacattctagtttgattaattgcataggttttgctctagggatttatttgtggcctagtttattgaaagttttagaagtcctaattcaccctcccccctcttatgcgtcacccgtttcctttaggagttgagcccaggaagctngaaagtggcttgccgaagcgacagaagtcgtangcttgtgattacctacgtactctgggatgtanggagaatagaaagaagcagtatgtatg

SEQ ID NO: 7636 - DNA, 418 bp, Zea mays
gcacttactaccttgggcaagatgatggaaaaccctatacctctcttgaaccctatcttccaaaaccatgggtgagagggggagagaataagcaattgtgcaaaccatgagttaatctttaaccaaactttaagtaactttgtaaccagcaattgtgggaaggaaatgttgcaaaaagacccctggagaaaccccaaatccattccttaagtggagagagaactagagctctctaattctctctaagtcaaaaactacacctacactaaagatcaaccgtgttcaccttgaagatggcaccaaaaccacctatgttctataccaaaaatgtggcataccacctatggcacccactggaaaaagttgatcccgataccttgacgtttgacatgccttggcatggtttttgtcgcgaggt

SEQ ID NO: 7637 - DNA, 319 bp, Zea mays
ttactgagtcatcaggagcgcctatatactctagatacagtacatttctttggtcctcaaacttgctctgtaagctgatttttcaaccttaaacacaatagagatccgcaacattgaactattaaactagataaccaatgagagattctgatttttgagacccacaactgacatgtatttcaagatttgacacccatatcacaatctgtgagtcattgacatgtaacctataaatcagcgcttgagttcatcgcttcttgttcatgtacagaggctcgctcagtgctatcaataatatgaccctttgcttcatggatgc

SEQ ID NO: 7638 - DNA, 412 bp, Zea mays
  unsure (1)..(412): unsure at all n locations
cttgtcaagcatggaaacatgtgggatgagcgcatctcatcatgaatgtgatgaccacttctagacccctataactgctgcatatggacctcttcggacccgtcgcctatctatacatatggggaagtaagtatggtctagttattgttgatgaactttcccgcttcacttgggtgttctttttgcaagataagtctgaaacacaagggaccctcatgcgcttcctcaagagggctcaaaatgagtntgagctcatagtgaagaagataaggagcgacaacgggtccgaattctataaccttcaattggatgagttccttgaagaagaatggatcaagcacgagttctccgctccctacacaccacagcataatggtgtggtatagaggtataacaggacgctcattgacat

SEQ ID NO: 7639 - DNA, 327 bp, Zea mays
ctatgttgtgcaacctctccgcttttataatagtgagtacccttatcatgcgtataaactctctaaggcgctttatgggctcatgcaagccccaagagcatggtatgaatgcctaagagattctcttatcactaatggcttcaaagttggaaaggacgatcctactttatttactaaaactcttaacaatgataatgttgtatgccaaatttatgttgatgatattatatttgggtctactaacgaatctacatgtgaagaatttagtaggatcatgacacataaattctagatgtctatgatgggggagttgaagtacttattggg

SEQ ID NO: 7640 - DNA, 297 bp, Zea mays
  unsure (1)..(297): unsure at all n locations
gaacgcacatatggcataattttcacagctgtcaagaagatgctcctcgacgaaaaaaagggcaagtgggccgatttgttacctgaagcggtctgggcgctaaacacgactgagtgcaggcgactgggttcacccattttcgccttctatatggatcggaggccatgaccncgtaagaaataaaacatgggttcccacggacagtctcggcagctgtccccgacgtggacgaacccacttcgaaagaactcatcgatggagatcgcgtcttcngcctacaggctctaaatatatacc

SEQ ID NO: 7641 - DNA, 468 bp, Zea mays
  unsure (1)..(468): unsure at all n locations
ctcaagcctcgggaactatgctcgtatccaatctgcctgagccagaactataatatcttgccatgtgcccccgctcctgtcaaccacgaccagcacccaacattagacttcccttattatctagcccagaccagagccatgatatntcttatggtagcactgttttcccgggtgatcactccatgttccaacttaatatgcaattattcttgtttaaccatcgggtttacatcaataaagtaaacttaccattttggaacacttaatatcactaaacaggagtgacttcataaacttaaagttgtagcaatagcatagctacttgattagatcataatcccaggttaaacaaggagtgacggtggaaagggtatgggtatctaaatatgtaacccatcaaatnatgcatatatatatcgaacggtaaactctattaaatgtattgggtgggatcaaacagagtgtgca

SEQ ID NO: 7642 - DNA, 339 bp, Zea mays
  unsure (1)..(339): unsure at all n locations
caagttattntgagaaagacaggattngttgcgcctgccataccgggaagcatagttgtacccatcatccacacaaaaacatcatgacgaccgacaggccactggagctcctacacatggacctatcggcccgattgcttacataaacatcggcgggagtaagtactgtctatttattgtggatgattattctcgcttcacttgggtgttctttttgcaagaaaaatctcatacccaagataccttatagggattcttgagacgggctcaaaatgagttcggcttaagaatcaagaaaattataagcgacaatgggacggagttcaagaactctcaaat

SEQ ID NO: 7643 - DNA, 393 bp, Zea mays
acccatgctagtcttagcagataaacatgcgtcttaatcggtctcctcttttgcataatcaactaaataaagtttgccgcctaacgcacccttataagctattgaaccatcacttcttcttaagaccgacacatgtacatttgtgaataaacagatttatgccatattacaaaggtgactcatagacaacaagttgtatgcaagcgactcaactaataacacacttgaatcaaagtgctcgggtgaaataacaaattttcctaacccttttaccttgacttggttccatcaccgaatatgattgaatcctgtggattcttgtacttgcgtatgaagagacatcctactttctccgtcatgtggtttctgcatttgctgttataatccatcttg

SEQ ID NO: 7644 - DNA, 185 bp, Zea mays
ggtgtattgaatggaggtggttggggttgtatttataaccaccaaccacttcctaggccgtgcttcaaatcttgcaaccgcggatggtccgcgccttgtccggacggtccgccccctgcatatcaacggctgataacgccacggtcagcagtaacggctatatcaacagctattttgcatttaat

SEQ ID NO: 7645 - DNA, 276 bp, Zea mays
tgacacactttgttcgaacaatgtatgtcgctgattctgctctgccttatccatttgtgcactaatcacacactgtacaatgacgctctcataatgctctgcatcatctgcaccaatctgctcctcgggtgggtccttattgcctgcatcatcatccgcaagcaaagcaagtgtagcttcattcaaatcactagcagaagaatacccaccatcgtgttttaccaccaaacacactgattatgacaattacgctggacgtgtcctagcccttgcatc

SEQ ID NO: 7646 - DNA, 204 bp, Zea mays
atcatatattgtctaacatctcgcgcagaccgctagctatttgagcgaactatcttgccgggaacaaaccggtatactcgacggcgacgagcatccacaactgaacgcgtggacccaccgactccggccagctccgacggtgttacggacaccgatgggatcccgctgacctccgacttacccttagacactttatcggaacag

SEQ ID NO: 7647 - DNA, 303 bp, Zea mays
  unsure (1)..(303): unsure at all n locations
cccataaccttgtctgctgtgcataatgtgttccatgtgtcacaattgaataagtgtcttcgggttcccgatcgaaccattgaagtaacggatgttgtccttgaaccggacttgacatactctgagcaccctattcgagtcttggatcaaaaggacagggttacccggagaataactctcaagttttataagatacagtggaaccagcattctgaagatgaggctacatgggaaactcaagattntctagaaaagaaattcccaggcctgttatcctcatgtaaattgtaaagcctgtataac

SEQ ID NO: 7648 - DNA, 134 bp, Zea mays
catcaaccaaagcctatgctgtctctgtgaagacataacctaacaaacaggatagttgggatcctagctatctgatgaacaagagcaaaactgtgtaaaatccctggttaacaacaagacgtgtttgcttggac

SEQ ID NO: 7649 - DNA, 228 bp, Zea mays
  unsure (1)..(228): unsure at all n locations
atataccaattgaatcaagcctagctatgggtgcataaatttcatcaaagtccaaaccctctactagtgaataacctttggccacaagtcgggctttgtttcttgtcaccgtaacatgctcatcttgttgttgcggaatacccatctggtacctacaacatttngattaagatgtggaactatatgtcacaccttattccttgtgaagttgttgagctcctcttgcat

SEQ ID NO: 7650 - DNA, 431 bp, Zea mays
  unsure (1)..(431): unsure at all n locations
gcatctatgactgaatttatgctggcaatgagacaatattccatagacaaagagttcgagttaggtattgaggcaagtacaatgataaaatatatatgctattgtcgtggaggcggctgtccttggagcatatatgcaagaattgagagggatggttcgccgaccataattgtatgttttttgtttatgtcaagaacttatcttatttatattgttgtgtccttcgaagtattacaatgagagtgttattgttgttgctatttttgtaggtgacagtgttgaatgatcatcacacttgtacttctattggacggaggatgactatcacaccaacaagtgcttgggttgctcanaagctcttctattatgttaaaaatacatattgtgctaggaatacatctaccttcagatcctacaatgccattgttatg

SEQ ID NO: 7651 - DNA, 345 bp, Zea mays
agcttaacaagcttgattctagtgcattcttttcattggcaagggtatcaatagaggtgttcatgttaattacttctatatctttattgtgaatcaactctagaagctctatgtttctttccttttcaaggataaacaagtcttcttgagcatcagagttgcctttcttttatctagcttttccattaactttgtgataacattgtatccatttaagccaaattctttaatcattgtatttttcatggcaatttgatcatcatcatcatcatttgaaaaatcattactaaataatagtaccttatctccctttgccatgaggcaagttggaatgtacgagtcctc

SEQ ID NO: 7652 - DNA, 312 bp, Zea mays
attttgagaaagacaggatcttgtgcgcatgtcaagcatggtagcaagttggtgttcatcatccacacaagaacatcatgacgaccgacagaccgcttgagctactccacatggatctattctgcccaatagcttacataagcatcggcgggagtaagtattgtcttgtaattgtggatgattattctcgcttcacttgggtattctttttgcaggaaaaatctcaaacccaagataccttatagggattcttgagacgggctcataatgagttcggcttatggatcaaaaagaatagaagcgacaatggga

SEQ ID NO: 7653 - DNA, 390 bp, Zea mays
  unsure (1)..(390): unsure at all n locations
gcgtacgaaaagaagggaaggtgttttttcgccttcggctcaaaagagaaatttcgtccacatcaaagcatttctcatacatcaatggaaggataaggatatataacaaggttgaacagaagttatctcaaaagtntaattacaaaagttatctcaaaagtttctcaagtactgtctacagtctactatctaatctccaaggagcttcggcttcggcgtcatttttgagcttcggcttcggcttcgtcatcctataaaaataanggtcgttgtaagtcaaaatcaagcttacaggaagaagtatcacaaggtatggttcttactggttcaggtggctacgagcttctctcagcctttttccccacctttgtcatatcattttacaatcta

SEQ ID NO: 7654 - DNA, 289 bp, Zea mays
tacctgagactctattctagtagttctggtgaaggctaaatctccttccttgaactctctgggatgacggttgttccacgccatgccttaatctgcgcttggtatattgttaatgcctctatggcaaggacacggtctccgtcgatgatgtccttaaaggttggctcatcgatgtcatgagtggctatggggcttgctcatggagatccgtgctttatctcttgcggcgtcattgctttggatccgtacatcaagcggaatagtgtgaacccggtcgctctaaattatg

SEQ ID NO: 7655 - DNA, 368 bp, Zea mays
  unsure (1)..(368): unsure at all n locations
attttgcgattntggtcactggttttttctccctctcaaatagcattttgctgtatgcagcatcggttccatgttaatgcttcgcccgatgacgacgacttccgctcgtcgcgtacatagcgatcagtttgttcaagcggtacaagaatgtcattgaccgaggaggtggagaaaacctaaatgtatggattcttgttgaatcttcaccatacttgttgccagaagttgtttgtgttagctaattaggaattactgtgtgtgagaatgtaatcaagagtttgtcagtgctggagtgaccgcttacgcactatggtgtacagatgaggggcttataaaggaacttatggatattgaagattctggtctgg

SEQ ID NO: 7656 - DNA, 269 bp, Zea mays
  unsure (1)..(269): unsure at all n locations
tcgtatattacttgcctatgctacttatcatggcttttatctntatcaaatggacgtgaaaagtgccatcctcaatggaccaatcaatgaagaggtctatgttgagcaacctcccggcttttgagatagtgagtaccctaaccatgtttataaactctcatatgcgctttatgggctcaaagcagccccaagagcatggtatgaatgcctgcgagatttccttatcactaatggcttcaaagtcgaaaaagccgatcctacactcttta

SEQ ID NO: 7657 - DNA, 365 bp, Zea mays
cttcatcccaacatgggctagtcggcgatgccttatccttcccatattattcttagcaattgagcaagtatcaagttcaactctattgaaatcaacttagtatagctgactctctaatactcccttaaatgctacggaatcatcacttcttctaaagacagtaacacctatatccgtaaaaagacaatcataacccattttgcataattgagatacataaagcaaattgtagtctaaagaatctacaagataaacattggaaaaagaatgatcaggtgatatatgcaatttaccaagttctttgaccaaaccttgatttccatcccagaatgtgatagctctctggggatcttcgtttctcttat

SEQ ID NO: 7658 - DNA, 244 bp, Zea mays
gagcttgcactggatgtactaaccccaattttttctgtttccaccccagccatgctaatttaaatgtaagcatgatctacaccgcctcttttttgcaaaactacttaaaaagttgccgtcaatacacccttaaagctatgaaccatcattcctctagagacatacacatttacatttgtaaataaacaggtttatcccatattgataagtgactcacagattgcagattataaccaagagactc

SEQ ID NO: 7659 - DNA, 439 bp, Zea mays
ctaagctgctacatgccttttcatttctcatagcaggtaccttactggttcactaccccacttaataagaatgagggtagaactcttgaatactcgggatatgaactccttgaatacctcatatcatgggtgttactgggccattttctgatgttgcttgagcaagctgcggagaaatgactgacacatggttgattctgggagaaccttcttatcttttcttcactatattcttttctcttctcactgttcacttttcactgcatatttctttctctttgctcttcccactagaggattctatcaaagagtattattatcgtacactggaggaaaccaaatattatgaaccatgtacaacagtcttcaacccaagaatcaccgagcattgtgatcttatgggtgaaggagtggaaaatggagttgcttgctatttggc

SEQ ID NO: 7660 - DNA, 281 bp, Zea mays
  unsure (1)..(281): unsure at all n locations
caacacgagccgcagctgggccgaggaaccntaagtttttacccccctatagggcgtgcgtgaaaaacaccctggaggcccacttccttaatacccccagacgtaacttctgaccccatccaaaaacccgtcccaccgtccaggaagaaaagatcaatccaagctagaatagccaactcgtgccatgataatccaactgtcttacatccccccaaaatttgaccaaaacgctcgtagaaatatgagcaaggtaactttactggggccgtttacgccgctca

SEQ ID NO: 7661 - DNA, 342 bp, Zea mays
cttcgcttcagtttatcatccgcagtccaacggtgtcgtgttactctcctatgggaaaatcttcacagctgtcaagaagatgctccttgatgaaaaaagggcatatggaccgatttgtttcctgatgcattctgggcactaaacacaactgagtgcatggcgactgggtttactcccttccgccttctatacggatcggaggccatgaccccgcaagatatatagcatgggtccccgcgaacagttccgtctgccgtccccgacgtggacgatccaacttcaaatgatctcattgacggagaccgaatcttctccctacatgcccttaacatataccaagcc

SEQ ID NO: 7662 - DNA, 323 bp, Zea mays
  unsure (1)..(323): unsure at all n locations
tcttcgctccgggtcggtctcggagacagcctaagctttcgtcgtcaacaccgccaaagagtagcgcccctggttcatatccacaggatatggcatagtctctcaactcttctttctcagcttcgacaattcttgtgcaattaagtgttgaaaattaaaattttcttcttccgaagcatcttcggctatttccttctttctcaggcactgtggccacgacctcttcggcagctgtagtagcttcttctgcggccatgtcaagaagtatcttatcaatattagaaagtgtgctttctagatntgcatctttggccggttcagct

SEQ ID NO: 7663 - DNA, 336 bp, Zea mays
tctcataacccgtgcttgggttgggatagaaataggatcacttccaaattagttgctcctaacatccaacaacctaacatggtctatagtgtggatccctgacatacattggatccattatggggccttgttcgcaatatcctacaaccaaacatgtggatatttgattctggacgataatgcagttcatgtgcatggtagcatatagaactatgcgggactcattattgagacggcattatgatgtttggatctctacacacacattcagatcggtagcattctgagaaatcttacttaccttgtactaaatataatgctctcataaaatacaat

SEQ ID NO: 7664 - DNA, 323 bp, Zea mays
tatggctggagggcgaggcttctactatcaactgtttggtactcagtataaactgccatctttattggaatgtggataccaagaatagcgacagggtattatgtattattaattgtccaaaatcgactttgcattacttgtctttgctcctgtataactatcattgttgttgaacaagttgttctacctaatgggtcaaagggtatgaagttttaactccctttccaatacggtagcaacaagaggttatgtctcaatgtatgtcgttgagagctaaatagctgtcatagtcatcgtgtctaaaagctatggttcttatgcaa

SEQ ID NO: 7665 - DNA, 289 bp, Zea mays
  unsure (1)..(289): unsure at all n locations
cagcttttgcccctacagattgtctaattgtgtgaagggcaacgctcccatgggttangataatcagggttatattttatatcctactaattatcccgaacacagaattttgagaattcatgctaagaaatctcattctgtttctcaccatgcttttatgtataaaaatgaggcttctagctctagacattctactcatgttaaaatgtctaaaaagaaaactcctactgcatcatatgaacctaatatttcatttaagatttctaatgcatcatatgttttaactaac

SEQ ID NO: 7666 - DNA, 298 bp, Zea mays
acctccgaccggatcttaataccgagctgcactgatctgagtgcaatattttcttaaagcatgaggactaagaaatgctgactcggcacgtgctgcatgatgaagaatcttaattattaagccagttgaaagtaaacttcactgaacctgcagcatttgatcatattgaatcaagtgagctcttgataatcatatgggatggtattttgcgcttgtactttcgggacaacgcgtttatgaactggtgatgcacggatttgaaccgcaacttacttatccagcaactatgaatcccgct

SEQ ID NO: 7667 - DNA, 328 bp, Zea mays
gtattttctctgtttccgaatgcaatatagataatcatgctcgttatttcctccgtacacaagataacctggaagatattttaaatctttggtataatgccgaacattagcaatctgctctttatttaatttcccgcccgaagcgtgaagaataatgtatgtgtgacttgtgagtggcacttcttcgggtggtggaaactgtccttccctgattaatcttcaaacttggaagatttaactttatcttgtgtctcttctctaacaacttctggtattaaatcaattctcaaagagctggctttgttcacatcataagatacctctacat

SEQ ID NO: 7668 - DNA, 329 bp, Zea mays
aaccctcttcatacctcaatctgtaccttgatgcttatcatgtacccgtattcttttaatccatctttcccatctcgatttgagaatggtgttgtacctatactgaccctggtgtgattttctccctgtcgggtccaatacgtgctttatctctatactttattatgctcatgcccctatctcgcgtgtcttgttcttctcctcgtctttcgacaaacttagagagcaatttccccttatttagtgaagaccaccatttatttaacattaatgtgtagcaacgagatatttgtcgttgtatgcttgcattgtttgtccttgtgttatga

SEQ ID NO: 7669 - DNA, 393 bp, Zea mays
  unsure (1)..(393): unsure at all n locations
acatgtgctaagcggcgatgccacagccagcccatgctagtcttagctattaagcatgcatctagaccggcctcttcttgtgcaaaaatcaactaaataaagtgtgccgtctagtacacccttaaaagcagtgaaccatcacttcttctaaagacagacacatctacatttgtaaatagacagttatatcccatatgacataattgactaacagatagcatattatatccaagactctccactaaaaatacattagagatagaatgctcattagaaattgcaattntacctaacccttttaccttgccatgattcccatcaccgaatataatggaatcttgggaatccttattcttgacgtaggaggtgaacatcttcttcttccccgcatat

SEQ ID NO: 7670 - DNA, 334 bp, Zea mays
ttatagatatatcagaatttccctcaccagatcactcccaaagcaattatcagaatggggatcttcgtctgggctgtgagaagtcaaagcctgaagccaagtgcaaaatgcttttgcagtatgcatgaattgtgctatgaaacgataccctatggtaaagaacagtaccatatacaatttggttgctacagcttcgttgctcgttctggctcaagctacccagtaccaacctttcggaagagatggcccggagcctggatggatgagtgtgtttacgtgaagaatgatttaaaagcaagagaagatattaaagaaatcatcatgcgccccatct

SEQ ID NO: 7671 - DNA, 415 bp, Zea mays
  unsure (1)..(415): unsure at all n locations
agctagtgaagaatatccatcccaacatggtctagtcgacgatgccagggccagcccatattagtcttagcaatcacgcaagtgtctagttcaacattatcatcaatgaaatcaactaaatatagttgtccatttaacactcctctaaaaacagtgaatcattgcttcttctaaagacggtaacatccatatcagtaaataaacaagtgtagcccattttgcataactgagatacataaagcaagttatagcctatagattctataagaagtacattagaaatggaatggtcaggtgatataagcaatttacccaatcctntgaccaaaccttaattcttatctctgaatgtgattgctctctaaggatcataanttttcttatatgatgagaacatctatgtctcccctatcat

SEQ ID NO: 7672 - DNA, 264 bp, Zea mays
tctatgtttaggcctactgtgaatctataatgatagaatacgtgtcgtactgttattgatcatccaaaagcaacatgaggcaaacttttatgtctatgaattttgtttggaatacctatgacatgggtttaataagagaatatttgtggatttttttgttcccatgattaataaatattttgtgcgaaaaattgaattccgtaaaattagtgcaacttactatcatcgcagatggtgaaactcatgaagagctcctgtggagtg

SEQ ID NO: 7673 - DNA, 380 bp, Zea mays
gctaagttttacaagatcaactaatcatcctccccccctctatgtactctcacttcttcatacatcgggatgctccgggttcttacgatcgagtttctttccccccttctttatgaggtggggtggcacaagcccttcctgccacgggtcccggaggacgcggggaccgaacaacgcatcgggtcgccgcggaggagaagataaagaagaaggacgcggagaaggcccgggcccgcgagcggaggcgggctcgggacgctttggagaagcgtcgtctccagcaggagagggaaggactcccaagggagtcgtcgccggagacacccgacgacgatgatgacgacgatgatgaggaggagggcgacatggccgcccgtctc

SEQ ID NO: 7674 - DNA, 416 bp, Zea mays
tctacaggctagcgggatgcccatccatccatgctttcttactattagcatgctttttaccggctctctttgcaaacaactaataaagtggccgtctaatcaccctgtatagctagtgaaccatcacttcttctaaagacagaccatctacatttgaaaaagaaattatttccatatgcatagttgactatacggttagcaatattgtaaccaatgagactcaactaataacacattatagatggagtgctcattagatattgcaatgttacctaacccttttaccttgccttgattcccatcaccgaatataattgaatcttgggaatccctattcttgacgtatgaggtgaacatcttcttctccccgtcatatggttgtgcatccgctgcaataatccatcttgtaccccgga

SEQ ID NO: 7675 - DNA, 306 bp, Zea mays
  unsure (1)..(306): unsure at all n locations
ctgatgcaccttctaagctcttgtgtataaccctgactattgccttttgctcgagtaccaaatctggcccaaaaaatgtccctttctcctgcttgagaccaatttattggagtcctacaccttctcccatataatgcctccaaaggtgccatctttaaactggactgatnnntatctgtgtaagagaactctgacaaagacagacacttgtcccaatcctttacattatgtagtgcacatgctcgcaacatattttccaaattttgattcaccctttctgactggccatctgtttggtggtgatat

SEQ ID NO: 7676 - DNA, 456 bp, Zea mays
tggacgtgaaaagtgccttcctcaatggactaatcaaggaagaggtctatgttgagcaacctcccggctttgaagatagtgagtaccctaaccatgtatataaactcacaaaggcgctttatgggctcaagcatgccccaagagcatggtatgaatgcctgcgagactttcttatcactaatggcttcaaagtcggtaaagttgatcctactctctgtactaaaactgttgcaaaagacttgtttgtatgccaaatttatgttgatgatattatatttgggtctactaacaagtcaacttgtgaagagtttagtaagatcatgatacaaaaatttgagatgtcaatgatggaggagttgaagtatttcctatgatttcaaatcaaacaactccaagatggcacctctatcaatcaaacatattacattcaagacatacttaagaagtttcgaatca

SEQ ID NO: 7677 - DNA, 401 bp, Zea mays
  unsure (1)..(401): unsure at all n locations
gctggagaaatcctggattaatctactgttatatctcaccaatccaaagaaacttcgaacttgatgtacagtggntggcgggttccactctagaatatccttgatcttgctgggatcaaccacaatcccatttgtagacaatacatgtcccagaaattggattcctccagccaaaacgcgcattgctaaatntagcatataattgatgttcccttaagcgcgttaatacgatccgtagatgctgagcatgttcctcttcattctnggaataaatcaagataacatcaatgaagaccaccacaaatttgtccagcttcggcataaacaccgagttcattagatatgtgaagtgggcaggagcattcgttaatctgaaagacataaccaaatattcaattatc

SEQ ID NO: 7678 - DNA, 479 bp, Zea mays
  unsure (1)..(479): unsure at all n locations
ctaagcttagaaacgaagcctcatgttccagaatttagtgggagaacaactgtctaaactgaaatataagagcttagagagtatgccaaatactgtggatacatacctgtggcactcctcttcggaggcgttgatgatgaaaaattagattgtattcgagatcaaacaggagccaaagttatcagtactctgtccaagagtatcggcttcccgaagctagaaacaaacatcatccgctaccgacgacaacatgtcgttggtagtttattttattccaacttcaaggtgaactacttgtcccttaatgtttattgtttctaataataaaatcatgtctgacgaaagttgttttcgtgcaaagtatgctgntgagcaaagccttgctaatgcagcatgattttgaagattaaaagcacgaagttattattgaaaatttggaaagcataataaaggagccatcagatgctttcgagaaaaga

SEQ ID NO: 7679 - DNA, 129 bp, Zea mays
tttttatatttttcttggcacccagccgagaggacagggggatccacatctaacgttgaaaggaattcacttggccaccatcggtcttgattcttgtaccgttcatagctatttgtagtgcggaattcc

SEQ ID NO: 7680 - DNA, 350 bp, Zea mays
  unsure (1)..(350): unsure at all n locations
tctggcacatataataacaatggagcccctggcgtttggtggagctaaatgttgttagatctatcaaatactgcttcagctcttcgaaggccttctgttgattggtcccattgaagatttgctgattcacacttctaaaatggtgagtttctctctgctgatctagatatgaatctgttgagagacgccagccttcctgtcaatctttgagcccccttttttgtacttggtggttccattcgaagtatagcttcaattttgcttggattaacctcgattcctttgttgagactangcaaccgagaaatttccccttctctactccgaaacacattnttctgattcaattt

SEQ ID NO: 7681 - DNA, 393 bp, Zea mays
  unsure (1)..(393): unsure at all n locations
ctgcagcttctaagggagaacacgcgatatgttttactaacgttcaattcgaaaaagatagaccgtgngcagcttgtcaagcagggaaacaggtgggatgagcgcatcacagcaagaatgtgatgaccacttcaagacccctggagctgctgcatatggatctttcggacccgtcgcctatctaagcatagggggaagtaagtatggactagttattggtgatgacttttcccgcttcacttgggtgttctatttgcaggataagtctgaaacccaatggaccctcaagcgcttactcaggagggctcaaaatgagtttgagctcgaagtgaataagataacgagcgaccacgggtccgaggtcaaaaaccttcaagtggaggagttccttga

SEQ ID NO: 7682 - DNA, 478 bp, Zea mays
  unsure (1)..(478): unsure at all n locations
actttaatctcagcttctaatggagaacacgtgataggtgtgacaaacgtacatttcgtaaaagatataccttgtgcagcttgtcaagcatgtaaacatgtgggaggagcgcatcacagcaagaatgtgatgaccacttcaagacccctatagctgctgcatatggacctcttcggacccgtcgcctatctgaacatanggggaagtaagtatgggctagttattgttgatgacttttcccgcttcacttgtgtgttctttttgcaagataagtctgaaacccaagggaccctcaagcgcttcctcatgagagctcataatgagtctgagctcaaggtgaagaagataaggagcgacaatgggtccgagttcaagaaccttcaagtggaggatgtccttgaggaggaatggatcaacatgaggtctacgctccctcacaccactcaaaatggtgtatagaaggaaaacagacgctatc

SEQ ID NO: 7683 - DNA, 354 bp, Zea mays
ctctggaaaccgacactctctgatagagagccgattattcttattcccgcacggtcgtgaatgcatcctaaggctccttcttcaattccactaaagatcataacttctggctggtagccacaagatgttccatatccctgtagctccttcttttctgcctcggataatttttaccgaccatattccgaaggtcgatgtccttttcttccgaagcaacatcatcaatcttttttcttttgtcatgcactgaagccatgaccttctctgcagtcacagctgtctcttcacagccatatccgagagcattttatcaatcctagacagtgtactctcaatgttggcagcgtcggcagc

SEQ ID NO: 7684 - DNA, 350 bp, Zea mays
  unsure (1)..(350): unsure at all n locations
gcttaacaacgatgagatggctcttactattaagagcatntggcaaatcctcaagcaacagaaggggaaggactacaaaccccgctccaagaggagtttgctataaggtgtgagaaagtctggttattatatttctaaatgtccatatacaagtgtagtgacagggatgacgataagaaagggaataagaagatggataagaaggagtattacaacaagaagggtggcgaggcgcacattggacgagaatgggactccaatgagagctccactgactcctcctccgatgaggacgccgccaacattgccatcaacaaaggccttctcttccccaacatcggccacaaata

SEQ ID NO: 7685 - DNA, 390 bp, Zea mays
acactttaatactaagcttctataggagagcacattgtatgactaacaaatgttcattttgagaaagacaggatttgtagcgcatgccaagcatgaaagctagttggtgcccatcatccacacaagaacatcatgacgaccgacaggccgcttgagctacttcacatggatctattcggcccgattgcttacataagcatcggcgggagtaagtattgtcttgtaataatggatgattattctcgcgtcacttgggtgttctttttgcaggaaatatctcacacccaagagaccttaaagggattcttgagacgagctcaaaacgagttcggcttattgatcaagaaaattagaatcgacaacgggacggagttcaagaactctcatatc

SEQ ID NO: 7686 - DNA, 396 bp, Zea mays
agctttatcaaatggacgtgtatagtgcctttctcaatggaccaatcaaggaagaagtctatgttgagcaacctcccggcttttaagatagtgagtatcctaactatgtatataaactctctaaggcgctttatgggctcaagcaagccccaaagcaaggtatgaatgcctaagagactttcttatcactaatggcttcaaagttggaaaggccgatcctacttactaaaactcttgacaatgatttgtttgtatgccaaatttatgttgatgatattatatttgggtctactaacgaatctacatgtgaagaatttagtaggatcatgacacagaaattctagatgtcgatgatggcggagttgaagtacttcttatgatttcaagtgaagcaac

SEQ ID NO: 7687 - DNA, 308 bp, Zea mays
  unsure (1)..(308): unsure at all n locations
gagaaagacgggtttgtagcgcatgccaagcatgaaagcaagttggtgcccatcatccacacaagaacattatgacgaccgacaggccgcttgagctactccacatagatctattctgcccgattgcttacataagcatcggcgggagtaagtatggtcttgtaatagtggatgattactctcgcttcacttgggtattcattttgcaggaaaaatctcaaacccaagagaccttataaggattcttgagacgggctcanaatgagttcggcttaaggatcaagaaaattagaagcgacaacgggacg

SEQ ID NO: 7688 - DNA, 102 bp, Zea mays
acccgggaccccaaaaccaccagagcagcaatttgtggacccagcacagcagaagggcaaaccacaccacaacaaccggacaagacgcagaacaacaaaagg

SEQ ID NO: 7689 - DNA, 221 bp, Zea mays
agctttcttaactcggggtgaccactatgccctactaacggagcaatcggcttaagtcggcaacgactcaaaccggtgcaacatgctcacgcttacttaactcggggtgaccactatgccctgctaacggagcaatcggcttaagtcggcaacgacttaaaccggtgcaacatgctcacgcttacttaactcggggtgaccactatgccctgctaacggag

SEQ ID NO: 7690 - DNA, 370 bp, Zea mays
taagcgtcaatccatctgggcagggacacaagcgaatatcactactcgctgacggacctcgctgggtacacaactccgacattaatgcctatcacttaatctatgtattgttcatgtacatcagttatgagaaaatgatcctcactgattcctattttagacacataggaccattggaaagtcatagcttaatatccataactccaaaaattatgattcctgctcctagggttctattttaatgtgtagactatcattatgtattgtgttacatgttcggcgtgatgttaattgtctctatatattgtgccgcgccttgagacacgggggaccctaagtcgactagtgagtgtgctgcgtgccccaaccc

SEQ ID NO: 7691 - DNA, 220 bp, Zea mays
gtcatcaatgggagaacacgtgataggtttgactaacgtgcatttcgaaaaagatagaccttgtgcagcttgtcaagcaggtaaacaagtgggaggagcacatcacagcaagaacgtgatgaccacttcaagacccctggagctgctgcatatggacctcttcggacctgtcgcctatctgagcataggaggaagtaagtatggtttagttattgttgat

SEQ ID NO: 7692 - DNA, 449 bp, Zea mays
  unsure (1)..(449): unsure at all n locations
gcttcacatctctggactaactcngctgcatcaccctttgctgtttttcttataaaccagacctgtagactttcccaaccagagttctagatgctgcgtgtattccacactgtccggcgtgaatctcatctaatagctgcttcccagtaaccgaggaaatgcacttcatgaggactcatgtctcaccccttctgtacagtgcgccccctatgagggtgtaatgggccgactgtctcacgatgcgttctgctgtaaccttatcatctgattcttcttcattctttatatatctgatgataggctctctccagtcgctagagtctgactctggctggctcaaagtgttgcactcttaccgctgaactgatggaatacttgggtgtgacacttactggacaaagacatcgggtgcgacctgtgctcgctggatcctaactcaacaatgcatt

SEQ ID NO: 7693 - DNA, 218 bp, Zea mays
ttctttttggaagcacgcaaatccttgatggtggagtctttggtcgacaacaatcgtcccaagtcgcagaacttcgacttgggatggctgcagctcatggcggtgatgatctaggttagacatggtgaagcggtggctctctccaggatggtcaaggagttactggcgtcatggtacatcctggctagattgtcgcgaaagacaataagtgctcgtct

SEQ ID NO: 7694 - DNA, 443 bp, Zea mays
tgcttcatcgtacttcccttgatctatgacgaatctccttatattcttaataatatattacaaacaaatggtttgtcgtgtttttgaggaccttctaaagacgaaggcccccaacaagtactcatgtgaagcgttggacatcatagggatgaacaatgcaccgatgcgaggggaggggagtctaagggtacttttggagagggtcttagaccacttctaaaagcatctacaacaacttttaaattatagttcccaaaagaacaagattggaatctccttataaataataaatctaataaagacaatcctccaacatcttcctataatttttctaaagctctctgaaatatggcaacatcgatgtgctttgcggatgcattggagcagtcgatgtcgcgagactgcaagccgttggccataaccgctgatgatggcgggctcga

SEQ ID NO: 7695 - DNA, 217 bp, Zea mays
tgtttgtggcgccctcgggcgtcttgttgcagccgaagtaccaagtctcccacttggaagcctcggggccgaacccttcgggcgtggtagcgtcgcagagactgatgataccgcgccgagtgtagtaaggccacgtcccgagcctcttccagctggtccaatgaatcttctcggctagtctggtttctttggtcgttgtaagcctttgtcctcgggg

SEQ ID NO: 7696 - DNA, 452 bp, Zea mays
  unsure (1)..(452): unsure at all n locations
tactcctccctangaagggtcgttcatcatcgcctatatttttaagcccgggacatacaagctggccaacaatcgatgcgaagtctacagcaacgcttggaacatccaacagctacgtcgcttctacccttaaaatgtttcaagtcgttagtgtatctcgcttttttacgtgttaaaaaagtcaaccgtcagggaggatcggccttgcctcagcaaaaaccaaacttccctcgggggctagaaggggggaaccccctctgcgtcaaaattttcctcggaaaagttttccgccaaaatgactttcgtgctttntgacgatatcgataatggaatcctacaaacgacgagaggaaccttaaacggctaggccgaccgagccgagggacttctacgcctccgggatacagatacctcactcatcaccttccgcgaaaagtacttcacgctcggat

SEQ ID NO: 7697 - DNA, 220 bp, Zea mays
ttctttattacacccttcggcacgtactatttcgtacgaatgcctgaaggactcaagaacgtcggctcaaccttttctcgcctcaccaagaaggtccttgaaaaccaggtaggccgcaacatcttcacttatgtagatgacattgttgtcgcaagcaaaagcaaagaggaccacctggccgacctcgcagagacattcgccaacttgcgcgacacacgac

SEQ ID NO: 7698 - DNA, 419 bp, Zea mays
tcagctccatctatgtaatggatcgcctttgaattcgttttacttccttcagccctcctagcagcatcttgacttccatgaacagcaatgtgcccttgttccgaaggtatcttcatgcataagtacgctggatggagtatatcttctaaggcattaaacgttcctcgaccaatgattgcattgtatgggtattccatgtcaacgatgtcaaagacaacttgttcagaccttgtattgtggacataactgaaggtaactgacattgtcattttaccaagagccacaatctgtctttctccgaagccacaaagagggtgtgttgcgtcatgtattttgtcttctggctcttgcatctgtctgaaggccattgcaaagatgatgttcgttgcactgcctgtatcaaccagaacattgtggac

SEQ ID NO: 7699 - DNA, 219 bp, Zea mays
attcttttctttggtctggaagatacagaacaaatgcaaaatgttcatcagctcacacttcctacggctgaccatataataagcggtggcggggtggacaaaccaaccccatctgctcgctgtgtacagctagcagcgcgcgaaacacatattcatatgatgtcgcaatgactgttcgcaagggctgtttggcgaaggattgcgcaatggttcgagatg

SEQ ID NO: 7700 - DNA, 436 bp, Zea mays
atactcacctatgaaattcttatcccacatgggcgtagctgtgattcttttccaacccatgttagtcttagcaaataagcaagtgtcgagttcagctctattaaaatcaactaagtatagctgaccctctaacactcccttaaatgctactgaatcatcacttcttctatagacagtaacacctatattcgtaaaaagacagatgtaacccattttacataattgagaaacaaaaagcaagttgtaatctaaagaatctacaagataaacattggaaatagaatggtcaggtgatattgaaattttaccaagtcctttgatcaaaccttgatatccatccacgaaagtgatagctcgatggggatccttgttattctcatatgaggagaacatacttttctcctctgcatgtggtttgtgcacccgctatcgatga

SEQ ID NO: 7701 - DNA, 205 bp, Zea mays
gtctcgctgattaaaatcaaacgagttaaagcccatcaaatgaagctttttcatgcgattctcacttatatgacccaaacgacagtgccacatgtaggtaggacttaaatcattaggccgaggccttttagcactaatattacagataggtgcatcatcaagatttaaaatgaataacccattcataatggatgcaaaagccaca

SEQ ID NO: 7702 - DNA, 442 bp, Zea mays
  unsure (1)..(442): unsure at all n locations
tcatcttgtgccacaatactataacttgtttggtgtttattaacaaganaaggttaagataaaggaccaggcacaagtatggatgagctctctagagattaaaaccttcattgtggaaagtacaccacaacatggtaaaggtacaaaaggaggtattgatcttttgcatatttgtatcttaattttcctcaaatgcttgtggtgcatatgtttaatgtgtaagggggagtaatgttaatgtgttgcattttccctgcttaatatcctgctgtcccttgacatcatactgtgttcttgcttgaatatggttttggagttagatgtcaaagggggagaaattgtgcatttaagcttaccttgacctgagaggaacgcttggataaaaagaatgagttactgctgttataatgataatattgtgatgtagataataatgatcata

SEQ ID NO: 7703 - DNA, 211 bp, Zea mays
ctcacgcccgggagtgatccttaatcacctgtacgcttttcttgatctgcccatctgatctttttcttcataccacaacttactggaacactactccactaaagatgtgggttaagtctgaatcatgggattgaactccttgaagtacctataacatgggtgcatggggccttcttctgctattgtaattgagcagctgagacagatgacc

SEQ ID NO: 7704 - DNA, 457 bp, Zea mays
ccggcggattccttcactacggggtcctcaaccttatttatatctcgctcaaaatcttcatcggcttggtcgaagacctcgaagtgcctgcacccttcgcgggagagcacgttcatcgccccctcgcaggtgaccagggaggcatacgccataaatccctccacgacagtggggagtgcttgcaactcctcctgcacccactccaggcagcgaagtccgggctcccggtccggcacctctaaatcaccggtccccacgcccagcccacggtatgtatccacaagcagctggcacgtacgctccgcctccgcgcgcgacatagcctcagccctctccacgcggctctccagggcggtgagccgctcctgcagctgctcggcgcgctccctggcaagattgccctccgcccgtgccaggttagcctccgcctgcgcagcctgcgccttaacaagagcct

SEQ ID NO: 7705 - DNA, 218 bp, Zea mays
attttttgaagattcttcatcccaacatgggctagtcggtgatgccaaagccaacccatattagtcttagcaattaagcaagtatcgagttcagctctattaaaatcaacgaagtatagctgaccctctaatactcccttaaatgctactgaatcatcacttcttctaaagacagtaacacctatatctgtaaaaagacagttgtaacccattttgca

SEQ ID NO: 7706 - DNA, 409 bp, Zea mays
tgtgagattaataatatgtattacataagttcatctctcttctataatttagggcacaataaaatatgttgaactatgtttatgtaattgtaagtaacacttacggaaataataatctattttcaaatgaagttaagttatattgtagttcatgttatactttaaattcattatcccttaggtagtattgtgtccttttaagttgtgttccaatgtatgtacatgtttggtgtggtgttcatttgtactttccaaatgtattgaatgcatgctcgctttatttatacaacgagcagtccgaggttcctaagtgtgttgttggagacctccctgagcaacaacctggtgaaggcaagtgtcctctgacctattatgtcctacatactttatgattcactgtcccgcattt

SEQ ID NO: 7707 - DNA, 220 bp, Zea mays
agcttgtgaagattcttcatcccaacgtggcccggtcggtgatgccagagccaacccatattagtcttagcaattaagcaagtatcgagttcagctctattaaaatcaactaagtatagctgaccctcgagtactcccttaaatgctactgaatcatcacttcttctaaagacagtaacacctatatccgtaaaaagacaattgtaacccattttgcata

SEQ ID NO: 7708 - DNA, 441 bp, Zea mays
  unsure (1)..(441): unsure at all n locations
ntatggacatacttgtaatttcatgtgaagctatacatctcccttataaatagatgaatattattgtgcatagcttcacctttttcgggggaagataacactctcatttgttcatctcccgaagttaccttcgagctctcattcgtgtaaagccgaaggtatgcttgtaattgtttatcatattgccaggagtaaaatttgagataaatgtgcagataagttggtcttgttctttattatttgcactttctattcttgttagatatacacagtcttcacttgtcaccctcttccttcatatgaccttcggaaaggggtcaggtgaaggaagaagcgggcaacacactgattcatggtcttgtttttgatatcttgaaggattcaaaaacaagtgtccaacactaccttcatccttggatcattatcccgaagagataatgc

SEQ ID NO: 7709 - DNA, 219 bp, Zea mays
agcttttttgggagaacatgtgttaggactaacagatgtgtgttttgagaaagacagaccttgtgcagcatgtcaggcagggaagcggtggggacaaattatccaagcaagaacgtgatgacgacatcaagaccactggaacttcttcatatggatctcttcggacttgttgcttaccttaacatcggggtaagtaagtatggtcttataattgttgat

SEQ ID NO: 7710 - DNA, 465 bp, Zea mays
  unsure (1)..(465): unsure at all n locations
aaactaagcttggatatcgacattgtctgccatctcccgacagacatgttctttttattgtctgatagacaataaaggaagtcatgttcgtcatcgccactataaaccaaggaccctcgagggtactttagatccctgacataatgttgcgctacggcaatttgctccttcgataattttttccccgaagcatattgcactatgaattccaattcttcggtaggcgctccgggggcaggagattcagattcttcaacagcaccttctttntccaacattaatggtgctccggcaacctctgaaggtcttgttttggtaccttcttcagcagcctccgaagatcttgcttccacggtgactgactatccaagcttcatcagaggtctgcgccatgatagctttgctagaattctttanggcttcgccctctacaatangtgctaaggcaggagtcgacgcctttac

SEQ ID NO: 7711 - DNA, 220 bp, Zea mays
agctttttttattgaatcaatagattagagaaggttatatggattggggagacagagacggagatagatgataaacaaatcaggtccgcctcagctagaaaactaggtctagatgtggtggtttaaattggagctcagtgttaacctatgacacctaggtattgccacacgttagagacatgttgacatatacgtcatcagtgacgtgatatcatgtaac

SEQ ID NO: 7712 - DNA, 473 bp, Zea mays
  unsure (1)..(473): unsure at all n locations
gacacaagaaactaagctttgtgttcaattcgtcaacgctattttattaaagttatatcttttctctcgattaacatccacagctatactctagatcaaaagagctacttccccgtttctttattatttgtcgcggtttaatttacaaataaactagcagacgacaaatattcaagaatatagaggtagtatcaagtaaagtaactcaaaacacattatatcatatcactctctctaaatgcggccaccatgtcctataaaaacaaacatgtacaatacatgccatcaatttttttatatagttctttcgttctaaattataagtctttctaacttttctgtacacaccttctaatataaacatacatgatctttcngcaagagacacgatgatttaaacaattngggctttatgctgtcaatgtgagatatcaccctacatcatgtgtgacgtnggccattctctatgtaat

SEQ ID NO: 7713 - DNA, 221 bp, Zea mays
agctttttgtagaagggataacatagtgcgctgcctggcacgggcgcactgttcaccagcagacccagcaggcgcgccgcctgctggatgaccttgacgccgcttgccagcggatgggacgggacacattaaatgctgagagggcacgtcgcccgtcagcgcagtggcaggcggcatgtcctctcctcaataaatgcaggcgctgcacgactttacgtcag

SEQ ID NO: 7714 - DNA, 461 bp, Zea mays
  unsure (1)..(461): unsure at all n locations
tactaccttcctgtatatattgatttcatattaattacgagatccatctctatcgatctatggntctaggtttatcttggtcttgcaggcgggattgccattaaactagtgtccatgctgaggtgagcggtacgggtgctgagtcccaacgggagcggtggaaccaccgtccaaataacgacgttccgcgcgctcaacccgcagcaaggcgatctcagcacgagccctactcagctcgtctaatgcatggtccagctccgtgtttagcacggcggctaggttgactgtgctgctcaacctatgattgccctcaccgacaggtgagacaatcacgcctcctgtgctgccagatgaacggcggnggtaatacttcacgtcaagaccgtcagcttgcccaccgaataccgagcagtagtgcgaaagcgcacgccgtgcaacatcttgcatggctgcctcagctg

SEQ ID NO: 7715 - DNA, 221 bp, Zea mays
atcttgttccccgttccactcgttgtgtcttccttgggtactcctctgatcacaaggggtatcggtgccttgatctctccactcacagagttctcgcctctcgtcacgtcatcttcgacgagtttgacttccctttctccgtctcttcttccgctgcctcctcctcagagtacgacaccctcctcgaggcatattatgttgctccctctgtcgtgtcatgc

SEQ ID NO: 7716 - DNA, 437 bp, Zea mays
  unsure (1)..(437): unsure at all n locations
actaagcttgtcatacctgtcgaagcaacagcacatgccagcacagttgctatntaccataccagtaacttggcctttcgcatgctggggattggatatgattggacctttcaagaaagctcaaggaggttatacccacgtattggtggcaattgacaaattcactaaatggatagagttcaagcccattacttctttaacctctgctaaggccgtggaattcatacaggatataatattcagattcgggataccaaacagcatcatcactgacttatgatccaacttcaccagctcagaattctttgacttctgcgagcaaaagagcattcagatcaaatatgcatctgtggcgcatacaagagccaacgggcatgttgagcgagccaacggaatgatattggaggcactcatgaaaagggtcttcgataaaaatg

SEQ ID NO: 7717 - DNA, 241 bp, Zea mays
tagaccagctggacgcctgcttttttgtagctatgcatacattaccatccactcaaaaacaagctctccttcgcctcatattgatgttcttttcgatcaatgggtcgaagccaaagcgatttccaagatataccttcgctccggctatcatcacatcaagatacgatcatgtgatgttcctaagactgtctactcaaccaaatatgggctgaataagaatttggtaatgcagtttgggcta

SEQ ID NO: 7718 - DNA, 457 bp, Zea mays
tcagctccatctatgttatggatggcttatgagttatttattttccttcggcccttctggcagcttcctgacttccatgaatagcaatgggtcttgatccgaaggtatcttcatgcaaagataggcaggatgaataattgcttcgaaagcattgagggtgccatgaccaataattgcattgtaagggtattccatgtcaacaatgtcaaacacaacttgctcagttctagtgttgttgatgaacctgaaggtcactgacatagtgatcttgcctagtgctacaatctgtcttcctccgaagccacagagagggtgtgtagcatcatgaatcttatcttctggctcttgcatttgcctgaaggccttagcaaatatgatatcagctgcactgcctgtatcaaccaagacattgtggaccagaaactctttgataacacaagagataaccatggcatcg

SEQ ID NO: 7719 - DNA, 219 bp, Zea mays
agcttttaaagggagcacacgtgataggtctaaccaatgttcatttcgaaaaagatagaccttgtgcagcttgtcaagcaggcaaacaagtgggaggagcacatcacagcaagaatgtgatgaccacatcaagacctctggagctgctacatatggacctcttcggacccatcgcctatctaagcataggaggaagtaagtatggtctagttattgttg

SEQ ID NO: 7720 - DNA, 452 bp, Zea mays
  unsure (1)..(452): unsure at all n locations
tgtggcagctggcatgacactagcaacaataagcttcttgtttttacatgcagatctgtgctgaggaagcaccacattatgtgtgagttatccattgatgactataactntattaacgttggtctacttagaggttattacataggaaggtctagttctggtaagtgataactttatcggcattgagttattcgtacgctacaagttgtgttgctataccacgtagaattttggagaaaatagcacgccaccatgctggcagctggtcattagaacctcacatgtattataatatatgaaattgttagactgtgtgctattgtatggctgactgtggttaagtgcgatggacctacagcccaacccatgtacaacccgttagggctaggggaacaccgatacatcaatcaatctattctgtttcactataatatggtatcagatagcatctt

SEQ ID NO: 7721 - DNA, 219 bp, Zea mays
ttttttctcaacctttcttgttgcttattaaatatccttcaatttttataattggttcaagtcataattttaaatttttcatacccttttccttattttcttgaattttgctcatggggcttacttagggtttttattagagttacaacattattaccttttggagagacccatttgctttgatcatgatacttttaagtatatgcttggtgaattctt

SEQ ID NO: 7722 - DNA, 219 bp, Zea mays
tgcttgttttgggctcaacttccttcttcatccagatccggggaatcctgagaagtagtccagcaggctcatgagctccgaaggggctgccgcatctatgagagagtctattcttggcaaggggaattcatccttcgggtacgccttgttgagacctatgaaatcaatacacattcttcattttccattagacctctttaccatcacagtgtaggctag

SEQ ID NO: 7723 - DNA, 420 bp, Zea mays
  unsure (1)..(420): unsure at all n locations
accctanatagggattaaaggggtaaaacttaacctctatttataaaacctaacagctttatggtaatagttataaaatatccccaaaaacaaagttgaatcacctttatacccctaagataccagaaaccctaattggaaccctggaaaaccctaaaactaaaccctaggggcctatgtacaaaattagtccacttttggactaatgtgcaaaacccaagttaaataagtaccttaagtcatttgggtcacaaatatgtgagtttgcaagttaaatcctgagatttggacttaaatgcaaaatggacctcaattgggttcaatactaagtctaaaatttcagtgttataagctcaactttggagcttattaacttccaaattagtaagaatttgctctagttcatcacaacaactatgt

SEQ ID NO: 7724 - DNA, 218 bp, Zea mays
attttctcatcctcccttaccattctagcagcttgcctactcagaatgctaacaattctttttcttttcatacctttggcacctttgtcaagcctttcataatcagggtattcaaaattcaaggcatccatcacccggttcaatcttcgttttggctgggtgccgaaggccgcggtcatcagttggtcttcctttttggtataatttccaagtatttc

SEQ ID NO: 7725 - DNA, 426 bp, Zea mays
  unsure (1)..(426): unsure at all n locations
tgaatgggacgaaaggcgctcatgacgaaggatattattatacgaagctatgcgcagnaaagcttctgcatgaaagcagaaaaggggaaccgacttaaagatgaaaagccaaattagacctcgaagaattactatagagttattgataaatgtaaagggcattaatgtaattctacacaggctgtgtcccgtgcctataaatagatgaacagtactcccgtactattcacgctgacttgacattcgctttttcacatcacgcctgtacctttactttccatcaatccgaaagtacatttattaattgttattatgattttgataataaaaaataaaaataaatgaacgataatatccgcattattgggtgtatttcatatacaaatactttcttgtcatctatcgagcttacaacgggttttttct

SEQ ID NO: 7726 - DNA, 220 bp, Zea mays
tttttttttgttggctaaatggatttggagactacaaaatactagtggtttgtggcaatccattataaaaagcaaatacattaagaataaacctattatttcggtgaaggatagaccttcagattctcatttctggaaaggtattctctcggttcgagacaaatattataaatactgtaaaattaagattggtgatggtaagagttccagtttttggaaa

SEQ ID NO: 7727 - DNA, 438 bp, Zea mays
  unsure (1)..(438): unsure at all n locations
tgctacngtattatgtaggggtaccatagcttttctgtttatcttttatccttactttctcatgtggcagagtttggttattattatctcaaaagacttatctactacaatcactgattttttttaacagaggatctccccatttctattgttttcataaccgaaatacaactgagtttttgaagatagcattcagaacagaaggatatatctcaattcaagagacatatgacacaatataaggactggcagggggagagatacatgctgatgcaaaacttcctccaacggaacacacctgattcagacatatccgccgaaaaaagggggaagtaacccaccatcatccaagttttcatccatatgggccaaaacataaccagctaatcaacctgacgtggacttagagctgaatctaaccacatgaccggagtcaaa

SEQ ID NO: 7728 - DNA, 241 bp, Zea mays
ataaaaaagagcggcgggcatgcatgcttgtgaaggcacttcatccccacatgagctaagcggcgaagccacagccagcccatgcaagtcttaaccattaagcatgcatctaaaccggcctcttcttttgcaaaatcaactaaataaagtttgccgtctaatacacccttaaaagctagagaaccatcacttcttctaaagacagacacatctatatttgtaaacagacagtgatatccca

SEQ ID NO: 7729 - DNA, 397 bp, Zea mays
taaaaataagctgtctaaggatactccgctaagggtgtttattttttataggattctccccctttatagatgaagaatatgctcccctgacagagatcttaaacaaaagcatgtgaaaattagaggagccagacatgagttgaagagactaactttccttatgcatatgtgacataatatgagtgaaccacttatgctattatagcaacatggaagtatatgagatgagatatagtctaacttaatatttggagaagacatgttaatgatactagatgtagtctcaaaagatacagatggcgagcttgagagacatgatatttttggagatttgcagtggaagatgttgatttctccgggacctattttccttcaatgagactatacatgaaataac

SEQ ID NO: 7730 - DNA, 222 bp, Zea mays
agcttatttctccctaggaagggacgttcatcatcggccatgattttgaagcccaggacatacaagctggccaacgaccaaggcgaggtctacagcaacgcttagaacatcgaacaactacgtcgcttttacccttaaaatgttacaagtcgttcatgtatctcgctttctttacatgcataaataaagtctaaccatcaaggaaggatcagccttgcctcg

SEQ ID NO: 7731 - DNA, 472 bp, Zea mays
  unsure (1)..(472): unsure at all n locations
tactaagctggactccggtatccacacattaatccttaagtcagtttttttcgtcttatggacaangcatcctccctggatccaagtccatagactaacatatatcccgttatcaagatgaatacaatcaattcctgacctcgcgcgagtgctagaaaaatcactcgacttctaccgagatcctgattagcatagcagctactcgacctagcatactagtattcatctcaaaaaggaatcctaagttcatgcaactagaggtttcaagcaactcctacacttaagtgcacattgcaatcctacaagcattaagtgtagtaaagtagcatataataatacggttatgcatataaaccggngcttgccttcaattgctggggctgcgaggagatcctcaatagcagcctctgaagcctgctcctggtcctcctcttggacagatacttgcttgggatgagcacgtactctccgg

SEQ ID NO: 7732 - DNA, 217 bp, Zea mays
agctttttcttaacgaccttcgacgccaccatcctgcagagagatgaaggcataaggcaatgagaaatttaacaaaggaaaaccaaggtaaagaagacaaaggttaaagtttcatactcggtcaagtagttttcgtgcttcgtccccggccagttcatgcccgccctttgcccaaatttgggtaataaatcttcaggcttcggctggaatatcaact

SEQ ID NO: 7733 - DNA, 453 bp, Zea mays
tgccttcgcctcagtataccacccgcaatccaacggagttgtgttatttcaaatggaaaaatttcacagctgtcaagaagatgctcctcgacgataaaaagggcaagtgggccgatttgttacctgaaacggtctgggcactaaacacgactgagtgcatggcgactgggttcacccctttccgccttctatacggatcggaggccatgaccccgcaagaaataaaacacgggtccccacggacagtcccgtcagctgtccccgacgtggacgagcccacttctaatgacctcattgatggagaccgcgtcttcgccctacaggctctaaacaaataccaagcccaaacaaaagcatggcgtgaccacgcagtcatcccgagggaattcatcgaatgagacctcgtactcgttcggacaactcggacagagttctgtggcaagctggagccca

SEQ ID NO: 7734 - DNA, 220 bp, Zea mays
agcttatttatgttgtacttgttgcgtccaggaagttgtgccactattttcaggcacacagggttgtggtggtgacctcctaccgttaaaggccatcctccacaactctaatgccacagacaacatcgctaagtgggcaccgaagcttgctgagttccaactggacttccagcctcgccacgctatcaagagctaggtcctggctgacttcatcgtggag

SEQ ID NO: 7735 - DNA, 395 bp, Zea mays
  unsure (1)..(395): unsure at all n locations
ntagtgttaagtgagagagatatgtgggttcttttgagctcttgcacttggattgctttctttctcattctttcttgagatcaaactcacttgtaattgaggcaagagacaccaatcgtgtggtgatccttgtgggaactttgtgttccaagtgattgagaagaaaagctcactcggttcgagtgaccgtttgagagagggaaagggttgaaagagacccggtctttgtgaccacctcaacgaggagtatgtttgcaagaaccgaatctcggtaaaacaaatccgcgtgtcacactctttattcgcttgcgatttgttttgcgccctctctctcggactcgtttatatttctaacgctaacccgacttgtagttgtgaataactttgtaaatttc

SEQ ID NO: 7736 - DNA, 221 bp, Zea mays
agtttttttcggcaatttccagggcacgtacgtacgccccgggaattcctgggacctccgaagctgccggcaacagccgggagagtctctccgggactacatccggcggttctcgaagcagcgcaccgagctgcccaacatcaccgactcggatgtcatcggcgcgttcctcgccggcaccacctgccgcgacctggtgagcaagttgggtcgcaagaccc

SEQ ID NO: 7737 - DNA, 460 bp, Zea mays
  unsure (1)..(460): unsure at all n locations
ntanaaattgtgaaggttcttaaccagtcaccttctacatataagtcttctacaatagcatcatgcaatctagtccattatccttaaatgtattaatatattgcaatatatcatatacatctctgctcgacaacaatgcctgaatttgctacctcaattccttcggaattagccttccaaactggtgctcttcttgttgatgtgccatgcatcaaggcagcatggcaaacgtgggcaagtcaccgcaccacgggattgtgctccctggcccacagttgttgtttctcgatgtggcgttgtcgtcgatgtcgctgatgttgacaacattacagttgctggtgtatcatgccgtgttagaatgcgctgtcggtgaagggagcacgtaacancagttgttcatgaaccacanaggcatgaacagagtgagctaaaaaattaaatattgacacgaaccaatcaa

SEQ ID NO: 7738 - DNA, 220 bp, Zea mays
ttttttgtatgtctagtagggtggattttcttagagggactgaagacaatcgagcagattacaatggactcagcttcggtcgagaccaatatggttagcctgctgtaccatttatttgatcctcgtactttcccactgttaactgtaattagggtcttatatgcacatatcaactctttgtaagttattctttgaggtcatggatccaagtatatcacct

SEQ ID NO: 7739 - DNA, 433 bp, Zea mays
tatgaagattcttcattccaacatgtgctaatcgtctattctatagccagcccatgttagtcttagcaattaagcaagtgtcgagttcagctctatcaaaatctactaagtatagctgaccctataacactcccttaaatgctattgaatcatcacttcttctagagacagtaacacctacatctgtgaaaagacagttatagcccattgtgcataattgagaaatggaaaacaaattgtcatctaaagaatctacaagaaaaacattggaaattgaatggtcaggagatatagctatattacccaatcctttgaccaaaccttgatttccatccccggatgtgatagctcgttggggatcttggttcttctcatacgaggagaacatctttatctcccctgtcatgtggatggtgcacccgctatcgatgat

SEQ ID NO: 7740 - DNA, 220 bp, Zea mays
tttttgtgaaggttcttcatccccacatgagctaagcggcgatgccacaaccagcccatgctagtcttagcaattaagcatgcatctagaccggcctcctcttttgcaaaatcaactaaatagagtttgccatctaatacacccttaaaagctaatgaaccatcacttcttctaaagacagacacatctacatttgtgaatagacaattatatcccatat

SEQ ID NO: 7741 - DNA, 459 bp, Zea mays
ctaagctgccgtctagacacccttataagctagtgaactatcatatattctaaaaacagacacatctacatttgtaaacaaacagttatatcccatattgcataattgactaacagatagcatattatatccaagagactctaccaaaaacacattagagatagagtgctcatttgagattgcaattttacctaacccttttaccttgccttgattcccatcaccgaatattattgaatattgggaatctttattcttgacgtacgaggtgaacatcttcttcttccacgtcatatggtttgtgcatacgctgtcaataatccaacttgaacccccggatgcataaacctgcaaaggcaaattaggcttgggtcttaagtacccaactcatgttgggtcctgcaaggatagcacaaatatccttatggacccaaatgcaagatttgtctcccctgcatc

SEQ ID NO: 7742 - DNA, 219 bp, Zea mays
agttttaacccctgcgagacctttccccgtttctttctaaccttaacgaatgcgacatcgaatgtcatacttgatgcatatttactttatttgtccccttgtgtggtgtactgtttgtttcctaatttgaatggatgtatgtatgtatgcttgcaatcgcatagagaacgatccggtcgaagagcccgaggaactcgcaggagaagcccctgagcagca

SEQ ID NO: 7743 - DNA, 441 bp, Zea mays
  unsure (1)..(441): unsure at all n locations
ntgattanagtggggttntttatttgggctatgatgtttcttggctanaaccaaatgccaggtgcttctgtaatattcatgatttatcttaccagacgaaggcaactaggaaggagtagtaccataacaactgtgggtgctacagcttcgtgccccgctctgatgcaagatatctcgtgccaacatttctaaagaactggccgggctcttggatgaaacaatggttttatgtgaagaatgatctgagtgagagggaagatgtgcggggcattattcagcgtcccatatggtcacgcttcggcattagaaggccgtcaattgcaattgggaacgaagtgcaagcgtgtttgatggcttttaacactgtgtgcacctacattggtaccaaggatatggtacaagagcatattgcttataaagtgtggccactggtgaatgact

SEQ ID NO: 7744 - DNA, 220 bp, Zea mays
atttttttatgttatatcattcattagcatacatactcattcttttattatatttatatttccaggaccagcattctgatggtgttgcagatgatcatcccaacgattccttattctctccaacataccatcatcacaaggttcgtgatttgaataaataacctaacgaaaggtataaagataataaaattgtctgatttgttgccctgtatatttgttg

SEQ ID NO: 7745 - DNA, 445 bp, Zea mays
  unsure (1)..(445): unsure at all n locations
tgcttactnggtaagatgaccaaggcgcctttcactggtttttctgagaggacgttagatttattggaactcatacatatactgatgtgtgcggaccaatgagtactacagctaggggaggattccaatacttcataaccttcactgatgattttagtaaatatgggtatgtctacttaatgaaacacaagtatgaatccttagaaaagttcaaagagtttcacaatgaagtataaaatcagcgtggcaagaaaattaaagcactgcgatcagatcgtggtggtgaatatctgagtcatgagtttagcaatcatctaaagagttgtggaattgttccacagcttacgccgcctggaacgcctcataggaatggcgtgtctgagcgacgtaatcggactttattggatatggttcgatcaatgatgagccagtcagacctactttg

SEQ ID NO: 7746 - DNA, 220 bp, Zea mays
agttttacaacgaggaaatgacgctcatcatcaagagcttctgccaaatcctcaagcataggaggggtaaggactacaaactccgctccaaaagggtgtgctacaaatgtggtaagcccggtcattttattgctaaatgtccaatgtctagtgaaagtgacagggacgacgacaagaaggggaagaagaagaagaagaggtactacaagaagaagggcag

SEQ ID NO: 7747 - DNA, 457 bp, Zea mays
ctccgctataagaatttatccaacatgggcgagtctttgtgctatagacaacccatgttagtcttagcaattaagcaagtgtcgagttcagctttatcaaaatctaccaagtatagctgaccctctaacactcccttaaatgctattgaatcatcacttcttctaaagacagtgacacctacatcagtaaaaagacagttgtagcccatttgacataattgcgaaacagaaatcaaattgtagtctaaagaatctacaagaaaaacattggaaatggaatggtcaggtgaaatagcaattttacccaaacctttgaccaaaccttggtttccatccccgaatgtgatagctcgttggggatcttgcgttttctcatatgaggagaacattttcttcttccctgtcatatggtttgtgcacccgctgtcgattatccaacttgagcccccggatgcat

SEQ ID NO: 7748 - DNA, 218 bp, Zea mays
ttgcttcggctccatctatgttatggatcgcctttgaatctgtccaactccctttagcccttctggcagcctcttgacttccatggatagcaatgggcccttgctccaaaggtatcttcatgcatacgtacgctggatgaagtatggcttcgaaggcattaagtgtctctcgaccaatgattgcattgtatgtgtaatccatgtcaacaatgtcaaag

SEQ ID NO: 7749 - DNA, 358 bp, Zea mays
gcttgccaggcttaaaccgaggacccccgccaccggttaatcgcaatcgtgctcgccggagttcagaaccccaccggcgcacgtggaccgggtaagtcactgcgccattttccgattcaatgcacagatagccgtggagctcatcgtgccacttgattgaactagatcgccgtggtttagccggaacacccgctcccgacgagatcacccgcctgcgcaagtggaccggacgattccggccacctccgccgtcgagccgtacaacgttgtgaccgccaggacctcccggagccaaccccgtccctcgccggacctttctcggcgacggtaagccgtgccgcccttttcttttccgcgg

SEQ ID NO: 7750 - DNA, 218 bp, Zea mays
agcttgaaaaatatctggatatggttcgaagaatcgaagcttccttcgaagggttttctgtcaagaatatccctcgaggacaaaatgagcatgctgatctgctagctaaatcagcagcacaggggctgcctttaccttcggatgtatttttcgaaacaataaaagcaccttcggtggaacttcttgaaagagcagttcttaatatatctcctgttttt

SEQ ID NO: 7751 - DNA, 386 bp, Zea mays
tagtaatggcagggtttgtactacgcttacgggtacttttccctaattgatgtaacccttgtgaacttttgagatctgtgggaagtttgcaaccatgttatcttcattcgaacctaatattatgattatggcaattttctttccataagagataatagcatgttgttcgagattgtgaattgggatgacaatggcggcaatctctgttttcagatggcagctatgcagcatcgcgggcagaacgagcaagtttccccgccacctcctccagcttccacagtgcaggagctgatggcccagcagaacgagattctgcgacagctcttgcagcgccagccccaccctcaacagtatggtggaggccagccatagcaacctccagcagc

SEQ ID NO: 7752 - DNA, 221 bp, Zea mays
agctttatcaatttcaacactcttttttggagttgtgcttgaagacttaattgtctccaagacatctagtacatttaccattcttttcctttttggggtcaccattggagccttttggatttttgctgcttcaatatttattgcaggacttaaagtttctgaggttttttccttggtcagatttttcgcttcttccattttttctgtcgatggtgcttcgg

SEQ ID NO: 7753 - DNA, 419 bp, Zea mays
actagcttctcatccgcgtaacgtgaaaccgctgtattcttctatgaagttttctgagttctccgttttgattaccacatcatctacgtaggcttccacacgcttgccccaatgatcggctaagcatgtttgaatagctctctgataagtcgccccagcgtttttgaggccgaacgacatggaggtataacagaaagcaccaaacggagtgatgaacgctgttttttcctcgtcttcctttgccaaactaatctgatggtatccggaatagcaatccaggaaagacaacacagaacatccagcggtggagtccaccacctggtctatcctcgggagcccgaagggatcctttggacaatgtttgttgagatcagtatagtcgacgcacatgcgccaatccactttattctttttgagta

SEQ ID NO: 7754 - DNA, 221 bp, Zea mays
actttttttcttcctcctcatcctcatttgtgcttccgctatcattttcattagccacacaacacatgtgggaatcgaaatgggaagacaaaccttttggagagatggattcatcgtttggtctccatcgtccattttctccttcttccttgcaagggttagtatcacaaaaactaaaggaagtagaggcatcaaatgaactattatgtttggactcatca

SEQ ID NO: 7755 - DNA, 406 bp, Zea mays
  unsure (1)..(406): unsure at all n locations
acaaaactccccctcaatgaaatactnctnttagtgttcaagagagttttaagatatcaattttgaaaatactacttttttccccttttgaacacaataagacaccacaccgcccctattctttgagaaactaagtttttgaattggtggtggtgagggtattttggtttgggctcatactctctccccctttggcatgaatcgccaaaaacggaatcattagagcccttgttactttcacttgccctttggcaaataatatatgagtgaagattgtaccatataggagaantatgcggaatatcgactaagagtggataataacgaacgagttgagtggaagcgtcgtctttggcgaataatacatttnccttttaatcctatgactaagcatgataatatactt

SEQ ID NO: 7756 - DNA, 221 bp, Zea mays
agcttgttatgattcttcatcccaacatgggctattcggcggagccagatccaacccatattaggcataacaatcaagcaagtgtcgagtacacctttatcaaaatctaccaagtataactgaccctctaacactcccttaaatgctattgaatcatcacttcttctaaagacagtgacacctacattaataaaaaaacaggtgtagcccattcgacatag

SEQ ID NO: 7757 - DNA, 437 bp, Zea mays
  unsure (1)..(437): unsure at all n locations
aaaaactaagctttgaacaaaatgcggcgacggcgagcatacctcgtatatgttttgatacatgttgtagaaacaaaacaagcttgctgtgagtcaagtgagtgaacaagacagtaaacgcacctcangcttgcaggccgtgcaaagcgcgcctagggagttggcgagcgcggaagcgttctgcgcatcaccgcggctgctgtggccgctctacggcggcaagacgtggaacacggtgaggaagtctcccttgttggccacgtgggtgagcgcccacaacatggcgtgcttggcgccggagctctggtccaccaccaccattacccgcttacgccccggcgcaaactcatgcgccctgcagaacccgccgccgcggtggcggtgttcccgcgccctgttcttctttcgcgacccgcgcctgcttgcgatgtcggtga

SEQ ID NO: 7758 - DNA, 220 bp, Zea mays
agcttgacaaggcatcagagtgtttcctcaaccttgctggtccagctctagagaacctggctgcaagctgcccttggccaagcatggcaatcgttgcagcactgtggacccagaaggtgaagcgatggagcgatttcctaatattttcagcttcgcgcactgtgttccaccacaacaacgatgcagtcgtccagctcctccgaagttgcttcgccgctac

SEQ ID NO: 7759 - DNA, 323 bp, Zea mays
tatctacgactggcctgtactatcttaaggggcgagtcatagttgacggatatcggcacaatatggtcatatcgatatgggaacacagacatgatgatcgtcaatcgcagaaacgcatctgtgcatcagatatagtggtggaaatactcatggacacgtcctgaaaatcacgcactacatactaaccaccaacccttattcgtagatacatgggatagcatgagaacatcctacgctgtgtgtattcttcaagaaaaggatagccaggagatatgtaatcttgatgaaatactgctacagtaccgcttagactaatcaattat

SEQ ID NO: 7760 - DNA, 222 bp, Zea mays
agcttttacattgcttccctgttggaaaccaatgccatccttaatgctagggcgtctcccactatagagcatgcatctaggaaatttaaaattcccattctttatctcatgctcattaattttagcagtaagttgagctatgtgatcattttgttgtttaattaaagcaaggtgatcatgaatagcaccaacattaatgtctctacatctagtacaaattgt

SEQ ID NO: 7761 - DNA, 398 bp, Zea mays
  unsure (1)..(398): unsure at all n locations
tctcctgcacaagtgctgcacttaccgctgagtgcgattctgtcacatataacaacaaaggagcccctggcgttggtggagttaatgttgttaaatctatcaaatattgcttcagttcttcgaaggctttttgttggcttggtccccattgaaagacttcggctgatttcagcacttcgaagaatggtaaatttctctctgctgatctgaatatgaatctattgagagatgccagcctccctgtcaatctttgggcccccttttttgtagttggtggctccattcgaagtatagcttcaattttacttggattagcttcaattccctttgttgaaaccaagcatccaagaaatttccccttctttactccgaagacacatttntctggattcaacttt

SEQ ID NO: 7762 - DNA, 220 bp, Zea mays
tttttttggaaaccaatactctttgacagagtactgataatcttcgctccggttcggtctcggagacagcctaagctttcgtcgtcaacaccgccaaagagtagcgcccctggttcatatccacaggatatggcatagtctctcaactcttctttctcagccttcgacaattcttgtccaattaagttttgaaaattaaaattttcttcttccgaagcat

SEQ ID NO: 7763 - DNA, 450 bp, Zea mays
tagatgttctaagctgtccatggttaggataaacttatatgttagctcataacctgtgtttgggttgggatagaaattggatcactttcaaattagttcctcctaacatccaacaacctagcatggtctattttttggatctctgtacatacattggatccattatgtgttcttgttccaaatttcctcgaattaattatgtggatattttattctggttgataatgcagttcatgtgcatgttagcatatagttctctgtgggtcttattatttagttggcattatgatttttggatctctatacacacatttagatcggtagtattttgagaaatcttatttacattgtactaaatataatgctctcataaaatacattggtagtacatgatgttagtttagtgtcacttttcagagtcaagttcagtcatctacctctcgttagata

SEQ ID NO: 7764 - DNA, 219 bp, Zea mays
attttttataccaactgtaacaccccagaatgctactaaactacacctctaacattcgtatataaaatttcgacagcatctcctttgaaaattacataaacggggaagcgacaaagtataaatagatatcatgataagaaaacataatcgacattaataatctcctagcaatgggaagacaaacataacagcatgaactaaattaacaagtgcgcacaa

SEQ ID NO: 7765 - DNA, 383 bp, Zea mays
  unsure (1)..(383): unsure at all n locations
tgtgtangctcacccaccggcttcgctggcgtctatatttctccataagccagagctccatgttgttttcatccacattttataccaaaacagatcgacgggcccttgtggctacatgtcaagcacaagagcacgcgtggagcatgggtcgaaagcgaaagggacaatgtgccgttgatttagaatctagcgttcttacctgttaaacaccataaccagggtgtcaaagttcgctgggtcctccaagaaggccttgagctcggcggcgtggcgtgcagatgggaaccggacggtcggggctcgcgtcataccgtccttgagcacgatgctgggttgcctcatgaacatcactggtttctgttcggcatactacatatagaata

SEQ ID NO: 7766 - DNA, 220 bp, Zea mays
ttcttgcaccacatgttttgtttttgcaaattcttttgtaaattcttttcaaggtccttttgcaagtagtcaaaggtaaatgaataagatttttgaaaaacattttcaagatttgaaatcttctccccctgtttcaaatgcttttcctttgactaaacaaaactccccctcaataaaattctcctcttagtgttcaagagggttttaagacaccaatttg

SEQ ID NO: 7767 - DNA, 353 bp, Zea mays
ttactgttatgttgttatgtcgtacggtctgaaaaacttcttgcctacattagtgccggcgatgagtaagactttctgggacctgattatggacaaagtggaagtctacgtcgatgacatcatggtcaagactaagagagggtcgaccctagtggaagacttaaccctggtcttcgacaagctgcgggcaacccgcacgaagctgaacccggagaaatgcgtttttggtgtctccgttgggaagttgctggggttcctggtttcatactggggcattgaagcgaacctggagaagatcaaagcgatcgaggcaatgaggcccccggcccgagtcaatgacgtctagaaactta

SEQ ID NO: 7768 - DNA, 218 bp, Zea mays
atcttttatcctcattgatatgtgtttttgtctatgtttatctgaattacacattcatttttctactttcagttatttatatatcgtcaatataatattattgttatgacgatattttgctacacggattttgcaaatcatagtgatgtttgtcgttatgtatctatgtttcatacatattttttacttccgtagcaacgcacgggcacgtacctagc

SEQ ID NO: 7769 - DNA, 412 bp, Zea mays
  unsure (1)..(412): unsure at all n locations
ctttaggttntatccccttgcgttaggtactatcccctttatttcctatttangggtaagttccctatccagggttctatttgcaaaatgctataacaatacaacttgtttgaaattattacctagtgaatgcattctaagtgtgtcaaacatatgcaatgccaatgtttatgatgccatgctcaagttttagttgcaataacaccaggggtgttacatccttccccccataaaagaatctcgtcccgagattaaaagtcctatggtaagtaatggaaaaggaaatgtgtcacatttttatttccttatttctggtacaaggcaagggtggtgtgggggtcactctttattacaaccaataatcacactttacaaattacatgaggctaaatagcctgtgaaattcttatct

SEQ ID NO: 7770 - DNA, 218 bp, Zea mays
tttttttcaattccgactcagcttgctgctacagcacatttggttcttttgccgagttagtatcattgtttggttgcctataaaacttgccgtccttgctgcttgacttttctggcaaagtacatttgtaatgttgcattcatgtatagaaactaatatattacaatggtacgatgaaatgactgatacttgcataaaattcaaaaacatatcaagta

SEQ ID NO: 7771 - DNA, 390 bp, Zea mays
  unsure (1)..(390): unsure at all n locations
tctaaagggagagcacattntatgactaaccaatgttcattttgagaaagacaggatttgtagcgcatgccaagcagggaagcaagttggcactcatcatccacacaagaacataatgacgactgacaggccactggagctcctacacatggatctattcggcccgatcgcttacataagcatcggcaggagtaagtactgtctagttattgtggatgattattctcgcttcacttgggtattctttttacaggaaaaatctcaaacccaagagactttaaaaggattcttgagacgggctcaaaatgagttcggcttaaggatcaagaaaataagaagcgacaatgggacggagttcaagaactctcaaattgaaagcttccttgagga

SEQ ID NO: 7772 - DNA, 215 bp, Zea mays
ttctttttgtagcgacgatagtactcagcagcagaaagatcgccatgagtgaaggagcggaaggcttggtcggcgtagagggtgcgcgtcgtgcggttcccgagaaattgggactcgatggcaagccacaggacgtgagtagaggcgccacgctcggagatcgtatcggcgaggttgtcggtgatggtgccgttgatccaagtcagaataacgac

SEQ ID NO: 7773 - DNA, 418 bp, Zea mays
  unsure (1)..(418): unsure at all n locations
ctggacaatattctgcgatggttcctggggaaccttctgtgcatgtgcagctgccgttttaattgcaccttccaaagtcagaacatgctacgcagtgaaacttgattttagttgtacaaataatattgctgaatacgaagctttgcttttgggtcttcggaagttgaaagcaatggggataagaagggcggtcctcaaaactgattcccaagttattttacgccatgttgacaaaagttgcaaagcaagagatccgaagcttgaaaaatatttggatacagattgaagacttgaagcctccttcgaagggttttctgttaagaantatttannaggagaaaatgaanangttgatnttctagcgcaagtagngggacaggggctgccattacctttggaagttttttttgaaacaata

SEQ ID NO: 7774 - DNA, 404 bp, Zea mays
tcacacctctggactaactcggctgcatcactctttgttgttggctagtagaaatcagacctgaagaccttcccaactagagtcctggatgctacgtgtatcctgcattgcccggcgtggatctcatctagtagttgcttcccagtggccgaaagaatgcacttcatgaggactcctgttgcgccccttctgtacagtgcttccccaatgagagtgtagtgagctgactgccttgcgatgcgttctgctgcagttatgtcatccggcacctcttcattctttatatatctgatgattggctcccattagtcatcagaatctgactctggctggctcagaacattgcactcttctgcccgatctaaggaaatacttgggcatggtacttcttggacgaaaacccc

SEQ ID NO: 7775 - DNA, 220 bp, Zea mays
agttttattgcgcatagcttgcggatgatcttttccttcgtcacaatctccttccgtcccactcaaacttcgtcttgaccatactcttatatactcgtaatccaattccgaagatacctgttcacacatttcacttggaaaacattgtcaaatcatgtttttgaggaccttcagaagccgaaggcccccaacagtagcccctcgcaatattaatttgctg

SEQ ID NO: 7776 - DNA, 462 bp, Zea mays
  unsure (1)..(462): unsure at all n locations
accttaaatctaagctagggctttactntcactgtgattatgcacaatgcggcttttttcttactagtgnnatataacaatcatgaatgttggttgatgcttcttgggtttcccctaaatatctggacacacgagcacattcataatgctattgggtcatatggtcgggtgctcatgtgggatcctgatatttctaatgctactagatagcttgttaaagcaagggtgacatctctgcacgaagtcccccatattattgtattttcagtggctgaaggatatcatggggtatactggactgttcagtgcgacatatttcaacagttcatgcttggtgcctagcctcaggacgaagagactgtgctctcatatcctcataatggtcattaacattctgaggaatattatggattgggcagcttgtgccaactttcatttgacctaacatacctcccatggtga

SEQ ID NO: 7777 - DNA, 56 bp, Zea mays
aaaaaagggcagacaaaccagaaaaacaaaaaaaaacccagaagcagcgcaacccc

SEQ ID NO: 7778 - DNA, 219 bp, Zea mays
agctttttaaaccatctggacccactccatcgcgctacagtcagcagagtcagagctcccttcaggcaccctctgttgcaagcaaccaactaccagtaaatgcctgttggcactgcggagaccccagtcacttcaagaataactgccctcagttgaaggcacccggaccgacctactccaactcagtgaatggcccccaagattccctcgacacctacc

SEQ ID NO: 7779 - DNA, 445 bp, Zea mays
  unsure (1)..(445): unsure at all n locations
ttgtgtgctatgcttactaaaatgttcacgagctcttggtgttgttataaatataatcgcataagttcgtatgaccttgctaactagatatgtgtgggagagctctttcactaacttggcaccttagttgcttcaattagaatcttttgtgacgtgtntgttatagttagaggagtgtagtcttggctaaaacaaaatagtattaattcaatatttatttgtgttagccaacgtaattagttttagaaaggactattcacccacccccccctctagtccaccatctcgaccctacaacggtccggccatatggccaaactatccgctaatatattcagacggtctagcactatacacagacggtccgaatgggtcgtatatggttcgcgcattacgtggcagctcgagcgcggtccgcactcccgtgcgtatgtgtgtacaccct

SEQ ID NO: 7780 - DNA, 222 bp, Zea mays
agtttcttatccagggtcctatttgtaaaacattaaaacaatacaacttgtttgaaatttttgcctagtgaatgcactctaggtgtgtcaaacatatgcaatgccaatgcttatgatgtcatgctcaagttttagttatagtaacaccaggggtgttacaccctagctcatgctttccaaaatttggcaactttgcaattgacatgccaccaaactgtccta

SEQ ID NO: 7781 - DNA, 93 bp, Zea mays
gacctaacaaactcagctgagctaatatgactccataccaatgtatgtactatgttttctacatctggttaaaatagatgtttagggggtgaa

SEQ ID NO: 7782 - DNA, 219 bp, Zea mays
ttttttttatcgaaaaggcgtaccgtaatgtgtgctgattttcatcaatcaatgtgttctgaattgagttgctacacatactagctgagctgcttattattttcgggttagatgttgaccagatatgcattcttttcctaggtataaatatgaaaatgagcaggttattgatgctgcttcaactgatgcaagctcacccttaccatatcaggtgtatgg

SEQ ID NO: 7783 - DNA, 315 bp, Zea mays
acatgacaccagaaggtgcaacacaacaagcattgaagaattaggattattgctgagcatatcagtacaagagacctggttcaggagtttttggctttcaaagtttttcctaatttgatagaatgggacatgccgaagctgaagggggagaataaagaaggtgaacttgtgcgtttaccttactattttcagtttaagagatactttaaaacaccttgtcaagagtggctggatacaattgaagtaatgtgtaatgaaatacttggtaactactcccataaagaagatcagttgatgactgcagccttcggcacc

SEQ ID NO: 7784 - DNA, 221 bp, Zea mays
tatctatataaccaggggctaacctaagtgatgatcatgatgggagggataccctagccttcatgtatcttcacccatgaaaaaggttctaaaaccctaatttcccctcttgagccattaaacctcaaacattggattaaagggaaaattatgcaaatgaccaattcatgaattgaaccctttaccaaagttgaagtacattaataaatctacaaaatgta

SEQ ID NO: 7785 - DNA, 433 bp, Zea mays
tcacaaagacatccatgcttcataaagacgttcatgctttttataaacgtccaagcttcgtaaagacatccatgcttcataaacaagggatcccttcttttgaacagagctgatgaaactgtatttctcagcttactatgtgccttagcatattttcatttttaaagcattctccgaagatcgacttcgtattcaattcgtgtctttagtgcaatatgatgtatgatgtgatcctatgcggcatgatgtaatgacatgatgcaaaatatcatgctaatgccgaagacacgcactcacacaccaacacagtctctgcgtccccttaggaacgatcaatgtctcattgtcgtttatattacggcttcactgcttaattttcggtgtaagttctgcatccacttaggaacgtctttgaccttcttcgcctttattt

SEQ ID NO: 7786 - DNA, 220 bp, Zea mays
tttttttttcagatggcgagaaggtctggtggcaagagtttgatgtaactccgtggcaactggaaggttggtctctagatacaaccgcgcggcccatcctcacgtgtagccgcgcaagcccgcgtccgcaaatcagctcgcgccctgaccacttgggaccacctgacagccgaccgcgcgctcactgcctggtagggctcatctgtcatccctctcctcc

SEQ ID NO: 7787 - DNA, 401 bp, Zea mays
  unsure (1)..(401): unsure at all n locations
tgaagccatgtgtagtagcataggccaataatatactatttgttttatgcctagctacaggtgcataggtttcaccgaagtccaaaccttcgacttgggagtatcctttggccataagtcgagctttgttccttgtcaccacaccatgctcgtcttgtttgttgcggaaaacccacttggttcctacaacattatgattaagacgtggaactaagtgccatacctcattccgagtgaagttgttgagctcctcttgcatcgccaccacccaatccgaatcttgtagtgcttcctctaccctgtgtggctcaatagaagaaacaaaagagtaatgctcataaaaatgtgcaacacgagatctagntggtaccctcttatgaatgatcccgaggatggtgtcc

SEQ ID NO: 7788 - DNA, 219 bp, Zea mays
ttttttttttgaaaaaggaagggccgactcttggtgcaggtgtgcaaactcaacttaacttcgctgcggatggcactataagtacatgtgaaagtcgcctagaggggggtgaatagggcgaaactaaaatttacaaatataaacacaactacaagccgggttagcgttagaaatgtaatcgagtccgagagagggcgtgaaaacaaatcgcaagcaaat

SEQ ID NO: 7789 - DNA, 408 bp, Zea mays
cggtggccgatggaaaacaataatccttgagatcttggttgtttaactgttcgccgccgacgactgttagctcggacggtactccgaagcggcaaacgatgttctgccagaagaattcttgggcagtctttgatgtgattgtggaaacagccctcgcttcaatccatttagtgaagtattcgacagccacgaaggcgaacttaaggttcccctgagcggtgggcaggggcccgacgatgtccaggccccagcgctggagaggccatgtatgggcaatcagctttgtatattgcgaggcgttgcctgaccgatgggagaacttctggcatgcttcgcatgacctcgtgacccgaattgcggcgcagatcattgcgggccagtaaaacccttgacggatcaccttggcag

SEQ ID NO: 7790 - DNA, 216 bp, Zea mays
tttttttctaaagggagaacacattttaggactaacaaatgttcattttgagaaagacaggatttgtagcgcatgccaagcaggaaagcaagttggtgccaatcatccacacaagaacatcatgacgaccgacaggccgcttgagctactccacatggatctattcggcccgattgcttacatatgcatcggcgggagtaagtattgtcttgtaat

SEQ ID NO: 7791 - DNA, 360 bp, Zea mays
cttctgatgctgtgacacggctgatcatgaatgttgagtatctttctaatcattctgcgggcttgggatatatggaaacattgtaacagatgtgttattgatcatttgcctccaaacctaaatctgcttcttctgcttgctgatgatgaaaccaggaagtgggttgtggctggggccaacggattgtctcaccttgctgctcctctgccagaattctaagtgctgctggcttttctctctaaggccttgatcggatatttcaaatccatgtgtatcggtgtgtattgcgatggattgggatgtattttgacttgctgtggaattcaaccgactcaattctcaccccctcccatggattaa

SEQ ID NO: 7792 - DNA, 413 bp, Zea mays
  unsure (1)..(413): unsure at all n locations
agcacaaactctacttattatatatcatgaaatagcttaaaagagagtgcattagtaacacatgcaatagtttcctatttagcaacctctagtatatgaatgacaagaaggctactaaaataaggaaacctcatgatatgaactaaattacccttacaagcattatgcataacatcaattaaaaaaagatgacagtagcatgattatttaattaagtttatagggcaactctaattcataacatggtgagtgattaatggagaagactctaaaccaatttaaacaagaatgaatacatcacatagtattggttcgatcctttttgaatgatgaatggcacactccattngggaaacacattctcatgttgtgagactacatatacacttatatagaaacattagcctcacaac

SEQ ID NO: 7793 - DNA, 223 bp, Zea mays
agtctttttttaactcataattatgaaagggtaggtttatttgcatgaaatgtggtgaacaatgatagcctcattgttgcagcctctgttctcaatgacattatatgagtagcctatggcagttggcaatagtttgtttcatgctacagcacaataccatccttacccttaccagtactggctagatggtgaaactaaaagtgtatgtattactagaatggac

SEQ ID NO: 7794 - DNA, 453 bp, Zea mays
  unsure (1)..(453): unsure at all n locations
cttgtagtgttgcggttctgaagtactactggatttcagttcttattaagtactatactggatttctgttcgaagatctgggattnttttattcacctcaataaagacgacggaaaattcaagaaatggctctcgcattgctgctttatttggtctgcgaaattcggaagataaattcgtgattatagaaatgagattaaatggtttgttttgggaaaaacattgttgtagacacaaacacacaacatacccggattataatatgtctatattgtataatgtaagttatttaaactaatatttagttcaaactaagttaaaggtcattataatctacttaaattatataatccaacttattntgaactagatggtagtttaaaatacattagattatatcgtaacatgatctgctatgcgacaaagtatgtgaatgacgggctcttcacttag

SEQ ID NO: 7795 - DNA, 221 bp, Zea mays
agctttttggcgtctattggttgtcgacttggtgtagactcctccttcttttcttccgtcgccttgaatgcaacgggttgagcttcggatgggtcgccaagctcgttgattttcctcgagccttctatcatgcactcaaaacttacaaaatgcccgataacttcctcgggggtcattttagtatatctaggattaccacgaatcaattgaacttgagtggg

SEQ ID NO: 7796 - DNA, 429 bp, Zea mays
  unsure (1)..(429): unsure at all n locations
taagcagaataaaaccaccataaagcanatctggggggttggtatcttctctttataacttgatgtttatgagtgtaaaccaacagaccaggttcatgagggcggacctcaccgggctggcgcacatatatgtgctacctagttacaaaggaagaaaactgagttccccagctatgcttatatgggaagaacttacggaggtgctctatgttccagggattgggcagaggctctccttcatctgtggcgaggcggacacacccgggtcggcatacttacgtcaccttgaagggtccttcccagctgggggagagtttatggagcccttctcggttcaatactcgccttaggactaggtccccgaccctgagctccctactatgcacgaaccgttggtggtagcgcctgagcgcttggttgtaccgtgca

SEQ ID NO: 7797 - DNA, 237 bp, Zea mays
acctgtctgcatgcaagtcttttttttatggatagattaccgcccactcaatgcgatgactatcaaaaacaagtatcctttgcttcgtattgatgttcttttcgatcaattggtcggagccaaagtgttttccaaaatagacattcgctcctgctatcatcaaatcaagatatgagcaagtgatattccaaagactgccttctcaaccagatatgggttgtatgagtatttggtgat

SEQ ID NO: 7798 - DNA, 221 bp, Zea mays
agctttttggctggctagggttagaaacttggagttggagagtgactgaccgccaagagctcgagaggccgagaccaagagtccaagaccgcaggggcagggcgcaagctgttgatcgctaggatgttggattggatttggcctctggtcgtagcctcctggcctcctaggccataggcggcactgtggcaggtcgcttggacttggacgttggcctgctg

SEQ ID NO: 7799 - DNA, 446 bp, Zea mays
gggtctggtgaacaaatcccttgcagtgatcttgcccaaattcttttatatatgctcccaatcggcgcttgaacaggggcagaggcaacgggaacacgtgttcgaccgcggctgacacccctggttcacgcccgttcgcgcaccgcgccttcccagtgcacgcccgcgcgcacacgccggtccacgaccgtccgtgcaccgcgccgtgcctataaagcctccccaggcgcgccccacttcgccccgcactcaccctcaccggtcagccaccgttccttagctccggcgagcgtattttcgcccgccattgccgccagagcttcggtcgccgtggccagctcactccagccaccctccagcccaaccagtgctttggctagctacgccagtagcccgtgaagcttgccaagccctcggacccgaccggacttcaccggaggcccgag

SEQ ID NO: 7800 - DNA, 219 bp, Zea mays
  unsure (1)..(219): unsure at all n locations
agtatcntttanaagatggatgaatacattcgagctgacaacaatatctgccatagaagggaggaagcgtacatgtattttgagatgactaggggcttcggaggaagacttcaccccaggcatgtcagaacgatccacaatcccaacacaaatgatgacaaggccaatcatactcagagcagccagcaaagctcacagtcttcgggaatgcagcaaact

SEQ ID NO: 7801 - DNA, 249 bp, Zea mays
  unsure (1)..(249): unsure at all n locations
gctaactaatgccgangacatcacaggttaaagctccaaacacgaacatcttattgccgctttacacgaaatgtttgccaaatattatgcatgctggtctcaagttaaatccagaaaagtgtgattatagagtaatgaagggcatgctatatggctgtctggatcaacaaagggtgttgaagctaatccaagatagatcgacgctataccttcgatgagcgcctgcctagttcaaagaatggggctcaa

SEQ ID NO: 7802 - DNA, 216 bp, Zea mays
tttttttgtcttgactatgaaggggccctcccacttgggctccagcttgcccctggactccgtccgagctgttcggacgagtacgaggtccccttagctgaactcccttgggatgactgtgtggtcgcgccatgctttggtctgggcttggtatttgtttagggcttgtagggcgaagactcggtctccgtcaatgagatcctttgaagttggctc

SEQ ID NO: 7803 - DNA, 256 bp, Zea mays
tttagaaagaactcgaccgtatggtgcataagtaccgctcttacgacacttatattatagaagaagacactcacgtggccggataaaacgacatgaccccctggcccacccatatacaacgacactgcggcctgtgtgagaacgaccacgaataaggccaggccttagaccgtgcattggcgtgggacagacgatagagattttttaaccacaacctaaaattgttcccaggtgagtcaacccaggatctgtgagt

SEQ ID NO: 7804 - DNA, 219 bp, Zea mays
ttttttttagtttaagcgtatacatcttaaatcttcttcgaaggtattttctctagcatagttagaaggaatgataatcttgtctaaaatttgttctaattgtggatcaatggttctaaaagcatttatcaccctagtagaccatgaaacataattagaacaaccaagaagtaatatctcaagagttacctccttgatctcctgggtcttcttgttctt

SEQ ID NO: 7805 - DNA, 436 bp, Zea mays
  unsure (1)..(436): unsure at all n locations
ntatcaaatggacgtgaagagtgccttcctcaactgactaatcaaggaggaggactatgttgagcaacctcccggctttgaagatagtgagtatcctaaccatgtctataggctctctaaggcgctttatgggctcaagcaagccccaagagcgtggtatgaatgccttacagattaccttattgctaatggcttcaaagtcggcaaggccgatcctactttattcactaagactcttgacaatgatttgtatgtatgccaaatttatgttgatgatatcatatttgggtctactgacgaatctacatgtgaagaatttagtaggatcatgacacaaaaattcgagatgtcaatgatgggggagttgaagtattttctaggattccaagtcaagcaactccaagaaggcaccttcattagtccaacgaagtatact

SEQ ID NO: 7806 - DNA, 220 bp, Zea mays
ttctatttaaaggagaacacattttgggactaacgaatgttcattttgagaaagacatgatttgtagcgcatgtcaggcagggaagcaagttggtgttcatcatccacacaagaacattatgacgactgacaggccactcgagctcctacacatggacctattcggcccgatagcttacataagcatcggcgggagtaagtactgtctagttattgggga

SEQ ID NO: 7807 - DNA, 380 bp, Zea mays
acagggcttgtagcgcatgacaagcatgaaagcaagttggcgcccatcattcacacaagaacatcatgacgaccgatatgccgcttgagctactccacatggatctattcggcacgatagcttacataagcatcgctgggagtaagtactatctagttattgtggatgattattctcgcttcacttgggtgttctttttgcaggaaaaatctcataacccagagacctttaaaggattcttgagacaggctcaaaataagttcggattaaggatcaagaaaataataagcgatattgggactgagttcaagaactctcatatctaaggctctttgatgaagagggcataagcatgagttttcttcttctacacaccttaa

SEQ ID NO: 7808 - DNA, 350 bp, Zea mays
cgagcaatgctcaccgcatcaccaggaagctatctgtggttttgtttctaacggacgacgaccggagaggggtccgccacagctgttgctctcaggcggcactggcggtctgtcgtgaggttccccgaggcaaaggatggctccggcaagacaagccgcgtactgaggacgcaatggggaatgcaaccgagcgctggggcgggttatatatgcacggtctcagccggggcgtatgtattaccgattggcgcgacactggcactcagtgcgctcgcgggcgtgtcctggctagcttatacacgtctaacacgtggcgcgtagtctatgcccgagtcttacctctgctgaac

SEQ ID NO: 7809 - DNA, 219 bp, Zea mays
tttatttttctctccgcttatacattctataacaccttcagggtccgctcggataaagttatcttcggtggaataagcgcccacgttggcgaagctagactttatcttcttcacgcagcccagggattttttgaagcatctttccttggatgcgcgaagttcttcaactgttttttctaaatagtttttccaatattcactaatatcttggttggcctc

SEQ ID NO: 7810 - DNA, 280 bp, Zea mays
ggaaggactatatatccgtctccaagagggttaactatacgtgattgaaatacgttacacataattgtgcatggccctattcaatagactttgacatggtccacgacaattaaggataaaagaacatggtaaatataatattcttccataacaatggtgatgtggcgcacatgctgcgggaatggtgctcctacgagaccttcactgactcctcctatgaggacggcgcaacatcttcatatagtagggcctactctttccaagcgtagccacaaatgcc

SEQ ID NO: 7811 - DNA, 219 bp, Zea mays
ttttttgtacagatagcaacacaacatgctaacacattgataagagtgctggaaatagcaagccagatgtcaaacctgtgagttatataagaaatactacaaataccatgactaatcgggaattatactttcatgatggtagagggcaattcaagcaagaaaacatctccccttttccaagtattcttagttcgagcagaagtaacccataactaaagt

SEQ ID NO: 7812 - DNA, 277 bp, Zea mays
gatcaacataaccctcaacgtctgccacgatgtgatagtacctggccgaaaggaggagtaccacgattgtgcaacatacttgacagccatgacgaaagactcggccatgactgcagaatagccaccataagaagaatatgacgccacgacactcaacagacactgctactgatctgaatggaccgcgtacatggggagaagaggtggcatgtaagacagaggccaacgagtaaccagcagttctactgacagacgagaagcaatcacaaaagcaaaa

SEQ ID NO: 7813 - DNA, 217 bp, Zea mays
agcttttcattgaacgacgtaatgtgctaatcaattctgtgttgcctgctacttcttcggttgcattaacctcagatatttggtctggtaatgctaaggaggactatattagtgttgtgtgtcattatgttaatgctgattgggaattacagaaaagggtcattggtcttaggcttattgaggttagacatactggtcaaaatattgctgaaaggat

SEQ ID NO: 7814 - DNA, 435 bp, Zea mays
  unsure (1)..(435): unsure at all n locations
ntagtaggatgtgtattagcaacttgctttccagcttgacatgcactgcatggcttgtctttttcaaacaccacatcctttaatcctctaaccatatctttctttaataccttcttgagtgtgctcatcccaacatgtgcaagcctcctatgccacagccatccaagagaagctntggtgaagaggcaagttcttaagtctgcgtcttctgaagtgaaatccactaagtagaggttgttgtatctaaatcccttgaataccattgattcatcatccatctttgttacaataacctctgttggagtgaataagcattgaagtccaagatcacagagttgacccactgataataaattgaagctcaaaggtgcaactaagagaacatttgatattgccaccttgccaagtccttgcacttttccttttgaattgtct

SEQ ID NO: 7815 - DNA, 221 bp, Zea mays
agcttgtcttacaactggcaatctcgtagccttcgaagtactttcctcaaatgttcctcatgctcttgctcattttgggaatatataagaatatcatcaatgaacatcactacgaacttgtcgaggtagtccatgaacacactgttcatgagatacatgaagtacgctggcacattcgtcaatccgaatgacataaccatgaactcatatagtccatactt

SEQ ID NO: 7816 - DNA, 457 bp, Zea mays
  unsure (1)..(457): unsure at all n locations
tganacttcattgaaggaaaaagacagcttgttgcattctgtcgaagcttctctcgccgaagctcgacctcaaaatgaaaaattaagcaaagtgttggaagaagctcgaacacttttggaaaggaactcggatcgcttcaatggcaagtccgaagcgctaaacgcaaccatcaagaccgaagttgaaaagaatcttaaactgaacaaaacaatcaagactcttcaggataaatgcttcagctttgctactcaatgcatcgctcgactgaacagtatcttcaattctgttggagccgtatctgaagaagttaaactttctattgaagatattgttggggcccttggatgtgttgagaaagaggttgacgtcctctacgaagttataactcgccacggngatatctgttcgctagtggcttctcgtggcatggcagctgctttcatcaaagctggatgt

SEQ ID NO: 7817 - DNA, 221 bp, Zea mays
agctataatggttcaacatagaagatgaagtgtgatggtccaaaggctaagatgactatggagactggaaatcacaagctaaatgaaggatgaacattgattatgtgagactcaatgtgcatggcttggagtcagctggattgaaccaaatacggaggcacgagatcttcgaggtactagagcaagggagaaggtcaaggtgactgaggtacctaatcaag

SEQ ID NO: 7818 - DNA, 471 bp, Zea mays
cggacacttaaaactaagcttcgagcgccaaggtctcaaaacaccttccctgagctcgttgtctataaacgattcaatttccctgcgcgtggcggccccaccgtgcagaattactgatcagtctttgcggcccaccgtacagcgagtgcgagcgggtgtccgcctggtgtaaaacttctggcgcttcgccttcttacctgcggcactatataaacagacgagtaggtgtgaagttaccacaacatttactgctatttgcactgttatgctgccaaaatttttaaccgtcgccgaagcttgtttgtcataatcgaacgaagctccatcttgaagcctgcttcggaggaaacaagtattaaagtttcacaagctcatagcttaatggccagagtccgctctaccgccagggttgaacgtgaggtggactaaactgaagcttctgagactgttcctattctcgaagccatgcaa

SEQ ID NO: 7819 - DNA, 232 bp, Zea mays
aacatccaaactgcaagcgagcaatctttttgttgacttgccaaacctacagaacccgtaaggtggtcgttcacggctagtgggacataacgcggacgaaacaaatcaggatgcgtaacccgcttgaacagaacttgaggaaatgcagcctccgctaataccttgagcgggaggaacgcaacatggcacgtgctattggggtggcccttgccctctccgcagaacaggcaaa

SEQ ID NO: 7820 - DNA, 221 bp, Zea mays
agctttttagggagaacacattttaggactaacgaatgttcattttgagaaagacagggtttgtagcgcatgtcaagcaggaaagcaagttggttcccatcatccacacaagaacatcatgacgaccgacagaccgcttgagctactccacatggatctattcggcccgattgcttacataagcatcggcgggagtaagtactgtcttgtaatagtggatg

SEQ ID NO: 7821 - DNA, 439 bp, Zea mays
  unsure (1)..(439): unsure at all n locations
tcggcattgcaaaccgacttaaagatagaatgaccttntatcctataatggtctgagtcaatgtngtaagtttttataaggggcatacttgtaattcctcacaggctgcgtcctgtgcctataaatagtgaacagtattccgttactgtggacagattctggtatttgcaatcgcatctctcggaatacaacctttgtcaaggcataggtattattggtatttaatgattcaatatattaaatgaatatgatttgatgtatctgtgagacatttatccatcttatatcttttattttgtattatcttacaatgtttgttggaagttcattacgaaggttcaacttcgtaatgaaactctcatcaaccttcgtccaagatccattatcctcaaaggaataatgcttcatggacgaaggatagtatcatttaacattttat

SEQ ID NO: 7822 - DNA, 219 bp, Zea mays
agctttattttgagaatagaagcaagagctcgaccatatgtcataatagaaggggagttatacaagcgtggggtctgttccccattgctcaagtgtttatctaaacccgaaggtatagaattaatgaaggaaatacatgcaggcctgtgtggatctcacattggatctaggcccttgcttgggaaagtttttcgccaaagattttattggccaaaggca

SEQ ID NO: 7823 - DNA, 383 bp, Zea mays
tcttcttcattctgatgaaaaccaagcccgttgatcactttattatatctaatgttccaactccgagatgcttgcttcaacccataaatggatttctgaagtttgcatatctttccagcattgatcggatcgacaaaaccctcgggctgtatcatatacacgtcctcatcaaggttttcattaacgaaagctgtgttgacatccatctgccaaatctcataatcgaaatatgcggccatagctagaatgatccgaatagatttaagcatcgctactggcgagaatgtctcgtcatagtcaacttcttcgaactgtcgaaaacactttgcaacaagtcgagccttatagatgtgaacatttccatccatgtctttcttcttctt

SEQ ID NO: 7824 - DNA, 226 bp, Zea mays
acaggagcatgctttttttcaccaccccctctccaagggaacccaaggtagacgggagtacaaatatcagactgtgggggaaactctacccaaaacccggacacatctacactggacggactagcaaaccggcggaaacgaggcggaagagaactgagcggaagacatacgcagacacacagccggggcccatctactcccctaaacccccaaacaagcccctggg

SEQ ID NO: 7825 - DNA, 376 bp, Zea mays
ccataaatactcaagcttgtgaaattttcatacaacatgggctagtttgttattcttaacatacccatattacgtttagcaattaagcaagtatcgagctcacctttgataaaatcatctaagcatagctgaccctctaatactcccttatatgctattgaatcgtcacttcttctaaagacggtaacacctatattagtaaatatacagttgtagccgattttacataattgataaactgaaagcaagtcgttatctacataatctacacgagatacattggaaataaaatgatcaggtgatatatcaattttaccaagtcccttaacccaaccctgatctacatcaccggatgtgaatactctttggcgatctt

SEQ ID NO: 7826 - DNA, 220 bp, Zea mays
tttttatgaacaatatatggacctgagtgcagtatgggacaatattaatctcgaggacacaaaagataacttgaaatatatttggggcactggttttttcttggtgcagaaggcttacaaaaggcaaatgagacactccaatgctcatattgtatacaaatggctttggaaaagcaaatgttagcctcgacacaaagttttcttttggttatggttaaag

SEQ ID NO: 7827 - DNA, 445 bp, Zea mays
cggaggccgaacgttgaaaggaatgaatctgtcttataatgccacagagccttccgcgttatctgatcttttattgggacgagagatttagtacaagagcatattgccttcagggtatggccgctcgcggaaaaatgggaaatgccgcacgaaaccataaaagaaaccgacgaaggtggacttatgaggctgaaatatacttttaagttcggagataaattcgttgagccagatgacgactggttaaaaagtattgaaaatttaagtgatgaactgcttggggcttattcgaacgccgaagatattgcactgtcagcagccttcggaggccgaaaaaagaagacgctgaatcgggtgttcgatgcactcgggttcgtctaccctgactattgttattccattcgagggctgatgaaaaaatacacaacctctgcgaaagaagaat

SEQ ID NO: 7828 - DNA, 220 bp, Zea mays
atttttaagccatggtaagtagcataggccaataatatacgaattgactcaagcctagctacgggtgcataggtttcaccgaaatccaaaccttcgacttgggagtatcctttggccacaagccgtgctttgttccttgtcaccacaccatgctcatcttgcttgttgcggaagacccacttggttcctacaacattttgattaggacgtggaactaaat

SEQ ID NO: 7829 - DNA, 444 bp, Zea mays
tgccaagccctcggacccggtcggacttcaccggttgttttatatcgacctcaccggacttcggtcttccaccgccgcgcgtggaccgagctattcagtgagtccccgcccaatatcttgcgctcatatcttctctggcatcccgtggacctccctgacccatttgattgaactatcgcgccgtgaccaggccggtcttctcgccgacgacgagcatccccgcctgcgcgcgtggaccggccgacttcggccatttccgacggtgtatcgcacaccgttgtgatccccgagacctccccttcgtactcgaccacttcacctgagcaatctcgccgctggttagcccctccgccctttcttctgccgcggttactgttaatgtagaaaatgacctctgttatgaattgagaacactgaggctatatgtaatgtcgtgactcatgt

SEQ ID NO: 7830 - DNA, 221 bp, Zea mays
ttttttttttccgccagtctgagcagttcgaacgggaaaaacaagatctcaatgcaaaacttgaagccgaagctcggcaaaattcggatttgagaaaactactgacaaatcttcaagaaaaatgcctggaatttagcaacaagtgcattcaacgactaagaaagattttttactcggttggagctagcagcgaaaaatttaccccatcagctgaagatcta

SEQ ID NO: 7831 - DNA, 332 bp, Zea mays
tcggagaaccacactcttcgacagagtgctgataatctttgctccagttcgatctcaaatacatcctaaggcttcttcgttaattcaaccgaagagcatagctcccggctggtagccgcaggatatagcatactcctgcggctcctctttctcagccttggataattcttgaccaataatattttgaaagttgaagccttttccttccgaagtatcttcggcaatttctttccctttctcacgcactgtggccagggtttcttcggcagccgcagcagtatcctccgcggccaaatccaagagcactttatcaatatcagatactgtcctct

SEQ ID NO: 7832 - DNA, 218 bp, Zea mays
tttttttagcaaaagaaatttctagaatcaagaatattgagctcatgcctaagtctggtaaaagattgttcatcaagtggcttggtaaagatatcggctaattgatctttagtgttaatgtaagaaatctcgatatcccccttttgttggtgatccctaagaaaatgataccgaatggctatgtgcttagtgcggctatgctcgacgggattgtcggc

SEQ ID NO: 7833 - DNA, 440 bp, Zea mays
  unsure (1)..(440): unsure at all n locations
ancgccttgccagatcagttctgatgtgtggctgcgttctgcttatgtcatacaacaggcgtagaggaggaaggcgtgctcagcaggagcgagccgctccgcatgatgaggtgccccagcagcagcacctgccgcccccgcccccgatgtcgattgagcagatgtttctgatgcagactcaggcagttcaagccatcggtcagactctggccgccattcagcagcagcagcagcagcaacagcagcaagcaccaccccagcctcagatgcctcagatgcctagagacaagcgtgctgaattcatgagaggtcatccaccaacgttcgctcactcttctgaccccatggatgctgaagaatggctgcgcactgtggagcgggagttgcataccgctcagtgcgatgacaaggagaaagttccttattggtcccgtctgttg

SEQ ID NO: 7834 - DNA, 217 bp, Zea mays
  unsure (1)..(217): unsure at all n locations
atttttaaatgngttttcctccatcattttttgatatgcaagtacacctaatcatacatctcgtggatcagataaaaatattagggccactatatttacatcatatgtttcagttggagcgatacctgggagtattaaaaggttatgtgcgaaatcgcgctcacccagagggttcaatcatggagggatacactacagaagaagtgattgagagctg

SEQ ID NO: 7835 - DNA, 421 bp, Zea mays
  unsure (1)..(421): unsure at all n locations
tgtgaaggaccagatcatcaaagcatataagtttttggatgataagtggtcacccaagttttgttgatgaagcaccagaagaccaatcaaggaaggaatccatgtgggagctcgcaagagaaaggtttgcgtgttggcatcgttgcttcttcagtaagctagccgccaagtgaaacctagaagcctgaagatgatctttgagtagccagaattagcgtttgcaatcagcaaccagatgctccgcaaaggccagattttgttgaagttccatctcctcgaagagtctacaaagtgaagatatgtagctgaagtaaagttatacccataacccttctgagccgaatctcgaggacgagattcattntangtggggtagatttgtagcatcccaaaaattcaaatcctgaaatttctcaaactc

SEQ ID NO: 7836 - DNA, 221 bp, Zea mays
agcttttcaaacgaagccttcatgttctagaatttagttggagaaaaactatcaaaagctgaagtagaagagcttagagagtatgccaaatcctgcggatacaaacctggagcactcctcttcggaggcgttgatgatgaaaaattagattgtattcgagatcaaactggagccaaagttatcggtactctgtcaaagagtatcggttttccgaagctgga

SEQ ID NO: 7837 - DNA, 426 bp, Zea mays
actatgaaactaagctttattacttcctacatgctttaatgtcttccttttctgtggttgatgccaaagggggagaagtttatgggccaaagcaatgaaaactatatcaaacaccaaacatcaccaatttaaaattttatctacaaatggcttttcaagtggttttggttatttggtccaaaataagaagtaagtgaattatggagttagggggaggcttaagtccataatgtcacattatgggggacaatcatgcatcttagcaagtagattgcacattttcattcaaatacttgtattatttgcttgctttggttgtgttgtcatcaatcaccaaaaagggggagattgtaaggaaaatggaccccgggccatttggctaattgagtattggtgtttgatgaacaacacaatccgtgaactaat

SEQ ID NO: 7838 - DNA, 221 bp, Zea mays
agcttttttggatgtatgaaaattggaggggattgagggccatataattcaatccccttgctggcgagactgtgttctctgaacaactctctaaatattaaatttaaagagctctccgagtgttctaaacaaccctctaaatattaaatttaagaaatgaataaaaaatgtatctctaatagttttctaaatagacttgctaaatttaattaattgttatg

SEQ ID NO: 7839 - DNA, 451 bp, Zea mays
tgttcatcgcattcaaccgaagctccgctgttggttatgcttcttcacaaggggaagagcttcgggaaaattaaaaaagtaaacaacttcataaaaaattgtgaggaattcatcatcaaatggcaagggtacgttccactgccagggttacacgtgacagagaagaagccaaagctgctgaaaccgctccgatttccgaagtgatgaaaaagtcggggctagtagtgccggaggatgtttctgtcgaaggtgcacctgacgctaaagctgagaaggttggtgctgaggaaggtgaatctaaagatgattatagtgtcgtgccatctaaacccagccacctggagtttgggaggtccactgttaccgaagatgatatgcctaagttgatgaagataggctatttcagtgaggccaaacaggaactaattcactttggcggagaagaaatact

SEQ ID NO: 7840 - DNA, 221 bp, Zea mays
agctttttttaatggacgtgaaaagtgccttcctcaatggaccgatcaaggaagaagtctatgttgagcaacctcccggctttgaagacagtgagtatcctaaccatgtttataggctctctaaggcgctttatgggctcaagcaagccccaagagcatggtatgaatgcctaagagatttccttattgctaacggcttcaaagtcggcaaagccgatcct

SEQ ID NO: 7841 - DNA, 438 bp, Zea mays
  unsure (1)..(438): unsure at all n locations
taaagccatggtaagtagcataggctaataatatacgaattgactcantgcctagctacgggtgcataggtttcaccgaaatccaaaccttcgacttgggagtatcccttggccacaagtcgagctttgttccttgtcaccacatcatgctcgtcttgcttgttgcggaagacccatttggttcctacaacattttgattatgacgtggaactaaatgccatacctcattcctagtgaagttgttgagctcctcttgcatcgccaccacccaatctgaatcttgaagtgcttcctctaccctgtgtggctcaatagaggaaacaaaagagtaatgctcacaataatgtgcaacacgagatctcgtagttacccccttatgaatgtcgccgacgatggtgtcgacggcgtgatctcgttggattgcttggtggactctt

SEQ ID NO: 7842 - DNA, 221 bp, Zea mays
agcttttttaggtggtgtctcccagtcatcttgatggcgcccaggaataattattagttggctttatttttatcatttatttttgtaagactcttccactatgtaataataatatttgtgacatttatctctatacacttggtcattgtatgtgttgtttttctttagcgcatatatgagacgcacccagctttaccccttaaatctgggtgtgacaaaag

SEQ ID NO: 7843 - DNA, 453 bp, Zea mays
  unsure (1)..(453): unsure at all n locations
tcatgagcggtagcttcggtaccacatataaacagatttgccgaatgtgtttcttcctgcaggaccttcagcgacgaagcatggtcccaacagtagccccttcgcggcgctagatcgttttttcgtaacgagcttgatctgtgaaaaggtctcttaggcttcgggaagcagaaggtccgaaaaacaccttccctgagcttgttgccgggaaacgatacaatttccgagcgcggagcggtcccaccatgcagattcaccttctcgggttttgtggcccaccgttcagtgggtgcgagcgactngttgtccggtgtaaaagacttgacgattcatcttcttacctgcagcactatataaacagacgagtacgtgtgaagttaccacagcattcattgctattgcactggtttgctgccaaaaattttaaccatagccgaagcttgacttttgcac

SEQ ID NO: 7844 - DNA, 200 bp, Zea mays
gagaccttttcccatttctttctaaccatggggagttcattatcgtatgtgacattctgcgcatgttcactttatttggtcccttgtatggcgtactggttgtttcctaatttgaatggatgaatgtatgcatgcttgcaatcgcatagagaacgatctggttgaagagcccgaggaactcgcaggagaagcccctgagc

SEQ ID NO: 7845 - DNA, 418 bp, Zea mays
  unsure (1)..(418): unsure at all n locations
tcatgaatntctggcactcactcagggaggtcgttcagtttttgtttacgcccaagctttcaatgacctgtgtcagtacgcacgctatcataccgacacggatgagaagaagagagacagattcacgcggggccttagtactaagcttcgtgaccgtctcaacacagtcaggggcaacagctacaatgagttagtcaacatggccatctctcaggaggattgcatcacagcccgtcaggcagaaaagaagagaaagactcctgtggcaggatcttcagctcagcctcagcgtttcaggattgtgtctgacactcatagcaggggacctcagcagcagcaagggcgatgggtgatccgaccatagcagcagcagcaggcacccaaccgctctcaacatccagctccgaggaacaacaac

SEQ ID NO: 7846 - DNA, 219 bp, Zea mays
tttttgccaagccctcggacctgaccggacttcaccggaggcccgagatcaccctcaccggacttcggtcttccgccgccgcgcgtggaccaagctatccagtgagtctccgcccaattcctttcgctcatgtcttctctggcatcccgtggacctcccagacctatttgattgaactatctcgccgtgaccaggccggtctcctcgccgccgacgagc

SEQ ID NO: 7847 - DNA, 423 bp, Zea mays
tcgcacctttgaactaactcggctgcatcactcttcgctgttggccaatagaatcctgacctgaagaccttcccgactagtgttctggatgctgcatgtattccacattgcccagcatggacctcctccagaagtcgcttcccagtagatgggagaatgtgtcggtgttttgggtccgaccgcacacccggggttgcccctcaaggtgtttttataagtatgacggtgtcgacaactgtagcaaaatggttcgtgccgatcgcacgaggaacagtggacaaggtttacaggtttgggccgcttaaagatgcgtaataccctacgtcctggtgagtatgcttggagaatgtggttacaagagagctctctggactgacgatgcggagagttgatgtgggtgctaagtaatagggtcgatcgttc

SEQ ID NO: 7848 - DNA, 219 bp, Zea mays
agcttgtcttcggctcatcctcctttttcatccagatttggtgatagcctgagtagcaatccaataagctcatgagttctgaagtagctgctgcatctacaagggagtctattcttggcaatggaaattcatcctttggacatgccttgttgagatatgtaaaatcaatacacatcatccattttccgttggctttatttaccatgactgtattggcta

SEQ ID NO: 7849 - DNA, 382 bp, Zea mays
ttgcctcgggcagactaatacaagagaggccaacacgttatgggagtggagagatggcgagagtagcgtgtaccctccgtggcaagaggctggatggtggtgtatctgtgctctcggttggcgtgaacccggactggtcttaagaaaccggtggcaagttgacatatgcaagggttaagtgctacatatgtcgtatgattggagatccctagctgggtattaaccgattcggatcgccgttacttctcagacatgaagacttggtcactgacttacacgtagcattccagtgaactataagggttgataaaagacggctagtgcatgtcacgtgcttgaactatggtagaaagaactctaatgacaggtaatgacttaactt

SEQ ID NO: 7850 - DNA, 218 bp, Zea mays
agtttttccgccttcaccactggattggccttggcgatagcgtccctagctgcagttcgatagtcgaactggcagtcgtgtttgtcggagtagcggtgcatcgaacagtacgtgttcccgcatcggcagttaaaacccgtcaacccaacacgcttcctacaggttgcgcaccggtttgggccttccttggccttcgcgataacagcagcagcctcgct

SEQ ID NO: 7851 - DNA, 385 bp, Zea mays
  unsure (1)..(385): unsure at all n locations
cgtgattngtgagaaaagtagaacaccactgtgatgatttttattagttgacgctctcatgctgcagcgcaaaagttataaatagccacatactagtcttttgcggaaagggaaagcatatccatactggtcattaagacaaaatgtttactcaaggaatccctttgcttaatttgaagaatcgacaaaccttgcagacatgcaggccatgcccacaaagacagctttgacagcttgcttctggccacaatagtcaaatgcaagaggcagcatttcatgcaaagtgaggaaagccatgacaccacccactgcacaaaggcacagaagtcaacagagtactcatgtatggaaacataacaaatactattcaatttcctaacggact

SEQ ID NO: 7852 - DNA, 364 bp, Zea mays
atgaaacagagctcgaccattgttattatttacgggagctatacaagcgacgggtgtgataccggctgcacatgtgtctatccacatccctaggcatagacatgatgaaagaaacacactcacgcctgtgtggatctcatcttggatctaagccttagcttgggaaagctatcgtgaaggattttattggtcaacgcagattcacatgcagcggacttactccaatagtgctaacgttgttcgaaatgtgcgacagatctaaaacacaccttcactgttacctcattatcacaacccactctgtctgagcaaatgaggtgccttgatcttttggcccataccaactgtacagggaacctaagat

SEQ ID NO: 7853 - DNA, 218 bp, Zea mays
tttttcttacataatttaggacgcggggaacaatttaataatcacatcgagtaattaccaccagaatatatatatatccgttgtgtggatgaaaagagactgtgacaacccttggatggttgacctttttattttgagcttggatcataaagcatcacaccaagaaggatgtatgttctgttcatcaaaacttccagagcggcttccatgctaaattt

SEQ ID NO: 7854 - DNA, 457 bp, Zea mays
  unsure (1)..(457): unsure at all n locations
tatnntatagaattaattnttgcaagaaattattaatattactaatccaccccctattttgaacatcttgatcctttcaaattctaacacagataaaagtaaacatgaaaccccctaatatatatatatatatatatctctactactatgaagaatgtaagggggtaggctgtcacccggttctgcccctccctcgttctgccctcccccatctgttattgtcgcagcaaaaaaattgctaccaagatcaggaatcgaaccctagatgccttaagcagaacgccctaagctcccacccactagccaactcaactcatgttggtttatattcaacctcaactatgatatctaagtgatgagataattcatgcttagtttttcatttggtgaccctggtatgtataattttttacccactatggtattttaacaacaacttacgcacttgcaggtgata

SEQ ID NO: 7855 - DNA, 217 bp, Zea mays
tagtttttcaccgacttcgccaccgatattattgtggacgactatcttggcggtaagttgttggctcccccttttctttttttttatttatttatccgtagatacgtcgcagggtcggacgaaggccaacttgctatagttgcgcctgtcgcggcgaccacgactgctgccgtggtgcataaggcgaagggcggggctcttagcgccggaggcgagg

SEQ ID NO: 7856 - DNA, 416 bp, Zea mays
ttcctgttgacatcttcggcgttgtatcaagaccttcttattatccgggtcctaccccgccgtgataccaactagactccgaaggtacctgctcacacattatacttccagaaatactgttaaatcctgtttttgaggaccttcgaatgccgaaggtccccaacagtagcccctcgcaatattaatttgtttaaaataacgaatttacattgcgatatggatgaaggctttacgccgaaggtccgaaaaaacaccttccctttgctagaatagcaacattcactgacaagcggggtctttagattatcaacgctcttggcgtataaatacggccataccgcaaactcatttgacacgctatctggccaactgctcccgctcactcaatttatagctcttgtgcactgcgaattgct

SEQ ID NO: 7857 - DNA, 220 bp, Zea mays
  unsure (1)..(220): unsure at all n locations
ttttgcttcctgtngagcctgaggctaaacttagctgttgtcagcctcaacctggcgggtggcacagcagtcggagaggggcgagcggcgctgttttcctttctggtcggccagtggaagtgcgaagtgactgcggtcactttgaccttgccaactgaggcacgtgtgtcaggataaggtgtcaggcaatcctcgcattgaatgcgcctgcgatacgatc

SEQ ID NO: 7858 - DNA, 374 bp, Zea mays
  unsure (1)..(374): unsure at all n locations
tgtcgtccgtctcgatgggcatcacctcccccaactctactcttagccgggaaagcttgtcgtctgtgtcgatgggcatcacctcccccaactctactcttcttggtatgtacatttcatcaactccatgcacaccgttgttgtcagtaactgcctgaggttcttcatgaacatgcacatgcagtcgtggtggcagagttatgggctgcacatcaacaacatcgaggtcacaactgatctcgatgatttcgtctagtgtgatgccggttgaaatggcangcatcatgatgtgatccacatcatcgctgctggcggtgttagcagtaagcccttgtgtggtaccgtatgagccaactgctgcaggagcctgatac

SEQ ID NO: 7859 - DNA, 415 bp, Zea mays
  unsure (1)..(415): unsure at all n locations
cgttttgtgcctttatctcactgtcaacggcttttaaatgaaggagtctatctttcacttctctcantacactattttttctctttgtcagnggtacagcgccttgtgcagaattngaagatccgcggtattataattattttgctcatatttcgtgaacattttctgaattttttattaacgcttatttaattctagagcacaattattgttactaccatatanataccaaacatgatatggggtggagaaaaagtntgagctccgatgagcttggctcggtctcgcaacaactttggctctggagcgggcttgacacttagaacgagctctggccaagctatttttgagctctgaaagtacagccactactgctcgtcattgcagtggtgtgctcatcacacaattgtaaaaa

SEQ ID NO: 7860 - DNA, 253 bp, Zea mays
  unsure (1)..(253): unsure at all n locations
attctccccctntgacatcaaacaccanaaccatattcatctagaacataggatgatgtctatggacagcatggtggttatgaggagagacacattatgaaagctccccctacttagtgagcatatgcactatcaaccatttagtaagatacaaatacacagaaagaatactactntctggttgacctttaccatgttgtagtgtactttccatcttgagagtatataatctctcgagagcttcttcacactt

SEQ ID NO: 7861 - DNA, 205 bp, Zea mays
cactgaccatgtagccgtagtctgcacgtaatgacgtatatgtatctcaacattgattacttttagatctagatatattagagcgctagtagactatatagacagacaccggagatgttggactgtggaagttccacttgcactgcgcatgctacctagcttgcactaccggaatcagcttctttgccgtgtgttctatacacac

SEQ ID NO: 7862 - DNA, 171 bp, Zea mays
  unsure (1)..(171): unsure at all n locations
ccacatgttatatntagtgcaaggcagttttctaatcacaatatttggatcatcacaccaaaagaacataatgaaataagtacaagatatataatatgttaatagcacactgtgtatagagatntcgagcctacaatcctacattattgaaatgtataatagcaccatact

SEQ ID NO: 7863 - DNA, 84 bp, Zea mays
taagatgtcgggcgccaacggggtcatcaccgtctgccccacgtacaaacactcgttcgaatgcgacgtggagtgcgtggagta

SEQ ID NO: 7864 - DNA, 369 bp, Zea mays
  unsure (1)..(369): unsure at all n locations
tggaccaatcaaggaagatgtctatgttgagcaaccttccggctntgaagatagtgagtatcctaaccgtgtgtacaaactctctaaggcgctntatgggcttaagcaagccccaagaacatggtatgaatgcctaagagattntcttatcactaatggcttcaaagtcggtaaagtcgatcctacgctctttactaaaaccatngcaaatgatnntgttgaatgccaacattatgttgatgacatcatatntgggtctactaaccaatctacatgtgaagagnttagtaggaatatgattcanaaattcgagatgtctatcatggnnggagtgaagtatttcttaggatttcaagtcaagcaactcca

SEQ ID NO: 7865 - DNA, 159 bp, Zea mays
ggcttttttctgcgaatccttacatttgcgacattttcatgcgaaacatctgttggattttcccttttaataaagtaactaatggttccataggctcgagtgcaaacctaacgaccttatttttattatcccttactgccttgctgttatgatctaata

SEQ ID NO: 7866 - DNA, 310 bp, Zea mays
tactcagctatgaagatcttattccacatgggaagtctgtgtgccgagccaccctgttagctagcataagcagtgtctagtagcttgtatcataaatcactagttagcgaccattacactccttaatgtttgatatatttttaaacagacctattagaataacatgagcattgatatgaaacaacagtgattaaattcaaaactgaagatgctaatatttccactacactgtctctagagctggacttttaagaccttcatagtggcctttatacaagtaccaatgtgtgcagtgctatacctgcacata

SEQ ID NO: 7867 - DNA, 229 bp, Zea mays
  unsure (1)..(229): unsure at all n locations
tatatattctcatgggtcttaattctcgtgttctggtctttacttgtgagcttaanaagtgttgcattcatctgggttctcgtgttctggtctttacttgtgagcctaaaaggtgttgcattcatctggtcacccttcgtctttgcttcttcaaacacttnttgccatatgtgggaagccgtatattaaattttagtatcataaaattaattcagtatggtcttgattt

SEQ ID NO: 7868 - DNA, 354 bp, Zea mays
  unsure (1)..(354): unsure at all n locations
ntgatcgactggtcgatcgcgctcaccctggtgccttcgatcttattagttctcttgtccaagccttctaagtnactactctccgnngacattttggcatacaaggatcaccaatgatgatatttttgtctgtctttatcggactctttcgatcgaatcaagactttnttatccgtcggttctattatattgacacgtaatgaatagttgcaatttgcatctcatgaagactcaaccgaccctcatttattgccgattgtatctatcgacgaaaacattacaatcattggtggcataagaaaaagaattatgctactcgcaataagtagaacgcgtactctctttagttcatct

SEQ ID NO: 7869 - DNA, 93 bp, Zea mays
ggtcagcatcaacagctgttatgaagatggactgaaacagtcatcgcttgtgcatatcacccttttctgggaagctcaaagctctctggaaat

SEQ ID NO: 7870 - DNA, 93 bp, Zea mays
aatgcttctatgctcttgctcattctggaaatatataagaatatcatcaatgaacaccaccatgaacttgtcgaggtagtccatgaacacact

SEQ ID NO: 7871 - DNA, 90 bp, Zea mays
aaaggggcggaaaccccaagagggagggaagaagaagggaggagggagaaggaaggaggagaaggaaaaagaggaagaagaaggaaggaa

SEQ ID NO: 7872 - DNA, 362 bp, Zea mays
  unsure (1)..(362): unsure at all n locations
gctaactccaaatcatgtgtaggataattctnttcatgcttccgtaactgccttgaagcatatgcaattacttttccttcttacattaacacacatccaagtcctagatgtgatgcatcgcaatacacatcaaatcctttatgaatatcacgcataattaacactagtgcagnggttagcctttcctttatttctcanaacatatctgacatgcgtcatccccacttaaatctttacctttctccaacagtgaagtaaggagttcactattttgagaagcttcatgaatctctgtagtatctgctatccaagaaactttgatctggcacatctatggtgttcaatgcagattcactatttac

SEQ ID NO: 7873 - DNA, 149 bp, Zea mays
tattatttcttgtataacaaccattatctaaattaaactatgaaaatacgtgaactattagaaacactatttaaaaagcttatgccatatatatgaaactaacaaaactatttctactatttggattcataatatacattttattaaaa

SEQ ID NO: 7874 - DNA, 69 bp, Zea mays
aaaggagggagaaagggaaggaaggggaagaggaggaagggaggagggaggaaggaggaaggaaggagg

SEQ ID NO: 7875 - DNA, 236 bp, Zea mays
cgaagctgagtcctttgtctggaaggttgatcgcactccaatgtaccctgggagatcacttgagaactgttacgctcgctacagtgcactctatatatgataactattgcttgctgctgggggtgatatatgactattatggtgattctatctataccgtataaattgacacttaagaatgtacttacatctttgtagctaactaatggtcacttgcagtatgcctatcccactgt

SEQ ID NO: 7876 - DNA, 374 bp, Zea mays
  unsure (1)..(374): unsure at all n locations
actgtcgtagctcacacctacactataagccatgaaatgagaataagaaagggaatatgaatatggaaaatatcgcatctaaactcttatacttgtcactgaatatataacgcataccaattacctatcctatcctatcaaaccttacctagaatgatagcataaccattaaagcactatgaccgaaaccctagtactcatcaactatttttctccttacataatgtgtaatctgctatatgactcatgtcatgcatcnataacgtacctgctacgagagactctctgcggacaagactgtatgagtacccaatcacacccattgacaagattgctgccacctgaagcagcacgttatctaccatatatcatta

SEQ ID NO: 7877 - DNA, 334 bp, Zea mays
  unsure (1)..(334): unsure at all n locations
ctctccctgtgacacggtatctgagaggtaagcatgccttcctttatgtggtcagcttattntagcctctcatttcttcttgagctttggtatgattatcttttggtcctgcgaattctagctcacaggaagatttgcttgtcgacggacaacaaacattagcacatggtaatatagtatcaatttgaatacatgtgcatgagtgaaggtgttgtgattataaaggtttctattacaacctcatgagcaatgttaacatgatatgtcatccataagatttcatgagagcatagacatatatattntcttggaagctagatttcaactttagctt

SEQ ID NO: 7878 - DNA, 235 bp, Zea mays
gatctgaatttaaacgaacacaacaattggcgagaacggtctacgccccagcatttccgagcttctatatttttacacatgcttcgggaaaaagttgactgacaagaaagcaaaggctcaatttatgctccaaactgaatatcctaaggggcgttgtattaacggttgtgagaaaagactcttgattgtctcctgcagcatgagattctgctgccggaataacaaaactttgatc

SEQ ID NO: 7879 - DNA, 371 bp, Zea mays
  unsure (1)..(371): unsure at all n locations
gagagtcaattcttntntattaactcatgctatcaatcgtcaatgatctatatnatccaagttgacccatagttatttaaatttattatattcaaaactcatatcatctcgggaaagatattgatgtngtaggaaataaagaattatcatgtgcganaaaatcaagacctacaacatggaggaaagccaaaggatggtaacatttatgcttttaagggcaagtatcttaaattattcattcttatgtgtagtcacattngaaaggaaaagcacttcanatgtttaaaaatatgcaccattccttgaagaaatcctctcatatgatagattgatattcttcattttattctatggcatcacatgcttaatta

SEQ ID NO: 7880 - DNA, 264 bp, Zea mays
ggtttcttactgaatcatgtggagacccactcacgtttcttcctttggccgacccatgcgcccacctcttagtagcttcgcttatccttggacttctgatctgcacaagcccaaatttgatctgcgcatatataggcaattacatctacgctctactacctgttagacagaaggctctcagtgctaggcgtattaaagctttacctaagctaggtaggcccaacaaagggttctaggaggcttgtctcccttgcatgacagaaa

SEQ ID NO: 7881 - DNA, 108 bp, Zea mays
tcatggagcttgctgctgcttgcacccatgataaacatgaacgcatggagagctggtaactagctaggtagatagatatatcatatgtgggtatgatggtgtggatga

SEQ ID NO: 7882 - DNA, 352 bp, Zea mays
  unsure (1)..(352): unsure at all n locations
tactcagctcgtgaatattctnctgagctataaaagtttgtgttgctctctattgtgctacacttcgtctcgatttgtcttgtgccttagcacgaatttctcttttccaaatatttctcgaagatcaacacttgtaatccccttcttgttccacatgccatatgttgtatgatgctttatgtatgcaaaaatgatgtgatgattgtcatgtatgcanaatgatatttgtgccacagatataagttccttgtatagagcacacatactttttatatcagcgctaacttttcgctgtaaagcctccttanggagctctttcgcttttactttcagtggaatcagcgttattttt

SEQ ID NO: 7883 - DNA, 215 bp, Zea mays
  unsure (1)..(215): unsure at all n locations
tctcagtctgtgcttccttatctctaccatattattgccgaatgtgatgatatttttattatatcacagaccgagtggtccatagcctcttggcgtggcccatatagaccatgaggtatatacattgaggtattgggcctacgctttcaaaanaataacatatatcacaacccgatgtgattgcgcaagcgagcgggcgaaagagtggcggtaga

SEQ ID NO: 7884 - DNA, 336 bp, Zea mays
  unsure (1)..(336): unsure at all n locations
ttggtctgatcgatctgacgttcgtgtcgtggatcactacgcgcgcgactttatgctgacggngaacagatcgagagcgtgcatcatatcatcattccagtcccagccgcgaatttctcgctacgctnntagtggtagtgataatgagctcgccagctacgcaatgctactagttggacagctcaccctcggcacggtgtatgctttgacggccacacgaatattatccttgcttaattcaatcactgcacgctgctagctatttattcggcacgaaattactntcttattgttcactccttttcgttctgaacgcagagttaattttgcacctat

SEQ ID NO: 7885 - DNA, 249 bp, Zea mays
ctgttgagctgggccccattgaaaaacttctgctgactatagtatttcaaagaatggcaagtttcttctgctgactagatatgaatctatgcatgatgccagcttctgtcacctgtgggcccctcttgcgctggggttcatcgaagatacttcatcttgttggttactcaatcccttctgaactaacaccatgacttacctcttactcaagaccatttctaattattcagcccttgttaatcacaatgt

SEQ ID NO: 7886 - DNA, 204 bp, Zea mays
  unsure (1)..(204): unsure at all n locations
gcttctgctacatcttcngcgctgtatcgaccttcgtattatcctggtcttcttctgccgcgataccgaattgagtccgaaggcacctgctcacacattatactttcagaaatactggttaatcctgtttttgaagaccttcgtaagccgaaggcccccaacatctatactgctcgtgctactatctattcaacattggttcta

SEQ ID NO: 7887 - DNA, 400 bp, Zea mays
  unsure (1)..(400): unsure at all n locations
agctntatggccagctcaagaagcaagttccagtgtattttgtatctgaggtccttagtgtctcaaagaaaaattatacagagctggagaaggtattatatgccgttttaatggcatccaggaagcttcggcattattttcaggcatacaatatcattgttccttcttcgcagccgttgaaggatataatgagaaatagagaagctactggacggattgggaaatgggctgcagagctcaacgaattttacattgattatgtgcatagatcttcgatccagtctcaagcattggcagatttcattgccgactggacgccaggggctcaggatgaagaagcaaataaagatgctgaagtgtggacagtgttttgtgatggctcttggggaatcttcggagc

SEQ ID NO: 7888 - DNA, 432 bp, Zea mays
  unsure (1)..(432): unsure at all n locations
gaaactaagcttcgcacctctgaactaactcggctgcatcattacttgtttgttgccaatagaatcctgacctgaagactntcccgactagtgttctggaggctgcatgtattccacattgcccagcatggacctcctccagaagttgcttcccagtggacgggagaatgcacttcatgaggacgcctgatgcaccccttctgtataatgtctccccaatgagtgtatagtgagccgactgtctggcaatgcgctctgccgagttcttgtcgtctggttcttcttcaatctttatatacttgaagattggccttctccagtcatcagagtctgactcgggttgatctataatgtcgcactcttctgcttgaccattgagatacttggctgagtatttttgccaagactccggtgggacctgactcactggat

SEQ ID NO: 7889 - DNA, 445 bp, Zea mays
agcttaatacctctaaaagattatcaaattttgtattgggcaagacactcatggttcaggataatgagggttacattttatatcctgctaattatcctgagcacaaaattaggagaatacatgctagggaatctcattctgtttctcaccatgcttttatatataagaatgaggcttctagctctaggcaatcaacccatgttaaattgcctaaaaagaaaactcctactacatcaaatgatcataacatttcatttaagacttttgatgcatcatatgttttaactaacaaatcaggaaaaatagttgccaaatatgttgggggcaaacacaaggtgtcaaaaacttgtgtttgggtcccaaggtgcttgttctaacgtgaaggacccagactgtttgggacctagaacaaagctaattgtttgatgttatgcatcggggctca

SEQ ID NO: 7890 - DNA, 472 bp, Zea mays
gtgaatattcttaatcccaacatgggcaagttggcgatgctcgatctcatccatgttagacttaccactcaggctagtgtctaggtcagtattgtcatcagtgaaatcaactaaatagagatgtccatttaacactcccctaaaagctagtgaatcatcacttcttctaaagacggttacatcaatgttggggaccttcttcctccgaaggtcctcaataatgtgactgaccatatgtgtatagtatgccatggattattacaggggggcttccgcttcaggatgaagggtttctctcatggcaaagacatacacgttattaagatgtagcccgaaggtgattataatgggcatctaagctatgaccaaagagcttcggcttaatatggtgacaaagactgagtcaaatgcttaccataacgggaaaggctactcagtccttagtgatgcatgtgtgttatagatgaatgtc

SEQ ID NO: 7891 - DNA, 461 bp, Zea mays
  unsure (1)..(461): unsure at all n locations
agctngacattggatcggtccccttgattgttctctttaccatccttaatgccagggcgtctcccattataaagcatacttcgagcaacattctctttcattttctagttcatactcggcatttatagcagttaatttagctatgtgatcattttgctgtttaatcatggaaaggcgatcatccatagcttcaatattaacatctatacatttagtacaaatagtaacatgatcaacattagatgtagatggtttgcatgcattcaattcctcactcctagcatttaattaattattctcatctctaagacaggaaaatgaatcattataaacattcaatttttcaatcttagaaactaaactgggattctcagttctaagacttgaaatcgaatcatgacaaatgctaagcctcttcagataagttttcacacttttctatttcctgagcataatcattt

SEQ ID NO: 7892 - DNA, 281 bp, Zea mays
cttcattgtaagacaatgacaaaaaccttacggcttaatgcatccgccacaacattggctttgcctgggtgataatggatatccaggtcatagtccttaataagctcaagccatcgactctgcctcataaataaaactgactgggtgaagaatgacttcaagcttttatgatctgtataaatatgacagatatttcccagcagatagtgacgccaaattttcagggcatgaaccacagcagctaactccagatcatgaagtgggtaatgctcttcatgtcc

SEQ ID NO: 7893 - DNA, 438 bp, Zea mays
  unsure (1)..(438): unsure at all n locations
atgctttcagacgagagattatatgctttcttctttctgaattcgcagtgggttttctcgaactagtgaaacnttggaaatgcctcgtattactaccctgcctcacttcctcggtagaggtgtatgtggtccatacaaccccgcggcaaataggtaacacgacttgtgggtaaagatgtgcaacatctgcagagtgtaaaactggtatattagccatgctcacggtcatgagcggctcggacactcacatgattaacttatggaattaaactcaatattttcatttgcactgcattgtgaatgttgttattaatcctgaactcttacttaatgtggtcgggatctatttacacttagtaaccgctaataatattttgactaactttaaaagcaatgctcagctttaaccatctcctttggtagcctacacttcacatg

SEQ ID NO: 7894 - DNA, 328 bp, Zea mays
gcctctccttgtcgtcatcaaccttgacatataactcttcctgattccagcccgccggccacttgcttcgatagctgaagacagggaacttcgcggtttctcgatagacaaagttatagcaaccgaagttatcatgtaatccatcttttctagccttcgtctgataatgcagctcatgaactcgacaaaagctgtccgcaaatggctccactgcctggcttcggagggcccagatataaacactaagcctaacgatagcgttaggagtcaactgatgaaagtagataccaaacctcttcaatacctttgcaataatcccatgcagggg

SEQ ID NO: 7895 - DNA, 379 bp, Zea mays
  unsure (1)..(379): unsure at all n locations
agctctgattgtgtcttggaatgtattgttagctcttgtattgaatgttaagggtggaatgcttggatgaattgaatggaggtggttggggttgtatttatagccaccaaccacttcctagccgttgcttcaattctgccgaccgcggacggtccgcgcccctattccggacggtgcgcccctgtacatcaacggctaaaatcgcaacggtcagcagtaaccgctatatcaacagctataatgcatttaatgcgtngtcagatgtcaaataaaggtagtcgcggacggtccggtcttgcaccccggacggtccgcgaggactctataattcattttaccgaacccgtcacctctgggtttttcggattctcacctaccg

SEQ ID NO: 7896 - DNA, 445 bp, Zea mays
agcttgaagctggcctctgcgccatgactaatgacgatcttgcggatagtcttgcatataacagtctgaaggtacaaaagattgtgcatttggaagtttatgaattttgaattattcttttgttcttatattaacccattcattcttttcatatagggtttaatacttagcaacgccttaagggcgcaaaagaatgctgaagacgagagttgcactattgctctcaacaaccttcgaacggaggttatcaagctaaggaacgaagctctggaaaaagacaaaattctacttacattggtggataaagtaaaagaagatgaagctaacttcaaaacccaatctgaagcccaaaaaattgagattgaagaccttcggaagcaactagccgaagctaaagagaaatgcgtagtcgcagaagctaaacgagaaattagcgaacactgga

SEQ ID NO: 7897 - DNA, 391 bp, Zea mays
  unsure (1)..(391): unsure at all n locations
tttaggtttgagagctctatgtttttcccataaatggagaaattggatcgcaacaatattaggaacttcctcttcaaaatcatcatcaacggtcaacaaacaaatgcaattaagcacatgtgtggcgtccgtcagggtgatccgctattgccgttcttggttattctcgcaatggaccctttgcagaggattattgagatggcggcagatgctgggctcctggggcgggttctgccaaataaggctaaacgacaatgttctctttatgcatatgatgcacgggtgtttgttacacacataatgacgatcttgagggtttgaaaagattctggacgttttgaacggtgtcatggatgaaatnaaatttgataaactgaattttccgattgaa

SEQ ID NO: 7898 - DNA, 402 bp, Zea mays
  unsure (1)..(402): unsure at all n locations
agcttcggtattacagcatatcctattattaacggtctaaccgacttaaatatagaatgaccttttagcccataaacgtctgagtcattgttgtaaacttttatgaggggtatgattgtaattcctcataggttgtgtcatgtgcctataaatagtgaatggtattcctttactattcacgcgttcctgtaattgcaaacatatcactcgggaattattgtttgtcaaggcaaaggtataaatgtacctaaacgttatattcaaacatcttagattcatataataagatatatgaatgatgttatttatttccaatatatttatctttaatgtttcacgttntacattactttgtatcatctctataaagttaattacgaaggtggaaccttcgaatattat

SEQ ID NO: 7899 - DNA, 345 bp, Zea mays
tcaagtttatgttttttttaagatacacggagaaggtgatattctcaactccacttcttaatcattatatctataaggtatttatatgagagagggaagaatagggacataaaggttcagatggataattcttttgatgacaccaatacgccttgtgtgtagaatcaaagaatctaagatttgagaagcattgaaaaggatgtaaggaggtaagatgatgagcctcgatggtatcccaatttaaacatgaagatgtttcagggacatagctatagtatgactaaccaagttactcaactaattctttcggccgaataagatatttgacgagtggagatatatatt

SEQ ID NO: 7900 - DNA, 410 bp, Zea mays
agctcgcatttgggtccataatgaaattgttactaaccttgtaggacccaacaagagttgtgtacctaagacccatgcctaaatttgccttgcaggtttatgcatctgggggctcaagttggattatcgacaacggatgcacaaaccatatgacgagggagaagaagatgttcacctcctacgtcaagaataaggattcccaagattcaatcatattcggtgatgggaaccaaggcaaggtgaaaggtttaggcaagaatgcaatatcaaatgagcactctatctctaatgtgtttttagttgagtctcttggatataatttactatttgtcagtcaattatgtaatatgggatataattgtctatttacaaatgtagatgtgtctgtcctataagaggtgatggttcac

SEQ ID NO: 7901 - DNA, 343 bp, Zea mays
ctcatactctgctgcgttgttggaagctggaaacagccactggtgggcatatttgaggtgctcgcctccacgtgcggcgaagagaaatcctgctcctactccctgcagcttcagcgagccatcgaaatacattcgccatacttctgcagtctctgggttatctggagcttgctggtcagtccactctgataccaaatccaccaatgcttgagttttgacggcagtgcgaagtctaaattcgatgtcatgagatcccacctcacaggcccactaggctattccgcccatggcttccttgttgtgaagaatatcccctattggaaaaccagtgagcactatgact

SEQ ID NO: 7902 - DNA, 251 bp, Zea mays
  unsure (1)..(251): unsure at all n locations
cgaagccagagccagcccatattagtcttaacaattaagccaggggctaattcaacattggtaacattgaaatcaactaagtatagctaaccatttaacactcccttaaaagctattgaatcatcacttcttctaaagactagtacaccaacattagtaaatagagaggtgtagcccactttgcataaatgagaaacagaaagaaagttggatctaaagaatctancagaaaaacattataaatggaatgg

SEQ ID NO: 7903 - DNA, 298 bp, Zea mays
  unsure (1)..(298): unsure at all n locations
attgtgctttctcctgggactctatttntctttaatgagactgaaagggaaatgtgcccttgggccatttctataaagaatntggtgattaagtgcccaacacacattaagggaatgagtatatgccaaaaggtggacaaagtgcaaatcaataccaaggtatgattctagacttagtacattggtttttgggtactaacatatttgtctaaatgctaaaatcagaaaaaagacaattggaaaagacttggctcgagcagccaaaactttgctcaatctgggtgcaccggactgtccg

SEQ ID NO: 7904 - DNA, 381 bp, Zea mays
  unsure (1)..(381): unsure at all n locations
agctngcatacatagctcatttgaatacctttgatcatatctcttttatatgctatgactaatgtgttttcaagtctatttcaaaccaagtcataggtatattgaaagggaattggagtctttggcgaagacaaaggcttccactccgtaactcatgcttcgccatcactccgagcaactctctattccttggggagaaatgagcatcaaagaaaaggacttcatccttgggggagagagtaaaagctcaaaaacaaaaggaccgtacttcgtctttggtataatcttaactcatttacttatgaccaaaggggaagcaattacttcgagggctctaatgattccgcttttggcgattcatgtcaaaaagggggagaaatg

SEQ ID NO: 7905 - DNA, 354 bp, Zea mays
  unsure (1)..(354): unsure at all n locations
cgatcattgcgctcatacaaaatctgcttccgcgcaagtgtaagagcttcgganaagacaaaaaagccaattcaaaaaatttcaagtgaatcataatcaaatggccagagttcgctctactgcaagagtcgatcgcgagggagacaaaaccgaagctgtggaaactgttcctatctcggaagcaataaagcgatctgggttggtaacaccggaagacgcccctgctgctgaagcagagcaagcagatattgaagagaccgattctgaagatgattacaacatcgcagtgccgagcaagcctagccacctggacttcggaaagtcgaccatctccaaaactgattntcctaatat

SEQ ID NO: 7906 - DNA, 302 bp, Zea mays
  unsure (1)..(302): unsure at all n locations
agcttgataatatgcatatcagactgttggattgaggcttcctttgagggcatttcctttagaaatattcctcgtggagaaaacgaatatgctggtctattggccaggacatcaacacatgggctgacattaccgttggaagtattttacgaaagcataaaagctccttcggacgagcttcttgaacgagcgatcctcagcatatccnctgtgtatactgcatacttgagagctggaattatctctttccttcaaggagaccgtctttcagacgatgaatcttattacataaggatctaatc

SEQ ID NO: 7907 - DNA, 236 bp, Zea mays
tctatcatttgaacacgcgagatttgtgtacctcggagactgccatgctccaagtcacataccgtgtgttcgtgagagttatcaatgacgacttccctgcctgcttaagcttcctcttcaattgcggaagatcttctccatcatcagtcacaacagatcacacgactataggacactcctttatgacatgaccacgacctccacactcgaagcactgtataccactactgttgggt

SEQ ID NO: 7908 - DNA, 462 bp, Zea mays
  unsure (1)..(462): unsure at all n locations
agctggcnncctttatttttctnttggggatttacttctttctactctatataataggcttacatgtcaaccactttgtcctaaatgattgtgccatgtagctattgagaaaagagatttggatcccacactaacaagaattagcatgctcatgattgacacgatattgaaggcaaccaagtagcggactgaaaaattaatcaagatcgattaagtcaatgctgatcctattcttatctggtagacttccgaacacttctcgagaagacccgtcaaggagcatgtgaaggttgtcctagaattgacaataccacctagaatgtcgctaaatttcaccaagatatgtgatgaataatgagatagagacaaaaaagggataaatagatattgaatggtattttgatcgattggacattgcatccctcaatcgatcgtggcctctcattatatagaggggggatc

SEQ ID NO: 7909 - DNA, 459 bp, Zea mays
  unsure (1)..(459): unsure at all n locations
tcgtcatctgagaggaatntaccctgtatgtaagagatgaattcagttctccagtcttcgctataaacaggagatatattgaggattgctctttcaagaagttccaccgaaggtgcttttattgtttcgaagaacacatccgaaggtaagggcagcccctgtgttgctgacttagctagcaaatcagcatgctcattttgtcctcgagggatatttttgacagaaaatccctcgaaggagacttcaactcttcgaaccatatccagatacttttcaagcttcggatctttagccttgcaactcttgtcaatatgacccgaaacaacttgggaatcagttttaagaatggcccttctgattcccattgcttttatgcttcgaagacctagaagcagggcttcgtactcggcaatgttgtntggcaactaatatcaagttttgccgcatagcaagttttaa

SEQ ID NO: 7910 - DNA, 261 bp, Zea mays
taacgactccacactcgaatggctatcttgagacgcaacgtcaaacctatggcttgcggaccaggccttaacaagccccagccactggcgaatattctatgccattttctgcccttgacctcatcaccagggcggctgcggggtccacctttgtgatgacacagggacataataagatgtgtaacagtgagtccggacccctatgtgaaaatgtgaaacttttcatacactttctgacctgggacgatggtccaggacccc

SEQ ID NO: 7911 - DNA, 452 bp, Zea mays
tagctggtgaagattcttcattccaacatattctagtctgtgatgccagagccaacccatattagtcttagtaattagacaagtgttgagtacagctgtgttttcattaaaatcaactaaatatagctgatcctctaacactcccttaaatgctattgaattgccacttcttctaaagacagtaacaccaatatcactaataagacagttgtagcccattttgcataattaagaaacagaaagcaaattgtaatctatagaatctacaagaaaaacattggaaatagaatggtcaggtgatatggcattctcatttctaagactggaaatagaatcattgcaaacatttaaatctttaaccttagaaattaagctagcattctcattcctaaggctagaaatagaagtatgacaaatgctaaactccttagttaagttttacatttttctac

SEQ ID NO: 7912 - DNA, 353 bp, Zea mays
tagaacactgataacccttatttgtaaccctaaaaccctaacgagagccctattcggtaatttcaaggtctatgcacttttagcaaaagtgtatacatcagagtgatagagtaacaaaagttagcaacgttaatgttcgcggaattccaactttttggtgtgaaattggggttaaatgcgagagatccacgagcacccatgttataagccctgaaaacagtgttaacatgtcaacttcaagcctttgtatctctagactatggggaggctgtcatgaggcaccacaacaaagtgggaagcgactatggactttaagttcgttaagcgacctacccaaaaaggtacagaatgga

SEQ ID NO: 7913 - DNA, 398 bp, Zea mays
  unsure (1)..(398): unsure at all n locations
agctttatatgcttccaatgaatgtggcctttgctgtctttctgtaaaccgcttgacagttcatccatgtgcctaacgctgtcggcgtttttagaggtaaccgccgagcgatagctgatgataccggcgtttttagaggtaaccgtcgagtcatggttgatgctgccggcgttttataggtaaccgccgaacgatatctgacgctgcagacggtttataggtaaccgctgagccatgcctaaagtattgctttcccgagcagtgacttggaactctttagaaatagtgcccgacccgagaaacctcatttatactcgcgctggcgtcgttntttattactaagccctaacttcacttttccgcctcgaaccactcctctgcttacctgagatcttcgt

SEQ ID NO: 7914 - DNA, 252 bp, Zea mays
catatatgcataagaacattacaccattcaaagaaaaacatagtgaaacatgctaaatgaaatagagtgcgctacttcggtcacacaaggaaaaataaacacgatcgttggagctatggacaagaagttaacgatgttacgctcagcaaatatcacttggaatatttaatccgatatttctatactgactgatagtaatataatgtgaaataacactactacttagatactggctaacttaccatattacta

SEQ ID NO: 7915 - DNA, 332 bp, Zea mays
acgcttcgccggcaatttctatggcacgtacgtgcgccccgggaattcctgggacctccgaagctgccggcatcagccgggagagtctcttcgggactacatccggcgattctcgaagcagcgcaccgagctgcccaacatcaccgactcggatgtcatcggcgcgttccttgccggcaccacctgccgcgacctgaggagcaagttgggtcgcaagaccctcaccagggcgagcgagctgatggacatcgccaccaagttcgcctctggccaggaggcggtcgaagctatcttccgaatggacaagcagtcccagggccgcccatcggaag

SEQ ID NO: 7916 - DNA, 335 bp, Zea mays
taagctcatgagctccgaagtggctactgcatccacaagggaatctattcttggcaatgaaagttcatccttcgggcatgccttattggatctataaagtcaatgcacattctgcatttttcattagctttctttaccatcacagtattagccagccactctgggtatgtcacttctctgataacactggcacttagaagtcttttcacttgatttcgtgcaccttccgctttatcatcggacattttcctaagcctctgctttcttggtctgagagtcgggtctacattgagtgagtgctccataatatctctattgataccgcagagatcatt

SEQ ID NO: 7917 - DNA, 401 bp, Zea mays
agcttctacagaagatggtcgagtacattatggccgataatgactttcagcagagaagggaagaggcctacagatactccgagatgactagggacttccgaggaaggctccatcctagtcatgtcaggacgattcataaccctagctcaaatgatgatagtggcaatcatactcaagggcatcagcacagctcttagtcatcatgaagacaacatagctccttcaggccaccagctccaagaggaagaggaggaagaagcttcggcggaaggttcagctcccaaccaagaaggttgttttgcttattctgtggagaagacaaaggacatgcaacaaggacgtgccaagtcacgatccagaaataaaaagaaatagcttaagacgaagcatgacattatcag

SEQ ID NO: 7918 - DNA, 416 bp, Zea mays
  unsure (1)..(416): unsure at all n locations
agcttgtggaggaccagatcaccaaagcttataagtttctgtatgagaagaggccacccaagttccgttgatgaagcaccagaagaacaatcaaggaaggaatccatgtgggagtttgcaagagaaaggtttgtgtgttggcatctatgctccttcaataagcaagctgccaagcgaaagctagaagcctgaagatgatctttgagtagccagaatcagtgttttcaatcagcaaccagatgttcctcaaaggccagactttgttgaagtttcatctcctcgaagagttgcaaagtgaagatatgtagctgaagtaaagctatacccataacccttctaaaccgaatctcgaggacgagattccttctaagtggggtagatntgtagcctcccaaaaattcaaattctgaaatttt

SEQ ID NO: 7919 - DNA, 429 bp, Zea mays
  unsure (1)..(429): unsure at all n locations
ttcctcagatgatgatcaactgacttctgcttctgaaatatattgnatctgtatagaatagtagattaattattgagaggtaaaaaggttatataggggtgaggagatcttggggcaaaaggaaaccgatagtcaagatttcctcagggcaggaaacttctaatcaggatcctatcgtaaggaaacccccaattaagatctcatctaatcaggatcctgtcctaaggaaacccccaatcaggatcccatcaggagtctgtaaccatatatctctacaataccaaatatggccggccggctatagagccaggcgcaggacctcgacacacagtaatacatcaaatgtctcaacagttctaattctgagttcatgcagaangttatcaatatgcaagatgctatattacgtagtctgtttgatgatgatct

SEQ ID NO: 7920 - DNA, 393 bp, Zea mays
  unsure (1)..(393): unsure at all n locations
agcttagatggcgcacatgaattgtgactatcatatactnttcaaagttcactttgagccgtgttgattcaccaaagaagacgagtaaatcctttatataggatagctaattaacatcaccttgcatgaagatcaaagtgccatatatataatttaaaggtggcaaatcattgtctctaataaggggaaacagaaggttcaatgcaccaatgtatggcacaatttagaagagtatgctataaatttactaccaacacaatcagtaaaggtgagaggggatctccgtgccttacacctctaagacgatgaaagaagcttttagacacaccattgaggatgacaacagaggttccaaattcaaaattgagtagttcgccatgatcgcactttgga

SEQ ID NO: 7921 - DNA, 315 bp, Zea mays
ttgaccacttgatgaacttgatagaaccagaatgggagttgataataactccgttgttgaagactcgcaacgccgcttgctcattttgcatgataataatgaagtcttcaggcgctgaacggtgaactgataaacttgcaggatcaaaatcatactccgctgcaacttctgccgcctaaagcttagctgacaccggcggccgcgaaccaatgaccatgacaaacagagcacaccgccgaagattgttctccaccatagttaaatcccttgctcgctcaaggacgcaaaccggtcgtgtcgtcgaacctgcagact

SEQ ID NO: 7922 - DNA, 376 bp, Zea mays
caacttatgaagaatcttcatctcatcatgggctactcggcggtgccagagccaacccatgttattcttaacaattaagcaagtgtccagttcacctctatcaaaatctaccaagtatagctgaccctctaacactcccttaaatgctactgaatcatcacttcttctaaagacagtgacacctatatcagtgaataaaccgtcgtagcccatttgacataattgagataccgaaagcaaattgttattcaatgaatcaacaacaataacattggaaatggaatgatcaggggatatatctattttacccacacccctgaccaaaccttggtttccatctgagaacacctacagggggggtgaataagtgatccta

SEQ ID NO: 7923 - DNA, 398 bp, Zea mays
actcagctcgcaatgaagagatggcgctcgtcatcaagagctttctccaaatcctcaaacaaaggagggggaaagactacaagtcccgctccaagaaggtttgctacaaatgtggtaagcccggtcattttattgctaaatgtcctatatctagtgacagtgaccgaggcgacgaccagaaggggaggcgaaaggagaagaagaagttctacaagaagaagggcggcgatgcccatgtttgtcgggaatggaattccgacgatagctcaagcgactcctccgacgacgaggacgccgcctacatcgccgttaccaaggggcttctcttcccaacgtccgccacagtgccttttggcaaggacgggaaaagaaggtaaatctaattcttccttaatata

SEQ ID NO: 7924 - DNA, 391 bp, Zea mays
agcttctaaagggaaaacacgtgatatgtttaactaatgttaccttcgaaaaagatagaccttgtacagcttgtcaagcaggtaaacaagtgggaggagcgcatcacagcaaaaatgtgatgaccacatcaagacccctggagctactacatatggacctcttcggacccgtcgcctatctaagcataggaggaagtaagtatggtttagttattgttgatgactcttcccgcttcacttgggtgttctttttgcaggataagtctgaaacccaagggaccctcaagcgctttctaaagagagctcataacgagtttgagctcaaggtgaaaaaaataagaagcgacaatgggtccgagttcaagaaccttcaagtggaggagtaccttga

SEQ ID NO: 7925 - DNA, 361 bp, Zea mays
  unsure (1)..(361): unsure at all n locations
agtaacataagaaagttanatgcgaattgattctagcctagctacgggtgcataagtttcaccaaaattcaaacctttgacttgtgagtatcccttggccacaagtcgggctttgttccttgtcaccacatcatgctcatcttgcttggtgcagaacacccacttggttcctacaacattttggttacgacatggaactaaatgacatacctcattccttgtgaagttgttgagctcctcttgcatcgccaccacccaatccgaatcttgaagtgcttcctctaccttatgtggctcaatagaggaaacaaaagagtaatggtcacaaaaatgagccacatgagatcgagtagtaccccct

SEQ ID NO: 7926 - DNA, 376 bp, Zea mays
agcttgcacttaccaccaaaccgcacctcttttcatattacattcaatggctcaacaatagtggtaaggtcaacgtaaccaagctggtaccaattaattttgctatcggttcatatctcgaagttgctgactgtgatgatgtgcctatggatgctatgaatattctgctacgtagaacatggcaattagactcacaattgttgcatcatggtagatcaaatccatattctctcatataccatgataagaaaattattttgcttcccaagtcccctgacgctattgtgcgcgatgatgttgctaaagctaccaaagcttaaactgataacaccactaatcttaagttgcttggtataaccaagatggtgataaattg

SEQ ID NO: 7927 - DNA, 360 bp, Zea mays
tattaggacctataaaactcagcttctcaccatgtcgctgctagccaagttgttgcagctatctccatcaatgatcaaacgacatgaacgcttcttaatgacacactttgtttgaaacaacggatgtcgctgattctgctctgccttcttcatttgtgcactaagcacacgctgtacaatgaggctcttataatgctctgcatcatctgcaccaatctgttcttcgggtgggtccttagtgcctacgtcatcatccgcaagcaaagcaagtgtagcttcatccaaatcactagcagacgaatacccaccatcgtcttttaccacgcaaacacgctgattatgacaataacgcttgccgtg

SEQ ID NO: 7928 - DNA, 466 bp, Zea mays
  unsure (1)..(466): unsure at all n locations
agctntagatggtatgctctctaaacatagtctctctataaaaaacttacgtgggcaaggatatgatggagcatcaaatatgagaggggaattccatgggttacagagaaggatattggatgagaacccctatgccttttatattcattgttttgcccatcaattacaattggtagttgtgtctgtggccaagtgttgctcttcagttatggatttcttcaactatatcaatttgattgtcaacgtagttaatgtttcttgtaagagacatgatcaacttgcccaatgtcaccatgataatcttgttcaaaggctaaagaatgatgacatgttaagggggagagggagaaaccaagcaactaatttaacaagagctggggatactagatggggatcacatcataaaaccttgtgtcatcttcaactcatgtggagtgctgtcttataggtgttagagaatgtatgt

SEQ ID NO: 7929 - DNA, 477 bp, Zea mays
  unsure (1)..(477): unsure at all n locations
tcctaagtgtgctctcatacttgaatttaanatctttcctctcatgaccagcaatcctaagcgacttgtctagaattgccaaagtagcattcatctcttctagatcagtggtgagatcatcgacgaaatgtgataccttagaagcagagccatcattgatgtccttcccatcgccgcccaccgcatcatcaccaagggccatggtgcanaggcctcctatggtgttggcaatgaagcataacccattcatcttgtcgtcgacccgcctttcagtgtcctcgtcactcaaggaagaaactgtgttgttagagtcatggtcgaggtcgctaagagaggtgaggaaggcacactccttgatcttcgccttctacaggtacttcttcgtgagtgcctccttgttgaatcctcccttggacttgtacttgttggaggtgactaccgctttcccttacgccgactagagtggtcacacgagct

SEQ ID NO: 7930 - DNA, 465 bp, Zea mays
  unsure (1)..(465): unsure at all n locations
agcttatgaagattcttcatcccaacatgatctagtctgcgatgccagagccaacccatgttagtcttagcaattaagcaagtgtcgagttcagctctatcaaaatctaccaagtatagctgaccctctaacactcccttaaatgctattgaatcatcacttcttctaaagacagtgacaccaacatcagtgaatagacagttgtagcccatttgacataattgagaaacggaaagcaagttgtaatctaaggaatctacaagaaaaacatttgaaatggaatggtcaggagatatagcaattntaccaagacctttgaccaaaccttgatttccatccccgaatgtgatagctcgttggggatcttggtttttctcatatgaggagaacattcttttctccccggtcatgtggtttgtgcacccgctgtcgagtatccaacttgagccctcggatgcataaacc

SEQ ID NO: 7931 - DNA, 398 bp, Zea mays
  unsure (1)..(398): unsure at all n locations
agctgataagccgctccatgtctcctttattagccaatatggntctaaagcgttgcaagacataacaacaatacaacagtgcaggcgtttagggctgcttttttggtgcggcccatactccaattaggtatgggcggcccatggtcgcgcgcacaatagtcgtttcttcctccgtgcgcacgatggagcgctcaaccgttcgttccggccgccccttggtcagctccacgacggcacgacctcagctctccaacctgggcctcggtactccatcaccatcgcgcatcggattctcatcctgtatgcctccttcctgctggctatctacttctgcttcngccgcgagagtgactactgggccggggaaacaatcaccacagagtccagctgtggccacc

SEQ ID NO: 7932 - DNA, 339 bp, Zea mays
ctttctttcgacatgctgaggcttgctgaggtaacactggtccttttacgccaagaatcaagctgtcagcaagtagagtcagatggtgaggatgatggcgacatcgaccatgatgaagtcctcatggatgcagtttcagatcttttgcctgcttttgcaaaagtgatgggatcttattttgatcccatatttgcaaaattatttgatccgttgatgaaatttgctgtatgttaccctcttaccctatctctttgcacatatccatagcctggttgctcgaacctatgggtaataattcataaagttcttatttttaacacaggtgcttggtttgctttg

SEQ ID NO: 7933 - DNA, 381 bp, Zea mays
  unsure (1)..(381): unsure at all n locations
agctngaactctcttcgtcggagttccattcttcacctatgtgagcttggctcccttcttgaagtatcccttgctcttgcctcccttcttcaacttgtcccttttgtaatccttcttcgcatcttgttcctttttgtttggacaatttgctatgaagtgaccggtctggccacattcatagcatgccctcttctttccttttctctgatacctatcattcttccttacaaacttcttgaaggtcttgatgaacataacagtgtccctatcacttgagctctcttcatcgcttgatgtttcaaccactttctttgacttgtggtctctgctattcttgaaagaatcttgctcatttgaaaacaaagcatgtgagtctcttgt

SEQ ID NO: 7934 - DNA, 482 bp, Zea mays
  unsure (1)..(482): unsure at all n locations
ntatcaaatggacgtgaaaagtgcctttctcaatggaccaatcaatgaagaggtctatgttgagcaacctcccggctttgaagatagtgagtaccctaaccatgtttataaactctctaaggcgctttatgggctcaagcaagccccaagagcatggtatgaatgccttaaggattttcttatcactaatggatttaaagtcggaaaggccgatcctactttattcactaaaactcttgaaaatgacttgtttgtatgccaaatttatgttgatgatatcatatttgggtctactaacgagtctacatgtgaagaatttagtaggatcatgacacaaaaattcgagatgtcgatgatgggggagttgaagtattttctaggattccaagtcaagcaacttcaagaaggcaccttcattagccaaacgaagtacactcaagacattctaagcaagttggaatgaaggatgcaaacccatcaag

SEQ ID NO: 7935 - DNA, 300 bp, Zea mays
  unsure (1)..(300): unsure at all n locations
cgagcagcagcttaggcaaagtacaaatgaccctaaatattttgagcacttcataccccgggagccaaaaacccctaaaggaaccctggaaaaccctgaaacccaaccctaggggcccatgtgcnaaaccaatgcaccttagggctacagcggaagacaccaacccaaaatgaatttaagtcatcctgtgcacaaagatgggacatggcaagttaaacactaaggtttcgggtgatctgggacaatgaccttttaagcactataaaagctaagcctgacactcaagtgagttggtacaac

SEQ ID NO: 7936 - DNA, 469 bp, Zea mays
tgtgaagattcttcatcccaacttgattctcaaaatgaacattggttagtcctaaaatatgctctccatttagtgtggcggaactgcccgaattattccaacttaagtgcctaagccctgccttagaggctggaccacacttaaatgggaataacccgtcaatccctcagatctagtccgacacggccactgacaggatcaagtagcacaatctcactcgatggtgagtcacagagcaaatacaataaagcataaaaccatgcatgtgagagtattaaattattacatcatcatcatcggagtttttgcaaaagtaaccatcattgttcgaagtgcagcggaataaaactaacggtaaataaacagagagatggggaagcctggcccatcactcctcatgttcctcctcagccgaggtagggtcccactcgacagtccaccccggtggcaagatggacggccaagtcac

SEQ ID NO: 7937 - DNA, 434 bp, Zea mays
agcttcgcgatgacagaccgtgtgtcttattattatagctactaatgatatgggatgtattcgtcgtccggtatcagtattattaactgttaacctgttacttgcatgatttatttgtcttcacttgacttactgtgtggacgacattcttctcatccctcagtgatcacagcgtcattatgaatttagtgcatggactactattataaccttttccatgaacaattaatgtgctaccgaatccattcttaattcattattcatgtgcctcagagcccctttctttaacatatgttcctttattacttttcaaatgccctataatattcactaaatgtccactggacctatgcttataaaggtattaattcgtttgcactaaacgcgcaccacatattagatgtgtcattgcatttccccaaaatatcaatcat

SEQ ID NO: 7938 - DNA, 420 bp, Zea mays
  unsure (1)..(420): unsure at all n locations
agactgcagcatgcaagcttgtgaacttgattagtgatgtactcnttgtgaatcataagatgcccaaggatatgtaccagtccaagaagctgctctcaggtatcgatatgcactacgaaaaaattgatgtctgcaagaataactatatgcttttctggaaagagaccgtgaatgagacgtgtacagtatgtggtgagacgagattcatagaggttataaacgatgatggtgtgaccataacgatcgagggtagcatgtagtagcttcgttacatgcctcttatacctcggttgaaacattngtttatctcgaagaatacaactatgacacatgagatggcacatagaagatgtcatgacactctngatgtcatggcgcacccaactgatatagatgcatgaaagtcactatgccttcgat

SEQ ID NO: 7939 - DNA, 379 bp, Zea mays
  unsure (1)..(379): unsure at all n locations
tgtgaaggttcttcatccccacatgtgctaagcggcgatgccacagccagcccatgctagtcttagcaattaagcatgcatctagaccggcttcctcttttgcaaaatcaactaagtaaagtttgccatctaatgcacccttaaaagctaatgaaccatcacttcttctaatgacaaacacgtctatattngtgaatagacaattatatcccatattgcataattgactaacagataacaaattatatccaagagactcaactaaaaacacattagatatagagtgctcggatgaaatagcaattttacctaacccttttaccttgccttgattccatcaccgaatattattgaatcttgggaatccttggttttacgt

SEQ ID NO: 7940 - DNA, 351 bp, Zea mays
agactgtgaacgtaggcaaggatatgactctgtgggacttgaccgacacagggcgctgtgcagtggagcacgcagaggtgagcgcgagctgaacgcaaacaacgctggcgttcaacagcctaaggccaccacgcaaggacgtagggagacttctaagtgctgtcatgtgctaaaagcgtggagagggccctggctttcatggcttgagaaacacaggaggatagaacattttcagagacttatacgtattttagataggacaaacaataacaacatgcagatcatgagaggtgacgtgagggagttggcctatgatatgattgaagactgtctgatgagcccccgagagca

SEQ ID NO: 7941 - DNA, 343 bp, Zea mays
ttaacaacaattctcaataataccgaatggtaacaccgaccggattttgtccaaaaaatggtccccaccctaaatcccaaaatgtgctctatggaaaggaaacatatgtggggggaggtgtaccagcccttggtcaatgataaatggctaccccaccccctatttaggcgaaaatagtcatgaacgacgactttcaataataccgaaggctaacacctatggattttttaccaacaaatggtctccacacaaaatccaaaaatgggatctatggcaaggaaacatatgtggggttaggagtacgaaccctctgcatatatcaatgggcacccaaccccatttt

SEQ ID NO: 7942 - DNA, 405 bp, Zea mays
gtgacaactccacaactccaatgccatctctatgactcttcagtcatagcagtagccatcacgagatcaaaccacccacccacccacccagttgcatatgcgatcgccggtatcaagagcatgggttccacaatatagccagtaattagttctgacgtagcacccagcttgtcaaaccacaacaatggtgatagctcaagcacaacgagagacttgctggcaaagaataaaaagtatgaaactatcctgcggccacaaccgttcaagagccgcagcaagctgatttctgcgcctctgctgcatcagcttccccttcagccttgatcttgatagatcgatcctgcgaacagggcagctaaggaactgtggaaagaaagcacacgtgcccaatgttcacacgctatg

SEQ ID NO: 7943 - DNA, 386 bp, Zea mays
agcttgcacaagcttgaaccgaggaccctctccaccggaatagcgcaatcgtgctcgccgaagttcggaaccccgccggagcacgtggaccgggtaagcctctgcaccatttcccaattcgttgcgcgcatggcctctacatcaccccgtggagctcctcgtgcactttaattgaactataccgtcgtggtttggctggaacaggagccgccgacgacccccgccgcctgtgctcgtggccagggtagctccaaccaccttcgacgccgacccgcacgccgacgtgaccgtcgtgacctccccgacgtcactgaccaccccggcggagctctactgctgccggtaagcctcgccgccgtaatctatgccgcgtgtactggttaaac

SEQ ID NO: 7944 - DNA, 382 bp, Zea mays
tcagctccatctatgttatggattgctcttgagtcagtccagtttccttcggcccttctggcagcttcctgacttccatgaatagcgatgggtccttgatccgaaggtatcttcatgccaagataagcccgatgaagaattgcttcgaaagcattgagagtgccacgaccaataattgcattgtaagggtattccatgtcaacaatgtcaaacacaacttgctcagttctagtgttggtgatgaacccgaaggtcactgacatggtgatcttgcccagtgctacaatctgtcttccttcgaagccacagagaggatgtgtagcatcatgaatcttatcttctggctcttgcatatgtctgaaggccttagcaaatatgatat

SEQ ID NO: 7945 - DNA, 356 bp, Zea mays
  unsure (1)..(356): unsure at all n locations
agcttcttggagcaatagttgcattntttatgtacattgcctccaatccgcacttctgtgaactctttccaaactgctgaagtttgtttcctcttggacccagctacaacatcttcgtcctcttcatcctcatcgtctatatcaattggctctgaatcgttgatagaatcagtgacagatggtgactcttgcataggtgcttcagatgctggacactaactctggttgcttccatcactcccactagttgtagacatttttctcagtctgtagaaattaacaactaaatatcatacaaatctgtcgacctccatcaatcaaacaatactaacaacacataaatattcttaccgatg

SEQ ID NO: 7946 - DNA, 349 bp, Zea mays
caaacctttgggaaagaacagtacctaacaactttggctgctaccgcttcctctctcggtccggggcaagctgtcccgtaccaacctttctgaagaaatggcccggggattggatgacagaatggttttatgtgaagaatgacttatcagtacgagaagacatcaaaggtataattatgcgttctatttggcaaagcttctgcccttcgaggccgaaggttgaaatgaacgaagccgccgaagagtgccaaagagccttcggcgttgtctgctcttttatatgaacaagggacttagtaccagagcatattgtcttcagggtgtggccgcttgcggagaaatgggaaat

SEQ ID NO: 7947 - DNA, 325 bp, Zea mays
  unsure (1)..(325): unsure at all n locations
accaaatgagctgtgttatataccatgtttttaanagcgctaggagcttcgcactagcaccaatgtggttcttgatgcctgtattttacaacctgacgtggctgatttgagcaatgatacactaaattaaggaaattagcaaatcaaagtgatgcttccatgagtactacgatcacagttcatcttcttcatctctaattggccatttatttacatacattaagcccaagacatctccatgcagaaaaaaggacatacccaataacgtatgctcccacatgaattgggatctgggaaagggatgagtcaagtctcatgcacaaaa

SEQ ID NO: 7948 - DNA, 198 bp, Zea mays
gcctagctaccggtgcataggtttcaccgaaatcccaaccttcgacttgtgaataccctgtggccacgagtgaagctttgttccttgtcaccacaccatgctcatcttgcttgttgtggaagacccatttagttcctacgacattttgtgtaggcacgttaactatattccatacctcgctactcgtgaaaccgtaga

SEQ ID NO: 7949 - DNA, 349 bp, Zea mays
  unsure (1)..(349): unsure at all n locations
nnacgggctactggcggagctagccgaagcactggcttgttcatatgatggctggagcgggctggccacggaggccgaagctctggcggcaatggcgggcggacataagttcgccggagctaacggaaaggggctggccggtgagggtgagtgcggtgcgaagtggggcgcgcctgggaaggctttataagcgcggcgcggcgcaccagcggtcgtggaccggcgagtgcgcgcgggcgcgcactgggaggcgcggcgcgcgaacgggcgtgaaccacgggtgacagccgcggtaaacacgtggtaccggtgactctgcccctgtcaagcgccgaatgcgacaaatctt

SEQ ID NO: 7950 - DNA, 410 bp, Zea mays
  unsure (1)..(410): unsure at all n locations
agctntattgatgatgaaatcttccgctttctttagtcaacgtgcccttgagagttataaggtatcgctaggggtacaatctcctgaggtgctcgatataccatgaattccccacttcggagccgtctatctgagtgagttggtaggatcccggtcgtgtgacctctgcaacgacaaacgaaccttcccatggtggtgacagcttgtgttgtccctccctcgttagtactcggcggaggaccaagtctcccactgcgaaggatcaatgtcgcacgactctgtcgtggtagcgcctcaaggtctgctagtatccggtcgactgaattaccatatttaaccgctctttctctagcatgtcaatgtcctctagcctggttgctccacgccagtatggtttcaaaggtaatcgg

SEQ ID NO: 7951 - DNA, 459 bp, Zea mays
tactaatatgttcactgctctgtcggctgccatggtgattttatacataagatatcgcacatatacctcaggaatagtgactctacttcatatctacttgctgagataggtcgcgaattgcctaacgtgggcccatctttcttcttgagtgatgctcttgagttatgcatatgccaccacctctgacttaaaaagaacatctggcatcattctgaaaccagccgaggagtgagcattaaaggtttagcaattctcaaaatatctatgttcaaagggcctgagtgaagaataattacgaagtgcttttcactgctgactcgataacaaagtagtgtaacataatggttaaagtggttaccctctatatacttggaccgagggatgactggtatattaacaagtacaaaagcacatcccgctcacatctgttgtgtattataagtgagcagtctgggaaat

SEQ ID NO: 7952 - DNA, 198 bp, Zea mays
cacctgccgctgcagctttggtggattggaaggatttttctcttttgtgtgcttgcattgaatgctaactcttgttagtagttgcggacgtgcaaaactcgtatgactctaatgttggggtggtctcattccccttccccctcatcctctccttctcccatcactctctcctctctctctctactccttcctcctctc

SEQ ID NO: 7953 - DNA, 476 bp, Zea mays
  unsure (1)..(476): unsure at all n locations
actcagcttgaacagcatatgatacttaccgatagcgaataatcactgaacaaattcagatttctggaacattggtaataatgaattaacgagaggagagaattaagctatatgtgaaagaggtattatgattttagtaaataatgagagacgcaaagaaaagatagctaccgtacaaagacaacattatcttcagagatattacaaaaccctctagtttgagaactatattttctcaagggattcatatttttttaaaagaaaataaactaattttctttaagaaaataaaaatctctgaaaaatgaggttccaaactaggcctaaaaaggaattccagttattggtcaaaagtagtttttccccgcgaagtataatgtttggtttgggtatcacgggataacttcactcaatcaaagagtaaataatagagnataaaattcagcttcccgcgaggatattggacaaataccaca

SEQ ID NO: 7954 - DNA, 470 bp, Zea mays
ccttaaaactcaacttgcacttttattaattggacattgactttcgccatgctctcctcccatgcgaggcgagcgaacgcgcgcgcgtgtggctttgcactctctctcctctcatccatgacttggtgagagagtgtgacttccatatttaagctagctccactgcactaagactagcaatatggtgctattggttccaccattccctatccatacacatatatgggcctttgagatttttctgtgatttaattgaatttctcaattgggcctagcccataaatcctaacaaaagatgcaaatgaaaaattataagacaatactacaataaaccaaagtagattgcaatgagaaaaatatgaggcaatacttcaataatggatggacatataatataatcgacatttttttgctaattttcaggtgtacctgcagtagtatataatggagaaaaaaatcaaatatcatgg

SEQ ID NO: 7955 - DNA, 400 bp, Zea mays
caagctctattccagggcacgtaagactatgaggagtacctgcaggcatacgtccgaaagttcttgtggctcaaagcccaaacgccaatagtgcctaatgagatcgtcaacaaagccatgatcaaggggctccgaccaagaccgacaacacagtattttgcaaggaagccaccacaaacattggagaagcttctccaaaagatggatgagtacatccgagctgacaataatttctgccagagaaaggaggaagcttacaggtattctgagatgactaggggcttcggaggaagactccaccccaggcatgtcagaacgatccacaatcccaacacaaatgatgacatatcaaatcacacccaaagcagccagcaaggctcacaatcttcgagaatgcagc

SEQ ID NO: 7956 - DNA, 431 bp, Zea mays
  unsure (1)..(431): unsure at all n locations
ctgcagcttcgatggatcaaggcgtcgcatgtttgttgactcaccactttacagcataattgaacgcgtgattcttgtgtagcttgtgagcctgcgtgcagactcataccagctgcatctgtggtcacactctgggacccctggaactgctgcatatggacgtatgcagacctgtgccctatgtgtgcctaggacggaacaggaatcgcttagatatggtggatgcatgttcacgattgatcgggtgcactgtttggggataattatgatatcctaggaccctcagcgctctctacgagaggacagacgagtgtgagctctggtgaagaatataaggagcgacaacgggtccgagttcantaaccttcaagtggaggagttccttgaagaagaggggatcaagcacgagttctctgctccctatacaccac

SEQ ID NO: 7957 - DNA, 435 bp, Zea mays
tgtagaatagcttcatcaaagaagtttagccttcaagattctaatgatgcgcgtccacaatcaaagaggctcaaaaaggtaagaacatcttttgtgatttgtgttacaagcagccatctggtgtgttacttggaatacacagttctataaaaccaaatcagaagtggccgcaacatgtaatgatgtcaacacaggttatgccagtttcaaggtagaatagtgcgaagctgatgatgaggctgttggcatggtgatcgcaacagcttgtgctgtcaatgcaagctaaacaatagccgaccagatcataaacattagagaatataacatgtctaatatactaattcaaaatgaattgaagcaaatggttgcaagtatagaataaaagatgaaaccaactgtacggcgcaagcaattaccttgaaggcatgagtggca

SEQ ID NO: 7958 - DNA, 444 bp, Zea mays
agcttgtgaatgacttgccgaatttcctattctgctggttgattacccacgtattctggtatatagagagagtagcacgaagcagtatgtaaaacctgcttcggctgattctgtcgcgcttctgcttcggcaatctcttttttcttctgaatggtgacctgacatgttcttgtagtgtggcccttgtcttcaccatagaataggcaatagagtttcctgggttgatccccatatcttcctccgaagcctttgccgcctctgccccttggagttggtggcctaatagaacttctgttgtgccctgaatactgtgagctattatgtggcccttgaaacaggcctccattatcatcaatctcgctggagatgtggatagaactaacatgcctaaggggattcatctccgatcccctttctattataacactataactcttcctcttt

SEQ ID NO: 7959 - DNA, 362 bp, Zea mays
  unsure (1)..(362): unsure at all n locations
acggacacttaaatctcagcttgatgggttgtgatggcgccacataattgatgctaacattacatttncttcaccaacacttcgcccataaaaaagatcaattctcattttcaattgcctgtttgcaagacaagtgataattgcaataagtaaattataatctacatttatataatctagactaccaaacagctacatatagtagattataatccggattatataatgtagattataatctagattgtataagtaagagcttcctaactcttgcagaactgtattctccacaagccggtcatgatacaacattacacacctacgtaaacttacagaagctattatagagttctgagacttac

SEQ ID NO: 7960 - DNA, 354 bp, Zea mays
tttaagatacaggagaaaggtgatattctcaactccacttcttaatcattatttctataagttatttatatgagagagggaagaatatggacataaagtctcaggtggataattcttttgatgacaccaatacgccttgtgtgtagaatcaaagaatctaagatttgagaagcattgaaaaggatgtaaggaggtaagatgatgagcctcgatggtatcccattttagacatgaagatgtttcagggacataactatagtatgactaaccaagttactcaactaattttttccgcccgattagatattcgacgagtggagaaatatattggacaaataccagaataatagaaat

SEQ ID NO: 7961 - DNA, 319 bp, Zea mays
  unsure (1)..(319): unsure at all n locations
acttttggctcagtgcattacaccaccaccactggcgcctaccttggtccataaccaatggctagaagggcatcgccaggcgcaacaacagcgcgatactcgggaggagtcctaagctcgcacaaccaacagtactgtgcccaagtcaaagcatatctactgaaagtagcacaacgctccgactagagaagagcctaatccaatgtatttttacctttntgccttcatactttctcctcaaaagacaatacaaggaggtgtaaccttcaccttgatgtaataagtcttgtggtacaccatccaatgtacaaaaaaagat

SEQ ID NO: 7962 - DNA, 402 bp, Zea mays
  unsure (1)..(402): unsure at all n locations
ggacgttttagtttcttctaaggaccaataaggaagaggtctatgttgagcaaccttctggctttgaagatagtgagtaccctaaccatgtttacaaactctctaaggcgctttatgggctcaaacaagccccaagagcatggtatgaatgcctaagagattttcttatcactaatggcttcaaagttggaaaggcggatcctactctatttactaaaactctngacaatgatttgttcgtatgccaaatttatgtggatgatattatatttgggtctactaacgaatctacatgtgaggaatctagtaggatcatgacacaaaaattcgagatgccgatgacggaggagttgaagtacttcttgggatttcaagtgaagcaactcctagagggcaccttta

SEQ ID NO: 7963 - DNA, 384 bp, Zea mays
tgttacattagattctgtacactggatcatcatatgtgttatatttgatattaactcacatgtgagatacatttgaatatgtcctaaaatctaaatgtgacagtgaaatagtagaacatgtaatgcaataaaacaattatatgtatttatggagatacaattttactaccactaaaatgtatatgtaagggtaataatgagctctaaatttgatactataaatttaaggatcaaatcggattaagatcgtgctctattattattgttattcagtcttaaactaaatttaattaatgacataatttattgcgaataaacatttggactgtgatctattacgacgcctatgtatatgcaacaaatgaagtaatatctggataaatc

SEQ ID NO: 7964 - DNA, 312 bp, Zea mays
aggaaggcgtgctcaacatgagcgagccgctccgcatgatgagatgccccagcagcagcacctgccgtccccgcccccgatgtcgattgagcatatgtctctgatgcagactcaggcagttcaagccatcggtcagactctggccgccattcatcagcagcagcagcagcaacagctgcaggctccaccccagcctcagatgcctcaaatgcctagagataagccggctgaattcatgagaggtcatccaccaacgttcgctcaatcttctgaccccatggatgctgaagaatggctgcgcactgtggagcc

SEQ ID NO: 7965 - DNA, 448 bp, Zea mays
agcttgtgaacagtacaaattcagaagggataaagttgtttcagcagatcagccgaagcccatgctcttatgtgaggacatagcagagcataaggtgctgttgggctctcaattatccgaagaacaggagaaaaccttgataaggtttttgttcaacaacaaagatgtttttgcatggtcagccaatgatctctgcggtgttaatagggatgttattgaacactcgctcaatgttgacccatccttcagacccagaaagcagaggcttcggaaaatgtctgatgataaagctgaaggtgctcgtaatgaagtcaaaagactcctcagtgcaggagttatcacagaagtaaagtacccagaatggctagctaacactgttatggtaaaaaaggccaatggcaagtggcgaatgtgtattcgatttacagatctcaacaaggcttgtccg

SEQ ID NO: 7966 - DNA, 483 bp, Zea mays
  unsure (1)..(483): unsure at all n locations
tcanatagttagataaagctctagccgatcaaccctgcgatctggttcatacaggtgcgtccacccacaccctaagccaggctgaataagataggcctccaccccacgactgtgcgcacaaaaaatagaaaggcatgaataagtcaaacattttccctgcatgtgactaaatttaggaaaaagatgtgaggcggtttctatttttaaatgctttgttttctccataaatataggatcgctgcaacagccatgcaactaaactcgtcaagaccactttatgatacatattgatattatttgtgctacatggtgtagatatttatgcaatttgatacactgcataaaaatatgttatctgttgcacgcacacaaaattaggatgaaaaaaattacgatgaaaggaaatggattggcatgcatggaaacaaaanatacttaatgctttattttctcccgagatataggatcgttccacaatcatga

SEQ ID NO: 7967 - DNA, 440 bp, Zea mays
  unsure (1)..(440): unsure at all n locations
tcngaatatcacgacttcattctcctcgggagtcggacatagtttcttcttcttcgtcagccctcacaatagacaagtcccgaaaatacctacccctcatattgacaagatggctttgtttaatgcttgatttcccaaaaactgcatggcttggtcgccaaggtcgatcttcggaatcttcaccaccactttccacatcatagctgtcactatcaccagtgtcttcagagagaccctctaaaatctccttagtaatcttctctgtgttagtctttgctattgattcaaggaagccaagattcatctcttcggaaaggcttagcttcgactcagcgatagctttcttatcttcagacatcttcgaaaatgccaagaaagtgctctcanagacgaagcttanaaatntaaaaaagccaggcaagcgttggtgtgcaaagagc

SEQ ID NO: 7968 - DNA, 382 bp, Zea mays
cctgaggcatgcaagctgcggagccgaatcaactacagctatttttcggtatccttttgcgcagaaagtggaagtgatttcaccggatgtgggctccaatgttggggacttgctctcaaatgctatgaattaaaaacatggcttcacagggatgttaagtataaatgcccttactcgcgcgaagcgttatctccccaaggatttaatgagctcttgacgaagggcatgagtaaaaaatatcacgaagatttcaccttcgtgaccatatttgtaaaacaataaacactgagtaatgaaataccaaatactaaatatattcacatgcgttatgatatgagtatataagtatcaaaacatgtttcttgggcatatatataccttc

SEQ ID NO: 7969 - DNA, 308 bp, Zea mays
  unsure (1)..(308): unsure at all n locations
ggagccgactctcgcgccggctctttttcctattgaaccgccttggcacctccacgtgcaccancctaagcatggcctcgcgccccggctagggcgcctccacgcgccttgcgcggcttgccgcgtttgcggacacgtggcaaggaggactacccctgcatcttgacaccctggcaggcctcccactgctcccgagtgagaagtatcttcccgccgatagtgataggcccagagagagcctgtggatcgtcgccgtcaaccaccttgaggcgaccaatcgcctctacgatcgacatcttggagagggc

SEQ ID NO: 7970 - DNA, 453 bp, Zea mays
  unsure (1)..(453): unsure at all n locations
ctaagcttatanatggacgtaaaagtgccttcctcaaggactatcttttttatgtctatgctgagcaacctcccggctttgaagacagtgagtaccctaaccatgtctataagctctctaaggcgctttatgggctcaagcaagccccaagagcatggtatgaatgccttaaagatttccttattgctaatggcttcaaagtcggataggctgatcctacactctntactaaaacacttgaaaatgaattgtttgtatgccaaatctatgttgatgatanttatattgggtctactaacgaatctacatgtgaagagtttattaggatcatgacacagaagttcgagatgtctatgatgggggagttgaagtacttcttgggatttcaagtgaagcaacttcaagagggcacccttcttagccacatgaagtatactcaagacattctaaaca

SEQ ID NO: 7971 - DNA, 444 bp, Zea mays
  unsure (1)..(444): unsure at all n locations
agctttattctcatagccgaagcatctgttctttttgtatgatgngatgataatgatcctacgtatgtctaaatatgttttatgaatgcagatgtcatgatgtaatgtatcgcgcaaatgaatatccgaatatgtattcgaagccataatcatagccttcattcccttgggaatgactcaaatcttattgccgcttatttctcggcttcaccatttacttttcggtgtattagcgctgacttttcgttgaagcctcccttaagagcttcttcgccttttacttcagcggaatcagcgtttattattcgctgcaagcctcccttaggagcttcttcgccttttactatcggcggaatcagcgtttatttttccgtgcaagctctgcattccctaagaacgactttggagcttctccatgtctcttttctctttcctttgactcga

SEQ ID NO: 7972 - DNA, 312 bp, Zea mays
cacttgctgtgagaaggattttacccgaaatagttagtgctgcactgattcgtgtgaacaattttttcaagcaaatctattcgccagttattccgataagccatattccaatgaaaatatcaacaaagcttcaaatggcattgcaagctcgcagtcagtctgagccagagggtagagccttaagaccggatatgaatcaaatgaaagaaaaaatggatcaaatttatcaaatgatggtagcagctcaaggggtgcaacatattaaaagcccatcacaacatgggtctaattctcgacaggtgatataatatt

SEQ ID NO: 7973 - DNA, 454 bp, Zea mays
  unsure (1)..(454): unsure at all n locations
agctttaacaacaaattcttgcatgttgtttgtaactgctatccaatgtccagtgtggcttgttgctcttggctagtcagcgaagcatcccgtgcgccgccacgtccagtgcctttcaagtttcaacacccctgcagtcgctttcttcccagttccaggcgagagcctcgctttcctgtttgacatcggccgtggcagacgagcaatctgcgtatactcgagcgctcattctcaaccggagcctggtatcaccaccaggtagactggcagagcgtcgcttgaaagaggcctggggctgcttgtgcccgccgccaagggtcacggagccgttcgatttatctggctagccggtaatcagtggtggccggttttgtgttaccgattnttatagtttgaatttagaatattttgaaattttgataaaataaataatgtcagtttttgataaatctat

SEQ ID NO: 7974 - DNA, 382 bp, Zea mays
cagctgcagcttaagccctaaataaacctaatttgcttagggaaggctcccatggttcacgacagtgagggctacattctatatactgcagactatcccgaagacaaatataggaagactaatgccataaaacctcacaaagtatctcatcatgcgtttatgtacaaaaatgaggcttctatctctaagcataccactcatactaaaatgcctataaagaaaattcctacagcatcaaatgatcataacattccatctacaacttaacgaggcatcttatgttctaactaacaaagcaggcaaaacatgcgccaaatatgttgagggccaacacaaaagtcccaagacttgtgtatgagtacccaaggtgcttgtatctaac

SEQ ID NO: 7975 - DNA, 454 bp, Zea mays
  unsure (1)..(454): unsure at all n locations
ctaagcttcggaattacaaaccgacttaaaagtagaatgacctttttattctaagngtctgagtcgccggtgtaaacttttatgaggggcatgattgtaattcctcacaggctgtgtcttgtgcctataataagtgaacaatattcctttactgttcacgcattcctgtaattgcaatcgcgtcactcgggaattaatctttgtcaaggcagaggtataaatgtatctaatatttgaatacattaagttgatataatatgaaagtgatgctattcatttataatttatttgtctttgatgcttcatatttcgtattattntatataatctattagaggtcaattatgaagatttaaccttcgttaatcgtatcgtccttaaacttcgtccgaagtcattaatccttaaggaataatgcctcattggaccaaggggcataacatttaacacttta

SEQ ID NO: 7976 - DNA, 452 bp, Zea mays
agcttacccatgacgaggcatgttatctgtaatgggtcctcggttagcaggcctacatcgacaaggtccttaatcaactcagacggagacactagaccgagactctcttctcgttcaagtcacccgcccggtctcagctttatcatttcaaacccaaagtttggtacctgacagaggtacatcgttttctgatgttgcacccatcacggccatgatggatccaccatcaagttctatttttgaaaatcatcccttcccacttgaagcatcatcttttgttgaaaacaaaacattttgtttttctagagcaagactaagcatcagaaaaatcttttcataaaacacgtgatcaaggaaaggtactcaatcttgcaaggaaggaaatgaacaagtgtttagcacacaacttctatcacctaatgcatcaagcaagagagaaagattctaaaata

SEQ ID NO: 7977 - DNA, 262 bp, Zea mays
gtggagagatggcgaaagtaccgtgtaccctctgtggcaagacgctggacgtgatgtatctgtgctctcacttggcgtgaacccggtctggtcttgagaaacttggtggggagttgacatatggaagggttaagtgctacatatgtcgcgtggttggggatccccaactaggtattaaatgactccgaacgtcgtttcttctcagatatgaagacttggtcactggcctacacgtagccatccaatgaactgaagggttgaa

SEQ ID NO: 7978 - DNA, 361 bp, Zea mays
caagcaccgcggctgcagcttgggcagagacgcttaatgtttgtcccccgaccagtctgggctcatgatggcactgaacggtcctgctggtcattgaagctgcttcgggtggagccccatgccaagccatcaattgacctcatgattgggagccctccattcttcccaacctccaagtaccggaatattcagcctgactttacaccgaagaactgctgcattacctcattcgtctcaatatcggcattggaggcgggatggctaccaccgacgttgcaggtgttctgttcaaaagactccgctcggccgtggaaccgggtgctcacacgtgcctgactggagcacaatgcggtacgccttt

SEQ ID NO: 7979 - DNA, 286 bp, Zea mays
atcttataatgctttgatgtgtgcaagatgatggtgcccaagattgataatccgaagcacatcccgaaggttgtagaagctgcattttaggcctgcctgcataaatcttagaagcatttgtattatctttggaaaaaacatatgaatcgacaattcgaacatcactttgtatatttgcccataccctgggaaatatttttacctttccattcatgcatataatgctttggtgaggacgaaacttgtgtattatgagccacaagcgaaaaacaccttcccttctttt

SEQ ID NO: 7980 - DNA, 331 bp, Zea mays
acccatgatgggggcgacgatattcatttataataccaaatccgtctcactatccacacacatgcatcactataaaaacagctatatataaagaggctgttttttcattttgatacctaaaatcactaatatgcagtcgctccattcatagctttactaccagcgactctaccgaccaatatttgctagcctagctagagcacactactgcttttcaaaccccatatgtgctatcattgaaagcacccaatatgttaggaaacggctcaccatccagagccggtgctttgtatatatgcaaaaagaccctctcttggatccaaccaccacc

SEQ ID NO: 7981 - DNA, 347 bp, Zea mays
gttctatacttttactactcaagttaatgcactcctttttagtgacactgctcctgacctaacttttggatgggcctattcagctcattgcagtttcgctttaagttctgaaatggttatctggactgttcattttttaatttcaactaactagaattctttttctctaccattaaaaaggcttattcatagttgaaatggttgcttatgagaatttcgctttattttgagatcaaggggttgccatgtcgtgaagccatgggtaaattgttggactaagtagaaactattcttcaaatactgcactatataacacaatctgtgtgcacagaagtctttggatttta

SEQ ID NO: 7982 - DNA, 387 bp, Zea mays
  unsure (1)..(387): unsure at all n locations
ctaagcggngatgccacagccagcccatgctagtcttagcaattaaacatgcatctagaccggcctcttcttttgcaaaatcaactaagtaaagattgccgcctaatacacccttaaatgctagtgaaccgtcacaccttctaaagacagacacatctacatttgtaaatagacagttataccccatattacataatggactaacagatagcaagttatatccaagagactctactaaaaacacattataaatagagtgctcatttgaaattgcaatattacctaaaccttttaccttgccttgactcccatcaccgaatatgattgaatcttgggaatccttattcttgacgtaggaggtgaacatcctcttctcccccgtcatat

SEQ ID NO: 7983 - DNA, 333 bp, Zea mays
tgttgtgccctacggcgtactgccgcagccgattttattattctcccacctggaagcctcggggccgaacccctcgggcgtggtagcgtctcatagattgctgataccacgccgagtgtagtaaggccacgttccaagcctcttcgagctggttcagtgagtcttctcggctggtctggttgcttcagacgtcgtacgcctttgtcctcggggaaccgtattctaagtctgtgggcaagatagcctcggccccatagactagaaagaacggcgagaaacccgtggcttggcttggtgtcgtcctcacactccataccaccgagggtagctctt

SEQ ID NO: 7984 - DNA, 397 bp, Zea mays
  unsure (1)..(397): unsure at all n locations
ttaacatcaaaatccctacacttagtgcatattgttatattttcaacacaagagttacttgctacttctagtttagcagttaaaacattaatttcaccttgtaaagaagaaatggtttcattacaagtagaaagttcacaagaaagtattccatgtcttttaacttctagagcaagtgaattttgagcactaacaaatgtatcatgctcttcatataaaaggtcttcttgtttctctaagattctatccttttcatttaaggcatcaatcagctcattaatcttagctatcttagttctatctaatcccttgaataaactagagtaatcaatgtcatcctcactagattcatcatcactagaagaatcataagntttagcattacgagtgattacct

SEQ ID NO: 7985 - DNA, 430 bp, Zea mays
agcttctacttaggaaggctttcacgagctctactgtatcgtatgtcatcctatttctgtttttttttcttcttcttctttgggatcttctaggaagacgatggcccgaaacatactcccgttcccttccagagcagaggaggaggtagggatacatagcctggcccacgtaactcctgtctggcatggttctactacacgccatcttgcaggctgcgtatagcctggccgttgcatgggcccatcctgcgagccaggtctccctcccttctccgagctagctaggcccgttggactctagccgagtggaccggaccatttgggcccgattaactgttgcctggtcccccaccccttctctgctccgcccacatgcgttgccgccgcgtccgggtggcgtggaggtggagtgggttgagaaaccctaatg

SEQ ID NO: 7986 - DNA, 443 bp, Zea mays
  unsure (1)..(443): unsure at all n locations
nttanagggagaacacgtgataggtctaacgaatgttctattcaaatagtagaccttgcgcagctggggaagcagggaaacatgtgggaggagcgcatcacatccagaatgtgatgaccacttcaagacccctggagctgctgcatatggacctatgcggacccgtcgcctatctaagcatatggggaacgaagtatggactagttattgttgatgactcttcgcgcttcactggggtgttctttatgcacgattagtctgaaacccaggggaccctcaagcgcttccttaggagggctcaaaatgagtgtgagctcaaagtgaaaaagataaggagcgacaacgggtccgagttcaagaacctataagtggaggagtttcttgaagaggaacggatcaagcacgagttcttcgctccctacacaccacagcagactggtgtg

SEQ ID NO: 7987 - DNA, 251 bp, Zea mays
atgggctcaagcaagccccaagagcatggtatgaatgcctaagaggatttccttaacactaatggcttcaaagtcggaatagccgatcctactttatttactaaaacacttgcaaatgatttgttcgtatcccaaatttatggcgatgatattatatttgggtttactaacgagactacatgtgaggaatttagtacgatcatgacaccaaaattctagatgtctatgatgggggagttgaagtacttctt

SEQ ID NO: 7988 - DNA, 356 bp, Zea mays
  unsure (1)..(356): unsure at all n locations
agctngtaaacatacctacgacttccttacataatatacttcagagataccccgaaggctaagcagatcgaagcttaagacccctataaatgtgaatacatacatgtcactattcatctatttatagggaagatgagcaccctcgtaagtaaataaaaatatgcccacaaagcttacgcacatgatttacaaatgatacagggcagtactatcttttctctttctgtcttgccgcacaagcctatagcttttcttgcttcgactgagttcgaagccttctccatgcccaggctggaaacctcggcttaacactctcattgcatgcacatatgatcgaatcttctttctcatgccgt

SEQ ID NO: 7989 - DNA, 379 bp, Zea mays
agaattatgcgcgtttttattctgtttaacacctgaggaattctttgttaacatgacttttaatataaaaataattactagaacttgcttaattcatagagaacgcatattaagtccaaattgaaccattccagtttctataattatgtaatattaatgtttatcaattagtgccactgctttaacacagaagccacattaaaaattgatatcttaattaatcttataccaagtacataagacctttggaaattcataacttaaaatccataactcaagatttagtgattctgtgtcttacgatcacgtagcaacgcgtagattattattatacactatattctaatgttcgggcgatgtaattttaggtataccaagt

SEQ ID NO: 7990 - DNA, 223 bp, Zea mays
ttccattctctagacacaaagcgttctcggaggtcttcgccataagacagtggcaggaagtcttacgactcagcgcatctgccaccacactggccctacctgcgggagaatggacctccacgtcatagtcctcattgagctcacgccatccctttgcccatattaccccgacggggaaaagacccaaacttcagaccgcataggcagaatctccccagatagg

SEQ ID NO: 7991 - DNA, 329 bp, Zea mays
  unsure (1)..(329): unsure at all n locations
actcaaagcttcgtcttgaccatactctaatatactcgtacccaattccaaatatacctgctcacacatttcacttggaaaatattgtcaaatcatggttttgaggaccttctgaaaccgaaagcccccaacagtaacccctcacaatattaaattgctgtactgataaattcatattgcgatatggacgaaagcctttagccgaaagtccgaanaaacacctttcccttgctagaataacaatcagtctttgacaagcgggacccttcacgtttcaacgctctgggcgtataaataaaagctcatcccgagttatatgacacgctctc

SEQ ID NO: 7992 - DNA, 363 bp, Zea mays
agaacacactttaggattaacatatgttcattttgagaaagacaggatttgtatcgcatgccaagcaaggaaacaagttggcactcattatccgcataagaacataataacgaccgacaggccactggagctcctttacatggatctattccgcccgatcgcttacataaacatcggcgggagtaagaactgtctaagtattgcggatgattattctcgcttcacttgggtattctttttacaggaaaaatctcaaaccccagagacctttaagggatttttgagatgggctcaaaatgagttcgccttaaggatcacaaaaataagaagcgaccacggaacggagttcaagaactcttaaat

SEQ ID NO: 7993 - DNA, 388 bp, Zea mays
  unsure (1)..(388): unsure at all n locations
agctntaggggaatagtcataaaatatttctaaaaataaagttgaatcacatttatacccctgaggtaccaaaaatccccatttgaaccctggaaaaccctaaaactaaaaccttggggcctatgtgcaaaaactgtgcacatttggaccaaagtgtaaaaattaccatgataaagcatataaagtcacatggttcacatttggaaagatttacaagccaaaccctaagttttggactcatttgcaaaaaggcccctagttgtgatttcatgctaagtctgaatttcagattgatgagctcaactttggagccttgcaacttttaaaatatagggtttttgccctgtggcaccacatcaaacttatagacctattaatggataacaag

SEQ ID NO: 7994 - DNA, 230 bp, Zea mays
ttgaattctttctttgatttgggttcccttgggaggggcattgtccttcccatgcattctgttcaccgaaagaggaagagtgagcttatcttatgccttcttgttgacaaccggagattacgactagccctcttttctgttgggcgggtcctctggtcctcttgctcattacggaggattccgtttggggcacatactatctttattctattccttccaagttcacacat

SEQ ID NO: 7995 - DNA, 367 bp, Zea mays
cttctaacgggagagcacactaagggactcacatattttcaattttgagaacgacacggtatgcagcacaggtctagccaggaagcaaaatcgagtccatcatccaggcaagaacattgtgacaaccgacagggcgtgcgacacactctatatggatctattcggcttgagagcgtacatacacatccacgggagtaagtcttgtcttgaaagtggagacgatcatcctccctacacttggctctactttatgcgtgaaaaatctcacacccacgcgactctcaaaggagtctggagacgggctccaaatgagctcagcttgacgatcacgaaaataagaagcgacatcgggaccgatccaagaact

SEQ ID NO: 7996 - DNA, 270 bp, Zea mays
tttgggcctgcgcacgcaaccgccactactaattttttgctgcttcgaccgtggatgatggaataaatccgatgggtctgcatctaagttctctgattttggagactctgggagctcggttgagtggactgatgagtcttcggatgaggacttggactactttgcggccttggatgtggcaacggcggatgcttcaccgcacgctgcggatgcataagatgtgcctggtcctagtactgggcgtaagcggctaacggcggttgctaaacg

SEQ ID NO: 7997 - DNA, 306 bp, Zea mays
  unsure (1)..(306): unsure at all n locations
ctgcagctttgaataccacattattttttttttagtnggacaagtcttctctcctttatcagccctcacaacggacaagtcccggaaatatctgcccctcatgttgacaagatgattttctttaatacttgatttgccaaaaaccgcatggcttggtcgccaaggtcgatcttcggagttttcaccaccactatccacatcatagctgtcactgtcaccattatcttcagataaaccctccaaaatttctttagtgatcttctctgtattagncttcgacattgattgaagaaaacccagatgcat

SEQ ID NO: 7998 - DNA, 344 bp, Zea mays
acatgggcaagttagtgatttcatagccaccccacattagtcttgagaactaagcaagtgtctcagttagccttgttatcattaaaatcgattaagtatagctaaccggctaacactcccttaaaagctattgcagcatcacttcttctaaaaagagtaacaccaacatcaggtaagagacaggtgtggcccattttacaaattgagaaactgaaagccaagtgtcatcttaagaatgtaccataaaaacattggaaatggaatggtcaggaaatatagctactttttccaaacccttgaaccaaccttgatttgcgatcccgaatggaaacgctttttgggga

SEQ ID NO: 7999 - DNA, 393 bp, Zea mays
agcttgagtcagtcctcctgcatagaatatttttcgcacaaagaaatgatatgggaatgaaacacattcatgagaaaatggaggccggtaaagccaactgcttcagaagagatgatcaaggtgttgtatggtttaacaacagcgtagttgtgcctaagaatgatgaaatccaccagcaaattctagatgaagcacatcttagtcgctattctattcatcctggaagcactaagatgtatcatgatctaaaacaacattattggtggacaaagatgaagattgaaatcgcatgctatgtggcaagatgtgacacttgtagacgtgtcaaggccatacacatgaaagctgctggccattacaatctttacctatccctacatggaaatgggagga

SEQ ID NO: 8000 - DNA, 309 bp, Zea mays
cctgacggtggccgactctctttacgacggagctctcctgtgcggcgtgaaaacctcatatcctggtggctgggttgatgagcggatgatgcggtcatgtacccacgatttatacacccagatgcgctacgatcggggaaatctgttaaaacgacagcgcgatatcagagccaatgcggaatcggaaatccccaaccaaatcgcacgcgcacgcggcgttcgcggatcttgttgctagcagtgagtccgatttgagaaggaagaccgctgacgatgtggacccaccggtcagtggctcgggtaggagac

SEQ ID NO: 8001 - DNA, 355 bp, Zea mays
  unsure (1)..(355): unsure at all n locations
gcaagctnggtgccgatggagaagcttaattctttgaaatcttgggtgtccaactacatgccgctgtcgactgtgagttcggatggtactccgaagcggcaaacaatattttgccagaagaatttctgggccgactttgatgtgatggcggatactgccctcgcttcaatccatttggtgaagtattcaacgactaccaaggtgaactctgggttcccctaagccgtgggcaggggcccaacaatgtctaagccctcacgctgaaggggccacgtgtgggcgatcagcttcgtgaactgcgaggggcgtcccgagcgtggggaaaatttctgacaggcctcgcaagatctgacaa

SEQ ID NO: 8002 - DNA, 334 bp, Zea mays
  unsure (1)..(334): unsure at all n locations
ctataaaatctcaacttgcccccgggcattggtcctatctctatcctttaaagatatggaccagnggcataccgacttcaggtaccccaaacactagttgcaatacataatgtcgcccacatgtctcaattgaagaagtgtcttctggttcccgatcgacacctgaaggacataagttgccttataaccagacttgacatattctgaacatcctattcgagtcttggatccaaaggacataattacccgatggaaaactctcaagttgtgcaagatacagtggaaccaacattctaaagatgaagcttcttgggaaactcaagactttttagac

SEQ ID NO: 8003 - DNA, 364 bp, Zea mays
agcttatcaaaaagataactaatgttaatctaatgatgtggcatgtggtgttgcctaaagctctattggcatattgtgtatttagacatggtggtaccaaatctactccttttgagttggtatatgggcaagatgctatgttatatattgtcacgcctggttttagaaggtaaactgaatgcaaaccatgtacgtgctaggatcaaaaactcacgtacacagcgattacatagttggacatcatcacacattgctcataataatagcggaaatagtactttattgcatcaagatgtccaagacatccacagagtcattaacttaagtcataatcataatcataatcaaagtgtgaatacgaaac

SEQ ID NO: 8004 - DNA, 356 bp, Zea mays
tcggaattccgttggagatagctctgctcgcccctataaagctcagccgatgccccatcccctagaaccgagcacaagcagaaacacacagagagaaagagagatatgcgccgccgtgcaatccggcgttagtggccaagtatttctgcctgttgatctggcaggttaactgtgatgcaaggagccaaattcgtgacaccagtgcgctggggggaccttgggcggtcgatattcttcgccaatgcaccaataccgccgcgcgccattaacgggaggagtgtgtgctcatggcatacatcttctggcggatattgccgttgccgaagcccgtgaagcccgtcattggattttttcta

SEQ ID NO: 8005 - DNA, 304 bp, Zea mays
  unsure (1)..(304): unsure at all n locations
gcatgccagctcgtagctaaaatagatattaatatattcttgggcctcggatccacaagagacatatgtcttgaccactaaactactagtgatgataatttgtgatagaaatatgaagatcttgtagagacctgttgtatcctctctactcctgatgatatcttcgtacaaaaacaatactatctggtgtngaagatggatcctacgcggatatcagtattggttcgttcctgccaagcacgtatcatcatttgcttcatcaaaagctagttatatggtgattttcctagataaaatgaaatct

SEQ ID NO: 8006 - DNA, 300 bp, Zea mays
tctatgttgagcaacctcccggctttgaagatagtgagtatcctaatcacctatataaactttctaatgcgctttatgggcttaagcaagccccaagagcttgatatgaatgcctaaaagaatttcttatcactaatggcttcaaagtcggaaaggccgaatctactttatttactaaaactcttgacaatgatttgtttgtatgccaaatttatgttgatgatattataattgggtctactaaccaatctatatgtgaggaaatagtaggatcatgacacaaaaatttgagatggctat

SEQ ID NO: 8007 - DNA, 461 bp, Zea mays
  unsure (1)..(461): unsure at all n locations
agcttatccataccccttcgcgctggcgctttacatttgagaccctgaaagtttaggatataaacccgcagttcaccttgactgtagtttgagtcttaggaatgttgcacagaaccccctgngcttctctgtttttgtgtgcaaactccagggagcagagaaaataaacaaataatcctagaaattgttttttagtattaaaataaattcagaaaattatttaattcatagaaaattcatattaagtccaaattgatccatttcagtttcaataattttgtattaatattgtgtatcaactagtaacattgtttagccataaaaattgaattaaaattattcaattgaattaatctattctaggtgctaaataatttcagaaattcataactcaataatcgtaactccgtttntatccattctagttgcattagtatcacaataatatttattatcatctg

SEQ ID NO: 8008 - DNA, 420 bp, Zea mays
tctccaagctggagccgaggcattgcctcaccggagaggcggtttcaccctcgctggactttggtcttccgccgccgcgcgtggaccgagctaactagtgagtcttcttccaattccttgcacccacatcttccctagcatcccgtgaagctctctgacccgttcaattgatctattgcgtcgtgagtaggccggatacctcgccttcgacgagcatcttcgcctgcacatgtggaccggccgactccgaccatccccgacggtgacccgcacatcgtcgtgatcctcgagacctcccgtacgttctcgaccacctcaccggagcaacctcgccgtcggtaagcccctccgcctctttctatctccgcggccactggtccattagggagggaccgctggtttgatttctagaaccctatg

SEQ ID NO: 8009 - DNA, 402 bp, Zea mays
agctgttgatgagtattatggaggaattgtctttttatgttgctactaagcaaataactctattccggtaatgaaatgcattcaaactgttattaatcgcctcttgccttctagtaggaatagatatttttctactacgttgcgctgcaatctatctaatcgactgtatactagctatttctacggtagagcatacagtgcatggagaaaagctaactgtagccacggtcgggaagagcaagatagtggatgatccgaggagaaggaaggcgagctagttttactcattccagtataatttcagaacgaagttgtagagtatttatggagaacccaatatttgtagtcgtagtaaagaccgctgccgacacctaagcagtggcattcacctgcttgaactgg

SEQ ID NO: 8010 - DNA, 204 bp, Zea mays
  unsure (1)..(204): unsure at all n locations
tactaaacacacattagncataataatattgtattgccatttatcctccaaacacatgagggtttgaatgtataatatcccaaaataatgttgaccaatagttgatcttcggtgcgtggatgacggaaagggttttgggcctgtggatgcaaagtcaagagaacatctaaggcattcttttctttcttccacaaaaccctagtg

SEQ ID NO: 8011 - DNA, 389 bp, Zea mays
  unsure (1)..(389): unsure at all n locations
agcttgaagccatggtaagtagcataggcttataatattctaattgactcaagcctagctacgggtgcataggtttcaccaaaatccaaacctttgacttgggagtatcccttggccacaagtcgggctttgttccttgtcaccacaccatgctcgtcttgcttgttgcggaagacccacttggttcctacaacattttgattaggacgtggaactaaatgccatacctcattcctagtgaagttgttgagctcctcttgcatcgccaccacccaatccgaatcttgtagtgcttcctctacgctgtgtggctcaatagaggaaacaaaagagtaatgctcacaaaaatgtgcaacacgagatctagtggttacccncttatgaatgtc

SEQ ID NO: 8012 - DNA, 361 bp, Zea mays
aataagaaccagcattggccacaccaaccacacctatttataacaccatgaggtcatgagccacaaaccaacaaccctttccagctcctagaaccattgcaagctagtgattaggtgaaatccgtggagaagatggttaacattgcacgaagcactgatagggaggtggtatatgcatcaaggcacctcactgccccgctggagaatggcgggatgcctattgtgcagcacatgctggcgccgacaccatcaattgggcagaattctcaccaacttcaaaactaccacaatctgctagttaatgaagaaaaagagttctctcctcaacagggaggatgttataacgagacaagacagtcat

SEQ ID NO: 8013 - DNA, 483 bp, Zea mays
tcttcagaagatggatgagtacatccgggatgataatgatttccgccaaagaagggaagaagcttatagattttctgagatgactaggggcttcggaggaagaatccaccctaggcatgtcagaccaatccacaactctagccagagcgatgacagaggaagccagcttcaaaggccacatcatagctcacaatcctcagggcaacagcaaagctctttcagggcagaggtggcaggggcttcggaggaaggtatgcggatcagcccagaaaactctattgcttattctatagtgaagagaagggccacactataagaacctgccacgtcaccattcagaagcagaaggagattgccgaagcagaggcgtggcagaatcagtcgaagtaggtcttacatactgcttcgtgctactcttcctatataccagaatacgtgggaatcaacctgcagcctctatagcttcggcaagtcattcacaag

SEQ ID NO: 8014 - DNA, 440 bp, Zea mays
agcttgtgagcaatacaagtatataaatggataatgctgcttcgaccgatcagccgaagcccatgctcttatgtgacgatatagccgagcacaaggtgctattgggatctcaattgtctgaggaacaggagaaaactctgataaggttcctgttcaacaacaaagatgtctttgcatggtcagctaatgatctctgcggagtcaacagggatgttattgaacactcgctcaatgttgatccatcctttagacccagaaagcagaggcttcggaaaatgtctgatgacaaggccgaatgtgctcggaatgaagtaaaaagactccttagcgccggagtcatcagagaagtgaagtacccacaatggctatccaacactgttatggttaaaaaggccaatggaaaatggaggatgtgtatttgatttaccgatctcaacaag

SEQ ID NO: 8015 - DNA, 139 bp, Zea mays
tattaacggcgaggaatacaaacatggggacgcttccccactgtccaagtggctatccacagccgaaggtctagagctgatgaaggaaatacatgcgcgattgcgtggatccaacattacgtctaggcctttgctgggg

SEQ ID NO: 8016 - DNA, 294 bp, Zea mays
tacccatgatgaggcatgtgaccagtaaaaggttctttgtttcatgcctacattcagtataatccttaatcaacctgggtagaacatcacctgttcctagcccaagttccgatttaagtacttccatccttaggattggttgtattccttaggatgaaaagagcattattgggaactttgcaggaagatcccaccatttctcccaatgaaaatattcttgcatgcgaaagccatccttcctcaggataacccctgagctatgcattaacgcaaaggacaacctctattcacaag

SEQ ID NO: 8017 - DNA, 429 bp, Zea mays
agctcggcatacagctgacaatttctttttctctgcagtactttcctcaaatgctcttcatgttcttgctcattctaggaatatataagaatgtcatcaatgaacactactacgaacttgtcgaggtagtccatgaacacattgttcatcaagtacatgaagtaagctggcacattcgtcaaaccgaatgacatggccgtgaactcatacagtccatacttggtgataaatgttgtctttggtatatctgaaggtcggattctgagctgatggtaacctgacctcagatctattcttgagaacacactggctcctctcaactgatcgaataaatcttcaattctgggcaatggtacttgttcttgatagtaacctcattcaaggatctgtagtcaatgcacatacctcttgttccttcttcttctccac

SEQ ID NO: 8018 - DNA, 385 bp, Zea mays
  unsure (1)..(385): unsure at all n locations
agcttaaccaagtcgcttcggtatgtccctagttccaaacgcaagtaccaaagctttttaaactgaacggcagattctcgaaggaaaaactaactgtcaaattcttttccatgtactggttggttcctcaaagctggtctcgggaggagaaggaccactgcctggaggagacggagaagtcnttctcttactcaggaggcctcctccgccatatattcacatgatctatcattgccggttgatccagtctcaaacgctcgtaatacatagtcctcttgactgttaaaactttattactggtgagggggatctccttccccaggtaccgtttacctgcattcaagttgcccacagccttcctctgattctggtgtttggtgtttct

SEQ ID NO: 8019 - DNA, 375 bp, Zea mays
  unsure (1)..(375): unsure at all n locations
ttggtgaagaggcaagntcttaagtctgcatcttctgtatagatttccactaagtacaggtggttgtatctaaatcccttgaataccattgattcatcatccatctttggtaaataacctctgctggagtgaataagcattgaagtccaagatcacagagttgacccactgataataaattgaagctcataggtgccactaagagaacatttgatattgataaatcatttgaaattgccaccttgccaagtccttgcacttttccttttgaattgtcttcaaatgtgattttatcttggccatcaacattcttatcaagtgaggtgaacatctcggggttggctgtcatatgttgtgtgccttcactgtcaataa

SEQ ID NO: 8020 - DNA, 248 bp, Zea mays
ttgctacaaatgtgggaagccccggcatttcatcgctaaatggcctatatcacatgacagtgacccaggcgactacaataaggggagaacaaaggagaaaaacaagtactccaagaagaatggcggcgatgcccatgtttgtcgggagtgggattccgacaaaagctcaagcgactcctccgacgacgaggacgccgtcaacatcgccgtcaccagggattcctttccccacgtccgccacaagtgcc

SEQ ID NO: 8021 - DNA, 371 bp, Zea mays
tgtgaaggttcttcatccccacatgtgctaagcggtgatgccacagccagcccatgctagtcttagctattaagcatgcatctagaccggcctcttcttttgcaaaatctactaaataaagtttgccgtctaatacacccttaaaagctagtgaaccatcacttcttctaaagacagacacatctacatttgtgaatagacagttataccccatattgcataattgactaacagatagcagattatatccaagagactctactaaaaacacattagatatggagtgctcattagaaattgcaattttacctaaaccttttaccttgccttgattcccatcaccgaatacaattgaatcttgggaatcttta

SEQ ID NO: 8022 - DNA, 375 bp, Zea mays
  unsure (1)..(375): unsure at all n locations
agctntatcaaatggacgtttttagtgctctcctaagtggaccaatcaaggaagaggtctatgttgagcaacctgaaagggaaatgtgcccttgggccatttctaagtattttggtgatttagtgtccaacacaagtgccctattgtaaaaaggtggacaaagtacaaatcaaggataaaggtatgtttctcagacttagtacattgttttatggactaatgtatcgtgtctaagtgttggaaacaggaaaaatccaattgaaaatgccttggctcgagcagccaagactctgctcaatctggagcaccggactgtccggtggtgcaccggacagtgtccggtgcgccaggctgctctggcaaacaagctgatct

SEQ ID NO: 8023 - DNA, 431 bp, Zea mays
cttaacactcataatcttacttattatgcaattattggttcttgaaatatgcatgacgtactgcacttagggggagtattcaaaactcaaatcactcatgaaaacccctagtgcataccagaatgcaaaattcaccatttgcctattttctctaaaaattatctagcctatggcgaaatattttgaaaagtatatgagggtgccaatacctgtcccaacaagtgttattttgtgtgaatataagttgggatatgtgttggttgggagttagatagaaaaattcaaatttttccaaactcttctctgtctgggctcacacgacagacctgtgtgcaccgacacttgactgtgctaatgtccgctgctctcatccccgcccttaaaataaggtatctgatcgctgtctgtgtgcacccgcacgcacatagact

SEQ ID NO: 8024 - DNA, 291 bp, Zea mays
caaatgttcattctgagaaagacagggtttgtatcgcatgtcaagcaggaaagcaagttggtacccatcatccacacaagaacatcatgacgaccgacaagccgcttgagctactccacatggatctattcggctcgatagcttacataagcatcgacgggagtaagtattgtcttgtaattgtggatgattattctcgcttcacttgggtattctttttgcaggaaaactctcaaacccaagagactttaaagggattcttgagatgggctcaaaatgagttccgataag

SEQ ID NO: 8025 - DNA, 391 bp, Zea mays
  unsure (1)..(391): unsure at all n locations
ggcatacttgtanaacaacaacacctaccttttcttttactgcagaccataccacgaacttggcctttcgcctgctgggtctggatatgattggacctttcaagaaagctcaaggaggatacactcatgtattggtagcaatcgacaaattcactaaatggatagagttcaagcccattgcttctttaacctcaactaaagccgtggaattcatacaagacataatatttagattcgggataccaaacagcatcataactgacttaggatccaacttcacaagttcagaattcttcgacttctgcgagcaaaaatgcattcagatcaagtatgcatctgtagcacatccataaagccacgggcaggttgagcgagctaaccggatgatact

SEQ ID NO: 8026 - DNA, 376 bp, Zea mays
agcttgtgaaggttcttcatccctacatgtgctaagttgcgatgccacagccagcccatgctagtcttatcaattaagcatgcatctagaccggcctcctcttttgcaaaatcaactaaataaagtttgatgtctagtacacccttaaaagctaatgaaccatcacttcttctaaagacagacacatttacatttgtgaataaacagttatatcccatattacatagttgactcacagacaacaagttatatccaagtgactcaactaagaacacattagaaatagagtgctcggatgaaatagcaatttttcctaaccctgtcaccttgccttggttcccatcaccgaatattattgaatcttgtggattcttgt

SEQ ID NO: 8027 - DNA, 389 bp, Zea mays
agcttgtgaagattcttcattccaacatgtgtctagtctatgatgccagagccaacccatattagtcttagcaattaagcaagtatcgagttcagctctattaaaatcaactaagtatagctgaccctctaatactcccttaaatgctattgaatcatcactccttctaaagacagtaacaccagtatcactataaagacaggtgtagcccattttgcataatttagatacagaaagcaaattgtaatctaaagaatctacaagaaagacattggaaatggaatggtcaggtgatatagcaattttaccaagtcctttgaccaaaccttgatttgcatccccaaatgtaatagccctttggggatcctcatttttctcgtaggaggaga

SEQ ID NO: 8028 - DNA, 425 bp, Zea mays
agcttcagcaacttaccaggactcaagatctactgttatgtatacgggtgaaggtacagagcggtgagtcgatggagggagtgtccgcggtggcgttccacggtgacgacacgacgttgcgggatttcggctgtggtagagttcaatcggtcggcatggtaagcaatccgaggctaaagttatgccgaaacaagagttagacgggtatgaactgacccgaggaaggctggccacggttggattcttcacggcggcaacaatgaccacacccagggaaatccggtgatcttggtcgatggtggaagaaaagggatggctagtgagtcgttagctcagtaactgggaggcgaagatcagtgcacggtcaatttggacgatggtggtaaggacacggtgatatttatagaaccgatgactcacggtga

SEQ ID NO: 8029 - DNA, 351 bp, Zea mays
  unsure (1)..(351): unsure at all n locations
gcttgaagcgcgagaaaagaagaatgaactcgttcagntgctttattattttaaatncaagaaacacttcatagaaccctgccaagaatggttggatacaattgaagttatgtgcaatgagatctttcgcaattttacgaaaaaagaaaattatttgctgactgcagccttttgcgcccggccaaagcgaagattgaatcgggtcatggatgcatcgaattttgaatatcctgactatgagcaattgaacaaaggtgcccgagggcaaaatagaaaaaaaattgttagtgttgtgggcagacaagctacttgaatggtgaaagaagatgaagatattctgttagcaaaaaa

SEQ ID NO: 8030 - DNA, 423 bp, Zea mays
  unsure (1)..(423): unsure at all n locations
ctgcagcttggaaatataacttttnttttttgcatccaaattagtgaaatatctcttgtgatgcttctatggaatggatctacactctaaaaatattgcatgttgagtttctggtacttttatttagggtcttgatttaaacaaagaaaatgagttttctttccaaaagtcatagtaattacaataatggccagaaaaatgtgattctacttttgttagatctctcgtgaggatattttttgtgataaatatatggacgtgtaaaacactatattactgtgtggactatactatttgtataatgaagtttaaaatagattgagatatgagctataataagaaggatgccatagatagtcttaaatcatacgaactctagctactctaataccacatgcttgaaaataagtaaacaacgagata

SEQ ID NO: 8031 - DNA, 351 bp, Zea mays
  unsure (1)..(351): unsure at all n locations
tctaaagtgagagcacantttgggactaaccaatgttcattntgagaaagacatggtttgtagcgcatgccaagcaggaaagcaagttatcgcccaccatccacacaagaacataatgacnacggacaggccactggagctactccatatggatttattcagctcgatcgcttaaataagcatcggcgggagtaagtattggcttgtaattatggatgattattctagcttcacttgggtattctttttacaggaaaaatcttatacccaagagaccttaaagggattcttgagacgatctcaacatgagttcggattaaggatcaagaagaatagaagcgacaaccggac

SEQ ID NO: 8032 - DNA, 393 bp, Zea mays
  unsure (1)..(393): unsure at all n locations
agcttaagatatcctctttagctaattattttggtgatggcaaatatataggcagagaanataacagctgtagtctgtgcatactgcatagggaaagtggtaatttcattttgcctgtagtaataaaaatatttcgggtttctttccttttgatctgtttccttcgtaatattttatcacttccacaaattcaaacaagtccctctgttcctttagtttttttttctcggcctgttcctttagtttttttttctcggtctgttcctttactttatgaaagaagtttagaatactcttgaggcattcggcaaagtgccaaccacatgaaaatggcaattctgttcgtgtttaaaataatgtccgcataacaaggctaatgctgcattagactat

SEQ ID NO: 8033 - DNA, 276 bp, Zea mays
cgccacttctcaaaatatctaccttgcgcagccttacctgcaagtaaacaggtgggaggagcgcattacaccttgaaagcgacgaccacttccacacccctgtagcgtgctgcatatggacctctacagacccgacgactactagccatagggggaagcgagcctggtctaccaattgtggaagactcttcccgcttttcttgcgtgttctttatgtgcgataattctggaactcaacggaccctatatcgctatctagagagagctcataatgag

SEQ ID NO: 8034 - DNA, 383 bp, Zea mays
tgtgaagggtcttatccccacatgtgctaagtggcgatttctcatacagcccatgctattcttagcaattaagcatgcatctataccggcctcctcttttgcaaaatcaactaagttaagtgttgtgtttaatacacccttaaaagctagtgaaccatcactttttctaaagacagacacatctacatttgtgaatagacaattatatcccatattgcataattgactaacagataacaaattatatccaagagactcaactaaaaacacattaaatatagagcgctcatttgatattgtaattttgcctaagcctttcaccttgcctttgattccatcaccgaatttgaatgaatcttggggatccttgttcttgacgtatg

SEQ ID NO: 8035 - DNA, 452 bp, Zea mays
  unsure (1)..(452): unsure at all n locations
ttaagcacctgggctgcagcttatgtgatgatgtgggattaatgtcatatctcanaaaacttcattgaggatctgcagctggtcttcaacagcctgaggcggtaccggtggaagctcaatccacaaaaatgtgtctttggagtaccagcagggaagttgctcggattcattgtcaaccacagaggaattgaagctaacccggagaaaatcgaggctaccatgagaatggaagcaccacgatcacagaagaaagtgcaaaggcttactggatgcatggcagctttaagcaggttcatatcaaggctatgagaaaaaggcttaccattctacaaattgctcaagaaggtggacaagttccagtggaccatataagcacaggaagctctcaatgcactgaagaagttcttgaccacgccaccagtgctaaagccgccacaccgagccatgccata

SEQ ID NO: 8036 - DNA, 288 bp, Zea mays
tgaaggactgcttatgcaggagagcttccgatcttgataacttgtttggcccacagagtcgctttatccgagcgcgagttacttatcgcagatagtgatgagtgaggtatctgtatcccggaggcgtatgagacccttggctcggtcaaccttggctgcttacatgtactccgtcgttatcaggatccgctttccgtatgagtcacaaaccacgaaagaaatcctgctataaagagatcccttttcgaggaaaaattccacacagagggggacttccctcttttagtc

SEQ ID NO: 8037 - DNA, 372 bp, Zea mays
acctgcggcatgcaagcttaatgcccccaagatattgtctaatttttgttagggtaaagctcccaaagctcaggataacgagggctatattttatatcctgctgggtatcccgagcacaagattaggagaattcatgctaagaagactcattctgtttcccatcatgcttttatgtataagaatgaggcttctagctctaggcattctacccatgttaaaatgcctaaaaagaaatctcctgttgcatcaaatgagcctaatgtgtcatttaagacttttgatgcttcttatgttttaactaacaaatcacgcaaagtagttgtcaaatatgttgggggcaaacgcaagggctccaagacttgtgtttgggt

SEQ ID NO: 8038 - DNA, 294 bp, Zea mays
cacaattgagctccaaaacagctacatatactaaaatcttagtttcagttcactgttcccaagctgaaaactcataaagtctgacaaccccactttggatcaccttttcgcctatgtgtatatagttccacggctgtcacacttaataaaagttgctctcctatacttattctacaattttgctatagtgggcattaaccaaaacttcttggattccaactacagaggtccaaagttgcccaattactgaaatcacactggatttcctaagtctgaattcacacttttaacagc

SEQ ID NO: 8039 - DNA, 235 bp, Zea mays
tatcatatggacgccataagcaccttcctctatggacctatcaaggaagaggtctatgccgagcaacctcccggctctgaagacaacgacaaccctaaccacgtaaataaactctctaaggcgctttatgggctcaagcaagccccaagagcatgatatgaaagcctaagagattctcttatcactaatggctccaaagtacgaaaagcctggcctacactcttcactaagactc

SEQ ID NO: 8040 - DNA, 339 bp, Zea mays
ggaccaatcaggaagaggtctatgttgagcaacctcccggctttgaagacagtaagtaccctaaccatgtctataagctctctaaggcgctttatgggctcaagcaagccccaagagcatggtatgaatgccttaaagattttcttattgcaaatggattcaaagtcggaaaagccgatcctacactctttactaaaactcttgaaaatgactcgtttgtatgccaaatttatgttgatgatattatatttgggtctactaacgagtctacatgtgaagagtttagtaggattatgacacacaatttcgagatgtctatgatgggggagttgaagtatt

SEQ ID NO: 8041 - DNA, 378 bp, Zea mays
ttctccagctgccaccatgtcagcttttatggcggcgtccaccaacaccgcaccagcgagcgtcggccgccccaaagcgcaccggcaggtcctcactcccgtcctcgccacgaaagcgaggacagaggatggaatgttgcaccctggctgggcagcaacaggtcgccttccccggcatggctggaggacgcctcctccgcagagctggaggatggtttccacccctaaaagctggaagaagaggtggccagccgacccgtgcgggaggtagagcttcggctcgcctcactctccgccccagtaaggatgatgaagatccttgaagctgatggcggggcgcaagctgcagccctgtttgcttctccccaccatcgaact

SEQ ID NO: 8042 - DNA, 336 bp, Zea mays
tcacatgctggggaccggacttgattggtccttccaacagagaccagggatgatacactcatgtttggggggccaatcgcaaacactctacatggatagaattcaagcccattgcttcttttacctcagctgaggccgctgaattcatacaagacataatattcagatgctggatacgcaaacagcatcataactgacttatgatccaacttcacaagtatacagttcttggacttctgcgagcaaaacagcattcagatcaagtatgcttcagtagcacatccaatagccaacaggcaggttgagcgagccaacgggatgatacaggaagcactc

SEQ ID NO: 8043 - DNA, 302 bp, Zea mays
accacacgtgatcgcaagtgatcagcgcatcaaagatgccaatgcctaggtaacagctgaggagttacaaccgtcccacttacaggaatgtcgcccccagatcttgggtatagatcctttatgggaaccaagaatgtgcgctggtatgtcgactttttcgtttattcagatgctccagataactgctcttcaaatgacattctctatgcaacttcagaaggaagtacttttaaagttattttcaaaggttactataccttcaacatctaagtgcttcttatgttcatatacaaagggcacgc

SEQ ID NO: 8044 - DNA, 428 bp, Zea mays
agcaccaaaggataaatcgatctgcttccaggtattcgtcttggaaaacacctaccataccctcatcgactgggccactcttcccgtcagctcgtgcacgccaagccagttctgtacctgtaaatagaattcattatcagattttcataggacccatatgattgctgcacatacaacattatgaatcacatatttcttagggctcatctagaaacatacaatgtgttcaaaatgataatctacatctctaccaaagagactgttcaagtcttcccacacacattgagctacacaacaggcacacattaagtgacaaattgattactcttctatgcagaacagacatcatgtgtcaagtaatggttctttattcaagtcatctctaaagagaatcttattgtgtgataacaaccacaggaacacatgta

SEQ ID NO: 8045 - DNA, 405 bp, Zea mays
agctagccatgcctggaaagcaacagacatgccattcattagatctttccataccaatgacttggcctatcgcatgctgtggactggataggattggaccttacaagagagctcgaggaggatctacccatgtattgggggcgattgacagactcactatgatggataaagttccatgccattgcttctttaacctctgctaaagccgcggaattcatacatagcataatatgcatatgcgggattccaaacagcatcttcaccgacttgggatccaacattaccatttcacaattctttgacttctgcgagcaaaagagcatgcagatcaagtacgcatctgatacacatacaagagccaacggtcaggttgagcgagccaacagattgatattggacgcactc

SEQ ID NO: 8046 - DNA, 380 bp, Zea mays
acatgatactgctacttcataactcagataaactatctcttgatagagaataagacggatgtacactctgactcgtgtgcatacgtttgccttgatccatgtaattgtcatgccactgatctgcacgtgcaacagagagcgaggaacatacaacgcatttgtatcgatcgcacttgtttcaccacatgggataccatcatggcatggtgttacgttgcatatgccttattctgctcgagcatgtaccagctcttgtgcccactgcacgagtgttcatacaacgtgagactgtcaatgtcttgtgtgacttattaggtctgatcatatatggagacgggaataatgctgactgacatagactctcttctgtcaatgcacta

SEQ ID NO: 8047 - DNA, 376 bp, Zea mays
acacgggaacatgatgacaacggacaagccactggagttactccacatggatttattcggaccgacagctaacataagcgtcggcgggagtgagtactgacttatgattgcggatgattattcttgcttcactagagtgttctgtttacaggaaaaatcttatacccagaagaccttaaaaggattcttgagatgagctcaaaatgagctctgattgaggatcaagaagatacgaagcgacatcgggacagagttcaagaactctcacattgaaggctatcttgatgatgacggcatcaagcatgagttctcttctccctacacacctcaacagattggtgtagtggagacgaagaatagaactctactggacatg

SEQ ID NO: 8048 - DNA, 313 bp, Zea mays
cgattctgaatcaccggtgcttcacggacatgatgacttgatcatctaacctacatcgtatatgacaaagagagatggtggtatatgaatgaggctaacggtttgatgaagtgactgatctagaataagatgatctagaatcatgtaagacttacttggataaattaattagtggctcaggacctactggtagtaagctgatttgcatacaggctttgatttttctatctcctcaccttgaatcgctagacctgcatgcctgagtcttctgcactctttctatagaataagtattgatgagtactcccgtact

SEQ ID NO: 8049 - DNA, 344 bp, Zea mays
gctgcaagccctgacttctgtgatatactactggctccagaggtatactgtagtaaacaaggcactatcatcacggcccaacgtgatcactaattcaagaatttcaagtcagtgtttaccacatcccaagattatgccgtacagacacagcattattcacaatgagagctgcatgatacaggctgcagtcattataattaatacagatggctggcaatattacgctaatatggtaatgtattggctaactaaacatacaaataaatatattctcctgctgcaagtcacaatgtacacataatacagaaataacgttcttttgtgagatgacccttcattttata

SEQ ID NO: 8050 - DNA, 230 bp, Zea mays
cgcacgtagaccgggtaatcctctgctccattcttcgattccttgtgcacatagcctctacgtcacgccgtggagctcatcgtgccatatgattggactagatcggcgtgggttacccggtacacccggctgcgacgagatcagcctgttgcgcgcgtggaccggacgattccggccacctccgccgtcgagccgtacactattgtaaccgtcaggacctaccggagcca

SEQ ID NO: 8051 - DNA, 350 bp, Zea mays
  unsure (1)..(350): unsure at all n locations
aggcttagcaattaagcaagtggtgagttcagctctaacaaaatctaccaagtatagctgaccctctaacactcccttaaatgctattgaatcatcacttcttctaaagacagtgacaccaatatcagtaaaaagacagttgtagcccatttgacataattgagatacagaaagcaagttgtaatctaaagaatcaacaagaaaaacattggaaatggaatggtcaggagatatagcaattntacccaaacctttgaccaaaccttgatttccatccccgaatgtgatcgctctttggggatcttggtttttctcatacgaggagaacatccttttcttcccagtcatgt

SEQ ID NO: 8052 - DNA, 409 bp, Zea mays
gcgcatgtcaagcaggaaagcaagttggtgttcatcatccacataagaacatcatgacgaccgacaggccgcttgagttactccacatggatctattccgcgggagtaagtattgccttgtaattgtggatgattattctcgcttcacttgggtgttctttttgcatgaaaaatctcaaacctaagagactctatagggattcttgagacgggctcaaaatgagttcggcttaaggataaaaaagattataagcgacaacgggacggagttcaagaaccctcaaatagaaggctctcttgaggatgagggcatcaagcatgaagtctctttctcctacacaccacaacaaaatggtgtagtggagatgaagaatagaactctattagacatggcaagaaccatgcttga

SEQ ID NO: 8053 - DNA, 458 bp, Zea mays
  unsure (1)..(458): unsure at all n locations
cttaaaactcagctttcagattgtaaagagggcatncatatgaagtgngaatctcctttcatgtttgtnttactggggctgttcctgttcgcctgacatatatgagcgggtctgttcactggtagatttcatctantaaatggccgaattggctctttcaactatggagacttttgtagagggataaaatatcttacctccagcggaatgacataatttttggttgagcagtttgggagaatacgaattttgaattaactatgctgttgtctgaaatagattcagtccgttatcttgtcagatgttttagaacttatagatggctgagattaattatcaattgaataccgaagttgtagagtatcttgcgtacatacttctaaaatatttggttgatatcaccaccgttataattntacagatacaatattaacaaacagggtngctgctgtatgtca

SEQ ID NO: 8054 - DNA, 484 bp, Zea mays
  unsure (1)..(484): unsure at all n locations
cgtcgattggttgactacttggtgtagactccttcttttttcctccgncgccttgaatgcgacgggttgtgcctcatatgtagatggatcatcaagctcgttgatcttcctcgagccttcgatcatgcactcaaaacttacaaaattcccgataacttcctcgggggtcattttagtatatctaggattaccacgaattaattgaacttgagtggggttaaggaaaatgagagatcttagaataaccttaaccatttcgtggtcgtcccacttgacgctcccgaggttgcgcactnggttcaccaaggtcttgagccggttgtacatgtgttgtggctcttcccctttgcgaagccggaatcgaccgagcctcccctcgatcgtttcccgcttggtgatcttggtgagctcatctccttcgtgcgcggttttgagcacatcccanaccttcttggcgctcttcaacccttgaactnntgtatac

SEQ ID NO: 8055 - DNA, 382 bp, Zea mays
acaaacagcccaaggtatatgaataagattgaaagaagcattttcaagattctgaaatcttctccccctgtttcaaatgcttttcctttgactaaacaaaactcccccttaatgaaattctcctcttaatgttcaagagggcttcagatattaatattgaagaggttataccaattcgaaattttataaaaaataagataccaattgaaaaacttcttttattacaaaataaaagactacatttttgaaattggtggtggtgcggtccttttgctctgggctaatactctctccccctttggtatgaatcgccaaaaacagatactcgtgagtgaaatataagcccttttacttgactctccccttcggcaaacaatatatg

SEQ ID NO: 8056 - DNA, 486 bp, Zea mays
  unsure (1)..(486): unsure at all n locations
tactcagcttacacctntgaactaactcggatgcatcgatcttcgtttgtttccaatannaacctgacactgaaacctttccgactagtgttctggatgctgcatgtatcccacattgccctgcatggacctcctccacaagttgtttcccagtggacgggagaacgcacttcatgaggatgcctgacgcacccctcctatacaatacctccccaatgagcgtatagtgagctgattgcctggcaatgcgctctgccgcgttcttgtcatctggttcttcttcattctttatatacttaataatcggccgccttcagtcatcagagtctgactcgggttgatctatgatgttgcattcttgtggttgatccattgagatactcggctggagaatttcttgcacgaagaccccgggcgggacctgagtccgaccggatccgagcttggacagtacatcggctgccgtgttccgatctctttctacat

SEQ ID NO: 8057 - DNA, 363 bp, Zea mays
cttcggtagctgatcacaagaaactttgtagttttccgattagcaaaattatagcgaccaaaattggcatgtgatccatcctttctagccttcgtctcatagtgcagctcgtgaactcggctaaagatgtccgcaaacggatccaccgcttggcttcggagtgcccagatataaacactaagcctaacgatagcgctaggggtcagctggtgaatatagataccgaacctcttcagtacctctgcaataatcccatgtaaggggaatcttaacctcacctttacgaagctcttgaagataacaatgtcatccttctccggctgtggtgtagtctcttctcccccgaagcgtaatagcttctga

SEQ ID NO: 8058 - DNA, 315 bp, Zea mays
ctgaaactagtgtacaccttactatagtatgaacgcgcagtacccacacagctatctatggtcgcatggtaaaagagctgtgcgtggggccaagccgcgactcgccccagcctctggtgactactctgggccagcaacagcatctgaacccaccacatgggcggctccggggccgccacgtggccagagaaggtgatgtactccaaagcatcgacagtgagtccggacccccatgggagagtgccggacccacgaatataccgtctggacctgccaggtggtccaggacccccacgtgtacctaccggacgccta

SEQ ID NO: 8059 - DNA, 351 bp, Zea mays
  unsure (1)..(351): unsure at all n locations
gcctaccgcctacacctcccggctaggacatgtctccatgatatgttccacgtcagactactcaagccgttctaagggaccctatgacgactccaccacacgtgccacccgtttaggatggccagtagttgccgactctacagaaagtattatgtgcacatctacgttgtggcgtctagcatgtgctcgtacagtggtagggccaatccaacgatgatgctacttgagagccattgcacgacttcagatcgctactcagacgctcagctngaagatgagctattccaataggtggcgagagagaatatgactgtgatatcttatgtgccgaataatgcgccacacaggtat

SEQ ID NO: 8060 - DNA, 403 bp, Zea mays
  unsure (1)..(403): unsure at all n locations
nnttagtttgaagcttcggctatgaaaacagtttttttgtgtttccgaagatgtctgaagctgctaagaaggctgctgctgagatgaagctgagtcttgatgaagagaagaacttacggtttcttatagcgatgtcgaagaccaacacagaataaatcaccaaggagattctggaaggtctgtctgaagatactggtgacagtgaaagttatgatgtggacagcggtggcgaagactccgaagatcatccctggcgaccaagccattcagtttatggtaaatcaactatcaaagagaatcatcttgttaacatgagaggaaggtatttccgggatttgtccgttgtgagggccgacgaaggggagaagacttgtccacatcctgaagagaatgaagtcgtagt

SEQ ID NO: 8061 - DNA, 420 bp, Zea mays
  unsure (1)..(420): unsure at all n locations
atattagtcttagcaattaagcaagtatcgagtttagctctattaaaatcaactaagtatagctgaccctctaatattcccttaaatgctatngaatcatcacttcttctaaaggcagtaacacctatattcgtaaaaagatagttgtaacccattttgcataattgagaaactgaaagcaaattgtaatctaaagaatctacaagaaaaacattggaaatggaatggtcaggtgatatagcaattntaccaagtcctttgaccaaaccttggtttccatcctcgaatgtgatagctctttggggatcttcatttttcttgtaggaggagaacattcttttctcccctgtcatgtggtttgtgcatccgctatcaactatccaacttgagccctcggatagcataaacctacaaacaaat

SEQ ID NO: 8062 - DNA, 448 bp, Zea mays
  unsure (1)..(448): unsure at all n locations
acatgtgctaaacggcgatgccacagccagcccatgctagtcttagcaattaagcatgcatctagaccggcctcctcttttgcaaaatcaactaaataaagtttgtcatctagtacacccttaaaagctaatgaaccatcacttcttctaaagacagacacatctacatttgtgaataaacagttatatcccatattacaaagttgactcacagacaacaagttatatccaagcgactcaactaagaacacattagaaagagagtgctcggatgaaatagcaatttttcctaacccttttaccttgccttggttcccatcaccgaatatgattgaatcttgnggatccttgttcttgacgtaggaagagaacatcctcttttcccccgtcatgtggttggtgcatccgctatcgataatccagcttgagcccccggatgcataaacct

SEQ ID NO: 8063 - DNA, 413 bp, Zea mays
  unsure (1)..(413): unsure at all n locations
gttcattttgagaaagacatgatttgtagcgcatgccangcggngaagcaagttggagtccatcatccacacaagaacatcatgacgaccgacaggccgcttgagctactccacatggatctattcggcccgattgcttacataagcatcggcgggagtaagtattgtcttgtaatagtggatgattattctcgcttcactngggtattctttttacaggaaaaatctcaaacccaagagaccttanagggattcttgagacgggctcaaaatgagttcggcttaaggatcaagaaaataagaagcgataacgggacggagttcaagaactctcaaatcgaaggcttccttgaggaggagggcatcaagcatgagttctcctctccctacactccacaacaaaatggtgtagt

SEQ ID NO: 8064 - DNA, 456 bp, Zea mays
cttcatccccacatgtgctaagcggcgattgccctgtcagcccatgctagtcttagcaattaagcatgcatctagaccggcctcttcttttgcaaaatcaactaagtagagcttgtcgtctaatacacccttaaaagctagtgaaccatcacttcttctaaagacagacacatctacacttgtaaatagacagttatatcccatatgacataatcgactaacagatagcaaattatatccaagactctccactaaaaacacattagagatagaatgctcattggagattgcaattttacctagcccttttaccttgccttgattcccatcaccgaatatgattgaatcttgggaatccttattcttgacgtaggaggtgaacatcttcttctcccccgtcatatgggttgtgcatccgctgtcgataatccagcttgaaaccccggatgcataaac

SEQ ID NO: 8065 - DNA, 491 bp, Zea mays
  unsure (1)..(491): unsure at all n locations
ctcatgaaggagctgncctccaagatgtgctccatgatggcttgctttctctatctgtctcgggtggtgctcgagctagtgggtcatgtggccggtgtactccggcttgccgttcatgacctcgcagaacacggtggacaggacctcggcgagtaggtatgtaatatgggtcggaaaatatccgtccgaatccggattcgaagatggtgaacgctgtgtcggatggaattttcggatatccggacttttttcggataacggatacgaatacggatattctgttcggatatcggattcaaatacaatatgtctgatatccatcggatatcgaatatccggatattttctcgaataaatcttctcggatatccggatagctgggtgtattttggtaatcttctagacaaaaataataatacacanatagccttagaaattcatgatatcttatagaggcacaacatatgtctaaatataaccctactaaatac

SEQ ID NO: 8066 - DNA, 443 bp, Zea mays
acagaattaaactataggattgtttatttttgtcgtttacaactctcataagctttccgaattgttcaagatcgcattcatatgaatcatgacagtccagttatgtttcgttgactgtggctgatcctgtttgcctgacaaaaatgagcgggcctgttcactggtggcgttcatatagcaaatagccaaattggctgttccaactatggagacatttgtagagggataaaagttcttactgccagcagaatttcataatttttggttgagtagtttggtagatattgaattttgaagttaactatgctgctgtctgaaacagattcagacatttatcttatcagatgtttataacttattgatggcagaatttaattattcattgaataccgaagctatagaatattctgtgtagatactcatagagtatttgtttaatatca

SEQ ID NO: 8067 - DNA, 440 bp, Zea mays
  unsure (1)..(440): unsure at all n locations
actcaagctgaagcctggtaagtagcataggcaagctatatacgatttgantcattcctagccacaggcgcataggattcaccgaaatccaaaccttcgacttgtgaatatcccttggccacaagttgggctgtgttccttgtcaccacaccatgctcatcttgctttatgcggaatacccacttggttcctacaacattttggttaggacgtggatcgagatgccatacctcattcctcgtgaagttgttgagttcctcttgcattgccaacacccaatccgaatctcttaatgcatcttccaccatgtatggctcaatagcagacataaacgagtaatggtcacataaatgagcgacacaaaatcgagttgttacccccttatgaatatcgtcgacgatggagctcacggagttatctagttgtatcgcttggtggac

SEQ ID NO: 8068 - DNA, 436 bp, Zea mays
  unsure (1)..(436): unsure at all n locations
ntcaccggcaatttccagagcacgtacgtgcgctctgggtattcctgcgacctccgaagctgccgatagcagccaggagagtctctccgggactacattcggcgattctcgaagcagcacaccgagctggccaacatcaccgccacggatgtcatcggcgcgttcctcgctggcaccacctgccgcgacctggtgagcaagctgggtcacaagacccccaccagggcgagcgagctgatggacatcgccaccaagttcgcctccggccaagaggcggtcgaggctatcttccgaaaggacaagcagccccagggccgcccatcggaagatgcccccgaggcgtcaactcagcgcggcgccaagaagaagggcaagaagaaatcgcaagcgaaacgcgacgccgccgacgtggaccttgtcgccgccgccgagtaca

SEQ ID NO: 8069 - DNA, 428 bp, Zea mays
  unsure (1)..(428): unsure at all n locations
taaaagatactatncaactaaactcagaagaagttgattttatgccattgnatgaaaacttcctctccttcaattgttagtcttctatccttactgggatgtaccatagtatacgttaaattccttgcaatataaaatgttcaatagtgcatataactttgacatcaactatatgtgtgcactaatttaaaggaatttagtctatccttttgggtttcaataatgatgattcatttgccatccacatataaggatcatcatttgtgaaaccctctcttgtgtttctaatgctctcttctctaagtgttacaacaaggtcctcccaagttctttgaagatgaatacaaaatctacaaatataagagtcttggttgttcaattatcgagtttcattcgatctcatatcaagtatgatcgaatcaagaaaa

SEQ ID NO: 8070 - DNA, 380 bp, Zea mays
  unsure (1)..(380): unsure at all n locations
ccgagattgaacttaaagcgaactgcatgttgctaatatttgattctaatgatttttcttcgcctctgtcgtgtttcactttcacgcggttgctggtgaatttatcccacatgaccgttgaaatttttggagttctgtgcttgatgnttatacatagcgttctttgagatatctgtntgcgcctgagaagaaacctgacataatcaatggtctagctaataagaatcgtccctaacaaaagggcctctagaggtcgatttctatattgattctttcaaataatttgtatattattataatgttttctctacgttaggttattctatctgagtcggaagattataacaacattacatgtttatatcgtcaatataatatta

SEQ ID NO: 8071 - DNA, 450 bp, Zea mays
  unsure (1)..(450): unsure at all n locations
cgctaccgcgctgtngtgttgggaacagncccgggcaggcttcanatctgcgggtgctcttagaacgagctttangatggagttcgtgcttaattattgatccctagtggagctccaagagttgaattagatgtaagagcaaatttgagcaaagattataggatagtgcggccggtacaagttcgctggagcaaatcgcgccgccgtccggggtcggggacctggtgatgcgaaggagaaagaaggggagggtttaagtgcacatgtcagtgagacatgtgaatagggtgtagggattctttactggtttttcaaaaagccaagggcctctccgcaaagtcgccagcgctggcgcgcgcgggcgtgtttccccgttcgcaggatgttttgggctgaatngagcccagtactattcattagttttccttttcttttactgccagacttgga

SEQ ID NO: 8072 - DNA, 497 bp, Zea mays
  unsure (1)..(497): unsure at all n locations
aaaactcgctactcctcctgagggcccttcatcatcggcaagattttttatcccanatcatacaagctggccaatgaccaatgcgaggtctacaacaacgcttggaacatncaacagctacgtcgcttttacccttaaaatgtttcaagttgtttatgtacctcgctttctctacataaataaagtctaaccatcaaggaaggatcagccttgcctcggcaaagcccgaccctccctcgggggctagaaggggggaaccccctctgcatcaaaattttcctcggaaaagtcttttgccagaacgtctttcgcgcttttcgattgcttcgataacagaatcctaanaacgagcgagagagaccttgaacgacaaggccgaccgagccgagggactcctacgcctccgggatacggatacctcactcgtcaccttccgcgaaaggtagctcacgctcggataagcgattctgctaccgaacaagttctaacgcctggaa

SEQ ID NO: 8073 - DNA, 470 bp, Zea mays
  unsure (1)..(470): unsure at all n locations
gtcttgtggatcctgctaagctgtagacagaagaactatccttggagctaccagtctttccccttctttcataatgtgtatacgacttgaacatcaatttttagactgaacaaaagttaatctgccacaaaaggcaaggaagaaaaacaagttaaaacctcctttgattcagaaagggaatgggggaattaattgcatttttgccgctgtgcgtctcattgnttgttttcgctaacgcgtgctgatgaagatacaccatttcatattactctttcagacgaaaatgcttgttttaatatcaaaccatgcctaaacagtctagtgaggtcccacgaaactaatctttggctggcccattgccctgttttgaagccatggcaggcaggtttcactgccacattgcatattcagaaatcagaaccatttgttataaatctaatgaccttagctcgtaacactagccactattg

SEQ ID NO: 8074 - DNA, 353 bp, Zea mays
tggcctatacgacatacttgtgcgggaggaatctccacttctggttgtgggtgcctataaacttcgcgtcaatcacatgaggaacaggcattctcgacatacatctgagagatagtccatgatctagatgttgcaccagccctcaaagtaccatcagtggtcatatgtgttaccggagcaaacgtttcatcataatctaggccttgagtatgttgtagacctctggccacaagaccagctgtatatcgctgaactgaaccatcagatttagtcttcattttagagacccatttatatgtcatacggactgcatgtgatggcaaaagaacaagatgcccatctccctttcgatc

SEQ ID NO: 8075 - DNA, 432 bp, Zea mays
  unsure (1)..(432): unsure at all n locations
tgaccttgcctccactactgattaccaatgtctttcttgatgattgggtgtcttggtattcagaatgatatccataaaggatatgatgaatctgtgatagattcgaaaatttcagatcattaatgaccatcagtaatgaattgtcatttccaactagttatggttggagtcaggaagttttgcacgctcctgacttgtgattaactgcatgtactgcatgtacaagttcccctatggttttagtatgtgggaatccatgaaagatttaccatgcgtacattgggtatgttcccaatctcaccaccgcagcgtacatgtatgggcacacagaaagctggggatctatgtgagaanttattctccgtcgatcattaagttttagagtctcttcttgagaatctatttatggcccgtacgcttgcttgaatcatg

SEQ ID NO: 8076 - DNA, 497 bp, Zea mays
  unsure (1)..(497): unsure at all n locations
ctaagcttacatgtctcgtatgattcanaatcaaacgaagttaatagcccatcagaatgaagcttcttcatgcgattctcacttatatgacccanacgacagtgccacatgtaggtaggacttaaatcattaggccgaggccttttagcactaatattacagataggtgcatcatcaagatttaaaatgaataacccattcataatggatgcaaaagccacaaacatgccattcttagagatcacacaaccattgttttcactcgcaaatgaataaccatccttcatcaaacatgaaggagacataatgtttcgactcatactaggaactagataacaattatttaactccaaaataaatcctgatgggaggtggagttgcattgtcccgacggtcaacgcagcaactcttgcattattgcctacccggaaatcaacttctcctcttttcacgcttctacttcttatcattccctgcatcgaattgcanatatgggc

SEQ ID NO: 8077 - DNA, 367 bp, Zea mays
cgaataagattcttgtcatcttctccgaagtaggccaaatacatcatcatgggcatgtcggcttcagacacagatgatttctcaaaatccacgtggctgtgatttgctggcatcaaaatgctataatcatcatcttcttcatcaacgttttcttcttcttaaatatcaacctgctcagcttcgacatcagaagtaccttcgtcaacatgtccctccatcacaactaaacccgagtgtctcatgacttcacaaatcggagctgtctcggaggactcagactactgtacttcacaaggtacccttgtagtcgagacgactctggccatctgatggatctatcatggtgacacgacactgatgtgtatac

SEQ ID NO: 8078 - DNA, 381 bp, Zea mays
caaagaaaacaaaggtaacttgttagaacgaaagttgtgaattgtctttaaatctgagtgatgttgacctttgtgagtcttatatgtgcctggaagataaatagacattgttgccatgcgaattattttcatttttgcagctgacctagatcttgatgctgaacttttcttctcttggcatggttccatggtggtactggtagccaaaggagtaaagagattcaagggaaattgattccatttatttcttgttggcctgtggatacaagacccatattaatagtcatctaagccccagcaatgccagctgttttttctatgatataaaaaaactcaaccggggtcctcccagtatattatattaagaagagaccgaaacaa

SEQ ID NO: 8079 - DNA, 422 bp, Zea mays
  unsure (1)..(422): unsure at all n locations
tccatttaagaaatgatcaagtgaattagattatttcctttccagatctctgatcaggaacagcaaagcttaagatggtcttcagccctggtgttgcaatctcatcaacagtaattgtcgtaatgatctgaacatcacatcaaacaagcagtcagaacgtgagaaatatggcagatcaactagttagtcagagagcaaattgttgaccaccataattagcatgcttgatagtagtttgtcaaagtacaattattagtctaggcgatatcataataaatgaacatgttggaggtccattttgagcaatggatgcaatttccaggggttaagtatatacatatacagagagagatttacatttgactccgagttngctttcacatctatgggcatgttcttgttctttatctgtgattggatct

SEQ ID NO: 8080 - DNA, 455 bp, Zea mays
tcttgtagctgctgcaatagatgagaagtgaactgcgtttctcggtctgacactatcttcttcagaacaccatgcaagcatacaatctatgacatgtattactctgccaacacaacactatgatagctggtcttgactgctatgaaacaagccacctttgtcaaggggtccactactacccagatggagtcataactggctcgagtgcgaagcataccgactataaagaccatcccaatctcatcccacttccattaaggaatctaaaatggctgcaacaaacctgcgggctgtggcggaactgcccgaattattccgacttaagtgcctaagccccgtcttagaggctagaccacacttaagagggaataacccgtctatccctctgatctagtccgacaaggccaatgacaggatcaagtaccacaatctcactcaatggtgagtcacagagc

SEQ ID NO: 8081 - DNA, 420 bp, Zea mays
  unsure (1)..(420): unsure at all n locations
ggatgtaaattggatggccacgtttgccaccacttcctttttctggagctagaactctcttcatcggagttccattcttcaccaatatgggcttgaccatatttcttcttcttgaagtgtcccttggtcttgcccccctttttgaacttgaccttttgtattccttcttagcttcttgttccttcttgttaggacaatccgctatgaaatgaccggtctggccacattcatagcatgccctcttctttcctttcctttggaacttgtcattnttccttacaaatttcttgaatgttttgatgaacatagcagtgtcttcatcacttgagctatcttcatcacttgaggtttcgaccactttcttggctttgtggctttgttcttcttggggttgtcttgttcattagtgatcaatgcatg

SEQ ID NO: 8082 - DNA, 274 bp, Zea mays
atgcactaacgacaatgaccttcgatgaagtctcatcgagctgttgagttgtgggtcgaccatatgatgacgggttctacatctcgactgtgaacgacacaacgacgagcttgggcaggatctaaccttataggtacactgtgggacaacgaccttcgcgaccgacaaactatgtctcggtgaagtccatgacacgataaggatgtatgccgagcgatccgatagggcgcactgtctaacagaaagccgcgcgagcactatacagggaaaatga

SEQ ID NO: 8083 - DNA, 462 bp, Zea mays
  unsure (1)..(462): unsure at all n locations
catatcatctacttctactgcaaagcttgtctagcatattttggtacccatcgcttgatgggtccatcatggttagtcaacaaagatctaggaatcctaaagtcctttgtgttagcactaggtaaactcattacctttctagcacaagttgcaattttgggttgcctagttatatgagaaataattgaccagctaggagtggaagtgttaccaatgggacaatctttgcattgatgtcccttcttttggcatatgtagcataggcgatcttcaagccttgaagatatcttccttccttgtttcttgcttgctacatggttagtgaatattttcttttctaacataatgcctttttggtttaaatagggacaagatctaattaagtgtcccttctgtgagcatntaaaacaaagtttatcatccttgttaataatcaagctattcttaatatatggacatgac

SEQ ID NO: 8084 - DNA, 439 bp, Zea mays
  unsure (1)..(439): unsure at all n locations
tcccggtaccncatttaccaagacttatgatggtcctgtgtttataatcatttatacccactaaagccatctcgtaccaaagcctttgtgtttcaaaatatctaagatggcactatgatctattttgtcaaaagccttctcaaagtccagtttcaatatcatcatctccttttttgattgttngcacagaaaatgtactcaaaggcctatgccaaacaaacctggatggtgcgatccttgatgaaaccatagtgatttctgtgaatgagtttggtgatgaccttgtgtagcctgtntgccaaaatcttggttaaaagctcgacactgaagttgagaaaggagatatgccggttatcattgattgtcatgggagagggtttccttcggagcaagactatatcagaaccatttatactttgcatacaaatattttcatcat

SEQ ID NO: 8085 - DNA, 401 bp, Zea mays
actcagctttgtccatgcacgtaagaccacggagaatatattcatgcgtatgttcgaatgttcttgcgtctgagagcacaagcgcccacagtgcccaatgaaatcgtcattgaggccatgatctcggctaggatctacggctcaatacttcgccaggaaaccccctcagactctggagaagctgcttgagaaaatggatgagtacatccgggccgacaatgatttccgccagaggagggaagaagcttataggttttctgagatgactaggggcttcgaaggacgaatccaccataggcatgttagatcaatccacaactccagtcagagtgatgacagatgaggtcagcttcataggccacagcatagctcacagtctttatggcagcagcaaggctctt

SEQ ID NO: 8086 - DNA, 477 bp, Zea mays
  unsure (1)..(477): unsure at all n locations
actcaagcttcacacctctggactaactcggctgcgtcactcttcgctgctggttcttataaacctgacctagaaaccttcccaactagggtcctggatgctgcgtgtactccacattgcccagcatggacttcatccagaagttgctttccagtggctgagagaatgcatttcatgaggactcctgatgcaccccttctgtatagtgttcccccaatgagtgtatagagagctgattgccttgcgatgcgcttggctgtattcttgtcatctggctcctcctcattntttatatatttgatgatcggcctcctccagtcatcaaaatctgactctggttggctcaaggtattacattcttctgcttgatacagagagatgcttgggtgtgggatttctttgacatagactccaggtgggacctgagttcgacttgatcctatcttggacaatacatcagccgcccggttcgatctc

SEQ ID NO: 8087 - DNA, 340 bp, Zea mays
cattaaactcagcctgtacaggagaacacatactgtgacttgcatatgtttttttgagaaacacacggtctagtagcgcatgtcatgcacggaagctagttggcgtccatgcatcacactagaacattatgactactgacaagccactctagctactacacatggacctattctgcccgatagcttacataagcatcggaaggaggaagtactgtctaagcactgtggatgattatgctcgctgcacttgggtgatctttgtgcaggagatatctcatactcgagagacattcaagggattcttgagacgggctcacaacgaggttggcttacggatcaa

SEQ ID NO: 8088 - DNA, 468 bp, Zea mays
actcaagcttgtcaacagctaactcacgggttatcctcctctctatgtttatttgcgagcacgggctgctgcaatgacatgataacatggaaagtggtactgcctcggttccccacaagtgcatgacaattcattaaggatgaccacatgtttccttgactcttgtgattcaccatctgaagttgactatcttgtaggtacacctcataagtccctgattggaagtcaaaaaaatcaaccgtatgtgttgtggcccattcctttgccttctcaagaaaagcctttggttttggagccgatctctcttcatcactccacaatcccacatcatgggcgtgtctatcattaaaccaagcaacaagcttgtagaaagttaatgacactatagcagttatcgacataccacgtactccacaatcccaacaatgttgtgaatgacttcgccaagttactacactgtgactcata

SEQ ID NO: 8089 - DNA, 425 bp, Zea mays
  unsure (1)..(425): unsure at all n locations
actaagctagagtatgcatngatttcgaattaaaagttcattttattatgagatcatgcccataccgacacattaatcaataatgcatcagaaatagaatattagctttcttgatggtaatgccggatataactagatcttcatggccgaagaggatgcgtctaaaacggcctttatatgtccaggcttcattggtttatttgaatgggttgtcatgacatttggtcttaaaaatgctggtgctacttatcagagggctatgaatntgatcttccatgagttgttaggaaacattatggaagtctacattgatgatattgtagtcaaatcggctgagtttagttctcatatagctgatttgtgcaaagccttttataaaatgcgtcagtatggcttgaaaatgaacccacgtaaatgtgctcttg

SEQ ID NO: 8090 - DNA, 401 bp, Zea mays
gaccttgtgcagcttgtcaagcttgtaacaggtgggaggagcgcatcacagtaagaatgtgatgaccacttcaagacccctggagctgctgcatatggacctcttcggacccgtcgcctatctgagcataaggggaagtaagtatggtctagttattggtgatgaactttcccgcttcacttgggtgttctttttgcaggataagtctgaaacccaagggaacctcaagcgcttcctcaggagagctcataatgagtttgagctcaaggtgaagaagataaggagtgacaacgggtccgagttcaagaaccttcaagtggaggagttccttgaggaggaagggatcaagcacgagttctccgctccctacacaccacagcataatggtgtggtagagagga

SEQ ID NO: 8091 - DNA, 391 bp, Zea mays
  unsure (1)..(391): unsure at all n locations
ttttctggtgtttctccttcgtccaattagcttcagtgttttaagagtgaagaactaatagaacttcatcttttgtcacagagtctacttttgagcaaagctntgaagttacaacaagataatgaagacaaaaagaacgaatttatcatcagtgatttggagcaaaagattgagaaccttgaaaattctttgaaggaaaaagactctctgctcagtatagccgaaggctctcttgctgaagctcgtcttcaaaatatgaagcaaagcattncaaatttagatcaaaacgcaaaaattgagaggttgaataaagagctgaaagaaacaaaaacaactttggaagacaatacgagccgatcaaccgtgaatctgaagctttaatatgaaagtc

SEQ ID NO: 8092 - DNA, 427 bp, Zea mays
  unsure (1)..(427): unsure at all n locations
ctaatgcttcttgatagctattatttatgagaatctctgtaacggcaacattcgtcccatttctatgggaattccagcacacatgctcgtagcatatcttcaagtatttgattgaccctctcagtctgcccacttgtttgaggatgataggccgaactgtggagcaatttggtacccagggacttatgaagttcttcccagaanttggatacgaattgaggtccacgatccgacactatagtctttggaacaccatgcagactaagaatacgagcaatgtacaattaggcatagacagtaaccgggtgatctgtcttgactggcagaaaatgagcaattttcgtaagccgatcaattataacccagatagaatcatacacttttgtagtccttgggtattccacaatgaagtccatactaatatctt

SEQ ID NO: 8093 - DNA, 469 bp, Zea mays
  unsure (1)..(469): unsure at all n locations
gcttcaaccgaagatatagagatcatccaggagactgcgtnggtagtttcatcggcgaaacaaaggccataccactagaatgtgccaagtcacaatacaaaagtcgttcctatgggagcacagagtatgttccaaagctcaaaagttgttcctaaatgccaccaaaatataacgtgaagaagatccaaagtcgtccctaatgggatgtagagcttatatgccaccgaaatagaaggtgaagaatgtaacacctctggtgttactatcactaaaacttgagcataacatcatcagcattggcatattatgtgtttgttacacctagagtgcattcactaggtaaaaatttcaaataagttgtactgatgtgacttgatgtgtgantaaccacagggtagagtgtgtaaccctatattatggcttatggatataagtaaagaccaaataagctaaaacctaataagacatg

SEQ ID NO: 8094 - DNA, 500 bp, Zea mays
tcaagcctatagccatggtaagtagcataagccaataatatgcgaattgactttagcctttctacgggtgcataggtttcaccgaaatccaaaccttcgacttgggagtatcccttggccacaagttcgtgctttgttccttgtcaccacaccatgctcatcttgcttgttgcggaaaacccacttggttcctacaacattttggttaggacgtggaactaaatgccatacctcattcctagtgaagttgttgagctcctcttgcatcgccaccacccaatccgaatcttgaagtgcttcctctaccctgtgtggctcaatagaggaaacaaaagaataatgctcacataaatgtgcaacccgagatctagtgcgtacccccttatgaatgtcgccgaggatggtgtcgacggagtgatctcgatgaattgcttggtggactcttgggtgaggcggcctttgctctacatcctacttgacttgatcatttgcatctcccc

SEQ ID NO: 8095 - DNA, 449 bp, Zea mays
  unsure (1)..(449): unsure at all n locations
aagttcttgtacttgtctttgtatttccttagtttcttcaggattggttcgatatggtggacggttaggaagtgcagcccctgnaataagatcgatttgatgctcaatccctcgaattggaggtagtccagccggtgtttcttgtggaaacacgtcttcaaagtcctgcaaaagatcagccacaacactatgaagagatgttatgtcattagcagaaatcaaaacatctttgttcacaagtacaaagagtacttgatatgggttgttcctcacttctctcagctcagattttgtggctagcataactagatgttctccctcttccttccttttatctcttgaatttggcttgtagcactcgctcaccgaattgtggatggcactcaatntctttggctcttctcctnctctacttgctgtactaatttcaagtatcttttgtaagtgtc

SEQ ID NO: 8096 - DNA, 393 bp, Zea mays
  unsure (1)..(393): unsure at all n locations
tttttatatgctncgcgcagaattatatgggatgcatcatatggactagtgcttccgctgctatgaattaattggcatctattgtgttcattctaaaataaatagtcatgtggataatggtgcatgtggttaatggtgctttaagattgttctaaattaatatcttagtttaaattgggatcttaatggtgaatagtgttaggttgatattcctgtgatatatccactaaattgaatggtgttaactctgatatatgcatttgtgtgttatacatcatggttgatcttgaccaatgatcccaaaagtgctagttgtaaaatgttcaattgctaatatgtcaattgggtctgagccaaatatgtttgagtagccatattcgggacatcataact

SEQ ID NO: 8097 - DNA, 418 bp, Zea mays
  unsure (1)..(418): unsure at all n locations
tgagagaagtccgcagagtcgccaccatatgtcttctgtagtntctcggcacgatgcattatggtaagggtttctgtccactggaagttgcgcaagtttagctcttacatttccttcacgaaatttgcaatgtcatttcttgcagatgtgcttcaatgcatttgacgaggaagctgacctcgatgttcttgaccatccatttctgaatttgttctattacctgttatgtatgaagtttgcatagcacgaaattaagtctcctgctccagtgtggcaacttcgaattgatacttactataactctaatgttccactgttcttaccatcttttctgcagcttgtggagattctccttcatctcttgtcctgtcattctaagaggattcctgcaactaccgctatccagatcaccctgtca

SEQ ID NO: 8098 - DNA, 310 bp, Zea mays
  unsure (1)..(310): unsure at all n locations
gtgaggtatccgtatcccggaggcgtaggagtccctcggctcggtcagccttggctgcttacgtgtaccccgtcgtttccaggatccgctntacgaagtagtcaagaagcacgaaagatatcctgctaaaaagagatcctttttcgaggaaaaattcgacgcagagggggtctcccccttttagcccccgatggagggtcgggctttgccgaagctaggccaacccttccttgacgactaaactttgcgtaggtgcgaggcatatgaacaacttgaaatcatcttaagggtataagcgacgtatctgttt

SEQ ID NO: 8099 - DNA, 318 bp, Zea mays
catcatgacgactgacaggccgcttgagctactccacatggatctattcggaccgatagcttacataagcatcggcgggagtaagtactgtctagttattgtggatgattattctcgcttcacttgggtgttctttttgcaggaaaaactcacaaccccagataccttaaagggattcttgagacgggctccaaatgagttcggattgaaaataaaaaagattagaagcgactatgggacggagttcaagatctcacatattggacgctttcttgaggaggagggcattaagcaagatgtctcttcttcctacacacc

SEQ ID NO: 8100 - DNA, 448 bp, Zea mays
  unsure (1)..(448): unsure at all n locations
aactcaagcanctaaagggagagcacanagaacgagggacaaatgttntattcttacatatgacaggatctgaaggcgcacgccaagcagaggaagcacattaggtgctcatccttccacacatgagacatcatgacgacgtgacaggccacatggagctcctacacatggatctattcgggccgaaagctcacataagcattggcaggagtaactactgcctagctattgtggaagattatgctcgctgcacttgggtgatcttcttgcacgaaaaactcaatacccaagagaccttaaagggatcctagatacagactcaaaatgagttcggcttaaagatcaagagaattagaagcgactacggtacggagttcaagaactctcagatcgaacgcttcctgaagaggggagacacgcatgagtctcctctcctacacccacaaca

SEQ ID NO: 8101 - DNA, 454 bp, Zea mays
tagcaagtgcaagttctagatcagtgaagtcctattattgggtcacattataaaccgagagggattggctgtagatccgaagaaagtaacaactatcttggactggaaagcaccaacagatgttcgaggaatcaagagtctcattggaatggccagctattatcggtgttacattgaaggtttcccaagaatgctaggccaatgacagctttgctggcaaagaaggttgagttcaagtggaccccaacatgccagaagtcctttgagacattgatagagaagttgacaatggcaccagtactgattttgctagatattcacaagccgctctcagtatattgcgatgcttcgtacaccagactgggatgtgtgctaatgcaggaacggagagtagtggcatactcgtcccgacagttgaggattcatgagaagaattatgctactcatgatctag

SEQ ID NO: 8102 - DNA, 357 bp, Zea mays
tctctatcatatttaaactgttgaatctatattattacatctgattatgtgctttatcatattagtttagttatagtctagcgtataagtctataatctaggttgcaaagctccttttgcggtagagataacaacactctagattatgattaagggcaaatagaggtcatatattagagaaaaaatagattacctaattcatccctcccccttaggtatcatcatttcttttaattggtatcggaggtactagctcatttggaactcttagtttaaccatcattgagccgacactattataagagggacaaatggatacatataggccaccatactttggcagcactaactttcata

SEQ ID NO: 8103 - DNA, 485 bp, Zea mays
  unsure (1)..(485): unsure at all n locations
tcactgcggatacaacgctatcatcggcagaccaggattggcanaattcatggccattctgcactatacatacatgatattgaagatgtcaggaccacaaggaatcatcaccgtgcgcgctgacttccaaggcaccgcagaatgctttcgagtggccattcagacggccctcaccaccaaatcatcaacgacttcttccgcgcaggcgaactcaaagcatgaggaggactntacagtacctgcaaacgaagctcaagttgtgacctctatgcggccgactgaggaaacgaanaggatcaacctctggttttcttatgaacgcaaaaccgccatcatcagctccagcttggatgacaaataggaaggcgcgctcgtccagtttctgcaagataaccgagacatattcgcatggcaacctgcggatatgcacggagtcccgagagaactggtcgagcacaaactgaatgtctatccccaggcgaggg

SEQ ID NO: 8104 - DNA, 374 bp, Zea mays
  unsure (1)..(374): unsure at all n locations
tcatgcttgaatgctagctaagtcagcagcacatgggctgcctntaccttccgatgtgttcttcgaaacaataaaggcaccttcagtggaactccttgaaagagcattcctcaatatatcttctgtttatagcgaagattggagaactgagatcatcttttaccttcagggtaaattcctttcagatgacgaagcttataacaggaggatagaggcaagagctcgtccatatgtcatgatagaaggggagttgtacaagcatggagttcgcgctccgctactcaagtgtttatctagaaccgaacgtatagagttgatgaaagaaatacatgcaagcctgtgtggatctcacattggatctatgccgtacttgg

SEQ ID NO: 8105 - DNA, 383 bp, Zea mays
tagccataccttgccataaatttggacactttcatccatgtacaaatagctttgctgaggacgaaacaagcatctcttgagccgaaggcgaaaaacaccttcccttcttttcgtacacaacgaagcatgctgttgcataacatgtatacgtttgaaacgaagcttctatgtgttcatcaaagcactgtcgtcgaagatggaatattactggtcgtgcttcatgttatgatgatgatgatcctacgaatgtgtaaatgaatgtcagtgtaaatgcaatgaatgatgtaatgtaatgtgcacatgaatgtcccatacacacgccaaaccacactcagactctgcattccctaggaacgactttggagtcgttagctctgcatccc

SEQ ID NO: 8106 - DNA, 436 bp, Zea mays
  unsure (1)..(436): unsure at all n locations
tcgtgtatcttncaaagctagtctataaatactggagacatctcatagatcatggagggaggaatacatcccatggtcaccgacagtaacctcttgagcaagtaagatggacttggtacgttgtagtgcataattcaatttgcatagatatacaagctccacaaaaatntacaaaactaaagcgacactgaataaaacaccagtggatagtagcggagaaagtgtttgacctgaagttaaaatataataacttgtgcagatatacctttgcactgccatacttgaggcaactaattcctaggtttaatccttcccttgtctgcatgatccgaacaataagtggctctttcgaccttgtcttcttagctttagctttctttggtagttctggagcgtaagtaagttcatctccatctatgattaatggccccttgag

SEQ ID NO: 8107 - DNA, 287 bp, Zea mays
  unsure (1)..(287): unsure at all n locations
aaacaacacantcagntgaaatggcacatcatatgctttcaatgcgagtccctatttatatgcccagcgcatcatagcttggtgggccatacatgccactgtctttcgctattctagcgaagggaaagtgttttcggaccttcggctaaaaggccttcgttcacgtcccagtctgaatttcttcacaacaaataaatactgcgaggggctactattgggggccttcgtctactgaaagtccgtaaaaacgtgactaatatgttattcagtgtaacatagactgatac

SEQ ID NO: 8108 - DNA, 186 bp, Zea mays
ggagacaagaattttgtcgagccggcgaaaacttgtaaccgcaaacaaaggcagctcgttaaaaagaatgcaagaacacacaccccaaaggagcggagtatggggggaaaagaagtttacttcaaaacgcaaagaaacacagcaagcaggggcagccagacatatgaggcgcaccaaacataggag

SEQ ID NO: 8109 - DNA, 460 bp, Zea mays
  unsure (1)..(460): unsure at all n locations
accataaaaactaagctttgaaaagccggtgctcgctgccaaggtaaagtatatgttttctttactaatgtcaaaagaatatgctcagtatcgccaacagtacgaggatacgttgaacatgcttcgtcaggaggccaaagctgagattgacagtttggagaagagcattgatggccaggcaggatccagctcatcatttgatgatatccagttccctgcagagtccgatgatgatatcaacaatttgacccaatcaatccgactttctcatgacgaagtctcagtaggccatgctgatttcagcgagtttcaaaggatgatattcaagcgcctaggtgatagagtgctgaataagcctacggagtacatatccccgttcaagatccctcataatcgacctgagatnaccctagccaaggcttgtgcacttaggcggatgatcgcctctgatcctgagctg

SEQ ID NO: 8110 - DNA, 491 bp, Zea mays
  unsure (1)..(491): unsure at all n locations
tgaacaatgtacaacctgtagatatggaagtgttgttgattcacacaactctgataagtgcttctatccatttatccttcaataatccaaccaaggactctgtaattactaatagaattatgttgttcgccctttcgaccaatccattagactttggatgtctgatcgaagcaaagtgtatgttagttcccacttgaccgttgtgggggacaagatatccccctggtccactggaaggataaaaaacctcacgaaaggcccaagggcccaatagatcgtaaggtcactccttcatgggcctgnggaggaacgatcagtaaagcagattgacataaggccaaatcggtgcaagccctgactgcccatcaacgttgagcaagccaccacaacagaatatgcgtacttcccgcgcttgagccccgtacaacggaaccaggcgaagaataggtggcagaactataggaagatagactcaatcacgtcactatctc

SEQ ID NO: 8111 - DNA, 320 bp, Zea mays
gcgcatgcatgcacggaagcaagagggcgctaaccattcacataacaacactatgcggactgacaggccactgcgagctcctacacatggaccaattcgggcgcacatcttatcataagcaatcagtgaggagtgcagtactagtctagatactcgtggatgatcactctcacgggactcgcgtaggatatagcaggaaaaaacccatacccaggagaccttaaaaggaatcttgagacgcggctcaaatgagctcggctaaccgatccaccagatcatacgcgaccacggaacacaactcaagaactctcaaattgaat

SEQ ID NO: 8112 - DNA, 439 bp, Zea mays
  unsure (1)..(439): unsure at all n locations
tagggggccaaatctgtcgagtatatatatttcttgtttagaagngatcacccaagttttgtttatgaagcactagaagaccaatcaaggaagtaatctatgggtaagtttgtaagagaaaggtttgcgtgttggcatcaatgcttcttcattaagctagatgccacacgaaaactagaagcttgaagatgatcttttagtaaccagaaacaacatttgcagtgggcaacaagatgtcttcaaaggccagaaattgttgaagttccatctccctgaagagtctgcaaaatgagaatatgtagctaaactaaagctatacccataacccttctaagccgaatctcgaggacgaggttcattttaagtgggtagacatgtagcaccccgaaaattcaaatctagaaaatttctcgaacttttcctaaattcaaaatgaatg

SEQ ID NO: 8113 - DNA, 381 bp, Zea mays
aagcgcaacgaagcgcttgagccaccgaagacactaacgaccactgctccggatctggctcatccggacatcaccaaaccataagagtatattgtgatgcatgtggcagggggctcggctgtgaactgatgcaacacgccgactaatagcgatgcttcaagcagccgcccgcatgagagcattacccactcatgatctggagctagctgctggggctcatgccctaaagaataggcgccactatctgctgagagatatctgtcacatatatacagatcactaaagcctgaagaacatcctcacccacacagagatagatatgaggccaagactagggctcgagctcattaaagactatgaactggagagccattatcaccc

SEQ ID NO: 8114 - DNA, 430 bp, Zea mays
  unsure (1)..(430): unsure at all n locations
agtaattcaattcttatcaactcaagctatcaatcttcaaatgatctacatattcaagattgacccaaggttacctcaatttattgtatttaaaactcatatcatctcggggaagatattgatgttgtacgaattgaagaatcatcatgtgcggaaaatcaaggcctacaacatggaggactgtcaaaggatggtaacacttatgtctttaagtgcaagtaccttaaaattatcatttcttatgcgtcttgtgtagtcacatagaaaaattgaagcacttcaaatacctttaaatntatgttaccattctttgaagaattttctatcatatggtagattgcatactcatcatttccatcctatgacaatctacatgccttaaattgttggaagtaccacatggcatggttttcgctaagttattctatta

SEQ ID NO: 8115 - DNA, 478 bp, Zea mays
tcgcacccttgactaactcggctgcatcgatcttcgctgtttgccaatagaatcctgacctgaagaccttctcgactagcgttctggaggctgcgtgtattccacattgctcagcatggaccttttccagaagttgcttcccagtggacgagagaatgtacttcatgaggacgcctgatgcaccccttctgtataatgtctccccaatgagtgtatagtgagccgactgtctggcaatgcgctcggccgagttcttgccgtctggttcttcttcattctttatatacttaatgattggccttctccagtcatcagagtctgactcgggttgatctatgatgttgcactcttctgtttgatccattgagatactcggctgtagaatttcttgcacaaagactccgggtgggacctgagttcgactagaccctatattggacagtacatcggctgatgtgttccgatctctttctacatg

SEQ ID NO: 8116 - DNA, 332 bp, Zea mays
ctattggtgttggtatgctcagtccacactatgcatattgatcgacgacctcatttcagctggcttgtttacattgcagacaggcgcgcttatgggacttcgatggggcagtgatttgtgtggaacaccttaagctgaagttactcactgatcaaaacctgaaagcttcgcccatggacttctgtacctggtcatttatgttttttgccgtgaacccagcttgcaacccatagcttgtaggtctaattgcaacactgctctgctaactgtgtatgatcagcacactaattgctgccaagccagtcttcgttgttgagctcttcacagctcat

SEQ ID NO: 8117 - DNA, 485 bp, Zea mays
  unsure (1)..(485): unsure at all n locations
gcttcnggcctcgncaccacccanatcccgaccacccttcgtctcttattgtgttatacacctgctccctatgctctaagcttcgctggggatatcaaccaaatctgctgaagataggctgaaggttggcctattcacaatctttgcgtgcgtatagccagctttcagaaatgctgcagctgtgccgtgagaagctagcagggcacagaaatcatcgtgcccctctattacttcatcaagcgccttgacttcgccttcaatgtgttcgaaggtgcttgatatgttttcggccgaaggggtaaacttttcagcactggctccaactgagtagaaaacttttttcaatcgttgtacgcagcgactgccaaaacccaaacacatgttctgaagctctatcgaagattgttgcagcttagtattttagtcagcttcagctctctattatgtctgaaatctattctctcttattgaagctctctgatttt

SEQ ID NO: 8118 - DNA, 474 bp, Zea mays
  unsure (1)..(474): unsure at all n locations
tctacagggagagcacatnttaggattaacaaagtgtaattttgttataggcaggatctgnagcgcatgccaagcatggaatcaagttggtgcccatcatccacacaagaacatcatgacgactaacaggccactggagctcctacacatggatctattcggcccgatagctgatataagcatcgcggggagtaagtactgcctagttattgcggatgaatattcttgcttcacttgggtgttctttttgcaggaaaaagctcatacccaagagaccttaaaaggagtcttgagacgagctctaaactagttctgcttaacgatcaagaaaattagaagcgacaaccggaccgagttcataactcacaaatagaatgcttacttgaagaggagggcatcaagcatgagttctcttctcctacacgcccaacagaatggtgatcggagatgaagatcgaactctatttacatggc

SEQ ID NO: 8119 - DNA, 265 bp, Zea mays
caagcatgatggatagcactgaacgcctaactccgcgattcagcttgaagtctgcgaacttcggtctcagcatgaacttggcaacttcagcttgcttagtttccgtttcggcctgcgagttagtttccgatgatacgactttctttacaagagcatgactcaagactttcgtcgtttccaacacaacattcagcacgtttgccatccttctcctcttaagagtggcagcagaagtcttgtgtatctttatcagatctacctctat

SEQ ID NO: 8120 - DNA, 454 bp, Zea mays
  unsure (1)..(454): unsure at all n locations
nttgatgacgagcgccatttcctcattgtcgagcttggaggcgtctattggttgtcgacttggtgtagcctcctnctttttgtcctccgtcgccttgaatgcgacgggttgagcctcggatgtagatggatcatcaagctcgttgatcttcctcgagccttcgatcatgcactcaaagcttacaaaatgcccgattacttcctcgggggtcattttagtatatctaggattaccacgaattaattgaacttgagtagggttaaggaaaataagagatcttagaataaccttaaccatttcatggtcatcccattntatgctcccgaggttgcgcacttggttcaccaaggtcttgagccggttgtacatgtgttgtggctcctcccctttgcgaagccggaaccgaccgagctcccnctcgatcgtttcccgcttggtgatcttggtgagctca

SEQ ID NO: 8121 - DNA, 423 bp, Zea mays
  unsure (1)..(423): unsure at all n locations
tcgacatctntattcgcttcttcttcctgagcccatggcgtccaatcagcaatgaagtctgctaacacctgggactgaattgaggatctatgcacattgtcaatactgaattcgttaagctccacagcccactttccaattcttccagtagcttctctgttcctcataatatcctttagaggctgtgatgaaggaacaattatgtggtatgcttgaaaataatgacgaagcttcctggaggccattaacactgcatacaaaaccttctccaactctgtatagtttttctttgataaacttagaacttcagagacaaagtatactagggtttgctttntaatttgtccttcaagcttctcctgtacaagcgtcgcactcactgcagagtgcgaagctgccacataaaatagtaatggagcccct

SEQ ID NO: 8122 - DNA, 420 bp, Zea mays
  unsure (1)..(420): unsure at all n locations
ggaccataaaactcagctgtggatctcataaaatatccaataagtttgttcttttgtttgatgaagacagaggggtctttgttttgttgccttcatcatanaacatcgtatcattttttattcaattattgcacaagccgcaaataaacaaccattcagtcattgaacgattgcttgtgccaaatatctgatctttgagttgcttgcctagaactggtcgagaaaaccatcaagcgaatatacacggattccagttctgtatggttcagttgtattggtccatcaaatgcatatacaaaattctctgatttctgtcatatgtgcttgcatgccaacttgacttgctgattatcaccattgaccttaatctattatgtccgttttaatttgatgaggttttcaccatgaaagcgtatcatt

SEQ ID NO: 8123 - DNA, 442 bp, Zea mays
  unsure (1)..(442): unsure at all n locations
tactcagctgcctcctgtgaccttcccatcactttttctatgccaccacgaatccacagggcgagggccacaccacanaatagtagctaaccacctccactgaacaagagcgcgaggtccacaccaccagtttagaaaactcagaggtccccctcccaaacccaaaaagtcaaccctaccaagccaaagtttggccagacctaacgaagaacctatctccgctcccctaggcgccgatgctacagcaggcagccaacatccatccattagggatgcctacataagatgatgatgaagacgtctaggatggactagacctcagtatcaacatcgaggagcaactgaaagggaagtagccttaacccatttcttatattgattntggtgcttgatgaccatcaaaaccattcggactaactagtttgcctagtctttgattcac

SEQ ID NO: 8124 - DNA, 393 bp, Zea mays
  unsure (1)..(393): unsure at all n locations
aacgagtggtaccagcaggcatatggggtgccttttacgacagctgatgacgtcgaagaagaagaagaagaaacttattttgatgatcgggagcagtttgtcccgcctccgtatcacggggatccgggccaatcgtcctcttatcctccgccccaggatccctctggcagtgctcctcccccggcccaatctggggaggaacactntgcctctgacctggcgaaccacctctttgctcctcatcatcctcctccccactggtgatcattggattggcgcttctctctctctntttggttcttgttgccaaaaagggggagaaggtttattatgcagtaccctttatgcagtacccctttattttttgtatgaacaatcggtctggtataacta

SEQ ID NO: 8125 - DNA, 375 bp, Zea mays
acgttgctatatcctgtgcgtctatgtgtgacatgatgaactatgtttggtttggatctttgttatgattgtcaccagaatgtgggtatcccctgcattttggtttacatactatgtcaataaagttagttatttagatgggaaaccccttttattccacttctctttctatctgacaacctgtgtggtctgagttggagattcattaccattcaggataagcgaacgtatcggccgatgctttgagcccaaagagtcaagtccatctgactggtgctccgccgatgccttatgacttggcccaggtattcgacaggtttagttcccgatttctgaacaattcccgaggaatcacagttgaattgaacctacctt

SEQ ID NO: 8126 - DNA, 169 bp, Zea mays
  unsure (1)..(169): unsure at all n locations
agctntgatcacttgcgccgcactaaccttgtactgtactgcacgatgtccgaacccccaacacttgaagcagcgcaccgaacgtcggcaatccgccgcccgatgagaggaggccagacagttaaaacacctaccccggagatcctcagggatcgatcgacggngaggt

SEQ ID NO: 8127 - DNA, 351 bp, Zea mays
ctaagaaactcaagcttatgaagattcttcatccaacatgtgctagtcggcaatgccagagccagcccatgttagtcttagcaattaagcaagtgtcgagttcagctctatcaaaatctaccaagtatagctgaccctctaacacttccttaaatgctattgaatcatcacttcttctaaatacagtgacacctacatcagtgaaaagacagttgtagcccattttgcataattgagatacagaaagcaaattgcaatctaatgaatccacaagaaaaacattggaaatagaatggccaggagatatagcctatctttaccagacctttgcccaaccttgacttccacccc

SEQ ID NO: 8128 - DNA, 369 bp, Zea mays
  unsure (1)..(369): unsure at all n locations
cttagagaagcctgctgcatgcaagctgctaagggaagaacacgagacaggtctattattgttactttcgaaaaagatagaccttgtgcagcttgtcaagcaggtaaacaggtgggaagctctcatgatgccaaaaatgtgatgacaacatcaagacccctggagttacttcatatggacctcttcggacccgtcgcctatctaagcataggaggaagtaagtacggncttgctatagatgatgatttttcccgcttcacttgggtattctttttgcaggataaatctgaaacccaagggaccctcaagcgcttcctaaggagagctcacaacacgnttgagctcaaggtgaagaagatatagagcgac

SEQ ID NO: 8129 - DNA, 349 bp, Zea mays
tcaagcctatctaaaggggagaacacttgagggtttatttttatgtttattttgagaaagacagaatttgtagcgcatgtcaagcaggaaagcaagttggtgctcatcatccacacaagaacatcatgacgatcgataggccacttgagctactccacatggacttattcgacccgattgcttacataagcatcggcgggagtaagtactgtctaattattgtggatgactattctcgcttcacttgggtgttctttttgcaggataaatctcaaacccaagagaccttaaagggattcttgagacgggctcaaaatgagtttggcttaaggatcaaaaagactagaag

SEQ ID NO: 8130 - DNA, 417 bp, Zea mays
agctcttgaagaaattttacgtagtcgagttatttatgcgccttttcgggagccagggggattgctaccattttggagaggaaaggttgtgaccacgtgaaattcttggcacaatccgaagccgccttatcctccgaagatataaaagacccctcgaccgaagcgagcctggtcggaggaaaatttttcaccgacatctggcacaatggtggccgggaaatggcccaagaaattatacgaaaaagcgaaaaaggcattcatggcgctagaaaagtagcagaggccgctgagaaaagtgcagagcccgaagtggaaataggtattgactagtggtttttgattctgctgtaattctttgatttcgaacttgttcacggtttggaatagtaatatagccgtatcttctcccccagaacc

SEQ ID NO: 8131 - DNA, 341 bp, Zea mays
  unsure (1)..(341): unsure at all n locations
agcttagcttttggtgtttgaagccntctganatagtattgaagcttcaaatctaattctgctattttggcttcagcactccgctaataagccttcagttgtttgaagttcgaagtctttcttctcgatagctactgattgctcctttatcttgttttctaagttctcaattataacttcgcgctttttatcctctaagtcctgctgcatttttaaagccttgctcaacagcatactctgtgaataaataaccttcgttagaaaacatctatgttactaacacaataaaagttagagaaaagctgtttaccttgaaattggaacactacagtctaccgaca

SEQ ID NO: 8132 - DNA, 279 bp, Zea mays
ctataaaactccagctttaagggagaacacaatttgggtatataatgttcatttcgagaaagacagggtttgtagcgcatgtcaagcacggaagcaagttggtgttcatcatccacacaagaacatcatgacaaccgacaggccacttgagctactctacatggatctattcggcctgatagcttacattagcatcggcggcagtaagtattgtcttgcaattgcggatgactattttcgctccacttgggcggccctcttccccccccacctccactc

SEQ ID NO: 8133 - DNA, 379 bp, Zea mays
  unsure (1)..(379): unsure at all n locations
agcttccgntcgntcccccaccctgcacgctgttgatttcaaacactggactcaccaccgagggcgtgccttgcgtgtctgatgaacacgtacgcttttttcatagaatagccctacgcggcgcttatgctttactcccctctcccctccctactttctagtcttgctcctccaccttccttatctctccttcctaccgtgtatctccctcttcttgctttaccgcgcatcactctttcacttttacctattcgttttctcgtgttcattcactcatgtgtcctccccttatctcattcatctcttcccatccttcactctcttccttcccctctccttttttttctcgcttctctccctcctcatctcatctcatctt

SEQ ID NO: 8134 - DNA, 336 bp, Zea mays
tgccaatacctgtcaaagcaacagttcatgccagcacagcagctacaaaccataccagtaacttggcctttcgcatgctggggactggatatgattggacctttcaaaaaagctcaaggaggatatacccatgtattggtggcgattgacaaattcactaaatggatagagttccagcccattgcttctttaacctctgctaaagccgtggaattcatacaaagcataatattcagattcggggtaccaaacagtatcatcactgacttgggatccaacttcaccagttcagaattttttgacttctgcgagcaaaagagcattcagatcaagtac

SEQ ID NO: 8135 - DNA, 400 bp, Zea mays
  unsure (1)..(400): unsure at all n locations
agctgctngcatatatgtctgagcaccctcgatcntgttgtcaggtncccgaagcatatgcacaaacaaaggcagaagcagagaagttagtcatcaaggccaatggcattaatggccttctaacttgatgcatacgccctggaagtatgtttggcccaggtgacattatgatgccaactttggatcgttatggatggtcaaacgtaagtgactctatgctatatggttaatactccctccatcctaagagccaaaatatcttaagttttttctaaatttatataataaactaataacatttatgatatcaaataagaataattagatttttattaactatattttcatattatatgtacttgatttcataaagctttatagctggctatactcgctcctt

SEQ ID NO: 8136 - DNA, 324 bp, Zea mays
  unsure (1)..(324): unsure at all n locations
nacgcttctacaagggagaacacattgggttttttttttgtgaatggtgagagagaaagggtctgtgccatatgcatccactgtaaggctacattttctgctaaatcctctggtggcactggacatttgctacgccatgttgatacttgtgctgctaagaaagaaaaggaacgatctggtagaattcaatctgttcttaaatataatcctgatggttcactaatgcgttgggagtactctgatgttagggcacgtactgaattgggtcgtttgattgctagaacagatttacctatntcctttgctgaacgtgaccatctgaag

SEQ ID NO: 8137 - DNA, 268 bp, Zea mays
  unsure (1)..(268): unsure at all n locations
agcttgcacacatagctctttngaatacctttgatcatatctcttttataaggcctacgactaaatgtggttttcaaggttatctcaaaccaagtcatatgtatattgaaagggaattggagtcttcggcgaagacaaaggcttccactccgtaactcatacttcgccaccactccgagcaactctctattccttgnggagaaatgagcatcaaagaaaaggacttcatccttggaggagagagtaaaagctctaaagcacaaggacc

SEQ ID NO: 8138 - DNA, 295 bp, Zea mays
tccactctactctatcggtattatctacccttcgccatcactccacaatgtctctccatctttggtataatcttcactcatatgttttatttgccaaaggggagaaaatagttaggaaaagggcttatatctcactcaaagtatccgtttttggcgattcatgccaaagggggagaaagtatgagcccaaagcaaaaggaccgcaccaccaccctaattttacaaactaatgattttcaattggtaaacttcaaagtgctatctctttgcgctttacagggggacacagtagcac

SEQ ID NO: 8139 - DNA, 411 bp, Zea mays
  unsure (1)..(411): unsure at all n locations
agctnggcaaaagcactacataactttatanataccaagaagcgattccaggattaatcaaatcaaacattacagttttcgaaatctgttctgacagaggacagaacacagcaaccagtttgtaaaattcataactcttaaactatcaggcctgtgtttatgaaattttaacacaagcaagatcagaaaagcatctacaactttcttataatgaccatgaacagattgtaacattaaattaggcaaacaatgcagtttctgaaatctgtacagaatttggacagattcagttactgaatttgtaaaaatcctaactcctaaaccgtcagacctatggttgtcaaattttaacaccagcaagataataaagttatctaccacttttctatagcacatatctacagaaaacac

SEQ ID NO: 8140 - DNA, 326 bp, Zea mays
tcggcgtgatagcaaaaaatgtaactgacttaaagatgaaaaggctattcagacctcgatagattactatccgccattattatcaaatgtaaagggcataaatgtaattttgtatgggctgtgtcctgtgcctataaataggtgaacagtacccccgtactgttcacgttgatctgacaatcgcttttgcgtcacacttgcactttcatctcctttaagctgaacgcacattctgtaattcccccgtcactcccgcttccctccctccccccctcctcccctcctcctcatttcccccccctccgctacacctctcctctcccccc

SEQ ID NO: 8141 - DNA, 329 bp, Zea mays
ccaaagaaacgacatggggatgaaacatactcatgagaagatcgccctcgctaaagcaaactgtctcagagaggatgatcaaggcatagtatggtttaataaccgcatagttgcgcctatattccattcatcttagcctatgatccattcatcccagaagcactaagatgcaccaagatttaaaacatcattattggtggacaaaaacgaagatcaaaattgcacgatatgtgccgaaatgtgacacctgtagatgtgtcaaagccatacacatgaagactgctggtccactgaaatctttacccattccaacctgtaaatgtgaggac

SEQ ID NO: 8142 - DNA, 321 bp, Zea mays
tgagaaataccaggatgcagtttattattttgaagcttctttcgaaggagtttctgtcaagaatattccacgaggagaaaatgagcacgctgatctgctagccaagacagcgggacaggggctgcccttaccttgggaagtattttttgagacaataagagcaccttcggtggaacttcttgaaagagcagcgctcaatatatctcctgttcatagtgaagattggaggactgggattatatcttttcttcaaggcaactgcctttcagatgacgaagctcataataagagaatgcatgtacgacgccccccatatgtaat

SEQ ID NO: 8143 - DNA, 242 bp, Zea mays
aattgcttcttcagaaagacatttcctgaagcatgtcgaataataaacgaaaaatcttcggtaggtgcttcgggaataggagttttagccttttcgagcacatccttctctagagccatgccggtatctagagatctttgctcaactctttgctcaattgcggcaggctctgcctccgcaggcaatgagggcctagctttcggttcagcacgaactttaacagcttcaggaaccttcttaca

SEQ ID NO: 8144 - DNA, 315 bp, Zea mays
caagcaaagcgagcttgcaagagaatggtcttttgtatataggcgctgcacactggatgttatattatggcaaactcgatatcctggtctggtggaattcccgacaactcgtctgggaagacatctgcatactcacaggctactgggattttctccaaaggtagctctatcatggaaaaagcaaatgaccgagttgtttcttgactaggaagatataaggtaaatttcccgcaagtcggggaatggacttcaacgatgcggcttgcgatgtgtaccactaccttgctctgggtcatccccatctgtccccccccc

SEQ ID NO: 8145 - DNA, 239 bp, Zea mays
  unsure (1)..(239): unsure at all n locations
ggaanttagagcgactgaggatgcaagcttgaaatgcagaaggcctgtttttttaatatttgcataggtattctaacttaccaagaagcgatgctctactcttgagaggcatcactcccatacaaaaatgcttgatcaacaacacagcatgtgaagacagctaaacttggattcattctaacctagtaaatacgcttaatctacgcctgtgcctggacctctgatcgcaaacactatta

SEQ ID NO: 8146 - DNA, 347 bp, Zea mays
  unsure (1)..(347): unsure at all n locations
agcttgaacagctcanatcttagcatgtgttanctgcattacttttcctttcacttaatcttacctaggtatccatttattcacaaacttaatcattctgcagagggattgggctgagcttaacaaggagcttcaagagcaacgagatcatgtccgtgttttgtctcttgacaagaaaaatgtcttcgacagctgcatgaagcaggtagaggatatgagaaaagagctacataactcgtggaaagctgcttctgatgctgccgcatgccctacacactgtgccggcttactcaaatattctctccccactccactcaaacaccgacatcacgcctcccccaccaatg

SEQ ID NO: 8147 - DNA, 223 bp, Zea mays
ttggaaagtgagcttgcaagatatgattgtacaaagggtgagtcgcttcaatcactctttgatcggttgatggtgttggtcaacaaaataagagttcttgggagtgaagattggagtgactccaaggtcacaagattgttcatgagagcttatcacgagaagcaccacagccccgcacgcatgataccgcatcctgctgcctctgcggctccgcccccttatc

SEQ ID NO: 8148 - DNA, 379 bp, Zea mays
gaaagctctcttgtgggctttggtgtaaggatgacaacccaattaaaggactaacaagtgtgctaagagttgaacacgcgcttaatgcaaagctaataggggtcaacacaagtgaacaagtgtgatggtccaaagactggattatctatagataatgaacactgcttaagtgagactcggtgtgcgtaactcagagacaaccgatcaagccaagaatggaggcaagaagagcttcgaggtaccgagtgcatgggagaaggtcaaggagaccaggaacccaaagccaggggtgaagaagacttgcaaagtcaaggttgatcgaagtatggtgcatcaaggatcactacataaggacatgacttacaaccaatgaggtaac

SEQ ID NO: 8149 - DNA, 247 bp, Zea mays
gcttttccgtgaccactatcccgagtttttcatgatttgtcccctccggcctcgcctgccgttgccgtcaaaagccgtctctgggatagttttcatcgccgccggcacgactgcacgcacatgtggatatgagaatatctggttcagttttttttaactagttcttttaagaatgcgaagaatctgagtatcataacaattatgcggcgacgagatcaaatgatccaaaccacttataatctacaca

SEQ ID NO: 8150 - DNA, 108 bp, Zea mays
agcttgtgatgctcaccgtgacacccgaaattcaatccggccccggatgagcgggaacgtttgcccatgatcacggtttccgccgcgcacatgccacaagccgatctc

SEQ ID NO: 8151 - DNA, 331 bp, Zea mays
taactttgagattctttcgagccatgttcttcttaactcagattcgaataattcttgtttctgaattcttatcaaattattcactatccaaccatgtcatcccttaagcatggttcatattccagaaaactcccaaaatactcttgtcccatattctgcctataatttccctgctcagactacgccagctgattcactcgccactattcccaccaacagtcaactctactgtactaccccacatccacccagctaccctgttcttccccacacactctccacctcttgccccccttcctacacccccccccctcttccccgctctcccccc

SEQ ID NO: 8152 - DNA, 66 bp, Zea mays
gcagcttgtactccttgtggagggctcctcctggacgacctgctcttctcctgtgggggggggggg

SEQ ID NO: 8153 - DNA, 230 bp, Zea mays
tcagtcacagctacaagacagtactgcgtgcacttgttgtgccagctcttgtaatcaccatgggtgtctgtgcaattatcatgaagctccttatggacgcggtggcgagttctaggaaggctgaaatagaatgggagaaggagtatgggcctccgtcgctcacgtacaaagatctgtcggccgccaccagaggattcgaggacacgatgctccttgcacgaggaggcttc

SEQ ID NO: 8154 - DNA, 349 bp, Zea mays
agcttctgcgcgtcgatccgtcctccgtccgtttatgctctgcgcccttccacgggatcatccctgtgaagcgcgtccagcccctcgggcgactcgacctcccagtctgcttcgggacaccctccaacttccgaagggagaccctgacgttcgaagaggccgggtttcgaggaacctaccacgccgtgctagggaggtcctgctacgcgcagaccatggcaggacctgagaacacccaacacaatctcaatatgccatggcccctcttgatcgtaatagcagtgcctactcactctccatttctacttctgtgatgacactagcactgaaagacctcctacatcactgc

SEQ ID NO: 8155 - DNA, 346 bp, Zea mays
gacggacacgtaacaatactacgtctttgtatgcgacccccgacacccgtttttttatatggttgacgtgcggcaacgaaattgcgcaaaaccaccccaaacatgagttttggacctaaagtagcggaatgggcatgttcggtgagaaaaacgaagaaatggttccggatgcaaaaactcgtgcttggaagcaacccgaccaccggtttaggaaagggcaacctgcggaaagcaaattgggcggaaccaagcccaaccttgactttggctccctagaatagggtatgggccagaccgcgggaaaaaaacaaaaaagggttcccgggggaaaaaccccgcgttttgt

SEQ ID NO: 8156 - DNA, 254 bp, Zea mays
taatcatatctaagagatcagataatgacggagcggaccttttgatttgggcttaatagctgcgcccttgacaggaattaccaaacaccgagatgatgagcgccatgtttactttcttcccattggtacgagtccataagagtggagactataccaactgtgagcgatgtggagtgaccgcgaagggcaaatgataccgcgagagtggagaggaaccttgtcttcgcccgcaacgccatatacgcttttaaact

SEQ ID NO: 8157 - DNA, 280 bp, Zea mays
tggcactagatgctactgtcctttttttgaggtggaaaagagagcactaaaagctggactgaagcccgcacagattaaagactatgggctccctgtccgggcctcttttgtcaaacctgttcgaccgaaggtacaaaatttcttcagtatagcggtgccatactgatttttatggatcgtttatatgtttgagaacttaccgcctatagcacctattggcgcgccctatcatcgaatgacgcctccacccttctaactgcctcccaataacctcccagct

SEQ ID NO: 8158 - DNA, 302 bp, Zea mays
agcttatagaaaagaaaagaaaggtttaacatgtgctgggctgaaaccagcccagatggcccaacagtggacagaagcgcgcccgcgcccgtgccactttgcacaggggtccctgtccttttgaatatcccgaaacaaggtcaacgcactattgagatgagtcactgacaatacccagaaaggaaccccgggttctacctttttaccccgaacaacccacgacgaagaacagaactacgccgacatccgagagcgtattccggacgaactacgccgcacctagagctcgcgagacagagaag

SEQ ID NO: 8159 - DNA, 312 bp, Zea mays
tgtgaaaccaatcacgagtttattgtattaatgatattaaattcaattggtcttcaaaatgtaacgaagcctttgagaaattgaaggtattattaaccactgctccggtattggctcaaccggatattgaaaagccattcgatgtgtattgtgacacatccggcagtggtctcggctgccgcctactgccagaaggccgagtcctaccgcatcctctcaggcagcttcccccccttgttttccatcatcccatcccgcccctccccccgtcctcccccccaccgctcccccgctcctcccttccccccccct

SEQ ID NO: 8160 - DNA, 405 bp, Zea mays
agcttcgcatgatggcagatgaaatgactgaatctcgtcaaggcggaggtgcatcgcctcctggaggctaaattcatcgagccggtggcttaccccacgtggctctccaatgttgtgatggtgcagaagaaaagcggaaaatggcgcatgtgcatagacttcaccagtctcaataagtcctgcccaaaggacaatttcccgttgccacggatcgacaaaatagtcgatagcgcggccggatgcgaggtcatgtccctcctcgactgcttctccggctatcaccagatatacatgaaggaggaagacaaggccagcaccagctttataacacccttcggcacttattgctttgtcagaatgccggagggtctcaagatagccgagtccaccttctccagactcacc

SEQ ID NO: 8161 - DNA, 239 bp, Zea mays
tcggtctctccacttatccattcattatcacctttagggatgcctcgtatgaagttatcttcattagaataggtgcccacgttggcgaagctagcttttatcttctccacgcagcccaaggattttttcgaagcatctttccttggatgcgcgaagtttttcaactgttttctctaaatggtttttcgataatcgctgatctctcgtttagcttctgcgagagcgccatttttctttgg

SEQ ID NO: 8162 - DNA, 375 bp, Zea mays
  unsure (1)..(375): unsure at all n locations
cgctnctagagagtgcaggcactattgtcttgtttatcttcaggagctgggccaggagagcttgtgtaatagagattctcatagcagcctaacgtacctgttctcgaagcacctgctcagtgagattagaactatattgctcgacatgcttcttgagaggagatattagacagatcaaattgccgaagtgcaacactatgctaaggagcttatatacccccaagggtccttggtataccgaggagacaatagagacgacttcctttactgtctaccagacatataaggagaccaatgcttgctgcgaatagatgggcaaaatggggtattccaagcatgaccttcgttagtctcgccacgacagaggatcaactt

SEQ ID NO: 8163 - DNA, 326 bp, Zea mays
taccgcatttgaagcatgattttttctctttggtcttagacttgcttggctgtccctttcgaccttttagcgccgccttgaatcttttgatgatgagggccatctcttcatcattaagaccggcagcctcaatttgtgccaccttgctgggtagcgcctccttgctccttgttgccttgagagcaatgggttgaggctcggtgatcgtaccattcaaggcgtcccccacgtaccctgcctccttgctcctctctcatacctccccaattcctaccgaccctccccacctgccccctcctctccgccgtcactcccgccctctcctc

SEQ ID NO: 8164 - DNA, 430 bp, Zea mays
  unsure (1)..(430): unsure at all n locations
agctnttctaactttagcacaagggttttttgtttcaatgcttcctggccagactggntaaaaccatgaataattacgctagactggcttagatcaccagcggagtaccctattcttttaagagtacgcagaggtaacaaattaatagctgaaccaccatcaatcatgatacggttaatgactaagtcatcaatctcaccaagcatgagaaggggtctattatgtttcttgttccccaataacaaatctttatcagcaaaagtcatgttttgagttcgagctaattctgcttccacttgggaaacttcggctctataatcttctagaaaggataatgcagcaacatatgttttacgcanatcgggagaaagacacaaggcatcatacacagaaagcatagctggtattttcttcaagtgtgcaactacat

SEQ ID NO: 8165 - DNA, 324 bp, Zea mays
tcggcagaaagaagaagtagttttttatgttttgtacaaaaaagcaaagcttcggcaggaagaagaagtagtcttttatgttttgtacaaaaaagcaaagcttcggcagaaagaagaagtagtcttttatgttttgtacaaaaaagcaaagcttcggcagaaagaagaagtagccttttatgttttgcacaaaaaagcaaagcttcggcagaaagaagaagtcgtctcttatgttttgcccaaaaacacacagcttccgcacaatgaacacgcacccttttctgctcccatgcgcctcccccactctacgtcgcctctccctcc

SEQ ID NO: 8166 - DNA, 277 bp, Zea mays
agcttgcttacttggtaagatgactcaagtcgctcttcacgggtttaccggagaggacggtaggtttattggaactcatacatactgatgtgtgcggaccaatgagtacgacagctaggggaggattccaatacttcataaccttcactgatgattttaggagatattggcatgtctacttaatgacactcaagttctgaatctttaacaactgctcaacgtgcttcatcattgagcaattacccacctcccccggaattattacgcaccgtcatct

SEQ ID NO: 8167 - DNA, 333 bp, Zea mays
tgacaatgagtgaaacggtttttattttatatagctttcgccaaatcctcaagcaaaggagggggaaggattacaaaccccgctcgatgaaagtttgctacaagtgcggtaagcccggccattttattgcacaatcgcctatttcaagtgatcgcgacaggcccggcgacctgaacctccgatccacagcgaccaccaccccctactgaccatccccccgccacccccccttcttcccctccttcgcactgctctccccccccccttccctctcccacccccccccccctcgcgcccttccctccctccccctccctctcctcccctctcccc

SEQ ID NO: 8168 - DNA, 417 bp, Zea mays
  unsure (1)..(417): unsure at all n locations
agcttgacattgtctcccttttgaaagcctttgccatccttaatgccaaggcgtctcccactatagagcatgcttctagcaaatttaaatttttcattttctaagtcatgctcattaatcttagcactaagttgagctatgtgatcattttgttgtttaattagagctaggtgatcatgaatagcatcaacattaatatctctacatctagtgcaaatagcgacatgctcaacggtagatgtagagggtttgcaaacatttaattcatcaatcttagcatgtaacaaaacattttcatttctaagattggaaataacatcattacaaacatttaaatctttagccttagcaattaattnttcattctcaattctaaggctagagagagatgcattcaatttgtcaatcttagcaatc

SEQ ID NO: 8169 - DNA, 115 bp, Zea mays
tgccgatgtcgtcgatgttttctctgtttttgctaggcaacatggtgccgtcctcggcgaagcggaacttgttgccgtagacgcggatccaattctgcacttccttctctttgct

SEQ ID NO: 8170 - DNA, 329 bp, Zea mays
tgtggaggaccagatcatcaaagccttatgtttctagatgagaagtggtcacccaagttttgttgatgaaccacaacaagaccaaccaaggaaggaacccatgcgcgagcccgcaagccccaccctcgcgccaccccgccccacccccctccacccccccccccccccccctcacccccccccacccctccccccaccccaaccccccccctccccccccccacatccccctccccccgcccccccggcacgccccccccctcccccccgcaccaccccccaccccccccccccccccccccacccccacccctccccccccacccccc

SEQ ID NO: 8171 - DNA, 375 bp, Zea mays
  unsure (1)..(375): unsure at all n locations
agctatttcacctctgttctgttgcttctngctgattctaacacttaaacaagtatattagcatacaaaaccaatgtactaaggcctagaaacatacctttactcttgatttgcactntgttcatccatgcgcatagattcacattcaagcacttgtgctcgcactccacacggctctacctattaagcccccaggctcagttccaccttaccgctcgctccctttccacctaccctctcctaactcctctccattcctcccccctgcctcctcaccccctccccctcgtatctccctccctcctctccccctctacttcgtcccccctccctctcccccccctcccaccccccctcttcctcttcctctccccc

SEQ ID NO: 8172 - DNA, 284 bp, Zea mays
acactatacccaagcttgcgaaggtcttcactgccaattttttgtgtcgatgccacagccagcccatgctagtcttagctattacgcatgcatctagactggcctcttcttttgcaaaatcaactaaataaagtttgccgtctagtacacccttaaaagctagtgaaccatcacttcttctaaagacagacacatctacatttgtaaacagacagttataccccatgttgcatacttgcctaacagacagcacactctatccaagagactccaccatcaacaca

SEQ ID NO: 8173 - DNA, 404 bp, Zea mays
  unsure (1)..(404): unsure at all n locations
agcttaatgcccncaagaataaactctctatatttgttaagggtaaggctcccatggctcaagatacagagggttacattttatatcctgaaaactatcctgagcataagattaggagaattcatgctagaaaacctcattatgtttctcatcatgcttttatgaatagtaatgaggcatctagctttaggcatccaactcatatcaaaatgcctaaaaagaaaaatgttgaaagggaaatgggcttaaacatgtcctctaatcgattttggtgtttgacgtccatcacaaatcacgtggactaactagtttacctagatgactnttatctcaggtgcataaggttcaacataaaccaagaaagaaattaagttggggactcaaataaacatggagcacagact

SEQ ID NO: 8174 - DNA, 271 bp, Zea mays
tctaaagggagaacacattttaggattattttttgttcattttgagaaagacaggatttgtagcgcatgccaggcagggaagcacgttggagtccatcatccacacaagaacatcatgacgaccgacaggccgcttgagctactccacatggatctattcggcccgattgcttacataagcatcggcgggagcaagtactgtcttgtaatagcgcatgactatactcgctctacttgcttactcgctttccactcctcctccttcccccca

SEQ ID NO: 8175 - DNA, 358 bp, Zea mays
  unsure (1)..(358): unsure at all n locations
agctntagtggtaggttcaatgcaccactaagtaaatcatttttgtttgttctggggggaggacaaaggccacatgacaagaacatgccaccatacaatcaacaagcaaaaagatcttgattcataaaccactcaaccttctcagacgaaggaggcgttcaatacatcttcatattgttcaccttatgttccacaatatgtccagcctcaatcataggagcctagggtgcatctgccttctgacctcaaatgctttaagtaaccgcgtgatgagagcgagtatcccatctgcttcctcggcttctacgacacacctccctatcgacctgaccctcctgttctcccctacactccccac

SEQ ID NO: 8176 - DNA, 422 bp, Zea mays
  unsure (1)..(422): unsure at all n locations
agctntgcaggaacaagagatggtatgatgttctatgttgcttgaaagagtcaattcttattaactcaagctatcaatctacaatgatctacatatccaagattgacccaaggttatttcaaattattatgtctaaaactcatatcatctcgggaagatcttgatgttgtaggaaataaagaatcaatcctatgccgaaaagtcaagacctacaacatggaggaaagtcaagggatggtaacatttatgcttttaagtacaaatatcttaagttatgtcaccattctttgaagaaattcctctcatatggcagattggatattcatcattcctatactatgccaatctacatgttttgatttatcgcgcactcccgtctcgttttccccttcctatctggtatgccttcctctctctcgagc

SEQ ID NO: 8177 - DNA, 363 bp, Zea mays
gtgacaactaatagacatactcaacgcttgtctttgtctagaacaccctagaattttgttcatcaaaatagtatattgttgctacatttgcaaataaaaatataagcatacatcagaatatgaaataacactcaaaatataagcaactcaaaaaaccatggcccgtacctcctttgcacgaataacaacatctgatgcttgcatcatcccataagaaggaatacgtggttgctaaatcatagctgacatagcatgatccagaatcagcaggaaataatgagcaaaagtgagtatttcccgtgggaaagaaaacacgtacagaagttatcacgttactaccttcggcatgagggaacatataac

SEQ ID NO: 8178 - DNA, 348 bp, Zea mays
  unsure (1)..(348): unsure at all n locations
gatcctaagcaccgaggcatgcagctgagttgaggcctaatngttagtaccagngactctctcaatcaaggactttgcaacccagatttgtttaggtctactcttgtttggtggacctaggaatgtaactttgacctttccatttgcaacctttcttagaacataatgagcattgaaagcaaatggtcttgagtgcttaggcaagggagttggtggcttgtcttcgcagcccttgctaaccgacacttttcgttccactccaccccttgatcctcttgcgctcccccttcccatccccttccctcatatctttccttcttccatctgcactacccaaatcctcctttc

SEQ ID NO: 8179 - DNA, 340 bp, Zea mays
acactatataatacaaactcaagcttacatcataacatgcccacatgtgtttttctctgaacgacattacgagaaaccgagaagctactggaaggactggaaaatgggctgcagagctcaatgaattttgtattgaatatgcccatagatcttcgattcagtcccagccgttagcacacttcattgcctgactggcccccagcccctcagcagccacaaccctcccaccgtccccatacaccgcccgctcccctcccctcccaccctcccccccccttcatccccttcccccccccccctcctcctcccccccccccccctctccttcctcatcccgccc

SEQ ID NO: 8180 - DNA, 208 bp, Zea mays
  unsure (1)..(208): unsure at all n locations
agcttggttgtgatcacattttttgnnagcacaacagtgcaatagtagtaaatgttgtggtaacttcacacctacccgtctgtttatatagtgctgcaggtgggaaggtgaatcatcaagccgctcgcacccgctgaacagacgcccacacncactaaatggtgttccatagcgcctaagatggcgaaccaccagattgtgcgtaccc

SEQ ID NO: 8181 - DNA, 335 bp, Zea mays
tgtaaactaacagtagatatgttcctttcttttgattcttgcatacaaatgcaacttcttttgtaaaacattgcagcagcagtaactaattaattagtattattccatgtcatcttttgaatattgtcggcagtagcaataactaattatatcaatttatcattgttccattgactaactgcaaataaataaaccgtacaatgaaaagcatcaactaatgacccatttttgctgcaactcatcctatttagaaacacacctggggatgaatcgggcgagctcgaaagcaaacttcttgcgcccaatgaagcccaagagatagcacgtctggaccc

SEQ ID NO: 8182 - DNA, 432 bp, Zea mays
gatcttagagacacctgaggctgcagcttcttgaaagaggacttctgctaattgctcagaagggtcccttgcagagagtcaagctgaaatttctaagataaacgaggagcttctccaagttcaaacatcattaaaagaaaaatcatagtgcttcgaacaagagaagaaggaactgcaagcaaaatataaagttgaagctgataagaacacgaagctgcaagaatctttgagcgaccttcgaaacaaatgcttggaatttggcagcctctgcgtgcaacggttaaaaggagtcttcagttcggttggggactgttctgaagaagttgccccttcagctgaagatatatcagatactttcaagcacaatgaaaatgaagctgatgcactcgatgaagtaatagctgcgcatggtgacttctgtgctctgctagc

SEQ ID NO: 8183 - DNA, 336 bp, Zea mays
tgccagaattgttttgaagaatttttttataaggttaaccactgcaccaatactgttaatgccagacatccacaagggatttgatgtgtattgcgacgcatcacaccttggacttggatgtgtgctaatgcaagaaggaaaagcgatagcttatgcctcaaggcagctgagaaagcatgagaagaattatcctatgcatgatttggaactagctgccgtagtgcatggtttgaagatttggaggcactatatatatgattggaaacaagtgcaaaatcttcacagatcacacaatcttgaaacatatactcactcacaatgaaccgaacctcatac

SEQ ID NO: 8184 - DNA, 356 bp, Zea mays
  unsure (1)..(356): unsure at all n locations
agcttctccatcatctctttctttatttcttgtcacaaagatgtctataaaaggagcttagctccgctaatgctttccagacatcattttttacaaaaccacgaaacataacaggaaggagtctttccattattatgtggtagtcatgactcttcaacccagaaaacttgcccgtcttcaaattcacagaccttctaaagcccgcggcgtaaccatctgggaactttaagtttttcaaccatttcatcaattgtttcttccttttaggtttaatactgaaaggagcatgtggcttcttctgattctctcctatctccatagtncctcttctacggattaaggccacgtctttcctt

SEQ ID NO: 8185 - DNA, 281 bp, Zea mays
ttgcaggagaaggagacgatatgattttttgggatgcttgagagagtcaattcaactcttgttaactcaaactatcaatcttcagtgatctatatccatgattgacccaaggttatttttcaaattactatgtcttaaactcttatcatctcggagaaagtattgatgttgtaggaaataaagaattatcctgtgcggaaacaacaaggtctacaacgtggaggaaaaccaaaggatggtaacacctatgtttttaagtgcacgtctcccaacttactgct

SEQ ID NO: 8186 - DNA, 377 bp, Zea mays
gcaagcttcacggctactggcggagctatgtctagctattgtcttgcccagaggatggctggggtgttctgtacacgaagctctggcggcaacggcggacggaatagagcttgccggagctaaaggaaagcgcgtgcccctcagactcacatcagcactcaatttgcaccaccatacaactcccctctcccaaaaacacgacctcaccctggcgtaacccaactattctaccacccccctctacatcctccttccgcttctctccccccccactccacccctccctctctccccatctcccactacccaccccctacgtataccccccttcaaccctacctattcccctcctcttctcctcttaccacctcccccct

SEQ ID NO: 8187 - DNA, 374 bp, Zea mays
  unsure (1)..(374): unsure at all n locations
agcttgtcggcatgcgcctcggtcaatgatctactctggncgcgctctttaagactggctgcgcgtgggcaacaaagagcttcggtgccatcgttactggcactgggccatggcgacccctagcctccataggctgggtctcagcgtggctcatcatggtgcgggtcttgtaaaccaccagtgcactcaggcctaagcttgataggttatgagtcgggcacaggtctaggggcccatatgttatgagtggaaggaggacctacccttttgctgcggctcactgccccacccagctaccgaactccttcctttttctttcctacttctcttctaaacgcactatcccccctcaccctctccgccactaaccaccc

SEQ ID NO: 8188 - DNA, 316 bp, Zea mays
ttatcaaatggacgggaaatttgctttctctcaaggaccaaacaaggaagaagtctatgttgagcaacctcccggctttgaagacagtgagtatcctaaccatgtctataagctctctaaggcgctttatgggctcaagcaagccccaagagcatggtatgaatgccttagagatcttcttattgcaaatggactcaaagtcggaaaggccgatcctacactctttaccaaaactcttgaaaatgacttgtttgcacgccaaatttatgcccgccgaccaccacctcggctctactctcccgcccacccccccccc

SEQ ID NO: 8189 - DNA, 421 bp, Zea mays
  unsure (1)..(421): unsure at all n locations
agctngggctagatgagcgagcattttaatagtgttgccacgaaggcgcaaaccggcttcagcataaaaaaggctctgtacataacacgacgaaggaaaagaggtccaaaacttgagcaataaaatataaaaaggaaagacaatgatgccattgccgtatttgtaaatcgcgtgtaaaccttatggcattcttgtaattttatatgaagttaaacaacttccttataaatatgtaaaccttatggcattcttgtaagtttatatgaagctaaacaacttctttataaatatgtaaacagcggcatacataaattcacctttcgagggccctaagctccattatccttagccttccaagtatctttgagccgattcccgtgtaaagccgaaggtacgactgtatatttatcttataagctga

SEQ ID NO: 8190 - DNA, 320 bp, Zea mays
  unsure (1)..(320): unsure at all n locations
taacgagtcccagacgagcctctgttgttaccgcgngcctgctatagagtcagaccacctaattcggcgggaggagctcggcacaataaaagctgtaagcgggcacctgaaaacaccctaaacttgcaagtgagcttatgcagttccccttaaaagtaaatgccaggagtaggctcgtggactacggcccccacttgactgcaccaactcacggcccgccgcgcttcgagcagcgcttccttcaccccgcggcctacacgcccacagctcgctcggcccggcgccgcgctccgccccctgcccgcccccaccgcccctcc

SEQ ID NO: 8191 - DNA, 290 bp, Zea mays
  unsure (1)..(290): unsure at all n locations
agcttctaaagggagagcacattntaggattaacttaagttcattntgagaaagacaggatttgtagcgcatgccaagcagggaagcaagttggtgctcatcatccacacaagaacatcatgacgactgacaggccactggaactcctacacatggatctattcgacccgattgcttacataagcatcggcgggagtaagtactgtctagntattgtggatgattattctcgcttcacttgcgtattctttttcgcggataaatctcatacccaagaaactttaaaagga

SEQ ID NO: 8192 - DNA, 316 bp, Zea mays
  unsure (1)..(316): unsure at all n locations
taccacatttgaagcatgagcgcnttcncttgtcttggtcttgcttggttgccccttgcgaccctttagcgccgtcttgaatctcttgatgatgagggccatctcttcatcattaagtctggccgcctcaatttgtgccaccttgctaggtagcgcctccttgcttcttgttgccttgagagcaaggggctgagccctcgccgaccgtaccattcaaccccccgctccctctcctccctcccccgacccccactccccgccctcccctcccccctcccccttctcccccctctctctcccctcccctcctctcccc

SEQ ID NO: 8193 - DNA, 369 bp, Zea mays
  unsure (1)..(369): unsure at all n locations
agctatcgntgcgaaacgcaggactgcataatanttgtgccgctgcgatnccgccaccaactactccgtattttggtgccgacaaggcgacacgagaaatttactgtactacaagattgctcagtgccgcctctcattatacgatgccttaaaaactctccaacgaatcgctccgcatagacgagacagatttgcattcataagaaagaataataacacagttaaggaatgggcctgcctcaagccccttacatgtctgatgccctcatctagcaccccatttatgagagttttcgccgcccacactgnaaacacaccacctactatgccccaccagatctgaccaaaaaccagttttctcaaactcgc

SEQ ID NO: 8194 - DNA, 195 bp, Zea mays
ttgcggcgatgtgggatttcataattatttgtctactcttctcacttctggtagatcggaggtagataatggtaagcatgccaaagggtggaattcagtgtagctcggctacataaaccccaggtatgtgtccattcaggaccgacctttaccatttagtttacagcgcatcccacacttgtccacaggtctatc

SEQ ID NO: 8195 - DNA, 395 bp, Zea mays
  unsure (1)..(395): unsure at all n locations
accttaagcacctgaggatgcaagcttttcgactagtcgggacagggcctcatgtttcggtgaaagnacgcgcaagcggcaaggccgaccgagccgagggattcccacgcctctgggatacggatacctcactcgtcccttccgcgagaagtaactctcgctcacacaaacatccctgttaccgatagagtccaaatgctcgaaacaagaggaaaaaagacgcagcttcgcaagcacggcgagggtgtgttttctggcctcggcggccgcagaaggcacacgctacaagacgatctgatcctgcaggctcgggtcttcacgctgaagggagccgcagcaccctcggcatcgacgacgacttcagttatgtccgacccagcctcggacggcggtgc

SEQ ID NO: 8196 - DNA, 337 bp, Zea mays
tggcaggccaataagagacggcagtattttgtctcaatccaaccttttggaactatggctggggaaacagtccttatagccgcccacttaggctgccattgattggtggggactcggacagacttccttttattgggaatcatggttctgttgggcgccactttggaaatcaacgaaggaatatctcaccgaactgcattcttgatggtcaccgtcataacttcctttgaagccatgtcaatgagttttacttgtatgttaagagtgttttataaggacttcaatggtgcatatacggttagaccgccttgttcatatcgtcaagtcgcacacttat

SEQ ID NO: 8197 - DNA, 342 bp, Zea mays
  unsure (1)..(342): unsure at all n locations
agcttctaaagggagaacacgcgataggtctattaatattactttcgaaaaagatagaccttgtgcagcttgtcaagcagggaaacaggtgcgaagctctcatcatgccaaaaatgtgatgacaacatcaagacccctggagttacttcatatggacctcttcggacccgtcgcctatctgagcataggaggaagtaagtatggtcttgttatagctgatgatttttcccgcttcacttgggtattctttttgcaggataaatctgaaacccaagggacccttaagcgcttcctaaggagagctcanaacgagtttgagctcatggtgaagaagataaggat

SEQ ID NO: 8198 - DNA, 180 bp, Zea mays
cagcttcgcgaaaacatttttcgaagctattttttaattttatgctggctctctaatgtagctacagctcttctcaatttatcttgtgccttagcacgattttctctttttgaaaacattcttcgaagcttaatactgtgtccccttcttgttccacatgcaatatgttgtatgatgctt

SEQ ID NO: 8199 - DNA, 374 bp, Zea mays
  unsure (1)..(374): unsure at all n locations
agcttaaacgaggtgaaccctattgaccttgttacaatagtgntatgattccacactacttttaccaattcatctggccactttccttttggcagattaaagattgatttcattatcctatgataatgattccgttggctcgttctaccaaaccattagattctggacgtctcacagatgcaaagtgtatcttcgtgccaatttgatcacaaaaagttttaaatgtttcagcatcaaattgtgttccattatcaaccgtgatggccttcggcacaccgaaacgacaaatgatgttcttccagtggtcgaagtgatccgagctagaggtttagcttccatccattttgaaaagcacttcactactaccacaacat

SEQ ID NO: 8200 - DNA, 274 bp, Zea mays
  unsure (1)..(274): unsure at all n locations
gtaagtgagaggatatttaaatgtcttcagnacttcaaccaacatcttgtgcaatggaaaatgaagcccaatcttcatgaagcttttaaaaaccactacttcatctgcttcgggaagaggaatggtactctcccctctagccctcacaatggatatattgtgaaaatattttcccttcattccaccaatttgcccttgcttaacaccggactttccaaaaacaacatggcttggtctcatgacccgtctttgcctctttccttccacttttcac

SEQ ID NO: 8201 - DNA, 243 bp, Zea mays
caggaccagagggaaatttatagcaacaggccttagaaacataacgacgtcattagcatacaaagaaatcatgtgctggagagatcgtgacgataggggtcgcagcaaccccttcaacgaagctctttgatttttcgagtcagcgcgtccatgacatgaatgaagagcataggtggaaaggaatcgctttgcctcaggcccttagatgtctgatgccctcatctacaacccactatgagattt

SEQ ID NO: 8202 - DNA, 229 bp, Zea mays
tataaggctcaagacacgtgtttcttttttatggtccaaaggctgagatgatcatgtataacggacatcacaagctacgtgaaggatggacattgtctatgtggatctcgatgcgcttaacttagatacaactggtcaagccaaggatggaggcaagaagaaattctagatacctagtgcacgggagaaggtcaaggagaccaaggtcacctaaagccaggggtctata

SEQ ID NO: 8203 - DNA, 390 bp, Zea mays
  unsure (1)..(390): unsure at all n locations
agcttgtggaggttcttcatccccactngtgctatagcggcgatgccacagccagcccatgcaagtcttagccattaagcatgcatctagaccggcctcttcttttgcaaaatcaactaaataaagtttgccgtctaatacacccttaaaagctagtgaaccatcacttcttctaaagacagacacatctacatttgtaaataaacaattatatcccatttgacataattgactgacagatagcaaattatatccaagactctccactaagaatacatttgatatagaacgctcattagaaattgcaattttacctagcccttttaccttgccttgatttccatcaccgaatataattgaatcttgtgaatccttatttttgacggagga

SEQ ID NO: 8204 - DNA, 228 bp, Zea mays
tcctagaggccatcaacacagtatattgaccttctccaattctgtataatttctcttggataagcttagaactttggagacaaaatatactggtgcctgttttttgacctggccatcttgcttctcttgcacaagtgctgcactgactgcagagtgggaagctgctacatataagagcaatggagcccctcctgaaggcggacctaatgttgccaactccaccaagca

SEQ ID NO: 8205 - DNA, 412 bp, Zea mays
agcttggaagtagtgccgaagctttctttttccatcaggacagcatacagtatcttctccaactctgtataatttttctttgataaactaaggacctcggaaacaaaatatattggggcctgccttttgacttgaccatcaagcttctcctggacaagcgctgcacttaccgctgagtgcgaagctgccacatataataataaaggagcccctggcattggtggagtcaatgttgttagacctatcaaatactgtttcagttcttcgaaagccttctgctggattggtccccattgaaagacttcggccgacttcagcacttcgaagaatgagaaatttctctctgctgatctggatatgaatctattgagagatgccaatcttcctgtcaatctttgagcccccttctttg

SEQ ID NO: 8206 - DNA, 267 bp, Zea mays
tatctgcattgcatgatcttgttattcattaccatccatgtccttcaatctgtatgatacaggttttgatgaatagaccactaagagttttcccactgtatctgggttggccactctccaaagtaccaaatgtcctggtttgatgtttttcagtcttaccttccgatcatgccattgcttgaagtctggcttgatgttttagctaaagcttgatacttattgattccatttaacaaaagcttgaacgggttaaatcctgcagaccct

SEQ ID NO: 8207 - DNA, 304 bp, Zea mays
tgcttatgaagggagaacacgagagtggataattatcgcgcaattcgaagaaaatagacgttgtgcaggttgagaagcaaatcaacaagtgagatgtgcgcatgacagaaaggatgtgacgaccacttgacgaccgcaggtactgcataataagcacctcttaccacccgcctactatatgagaataggaagaagagaggatcgtcgaataatcaatgatgacttccgccgcactagttgattgtttttgcaggagaaatctgaaacccaagggaccctcatgcgctgcctatggagaggtcaa

SEQ ID NO: 8208 - DNA, 147 bp, Zea mays
  unsure (1)..(147): unsure at all n locations
actaagcttttctgcacatagctttgagatcgatatatccttcggcgngatcgcctttcgtcccagctaagcttcgtccttaaccgtgccttcgtatacccacaattcaatttcgaacgttcctccccccactagtgctccccctcc

SEQ ID NO: 8209 - DNA, 377 bp, Zea mays
  unsure (1)..(377): unsure at all n locations
agctttatagttcacttcgttataagtanaatanatatgaggtgnnagnactccctccacgtctaaaattcttaatgtttacggctatgaagagatggaccaaaaatttgacgtttcaacctctgcacgcaacgttatcccccctccccccctacccccccccctctaacccaccatttcccatcctcccccccctacccatccccatccccatccgcccaacccttctccccgccccccccccctctctctccccctttccctcctccccccccccaccccccactccctccttccctccccctctccccccgttccccctccactcccctccctctcccccccccccctccccctcctccccccgtctccttccc

SEQ ID NO: 8210 - DNA, 188 bp, Zea mays
tgagacattattgcttaatggtcattcgttgtccgaaggacacacttgaggtcatcatatagatgcaccaaagaaccatataaagccttcaatgtccatacaatctatgtaatggaccacactcgttcctttgaaacaattcaaagaacttaaccacttcagatcagattttaagacaccaggccctc

SEQ ID NO: 8211 - DNA, 413 bp, Zea mays
  unsure (1)..(413): unsure at all n locations
agcttctaatgagagaacacaatttgttttatacaaatgntcattntgagaaagacagggtttgtagcgcatgtcaagcagggaagcaagttggtacccatcacccacacaagaacatcatgacgaccgacaggccgcttgagctactccacatggatttattcgggccgatcgcttaaataaacatcggcgggagtaagtattgtcttgtaatagtggatgattattctcgcttcacttgggtgttctttttgcaggaaaaatctcaaacccaagagaccttaaagggattcttgagacgagctcaaaatgagtttgccttaaggatcaaaaagataagaagcgacaatgggatggagttcaagaactcacacattgaaggctttcttgcagaggatggcatcaagcatgag

SEQ ID NO: 8212 - DNA, 330 bp, Zea mays
tcgtcatctgaaaggcaattaccttttaggaaagatataatctcagtcctccaatcttcacaatgaacaggagatatagtgagcactgctctttcaagaagttccaccgaaggtgctcttattgtttcaaagaatacttccgaaggtaggggcagcccctgtgctgctgacttggctagcagatcagcgtgctcgttttctcctcgtggaatattcttgacagaaaacccttcgaaagaagcttcaagccttcgaactgtgtccaggtatttctcaagcttcgggtctcttgcccagcaactcttgtcaacatgaccagaaataacatgg

SEQ ID NO: 8213 - DNA, 372 bp, Zea mays
agcttgttagagaagctgatggtgttgtttctttgttacaatcccattatgtggaaaatgtattgagtcgctttggttttagtgactgtgatcctgctccaacaccttatgaccccagtgtgctattaagaaagaatcggagaatagcaagggatcaattgacatactcccagatcattggctcgctcatgtaccttgcaagtgcaacaaggccagacatctcttatgctgtgagtaagctaagtcggtttgtgtcgaaaccaggagatgatcactggcgtgctcttgagagagtgttgcgctatttgaaaggtactacgacatacgcgtttcattataccggaaccccaaccgtgccgctagcgctttgtt

SEQ ID NO: 8214 - DNA, 119 bp, Zea mays
ttagactttgctatgcactttattctttgtatacaggtggccgtggaagtacatggcttgcaaactagctgctgcccctgcttaaccaggcacccctcgtatcactctctgcctctccc

SEQ ID NO: 8215 - DNA, 337 bp, Zea mays
tggacagttttctgcgatggctccatgttttccttcggcgcaggagcgactactgtcctagttgcgccttctaaagtcagcacatgttatgcggcaaagcttgacttcagttgtacaaataatattgctaaatacgaagcacttctattggggcttcgaaagtaaaaggcaatgggaataagaagggccatccttaaaactaactcttaagtcatttctggtcatgtagacaaaaatagtaaggcgagagattcgaagcttgaaaaatatctggatacagctcgaaggctggaggcttctttcgaaggtttttccgtcaagaatattccaagaggag

SEQ ID NO: 8216 - DNA, 250 bp, Zea mays
agcttctacagcgtctaacgatgtccttgttctctcttcccgaagctcaggtgacgtcaacggcacaaggtgccgacgacggatctctcactttccgtgggcttggcactggcggcgacggtttgttctaggggattaagctcgcaagagagggtagcagggaaagaacgcccatttatctctccgggtcccagctcggagagaggagaaaggtctcccacgacccgcccggccactcacgcgctcgtct

SEQ ID NO: 8217 - DNA, 247 bp, Zea mays
  unsure (1)..(247): unsure at all n locations
ttctaaggcgctatatggacttatactantttcaagagcatggtatgaatgccatagagatttattaattgttaatgctttcaaggttgggaaagccgatcccactcttttcactaagacgtgtgatggtgatctttttgtgtgccaaatttatgtcgatgacataatatttggtcctactaaccaaaagtcttgtgaggagtttagcagggtgatgactcaaaagtctgagatgtcgatgatgccc

SEQ ID NO: 8218 - DNA, 417 bp, Zea mays
  unsure (1)..(417): unsure at all n locations
agctggggntttaggtacccaactcttgttgtgttctataaggctagntacaacaacttttggaacccagatgcaagttttgtctcccttgcatttagatcccaattttctagcaactactttggtatttttgcataacaatacaaaagaagcattacatatttgatacatagtagttggaccagtgtaaactttcctaggcgaacgagaaatagtatgattgcgcctgggccttctcttatcataaacatatgtggaactagaagcaaacatagcatgtgaatcatgataaataggtaaagcagcatgattataacatttatcatgatgatcaaatttcttggcatgagcataaagataagcatggttcttttgatcatgtgaagaatacgagctgctagccataagggccttacc

SEQ ID NO: 8219 - DNA, 338 bp, Zea mays
ttggagataaagttatagacaccatttatttaagacaatggcagcatggcataaaagatccaacagaaagaacgacaccacaaagccaacattatcattatgccccttttgttttggcaaacaacttcaagataacagaaatgcatataccatatataacttataacataacttacctagtaaacaggatctacatatcctaaatcacacagcaaaaataattcactcagctcagtaattaattcaggacgtttaatcttaaactcacccttggtgctcgctagccaaagcttcatgataatgatgtggagccgcacctctgatagaaaatgtcattg

SEQ ID NO: 8220 - DNA, 202 bp, Zea mays
agcttataacaggagaatagaagcaagagtttgatcatatgtcataatagaaggggagctatacaagcgtggggtctgttcgccattgctcaagtgtttatccagatccgaaggtatagagttaatgaaggacatacatggaggtttgtgtggatctcacattggatctaggcccttgcttgggaaagcttctagctaagga

SEQ ID NO: 8221 - DNA, 175 bp, Zea mays
tggactactactctacaattaatcgtttatatatgatgctcgaaatattgcacaactaatttgagtctaaaatcataaaccttgtgatagatgtggttcgactacttgtatatatgatgtccaatgcattgcatatatgccatagtgtcgttgatatacctgcgaatatcagcca

SEQ ID NO: 8222 - DNA, 226 bp, Zea mays
caagctgctacagcgtatagcgacgtccgtgtttcctcttcccgcagctcaagcgacggaacggcacatggtgccgacgacggatctctcactctccgcgcgcttgggactgtcggcgacggttcgctctaggggaataagctcgcacgagaggccagtagggaaagaacgcccatttattcctcgcggttccagttcgctgcgagcagaaaggattccccccacc

SEQ ID NO: 8223 - DNA, 329 bp, Zea mays
tcgtgaaaatatttttcgaagttactctccgaagatcaatattgtatctccttgtgacttagcatgattttccctttttcaaagcattcttccgaagatcaatattgtgtccccttcttgggccataccccctatgacgcctgcaccctctcccactccccctcgcgccccgtcgccacccctccgtcccctcctctcccccctcctccatccccctccccccccatccctcccctcccccctccccctccctcaccaccctctactctccccaccccccccccaccccttctcctccccccctccccccccccctccccccccccttc

SEQ ID NO: 8224 - DNA, 284 bp, Zea mays
  unsure (1)..(284): unsure at all n locations
agctntgagaagctcctttcagctgangtcnctttattggtatagcaaataatatccgataagcaacaaatatattaggatagcaatccattctcctaacaaactcaaaaatttccatagcagacattgatctatctggcagtgccatttgcaatattcttaactctgatgtcagattattttgctcaaaatcaaatgaatcatcgacagagatagcttttgccaacacggtacattaatccttgagtttaatgtgatccaaagatataaactgacgccaccct

SEQ ID NO: 8225 - DNA, 320 bp, Zea mays
  unsure (1)..(320): unsure at all n locations
agcttcggcatctttgttgacttcttcnatgntatgccctggcgtccaatcagcgatgaagtctgctaacgcctgagactgaattgaggatctatgcacatagtcaatggcgaattcattaagttccgcaacccatttcccaatccttcctgtagcttctctgttcctcatatgcccttcaggggctgtgatgaaggaacaattatgcgatatgcttgaaagtaacgccgaagctttctggaagccattaacacagcatatagcaccttttccaattctgtgtaatttttctttgatcgccttaacacttcggccacctc

SEQ ID NO: 8226 - DNA, 312 bp, Zea mays
agctcttagaagtacttgatgggctattgtacttttgcctatcttaaataaaccagacaaacactttcctagttcattcatagataaagatggctgtccacaatacctaacaagctgatcctcaagaattgttttccttttaaccagtgctgtcttaaaggcagtattatctgcatttgattctttaccagattcatctgcaactaaatatttcttctcttcagcttccaaagcaagaacaggcttctccattctgtgctctgcacgcaaaacgtctaacttatctagaaaaacagctctgcgatcctgggt

SEQ ID NO: 8227 - DNA, 242 bp, Zea mays
tctaaagggagaacacgtgataggttttactaacgcgcaattccaaaaagatagaccttgtgcagcttgtcaagcaggtaaacaagtgggaggagcgcatcacaccaaaaatgtgatgaccacatcaagacccctggagctgctacatatggacctctttggacccgtcgcctatctaagcataggaggaagtaagtatggcctagttattgctgatgatttttcctccttcacttggccgc

SEQ ID NO: 8228 - DNA, 414 bp, Zea mays
agctttggaagcacaaaaagaatgtgattatgagagcactaaaatagcctttgggaatctgcgctcggaggttataacacttcagaatgaggctcttgagaaagataagattctgctttctttagtcgaaagactaaagacgagggaagctaatttggccagattctctgaagtggatcaaaagatgtcaaaacttgagaaggaaaaagttgcggacacaaaacatataactgacctagaatatgctttatctatccaagtaaaattgcacaattctgaagtgacagaactggagaagaaacttgacgaagttactaaaaacttcaatgttgagcaatcaaagcatgagatatccgatactgagtgggccatggtacaaaagaacgttgaagagcttcgttaagcgaaggaaga

SEQ ID NO: 8229 - DNA, 390 bp, Zea mays
  unsure (1)..(390): unsure at all n locations
agcttgggaaggttcttcatccctacattttcttagcgacgangccacatccagnccatgctagtcttagcaaataagcatgcatctagaccggcctcctcttttgcaaaatcaactaaatagagattgccgtctaatacacccttaaaagctaatgaaccatcacttcttctaaagacagacacatctacatttgtgaataaacagttatatcccatattacacagttgactcacagacaacaagttatattcaagcgactcaactaagaacacattagaaatattgtgctcggatgaaatagcaattttcctaaccctttcacctttgccttggtcccatcaccgaatatgattgaatcttggggacccttgctcttgaccgataaag

SEQ ID NO: 8230 - DNA, 157 bp, Zea mays
tggacagtattctgcgatggtttttggtgaaccttcggggcaggagcaggcgctgtgttggttgcaccctccaaagctaaaacttgttacgcagcacgacttgactttagctgcacaaataacatcgctgagtaccaagctctgctttttggcttcc

SEQ ID NO: 8231 - DNA, 128 bp, Zea mays
agcttaaagccatggtaagcagcataggctagtaattgcgaattgattctagcctagctacgggtgcataggtttcaccgaaatccaaaccttcgacttgtgaatatcccttggccacaagtagggct

SEQ ID NO: 8232 - DNA, 339 bp, Zea mays
tgtgatttatccaatttaaaaataatctttatctctcaacatggattttctatggataaactcaacacaagagatggcattagtagcacaagcactagtttcttatttagcaaccctttatatgtgaaagtcaaatgagttgctaaaatagagaaacctcataatatggactaaatttcccttgagccctcatgcacaatatattttgaatgacatggataatatgcatggtttttcaatgaagtttaaagggctgacttaatccatattatggtgagtgtctaatatagaagaatcaaatccaaattaactagatagagaatatgtcacataattttg

SEQ ID NO: 8233 - DNA, 335 bp, Zea mays
  unsure (1)..(335): unsure at all n locations
tcccggccggtatttgcaanctttcattctcttctttgctttctacaacgattttattcttcttccaaggacatggccaacaacgtgggggcggttttggttacggtcttcgacacagattattgcctggcttctaccattttcttaattacaaatgttttggatggaaaccagttcaaatatctgattatcagtcggtgcccatatatgctgatggagcccgttatatgaaattactatacgaacggttcaagaaaacaacgtgtctacgtccttgtctctcgcctctcagaattccaaacatcaactcaaccgcgcgcgcctgtcccggcccg

SEQ ID NO: 8234 - DNA, 399 bp, Zea mays
  unsure (1)..(399): unsure at all n locations
agcttaaggctcggctgtacataattgttgtcttttactccaatctgcttaataactgaaatttcaatccagtttacatgcttggctgttacataattgaagtatgcttgactttgttatcatgctgaatcttccactgtgacttgtgattgaggcttaagcttaactccatataagtataactcactagatgcttaagttagtagagagccagtgcattattaacaacttatctgacctttggtttaacatataccaagaatttgcaatcgtgtatatatataatatgcttttgtatttcacatttacttcacacctagtctttctaagataatgttcattgtgtatatactaaatcgattcattccatctactaccttctactgntatatattgctt

SEQ ID NO: 8235 - DNA, 336 bp, Zea mays
ttggaaaaagataaaattctgcttacacttttggataaaataaaggaagacaaagctacctctaaggctcaagctgaaacccaaaaacgcgaagttcaggatcttcagaaacaactggccagggctaaagaagaacgcatactagaagaaacaaaacgagaacttagtgatcaatgggcaaatcatttggaaataaatgttgaagagcttcgtgcttccaagaaaagatactatgataaatccatagagtgcgttaagaagataaaatccagcttcgccagcgttggcgcattctctagcgaagagaatttcacaagggggaattcagaaggcccg

SEQ ID NO: 8236 - DNA, 407 bp, Zea mays
agctatgaagattttatccaacatggttattcggcggtgccagagccaacccatgttagtcttagcaattaagcatgtgtcgagctcagctctatcaaaatctactaagtatagctgaccctctaacacacccttaaatgctattgaatcatcacttcttctaaagacagtgacacctacatcagtaaaaagacagttgtagcccatttgacataattgggaaacagaaagcaagttgtaatctaaagaatctacaagaaaaacatttgaaatagaatggtcaggagatatagcaattttacccaatcctttgaccaaaccttgatttccatccccgaatgtgatagctcgttgggaatcttgggttttctcatatgaggagaacattcttttctccccagtcatat

SEQ ID NO: 8237 - DNA, 319 bp, Zea mays
tctaaagggagaacacgtgataggtttgtttaacgtgcatttcgaaaaagatagaccttgtgcagcttgtcaagcaggtaaacaagtgggaggagcgcatcacggcaagaacgtgatgacaacttcaagacccctggagctgctgcatatggacctcttcggacctgtcgcctatctgagcataggagggagtaagtatggtttagttattgttgatgacttttcccgcttcacttgggtattctttttgcaggataagtctgaaacccaagggaccctcaagcgctttctcaggagagctcaaaatgacgttgagctc

SEQ ID NO: 8238 - DNA, 278 bp, Zea mays
gctacttcgacctatacacatttgattttgattaagcatttgctgaaggcttgcttcgtattcaatttttgcgccgttaatgcaatatgatgtatgacgtaatgttatacgaaatgatatgatgatatgatgcaaaatgatgaggatgtcaaagacacacactcacacgcccacactggaatacacaagactctacatcctcttaggaacgtcttttgagatcttaagttctgcgtacccttaggaacgacttttgagcttcttcaccttatatttca

SEQ ID NO: 8239 - DNA, 266 bp, Zea mays
tcaccatcgagggatccatcggttcatgtcggcagccggagtcagggctatggcgacgaaccatgtcctcctatatgccgcctatacatcattcacaaccttacaaacgcaggaatttgtatcctctgaatgactgcacttttccaccaaaattcaccacgcaacccatgctcgcccgtctgcccaactgttcctctctcgccagcgctcttctcccattctcccccatctccccaccctcccctccttccttcccccttccttcc

SEQ ID NO: 8240 - DNA, 310 bp, Zea mays
agcttctaaagggagaacacgtgataggataacaaatgtaaaattcgaaaaagatagaccttgtgcagcttgtcaggcaggtaaacaagtgggaggagcacatcacagcaagaatgtgatgaccacatcaagacccctagagctgctgcatatggacctcttcggacccgtcgcctatctgagtataggaggaagtaagtatggtctagtaattgttgatgacttttcccgcttcacctgggtgttctttttgcaggataagtccgaaacccaagggaccctcaagcgctttctcaagagagcttaaaat

SEQ ID NO: 8241 - DNA, 334 bp, Zea mays
tgtgaaggttcttcatccccattgttctaagcggcgatgccacagccagcccatgctagtcttagctattaagcatgcatctagaccggcctcttcttttgcaaaatcaactaaataaagtttgccgtctaatacacccttaaaagctagtgaaccatcacttcttctaaagaccgacacatctatatttgtaaatagacagttatatcccatattgcataattgactaaccgatagcaaattatatccaagagactctactaaaaacacattggagatagagcgctcattagaaattgcaattttacctaacccttttaccttgccttgattc

SEQ ID NO: 8242 - DNA, 311 bp, Zea mays
tgaggttgactcgccgaagcttcttttactgcagggtggttgcctacatattctgggatataaggcgaatgatacgaagcagtgtgcatgatctgcttcggctgcccctgttgtgctgcagcttcggctatctccttttgcttctggccggtaacctggcacatcccggtggtcgcgccctttcctcccccaccctccccccaatgcccttcctcctcgctctctccacatctccccctccccctcctccatccccctccccccctccctcccccttccctctctcccttcgcccccctctcccccccccc

SEQ ID NO: 8243 - DNA, 280 bp, Zea mays
  unsure (1)..(280): unsure at all n locations
agctctcctcaatcggcgccactcttactcnctctcgatatcatcattccggactggatctctccttgtgcggccacatatccagcgcaacatacgcatctctgccacacttagttgttggacatgtcatcttttagtgggccaacattctgctccatacaacatacctggcccgattgctgtccctgtagaacttgcctcttcagttatgaggcacccgggggtcgcatatgacacccggagnttgcccgccctccaaccatccagctttaaacccacg

SEQ ID NO: 8244 - DNA, 262 bp, Zea mays
ttaagctctttgacaagaatatttttttacccaattttaacaaaaatgcatcaaagcgggaatgaaattttgagaggttaaactaggtatgaagcagggttatgcatagacatgctttttcttcctcttgcaacttaaatatatgcaatatatgtataagaggaatatctaggtacatgtgtaaatgataggaagtagtttaccctttttgtaccttcacatagagatgctctcttcattgcggctactcaagccctatgct

SEQ ID NO: 8245 - DNA, 411 bp, Zea mays
  unsure (1)..(411): unsure at all n locations
agcttcttgtgcctagctcccaccaccatcnattttagcacccactctagcccaaagccagcagtcagaagggcaccaacacactcagcagcagcgcgactttcaggaggaatccgaagctcgcacattcaatagcactgtgcccgaatccatgcacatctactaaataatatcctacccctggcgcatctttgtttttctgccattttattttctttatgaaaaacaattcacgaaggagtaaattccaacttgataaaataatattgtacccatatcatcgagcgagatgcatccccttaacaagattccgtagctacaaaaatcgctcctaagggagcgcagagtaagttccgaagctcacaagtcgctcctaagggaatgcacagccaaaataccactcaaatagaa

SEQ ID NO: 8246 - DNA, 320 bp, Zea mays
acgttataaacatacacatttttgttttgtcatgcttcatagagaacgagacgaagggaaggtggttatcgcctttggctcaaaagatacaaggcatcgaccatagcaaagcaatgcgcacatggcggaacaggtagaagtataatacggggcatggatgacctgacaacgatctgatcaaatcacggagacagtctggtgtaaatatagtggacaaattttcacgctttactgtctggtctaaacagaagtttcagccccgcctcctatgtcctcctgcaccatctcctctggccccctctccccgtttttcctcttct

SEQ ID NO: 8247 - DNA, 417 bp, Zea mays
  unsure (1)..(417): unsure at all n locations
agcttgttggccattattgcatggtctggtctatatggcagncgaccagctatggactgatgtcccatctcaatgcatgaaaatcatgtcgaatgcataatgaaacatacttttggttgtagattatttcttttcctatgcaaagatggaaagaaggaactaggaaccttgtcctctaaccctagccactagataaataaatatagataggactttagggttgcaaaattacaccagtagggcgatgaaccacaactcagagatggtgaggcggcagcaacaaccttcctttcactaaacgtgtttaggttagatcagctatatgggaaagaggagacaacggcaaacgttggaccccgactcagatcaccgagtcggtgatcaccgagttgttaagccacaacattctcctcttga

SEQ ID NO: 8248 - DNA, 331 bp, Zea mays
  unsure (1)..(331): unsure at all n locations
aactatctaactcagcttcgacatacacttatttttctttgagctcgncagcccttacaatagtcaaatcccgaaaatatctgcccctcatattgacaagatgactttgtttgatgcttgattttccaaaaactgcatggcttgatcgccaaggtcgatcttcggaatcttcaccgccactttccacatcatagttgtcgctatcaccagtgccttcagacaaaccctctaagatctccctagtaatcttctctgtatttgtctttgctattgatttaaggaagccgaggttcatctcttcagaaaggcttagcttcgactcagcgatcgt

SEQ ID NO: 8249 - DNA, 324 bp, Zea mays
tgagtcaatcatcctgcatatgatttttgatgctcaaaaggataatatgggtatgaagcacatacgagagaaaatagggactggaacagccacatatttcaaagaagacgatcaaggtgtgatatggttcaataaccgcatagtagtgccgaagaatgaagaactccgccagcaaatcttagatgaagcgcatcttagtcgctattctattcatccgggaagcactaagatgcatcatgacctaaagcagcactactggcggacgaagatgaacattgacactgcacgctatgtggctaagccgcgcacttgcagacttcctcc

SEQ ID NO: 8250 - DNA, 416 bp, Zea mays
  unsure (1)..(416): unsure at all n locations
agcttctggtaaaatatatgaagccattgactcnatttcaagaacattccggtagtatgtgagtttccagatgtatttccggaagatttgcctggactgccccctgaaagagatgtagaattcgtaattgagctaaagcccggtacggctcccatctcccgaagatcgcaccgtatgccccctaatgagttgccggaattgaacatccaattactccgtctactgaataagtggattcatccgaccaagctcgcccccctggggttctccccctcctcccctcttcacaacctccctctcccttccacctgccctctctttcccctccccttctctccaccccaccactccaccaccgcttcccatatcctctcttctacttccactcccttccctgcatccttccctttccctct

SEQ ID NO: 8251 - DNA, 282 bp, Zea mays
tattactctttaggcttgggttttcattgtatataacatagtggatgggtattgtcttgatacatttcagtggacagattgcaaaggttttaggatgacattaatttacattattcattttcctttctttaatttccatttagggtttctaatgtaggtttgagctacgacagtgttttaataatttccaaaaattctgtaaaaattacagtgggttgccatttgctattctagcttgctctacgaatttgtcggctaacagcccccaggctcggctttcct

SEQ ID NO: 8252 - DNA, 421 bp, Zea mays
agcttaaccaaaccatctaacaagttggttatttctgcaacaacataggccgctatacaacatacacgtcggcttgcctattactatcgcaatccgagacacaacatatatataacaatcacttaacacaattggctcctacataacaggagttggctaacacagcataaaacatagcaaaccattttagacattgcgactcaaaacatgggtgggagcggattaattagcttctcttaaccatttctcaacttaaattggttaacacacaagtcacctaaaatagtacatttttgggggtctaacatagaggcattaacacatggcataaaacttcataagactacatttgttactgaaagacctaaagcacttatgtgcatatcttatcggattgttcttcaattctaacaaggaccaa

SEQ ID NO: 8253 - DNA, 340 bp, Zea mays
gcttgccctgcacgccgaagatacacatttctttttcgacaggacacaaggggattgccccgacaacaaatatttatagttccaagtattatattctctatgtccctgggcccacatgtcgagcctcagcgcctttgtgcatgccccccttcagctataaaaggggaggcatgcgatgttacaagacccaactctaggcaaacactctcaagttcatacaagctcccaagcaatacatcacacagtggagtagggtattacgctccggcggcccgaaccactctaaaccctcacgtgctctcgcgtgttgatccaccagactcgtagcaagaaaaacgct

SEQ ID NO: 8254 - DNA, 386 bp, Zea mays
agcttaaccgagaggtccacaagattagttatgtctttgaatctatcatcttctcttatgccatcaatataattgtcaagttgcaagtcaagttttaacaagtcagtgcttgacatgtcattaggataaaaatcagctagctttcgtaccttgtgtgcatcaaaagaagcaaaagagttggaaggatccaaggctgacatacaagaaagcagctccatattagcctcactaaaccgactatcaagctctaggctaatttgatcaatgaccccaatatatacttctcttctgaagtggtcatcattggtttggctatgaacaaatcgtgatgatcttccataaggcctataatttccatccatagtacgaactcggatatcatgctc

SEQ ID NO: 8255 - DNA, 288 bp, Zea mays
tgaacacaggacgccagggttcacagtattatggagttaccattggactagtcacgtttgttcattagtaacagagcgcagttatatttaagcatcaactgttctctgtccaggatgtaaccgagcgcccagttcagagttctgaatgcccagttcatattctgcattttcagattgtaaactgcccagttcagatttctgcatttttttgctatgcccagctcacagttctgcccagtccatattcaagcatcatctgctccgcccagcctagattgcacaatgccc

SEQ ID NO: 8256 - DNA, 268 bp, Zea mays
catgcaagcttaatgcccctcctaggagagtatctatcttcgttatgggcaaagctcccatgcctcaggataatgagggttacattatataccctgccgggtatgcggaggacaaaattaggagaattgactataggaagtctccctctggctgtaagcatgcttgtatgtataacacgtgggctctatacgctatacgctagataaatacgctaaattgcctaagaagagatccctcattgctccaatggacatagcaccacatact

SEQ ID NO: 8257 - DNA, 251 bp, Zea mays
acactacactatactaactcttgctgtgagcatgaaaataaatattatttagcatagaccactttgagttgctcacgtcacaagggccaagcagagtatttagaaagcaagagtattgatagttgatacatacttgcacaggcgggcaggctgctgacaaaaataaaaaaaaaactatgtacgcttggtgatgcagctttccatacactgggacaagaaccggaaagtactaccgagatccaccactcaga

SEQ ID NO: 8258 - DNA, 392 bp, Zea mays
  unsure (1)..(392): unsure at all n locations
gctcaacataatcaacttactttatanntttcatatggggatttgaggttatgttcttatataatgtttattgttcctggtaacagatttgcaattttcggtcgatagtggaatattttatgaatttaaatgcattttgataattttctgtagaaaaaattataataatacacaaatagtctaaaaaatcatgaaatttgatggaggagcaatatatgcccatataacatccttaaaaatgtttgggccataaaatctaaagattgccaacatttctttcaaatcactttcacttgttacgtgacttacatgtgatatcaccttaactatccaaattttaacataatcaatacttcactttatcatcttcacatagcgaccttatattatcc

SEQ ID NO: 8259 - DNA, 284 bp, Zea mays
tctaaagggagaacacgtgtcagtcctgactaacgtgcaattcgaaaaagatagaccttgtgcagcttgtcaagcaggtaaacaagtgggaggagcgcatcacagcaagaatgtgatgaccacttcaagacccctggagctgctgcatatggacctcttcggacccgtcgcctatctgagcataggagggagcaagtatggtctagttattgttgatgacttttcccgcttcacttgggtgttcttttcgccgcatacgtctgtcacccaatgcaccccttccg

SEQ ID NO: 8260 - DNA, 401 bp, Zea mays
  unsure (1)..(401): unsure at all n locations
agcttctaaagggagaacacattntatgttatcaaatgttcattttgagaaagacagggtttgtagcgcatgccaagcaggaaagcaagttggaacccatcatccacacaagaacataatgacgaccgacaggccactggagctcctgcatatggatctattcggcccgatcgcttacataagcatcggcgggagtaagtattgtcttgtaatagtggatgattattctcgcttcacttgggtattctttctacaggaaaaatctcaaacccaagagaccctaaagggattcttgagacgggctcaaaatgagttcggcttacggatcaagaaaataagaagcgacaccggaacggagttcaagaacactcaaattgaaggcttccttgaggaggagggca

SEQ ID NO: 8261 - DNA, 318 bp, Zea mays
tcatcacacccttcggtaaatactgtttcgtacggatgcttgagggactcaagaacaccggctcaaccttctctcgcctcaccaagaaggtccttgaaaaccatgtaggccacaacatcttcacttatgtagacgacattatcgttgcgagcaaaagcaaagaagaccacctggccgacctcgcagagacattcgccaacatgcgcgacgcaagactccggctcaacccatagaagtgtgtcttcgaggtacgccaggggaaaatacttggttacctagtatagcacccgaggaatcgaagcccacccaaccaagatc

SEQ ID NO: 8262 - DNA, 304 bp, Zea mays
agcttgtgtttacaagaaggaaagtgttttttctgttgtatttctgatcttgtatgcggatgacatattattgattgggaatgacattcctatgctggagtccgtcaaggcttcactgaaaaagagtttttctatgaaggacttaggggaagcagcatatattttgggcataaggatctatagagataggtcgaagaggcttataggattaagtcaagatacgcacattgacaaggttttgaaacggttcaacatggaacagtccacgaaagggttcacacctatgttacatggccaacacctc

SEQ ID NO: 8263 - DNA, 327 bp, Zea mays
tctcctcaattggcgccactcctattctctctcgtatgtcatcattccggactcggtctctccttgtgtggccacatatccagcgcaacatacgcatctctgccacacacagttgttgaacaagtcgtcttttagtgggccaacattctgctccatacaacatagccggccggattgctgtcctgtagaatttgccttttagtttgcgtggcacccgggggtcccataagacacccgccgcttgccgtcatttcacccatcccgctttacttctatgactgacaccctcatccatcgccctacccttctcctcctctctctcccccc

SEQ ID NO: 8264 - DNA, 331 bp, Zea mays
tctaaagggagaacacgcgatatttttgtttaacgtacaattcgaaaaagatagaccttgtgcagcttgtcaggcaggtaaacaggtgggaggagcgcatcacagcaagaatgtgatgaccacatcaagaccactcgagctgctacatatggacctcttcggacccgtcgcctatctaagcataggaggaagtaagtatggtttagttattgttgatgacttttcccgcttcacttgggtgttctttttgcaggataagtctgaaacccaagggaccctcaagcgcttcctcaggagagctcaaaatgagtttgagctcaaggtgaagaag

SEQ ID NO: 8265 - DNA, 125 bp, Zea mays
gagcacaccgcgctaggagggctttcttctttgattctttcttgcgatcaactcaattgtaacctatgcgagaggcactcaaagtgtggcggcccttgcagggaagttttgctcccggttgactg

SEQ ID NO: 8266 - DNA, 287 bp, Zea mays
  unsure (1)..(287): unsure at all n locations
tcgcacctatgaactaactttttttcttcattctttgncgctggccaatagaatcctgacctgaagaccttcccgactagtgttctggaggctacatgtattccacattgcccagcatggacctcctccagaagttgcttcccagtggacgggagaatgcacttcatgaggacgcctgatgcaccccttctgtacaaggcctccccaatgagtgtatagtgagccgactgtctggcaatgcgctctgcccgagtcttgccgcctgcctcttcctcattccttatcta

SEQ ID NO: 8267 - DNA, 372 bp, Zea mays
agctttctcgactaagccgcggttaggtcacttatggacgggcgaaaggacgcggaagcggctaggtcgaccgagcccagggattcccacgcctctgggatacggatacctcactcgtcccttccgcgaaaagcaactctcgctcacacaaacatccctgttaccgacagaggccagatgctcgaaacaagaggaaaaaggacgcagcttcgcaagcgcggagagggtgcgcttattctggcctgggcgctcgacgatagaacacgctaccagatgatctgaaccgtgaagctcggatctccacgctagcgagagcctttacactgccttgatttccatcaccgataacaaacgcgtcttggcaatccttat

SEQ ID NO: 8268 - DNA, 294 bp, Zea mays
gacagcacagatactggattcctgaaaactgccgcggagaccagaggcctccccacaactgctgcgaaagtcaaacagattagagcacaccttgccacgcatcgcatacacccctcgagccacacgccacacacccctgtgcaccccccctgagaccctacccaccaaccgcgccccaaccctcaccctccacccccccccccccgcccccatgccttcccccccctcccgcttcatcccccccccctccgcccacgccccgccaccccccccccccccccccccctccccccc

SEQ ID NO: 8269 - DNA, 99 bp, Zea mays
  unsure (1)..(99): unsure at all n locations
tcttcctcccatccggncgtcagtttattttgctcaaaatgaccgccggcggccatgaactctataaatcgaactcaccacacgcttcgtacggcagtc

SEQ ID NO: 8270 - DNA, 418 bp, Zea mays
  unsure (1)..(418): unsure at all n locations
agcttgtgaaggttcttcatccncacatgtgttattcggcgatgccacagccagcccatgctagtcttagctattaagcatgcatctagaccggcctcttcttttgcaaaatcaactaaataaagtttgccgtctaatacacccttaaaagctaatgaaccatcgcttcttctaaagacagacacatctatatttgtaaatagacaattatatcccatatgacataattgactcacagatagcagattgtatccaagactctctactaaaaatacattagagatagaatgctcattagaaatcgcaattttacctaaaccttttaccttgccttgattcccatcaccgaatacaattgaatcttgggaatctttattcttgacgtaggaggtgaacatcttcttctcccccgtcatat

SEQ ID NO: 8271 - DNA, 337 bp, Zea mays
  unsure (1)..(337): unsure at all n locations
tctacacatttcaatcactgtttccttgttatcgttgngcactaacgttttgctgaatattttgttgtaccgttgcaaggcacgggcacatacctagtattatattattcttatagatgatttttctctccacacatggatttgttttatgaaaaaccgtagtgtggctttatccatctataatcatttctctgctttggtttgcactcaattcgacacatttattcgtgtatttcgtgctgactctgcaagagaaaacctttctggggctcttcgcaaggttcttgctgcgcaaggtacgcttgctcagctttcttgtcctggtactcatgctcag

SEQ ID NO: 8272 - DNA, 340 bp, Zea mays
agctacatcttcccttgatccgcgctgcttcattctttgaagatcgggcagaagctgctgtatcttatcctgataaccttaaagctgcgaccctaaaccacacttagacaacaagatttttgttattcatagaccttcagcaaaaccttttcccaacaacttatataccacccttcgtattaacgactttgctgatacccttttttattgctaggggtaaaaggtttacgatgacatctacaaaatacatagtccttagcttcaacattaccgagcggcggtcctataatttaaaggatgggtattcaaaattatcatcagacacatacattacctcata

SEQ ID NO: 8273 - DNA, 241 bp, Zea mays
  unsure (1)..(241): unsure at all n locations
agctctatcaaacggacgtgaagagcgctttttttttggaccaaccaaggaagaggnctatgttgagcaacctcccggctttgaagatagcaagcaccctaaccatgtctataggctctctaaggcgctttatgggctcaagcaagccccaagagcatggtatgaacgccttagagattctcctattgccaatgggcctaaaatcgccacggccatcctacactctctataacactccttg

SEQ ID NO: 8274 - DNA, 380 bp, Zea mays
  unsure (1)..(380): unsure at all n locations
agcttctccatccatagcttcggaattgattcnntcttcttccaggtcgcgcctttcataccgtgtgcactttcatctcaaagccgaagatacctgtgacagtatattatacatggaaaacatgttagttgtgtttttgaggaccttcagaagacgaaggcccccaacagaaataatatctaaaccagtgctatatacctaaataacaaagagggcgtacccatgcttctgcatatttctcgagtttgcggctgccttggtggngggagggatcctgtatcatcaaacgtcgctcccggttagcgttgtgcgccacgcctcacttagacgtgcaccacttattcaccatctgcttctatactcgggatgccggtgcacca

SEQ ID NO: 8275 - DNA, 333 bp, Zea mays
taacaacagggttaatagcctcatgtgttttgcaagataaaagttcattttcaacaagaagattgtcatgatcaaatttaatttgagtatagtcttccttgatcttaactagtctattttgcaactccctattagcttcatttgatttgtcatatttctccttagcatcttttagggagtttgtgagctcatttatggttgaagacatagttttattttcttcttttatttcatcactagcctttataactatgtcatacttggtatttaaggattcattttcatttttcaacctatcacatttagcttttgactttctaatgatttgagtat

SEQ ID NO: 8276 - DNA, 287 bp, Zea mays
  unsure (1)..(287): unsure at all n locations
agcttggtcactgggccagggactgtctgatgtcacgacgnggccaggccaacgacgcacaggcggaggcggaggaggaggccctgctcctggcacatgcaagcattgagatatctccagcggaaccggccgcagaggcactcctccaccttgatgagtcgaaagcacgcgctttcctcggcgacggctccaacaaggacatgatcgaaggatggtgactcgacaccggcgccactcattacacgaccggccgccgggagctctttaccgagcctgactctagcgtc

SEQ ID NO: 8277 - DNA, 182 bp, Zea mays
ttacgaaatgaggtgaggtgtgttttttgttgcaccggcggggctataagaagagagttgggcgcatgggcgggcgtcgcggccgagaaacccggcgacgtgcgcgagtgcgcatgcgtcggtccacggcgacgcgcggagagggcggcgctgaaaggggtggcccccggcgccatactgag

SEQ ID NO: 8278 - DNA, 403 bp, Zea mays
  unsure (1)..(403): unsure at all n locations
agcttaacccaatttaccaagnatactactcattggtcttacataagtaaagttaaccttgtttaactcaagaagatcatgcacctttaaagttgtgatttctaaaagcacatatcacatcatgcatgtatcttacgcattgcattcattagattgtaatcttaccgacggagagtacgtgctcatccccgagcaaggacctgtccaagaggaggaccaggagcaggcttcagaggctgctattgaggatctccccgcagccccagcaattgaaggcaagccccggttttatgcataacctgctaattatgctattctactacacttaatgcttgtaggattgcaacgtgcacttacgcgcacgagtcgcttgacacctctaggcgctcgcacctaccactcc

SEQ ID NO: 8279 - DNA, 260 bp, Zea mays
  unsure (1)..(260): unsure at all n locations
tcggattattgatcttcggtgtttttatcctgnacacaacaaaaaagtataaggtaaaaaagtaatgtcaggagaaggtaagcaacatgtacaagtttaataccggcttaagatgacttcgagcttcgtcaccagctaagtcccgcccacccttcgtccaaattggcgttacaaatctattcccaatacttcgggctaggctgtggatatcagctcagttccctcgtcattccctgcatttccctctatcacatcctctt

SEQ ID NO: 8280 - DNA, 407 bp, Zea mays
  unsure (1)..(407): unsure at all n locations
agcttgagacgggaacaaccgnggcatgttctatatcccttgaagaacatgtcaaggacttgaggattgccaagaggaggatgcaaaagaagaaaataaatacctcctccaaaagcctcaaccatgcctccataaaaggtaacatccaaggtaataatcaagtcacacttcttacaaatagaaataagaggtgtagtgaattctttgaaaaggggcacttgactagatcatgtccctatattaaaaatggcttgattattaacaaggatgataaactttgttttagatgttcaaagaagggacactttattaaatcctgtccccatttgaaacaaaaaggcatagggctagaaatgaaaatatttactatccatgtatcaagcatgaaacaaggaaggacgaaatct

SEQ ID NO: 8281 - DNA, 330 bp, Zea mays
  unsure (1)..(330): unsure at all n locations
tgtattgtttgaataaaatataacttgtctgcagtttaaaaaagattgtattataaattaatgacctggaatccattagtatggcctctctgtacggccttccaccgatgtgctctaacggcgccaaatgaatgacaattcctattacatctgagacattcatatatgagggattaaatttttttatggtttagtgcggnataagtatactccatacagaaagacgcgcacatacctataaacctcttatgaggctgccgctcgccctctctgcccccctccgccctcttcccctccctcctcccctactcccccgatccctctctcccc

SEQ ID NO: 8282 - DNA, 326 bp, Zea mays
aactatagaaactcagcttgcctgtgccgccagtgcaactggcttgaaaaaaatgccactaattagacaaattttcaccatgcatttcttcaaaattatgtatgttgctttagcactgcaccaccataaatttgaagttgtcgcagccccaaatgcgcgggccttaaccacccctagcatcctttacccacatcgtccgctcattcacgccttaagccctactctctcgtcttctttccatcccatcacccactctcatacctatgcctacccccctccaccccatcctcacacccttcactcccacaattccctcttccccccct

SEQ ID NO: 8283 - DNA, 397 bp, Zea mays
agcttagcaaaagaaatttctagaatctttattattgagctcatgcctaagtctggtaaaagattgttcatcaagtggcttggtaaagatatcggctaattgatctttagtattaatgtaagaaatctcgatatcccccttttgttggtgatccctaagaaaatgataccgaatggctatgtgcttagtgcggctatgctcgacgggattgtcggccattttgattgcactctcattatcacatagcaaagggactttggttaatttgtaaccgtagtccccgagggtttgcctcatccaaagcaattgcgcacaacaatgctctgcggaatgtactcggcttcggggggaaagagcgacgatcttgtttttgaacccaaacaccacgatcttccaa

SEQ ID NO: 8284 - DNA, 332 bp, Zea mays
tgtggaggttcttcatccccacatgttctaagcggcgatgccacagccagcccatgcaagtcttagcgattaagcatgcatctagaccggcctcttcttttgcaaaatcaaccaaataaagtttgtcgtctaatacacccttaaaagctagtgaaccatcacaccttctaaagacagacacatctacatttgtgaataggcaattatatcccatattgcataattgactaacagataacaaattatatctgagagactcaactaaaaacacattggatatagagtgctcggatgaaatagcaattttacctaacccttttaccttgccttga

SEQ ID NO: 8285 - DNA, 232 bp, Zea mays
aataagaacactaagcttattcgcttgccagagaagaattatctcagaactcaaaaaagacgaaggggtggctttcaagagcttctctagagcgggattgcggttccccttgaacgagacgatcggcgaagccaatcataactctgagacacatcccactcccctgacccctaacgccaacgcccggctcagtggctttctccggcccacccccagccacggccggccaccc

SEQ ID NO: 8286 - DNA, 391 bp, Zea mays
aagtgcctcctcatggaccaatcttgaagaggtctattgtgagcaacctcccagctgtgaagatagtgagtaccctaaccatgtgtataaactatctaaggcgctttatgggctcaagcaagccccaagagcattgtatgaatgccttagagatttccttatcactaatggtttccaagtcggaaaggccgatcctactctattcactaaaactcttgacaatgatttgtttgtatgccaaatttatgttgatgatattatatttgggtctactaacgaatctacatgtgaagaatttattaggatcatgacacacaaattctagatgtcgatgatgggggagttgaagtactttttttgatttcaagttgaacaactcctagagggcacc

SEQ ID NO: 8287 - DNA, 448 bp, Zea mays
  unsure (1)..(448): unsure at all n locations
actcagctggggaatcctatgttgtacaccatgtagcaacatacattggtcttccaactttctacgcagaaggtccaggttcaatgcaaatagaagaagcccttgcagtggctacttctcttagatcttcaatcttgtcctcggaagctntagtagaaataggagttgacatctttgtagatttcagaacagcatccagaacgctggccattctccttcctttcctaggacttgctgctggagcaactgctaattntgataacccagtcgtggttgggggactctgcagtttcggacgctgctctatctttgagttctatgcttataattcttttaccggaccgacagtagctttggcggtcgcaacaagtattttctccaaagccgagggtgcagcttcggtatattncaattccatcttctctaaagcaagcgttccagcagtctt

SEQ ID NO: 8288 - DNA, 383 bp, Zea mays
tggacgtgaacgtgcctttctcatggaccgatctttgaagaggtctatgtttagcaacctcccggctttgaagatagtgagcaccctaatcatgtgtgtaaactctctaacgcgctttatgggctcatgcaagcccccatagcatggtatgaatgcctaatagattttcttatcactaatggtttcatagtcggcaaagccgatcctaaactctttactaaaactattgcaaatgattagtttgtatgccaaaattattatgaagatatcatatttggggatactacaaatctacttgtgaagagctcagtctgatatgattcataaattcgagatgtctatgatggaggagctgaagtatttcttatgatttcaaatcaagc

SEQ ID NO: 8289 - DNA, 432 bp, Zea mays
  unsure (1)..(432): unsure at all n locations
tgtgaacagtacaaattcagaagggagaaagcagcttcagcagatcagccgaagcctatgctattatgtgaggacatagcagagcagaaggtgctgttaggctctcaactatctgaagagcaggaaaaaaccttgataaggtttttgttcaataacaaagatgtttttgcatggtcagccaatgatctatgcggagttaatagggatgttattgagcactcgctcaatgtcgatccatccttcagacccagaaagcaaaggcttcggaaaatgtcagatgataaggccgaaggtgctcgcaacgaagtcaaaagactcctcagtgcaggagttattagagaagtgaagtacccagaatggctggctaacactgttatggtaaaaaaggccaatggcaagtggcgaatgtgcatcgattntacagatcttaac

SEQ ID NO: 8290 - DNA, 277 bp, Zea mays
tatcaccaaaaagtgatatattgaatgctctcttgtggcctctgcggggttggttgccaacacaaataacaggatgatatggtgttaagtgttgaacatgtgtttagtgccaagcttatatagttcaacattaagtgatcaagtgtgatgatccaaacgctaatatgactatggataatggacatcacaaatctaagtgaaagatggacattgattatgtgagaatcaatgacttgcaatcaactgatcgaatcaagggtggaggcacgtagatctt

SEQ ID NO: 8291 - DNA, 409 bp, Zea mays
catgaagattcttcatcccaacatgagctaatctgcggtgccatagccaacccatgttagtcttagcaattaagcaagtgtcgagttcagctctatcaaaatctaccaagtatagctgaccctctaacactcccttaaatgctatagaatcatcacttcttctaaagacagtgacaccaatatctgtaaaaagacagttgtagcccatttgacataattgggaaacagaaagcaaattgtaatctaaagaatctacaagaaaaacattggaaatggaatggtcacgagatatatctattttaccaagacctttgaccaaaccttgatttcaatccccgaatgtgatcgctctttggggatcttggtttttctcatatgaggagaacatactatttctccctgtcatgtg

SEQ ID NO: 8292 - DNA, 233 bp, Zea mays
acttatgccgggagtgtgaatacttcattttacacttcacaactgtcaggaacgagccacttcaaactcgtcctacacttttttagggtgcaatttccctctcgcctaatgaaatccgaaactcttatggacaaatcttgaagtatactaactgatgctgccaggcactcgactacacctgcacattatgatgacaatttaacactcaatcctgaattttggtgctgatgtta

SEQ ID NO: 8293 - DNA, 422 bp, Zea mays
  unsure (1)..(422): unsure at all n locations
aggttaagctaattggtaagcttattntggcgttctactgatatccccttaatgtcttactgagagtttattaagatttctagctgaacttattagagtgagacttattatcttctctttctttctaatacttttatgcttttaaggtgggtttgaactacaagacagcttaataaatttccaaaacttatgcaaaagttacagtggcttctcactgatgtctaattttctgcctcaaaatttggggcttaaacagtgaatagttttctctgtataaaattatcaattattaaggcagagggggtgtcttgaactacaactcctttttaacagtgggttatcttctaagacatattttttctggcatttaaatgttataacatgactttgtacatatgtttagccactaatacttatttgta

SEQ ID NO: 8294 - DNA, 353 bp, Zea mays
tgctaagccctctgacccgaccggattataccggaggcccgtgtattgatctcaccggacttcgggcttccgccgtcgcgcgtggaccgagctatccaatgagtttgcgcccaatatcttttgctcatgtctattcttggatcccgtggacactcctgaactatttaattgaactaccttgccgagaccaggccggtttcctcgccgccgacgagcatttccgcctgcgcgcgtggaccgaccgactccggacatctactactgtgttctcgacacctatgagatcccgcgaacgcccctttatcctctaccacttcaacgaaacaatcttgccgtcggttagccccttctgc

SEQ ID NO: 8295 - DNA, 123 bp, Zea mays
tatccgcatgtctaccatggagatcatgtcaaagcatcaccacaaagttaaggtcatatgcctgtatgatgattccggaataacttagaagctatctatgtgactagcaacatgggtatagcg

SEQ ID NO: 8296 - DNA, 435 bp, Zea mays
  unsure (1)..(435): unsure at all n locations
tctgatcaatccttcgcctacgatgaaacagctccatcgncatctccctaattttctcagccaaatcacacacaggaaggtctttgtggtctttaacccagttattaaaaaccttagccatgttatttgtgatgtaatcacatttgatatctttgttgaaaccactcttgtaccaaaggaatttgtggtgttggtctaagtactcagcaaccttatgaacatttctgacctggctgacatggtgttcaaatacatccctcctatatgccctagttgctggatacatgtgctctgaaccagcatggtgattcacatagtttcccattaagtgtttgaagcattctattctctcagcatacgggagaacaccatttacagcatgcatcaggcctttntgtgcatctaaacatatagcaagaactgtcatatcaccca

SEQ ID NO: 8297 - DNA, 371 bp, Zea mays
aaaatcgatactatagattcacatgcttattttctgatgataacttataagtactcatctatttgattcggtattataatgaaacgcacgtatactaacttatactatcctcatatacatttaaagataattatacaacatatattacggtatataaaaaatatgaaattaattacggttatcctatattataattattaaaatggaatttaattccaacgaaacaaacggagctaatcgttattgagctgctttctatatatatcgtgttttccctctaaatctggtaccaagatatagtacccgaaaccctgaagtaaattgagttctaacttgctactgctattggatgggaaatcggttcaagaatc

SEQ ID NO: 8298 - DNA, 394 bp, Zea mays
tgtggatctcctcgcctatggctctgcgcttctgttcgtctaatcagcgcataggctgcttgacgggtcacgctccggctcggatgtccagcgagtgctcggcgacatccctcggtatgccgggcatgtccgagggactccacgcgaagacgtcggcattcgcgcggagaaagtctatgagcactgcttcctatttgggatcgagcttggagccgatacggacttgcttggaggcgtcgctgctggggtcgaggggggcggacttaaccgtgtctgctggctcgaagttgccggcgtgacgcttaacgttcggcacctccttagagaggctttccaggtcagcgatgagggcctctgactctgcgagggcctctgcgtactccacgcactccac

SEQ ID NO: 8299 - DNA, 288 bp, Zea mays
  unsure (1)..(288): unsure at all n locations
ggtttaactcacttgacctgattttgacaccgataaacactcccgaagactctgtgggttctcccagtccaacaattatgcaagagtagatctctaaaggttaacaaattttaattacaaacgactcctgtcccgtaaagcaccagcacttcgccnaccattctaccttaatacgattacccgctatattaaagtatttgatttagtgactctctactataacgatatttatcgtcgccagggtgtacactacttctgaacgaactccattttattgtagaacaggtg

SEQ ID NO: 8300 - DNA, 425 bp, Zea mays
acactacataatactcacgcttacacaatattaagatttataggacaagtttgaattcttagctatagaatgccccctgagtatgtgcttatatgaaattatcaattttggtctcatatgccaaatagcacatacttatgctaagtgtgaagcattactacaacttatcattcgtggggtgcattatgttacgaatagaaccatgattcatatgacacacagatgcacataatcagagttaagcaccaaataactagatacaacacaggatagcaacctatcactattcaccataacgataccaattaaagcatcatgaaaatagacaacacatgaatatttatcacaagataaacatcaagcgcaatagatactaattgatctacacaccgaaaacagctaaagacgatgctacactatatgat

SEQ ID NO: 8301 - DNA, 385 bp, Zea mays
tattgaaagtgtgattttttgtttcctccaacaggacacctaaaacatattgcatgcatgttgtgcggcgtgggtggtgcaaaatgacgcgggacaataagttggatgagccaatgggagacgttggatgcgggctagaaactttttaggggaaccaaaacattccctctttgtagctacaaattagaaaatattttgggttgtgaaaaaatggaaaaggtttatgagagctgttggaggcttgtttttttcttttttcctttaatttcaagttaggggagattttaagagagctcttggagatgctcttaggttcctgcgtggcggtcggaggaaaaataaatggcggctggatgccttgggggttgggggacaacgatgtgag

SEQ ID NO: 8302 - DNA, 129 bp, Zea mays
  unsure (1)..(129): unsure at all n locations
taccgtataatcacacaccgagcgaagtctgtagacttgtagtacgttatacctcttgagaaaatngtcataggtggtcataatgtgcgatacacatccgtatctacgaacctgctaaaacagctacta

SEQ ID NO: 8303 - DNA, 427 bp, Zea mays
  unsure (1)..(427): unsure at all n locations
tagcagaagaaatttctagaatcaagaatattgagctcatgcctaagtctggtaaaagaatgttcatcaagtggcttggtaaagatatcggctaattgatctttagtattaatgtaagaaatctcgatatcccccttttgttggtgatccctaagaaaatgataccgaatggctatgtgcttagtgcggctatgctcgacgggattgtcggccattttaattgcactctcattatcacatagcaaagggacttntggttaattgtaaccgtagtcccgcagggtttgcctcatccaaagcaattgcgcgcaacaatgtcctgcggcaatgtactcggcttcgacggggaaagaagcgaccgaatttgcttctttgaagcccaagacaccaaggatcttcccaagaactggcaagtccctgatgtgct

SEQ ID NO: 8304 - DNA, 253 bp, Zea mays
  unsure (1)..(253): unsure at all n locations
cattctgcagatgtcagattatatgcgcagaggaggaaggcgtgctcagcaggagcaggcagcaccacaggatgaggcaccccagcanaagcagctgccaccctcaccctcgatgtccatcgagcagatgttcctaatgcatactcangcagttcaagccatcagtcagactttggccgccattcagcagcagaagccaccacctcagcctcagatgcctcagatgcncagtgacatgcgtgctgaattcatg

SEQ ID NO: 8305 - DNA, 427 bp, Zea mays
cttctaagggagaacacatgataggtttgactaacatacaattctaaaaagatagaccttgtgcagctcgtcttgcatgtaaacaggtgggaggagcgcatcatagcaagaatgtgatgaccacatcaagacccctggagctgctacatatggacctcttcggacccgtcgcctatctaagcataggaggaagtaagtatggtttagttattgttgatgacttttctcgcttcacttgggtgttctttttgcacgataagtctgaaacccaagggaccctcaagcgcttcctcaggagagctcacaatgagtttgagctcaaggtgaagaagataaggagcgacaacgggtccgaagtcaagaacctttcagtggaggagttccttgaggaggaagggatcaagcacgagttcttcgctccctacac

SEQ ID NO: 8306 - DNA, 340 bp, Zea mays
  unsure (1)..(340): unsure at all n locations
ccctaacagnngatatctntactgccatccctggtttttgctgtgcctttgcggnaccaatacttcggcacaagcataccaaatgaaatgtgcgggcaaaccatcctatattatttgttgaatgtggcgtcttcttttgttctcccctgtgggccactcacatgaccaaagtttttacttgaaaagggattcaattgatatatgggcatttgtggatggcactgcctttcctgttgtccacttctatttgtcttacatgctgatttctggtagttgtacaccgaatgaacaaaattctggtgaactgcaagaatggccatgtctgttgccttgcatcctg

SEQ ID NO: 8307 - DNA, 431 bp, Zea mays
ctattaggacctatggaactaagcttccgatctttggccatcaaagctgccactcttatttggctccttaggttagcgaacaaacacctctatcgatcgacgacagggaggtaccacatcgacaaaacacgaatctctttgagcgcataataatctacttatttttctttgctcgtggatgttgaaggatacatttgggctgtctatagctacttccctttagacacagatgcagcacactcttagctctatcaatagtatgtattcttcttgtacctactggaaccgcactttgggcagctgtgcaagtctgtataatcataacctcgataaacgatacagtgatttctacacgcgtggatctttttctcacccataatgagcggactgattattttttttcataatacgtgttgcaggcacattgttct

SEQ ID NO: 8308 - DNA, 403 bp, Zea mays
  unsure (1)..(403): unsure at all n locations
tctccgagggcaggacggngttggggatggctctgctggccggtctactgtggcagaaggggtgagcggccgcgggctctctgcgcacgggcaaactgcnacnggctaactctggtgaggtgtggagggtgtgcggaaaggtgcagccgaaacctgtgagggatttataagctcgggcgcgggccacggcgcgggtttggctctggcgcggcgcggggcgtgcgatggcgcgcgcgagcgtgctctggcgcgggcagaaagcgtcgaacacgtggcagtgagtttcttcccatgttcaaacgcttgcagagatcgcaaacgtgcgaatctcgccatgaatccggcgcagacctnctcctggcacctatggctatctcacatgtgtgagttccaagggatgata

SEQ ID NO: 8309 - DNA, 430 bp, Zea mays
  unsure (1)..(430): unsure at all n locations
tctaaatggagaaaaagcccaatgttttataatttagagtctttggtagcaaatgttttattcttgttaaaagaggtagaaaatctaaatttgctcctaacgttgtagaaggctttttactaagatatgattcaaacacaagggcctatagagtcttcaacaaatccactggattagttgaggtttcttgtgacattgtgtttgatgaaactaatggctctcaagtagaacaagttgatcttgatgagctagatgatgaagaggctccatgtgtcgtgctaaggaacatgtccattanggatgtgtgtcctaaggaatccgaagagcctccataagcataagatcaaccatcatctttcatgcaagcatctctaccaacccaagatgaggatcaagctcatgatgatgaaaatgaagatcaagaagatga

SEQ ID NO: 8310 - DNA, 432 bp, Zea mays
  unsure (1)..(432): unsure at all n locations
tctcctttttggcggaaatcgtgtcagcccggatatacttcttcatcttctgaagcagcttctctagagtcagtgggggcttcctggcgaaatactgagccataagtcctaaccgaaagcccttaatcatggcctcaatgacaatttcattgagcactgtgggcgcttgtgctctcaatcgcaagaaccttcggacatacgcctggaggtattcctcatggtcttgcgtgcattggaacagggcctgagctgtgactggcttcgtctaaaagcctcggaaactagtcaccagcatgtccttgagcttctgccatgacgtaattgtccctggccgaagagaagntaccatgtttgagccacgttctcgactgcaatgacagatgattatccatgacagctgcattgcttcgtataagatatcgttgctcatac

SEQ ID NO: 8311 - DNA, 435 bp, Zea mays
tactcaagcttctaaagggggaacacattctaggattaaccaatgttcattttgagaaagacaggatttgtttcgcatgccaagccgggaagctagttggtacccatcatccacacaaaaacatcatgacgaccgacaggccactggagctcctacacatggacctattcggcccgattgcttacataagcatccgcgggagtaagtactgtctagttattgtggatgaatattctcgcttcacttgggtattctttttgcaagacaaatctcatacccaagataccttatagggattcttgagacgggctcaaaatgagttcggcttattgatcaagaaaattataagcgacaatgggacggagttcaagaactcacaaatagaagggtttcttgaggaggagggcatcaagcatgagttctcttctccctaca

SEQ ID NO: 8312 - DNA, 294 bp, Zea mays
ttatctcactagtcaagttcacacagtatgctactttctgagcataagcatatttaaccttaacatgcttcgtattttcttgtaattacgaagtgctaatggctatccaagagataatccttctcatgaatagcattgatcaactcatttgacttgtccttttgttgcctgtttatgttggcaaaccgggcaagtaaatcatcctcatcatgactagagatgggctcatcactacatggtgcctatgtagcggaggctctagatcttaacttcattttgccatgccttgccatg

SEQ ID NO: 8313 - DNA, 221 bp, Zea mays
tgccaaggctacgggaatgttggattatccgcctgaaatcaggacgtcttgtagaacaccatgccgctatatggtcagcggcgtacacgaccgggcagaaaaacggcacctggtttcggcgttcgaacgacttcgattcgaggaagccgaacgcaacagaggtacggtttatcaccacaagatcgggatgagcccccagaaaattaccgttacgcgcatca

SEQ ID NO: 8314 - DNA, 301 bp, Zea mays
cacaggggatctctttcttacttggctctattgacatttatggaacctacttgatatctaagagacacgtgctattgaccttgctgcatagcaagttaccatcccggcgatctcaacacaggcgacctatctgatatatagaactattgcatggagctatgtgcagacacctctcctatagcctcccgtgagttgactccatgcttgcgcaacagatatccggatgcttatgtctagcatgctgtgattgcctgctgcctgctatctgagagttatttggagtgactgtataactctcata

SEQ ID NO: 8315 - DNA, 317 bp, Zea mays
  unsure (1)..(317): unsure at all n locations
tctaaagggagaacacattntangactnaccaatgttcattattagaaagacatgatttgtagcgcatgccaagccgggaaacaagttggttgccctcatccacataagaacatgttaacgactgacaggccactagagctcctccacatggacctattcggcccgatcgcttacataagcatcggcgggagaaagtactgtcttgttattgtggatgactatgctcgcttcacttgggggttgtttttgcaggagaaatcacaaaccccagagacttcttagggattcttgagacgggctcataatgagtgcgact

SEQ ID NO: 8316 - DNA, 412 bp, Zea mays
  unsure (1)..(412): unsure at all n locations
ctggtgtagtcgatgcacatctgaagcttcccgtttgcctttggaatgatgactagattggccagccacactgggtgatgaacctcttcgatgaagccggtgtctaacagcttctggacctcctttcggatgaagtcctgccgcgcaacgaccacgtgtgtaagctctctaaagcgctctatggacttaagcaagccccaagagcatggtatgaatgccttagagactttttaattgctaatgctttcaaggtcgggaaagccgatccaactctgtttactaagacttgcgatggtgatctntttgtgtgccaaatctatgtcgatgacataatatgtggttctactaatcaaaagtcgtgtgaagagttagcagggtaatgacgcagaaattcgagatgtcgatgatgggc

SEQ ID NO: 8317 - DNA, 423 bp, Zea mays
tatccaatactcaagcctgtgagatataaatgagggaaatggcggatgcgtgtatactacactggtctttatcaagcatgtgcaagagtttcctaccctctgcctcccatcgatcaaatcgcggattccactgctgggtgcgaaaccctgtcttttctcgatgcctactcatggtatcaccaaatcaggatgaaagagtccgaccagctcgcgacttctttcatcacaccttatggcatgtaccactatgttaccatgccgatcggttagaggaatgcgggtgcgacataacatatgtgcatgaaccacgtgttcggcgaacacattgtgcgaacggtcgaagcctacgtccatgacattgtagtcaagacgaggaaggcctccgacctccttttcgaacttggagcgacattccgatgtctc

SEQ ID NO: 8318 - DNA, 410 bp, Zea mays
  unsure (1)..(410): unsure at all n locations
ctcttgtagctgctgccaaaaatgagaggagaactgcgttcctctatctgacactatctacttcggcacaccatgaaggcagactatccgtgacatatataactcagctaacgttgctccggtgtatgttgtcttcacaagtatgaaatgggccacctttgttaagcggtccacaactacccaaatggaatcataaccggcccgggtacgaggtaggccaactataaaatccatcccgatctcatcccacttccactgaggaatccgcaatggctgcaacaatccggcaggcctctgatgctccgctntggttctctgacagctatcacagatggcgacatattctgtgatctctctgttcattccataccaccaaaacctccttttaaattctgatacatcttctcact

SEQ ID NO: 8319 - DNA, 427 bp, Zea mays
gttcaaaggcgccaacttgatactttcttgataactgttattgtatgaaaactccgctagaggcaaacattcatcccattttggggagaagtccaggacacatgcccgcagcatatcttcaagtatttgggtcaccctctcagtctgcccactggtttgaggatgataagccgaactgtggagtaatttagtacccaaggagttgtgaagtgcttcccaaaacttggctacaaattgatgtccacgatccgacacaatggtcttcggaacaccatgcagactgagaatacgggcaatgtataatgctgcataagtggctactgtatatttggccctgacgggtaagaagtgggcaatctttgtgagtccatcaactataacccaaatagaatcatacccattggccgtcctgtgcagtcccacaata

SEQ ID NO: 8320 - DNA, 371 bp, Zea mays
  unsure (1)..(371): unsure at all n locations
tcatgatgacggcacatgctgcctctcgttcctgctggaacctatcatctccttaagatcgtctctatggccatgcatgcaaaacatcgttttacactttatactgcactgttcacaaagtgaagtttgaatatatggatgatgataggtaagcttgtggagatagcataacaatcactcatcaaacttgaatatcgtcgccttgtgcatatgttcacacttttgctcaccatatttattgcatgatcgacgcgtctcatcgatcaagctatctttttccaagtcaggtcagcttgctaactactacgccaatgtgaagatagctcgcgatctcacatatatnagttctttgctttgatttttgggcaatg

SEQ ID NO: 8321 - DNA, 105 bp, Zea mays
cttgagcagctctatgcggcttccactttactgctttacaattaaatttatttctaagcatgctcattatttaacactaagtgactatgtgatcatttgtgttat

SEQ ID NO: 8322 - DNA, 272 bp, Zea mays
actaagctgtctggggatttaatgtctgtgcatcttatcggcacatggatctactccaagagcatttggccttcagagtatggcaacttgcaaattaatgggaaatgtcacaggccacagaacgtcgcccatctatgcaagaggcagacaacgcggtttggtgtctcctagatatacgtacccataccaaacccaatttggtgagactgaccacgatatcctaaaggccattccaacactatgctacgaaattttgggcacccacactcaca

SEQ ID NO: 8323 - DNA, 419 bp, Zea mays
cttcatccccacatgtgctaaacggtgatgccacaaccagcccatgctattcttagcaattaagcatgcatctagaccggcctcctcttttgcaaaatcaactaaatagagtttgtcgtctagtacacccttaaaagctaatgaaccatcactccttctaaagacagacacatctacatttgtgaataagcaattatatcccacattacatagttgactaacagacaacaagttatatccgagcgattctactaaaaacacattataaatggaatgctcggatgaaattgctatttttctagtcctttaaccttgccttggttcccatcatcgaatatgattgaatcttgggaatccttgtttttgacgtaggaggtgaacatcttcttctaccacgtcatgtggcttgtgcatacgct

SEQ ID NO: 8324 - DNA, 157 bp, Zea mays
tccagggcttctgaaggatctcttgctgctgtaatcgaaacagccattcatttctggcttttacatcaatacagccttgattgactttatactcgcctcgaccttaactgtctgccttgctatttccatttaacttgttcttgctgtagcgactcat

SEQ ID NO: 8325 - DNA, 433 bp, Zea mays
tgaagctggattatgcgctatgatgaaggaggatcttgcggattgccttgcatacaatagcctgaaggtgcgagaattgtatatttaaaaatttacaatttttgaatcattcttttattcttatactaattcttgtatatacagggcttaatattgagcaacgcgctgagagcacaaaagaatgccgaagacgagagctatgacattgctttcaataatctacgatcagaggttattaagctgaggaacgaagctctagaaaaagataaaattctgcttacattggtggacaagataaaggaagacgaagcttcctccaaagctcaagctaaagcccaaaaacgcgaaatcaaagatcttcagaaacagttagccagagctaaagaagaacgtatacttgaggagacaaaacgagagcttagtgatcaatggg

SEQ ID NO: 8326 - DNA, 229 bp, Zea mays
tactcaagcttctatagggagaacacgtgataggcatgactcacgtgcaattctaataagatagaccttgtgcagcctgtccaggcggtaaacaagatggaggagcacatcacagcactaatgtgatgactcactttaagacccctggagctgatgcatatggacctcttcggacccggcggctattttagtatatgaggaacccaaggtggcctagttattgttgaag

SEQ ID NO: 8327 - DNA, 415 bp, Zea mays
tgtggaggttcttcatccccacatgtgctaagcggtgatgccacaaccagcccatgcaagtcttagccattaagcatgcatctagaccggcctcctcttttgcaaaatcaactaaataaagtttgccgtctagtacacccttaaaagctagtgaaccatcacatcttctaaagacagacacatctacatttgtaaatagacaattatatcccatattacataattgactgacagatagtaaattatatccaagagactcaactaaaaacacattagagatagagtgctcatttgatattgcaatcttgcctaaacctttcaccttgccttggttcccatcaccgaatatgattgaatcttgggaatccttattcttgacgtaggaggtgaacatcttcttctcccccgtcatgtg

SEQ ID NO: 8328 - DNA, 420 bp, Zea mays
ttagcctgatgatcctgaacaaaactacagctttatagttgtatactccataatccacccggaaacagatatacacaagattaatgacactattttatcaccagaatcacaccatacacgaccaaaataatatatcccggggaaatgatgcctctacaattttactagaatatatatcgcacaacacgaactggagacgacgaaattgccttcttgaacacagacggcagcaaaatggcacagatgaacggtttaacctctgaagagtctccaccttatcaacaaaaaacaatcaattgaatgactcgtggtgtgggtacagacaaatcaacacgtaaatctttccaggaacagcactgcagcatcatacgaaccccaagatgactggatatgacctgctttcacattgccacgtgccta

SEQ ID NO: 8329 - DNA, 421 bp, Zea mays
  unsure (1)..(421): unsure at all n locations
tcttcaccacgtgatcaccggtatcttgagaatgttgagcaatgcacttcccttttagttgagtcaagctcatttttagcctctcattctcttcttagagcttttgatatgaatcatcatttgttcctgcaaattctagctcaaaggaagatttgcttgttgacggacaacaagcattagcacatggtaatatagtatcaatttgaatacatgtgcatgagtgaggttgtagggattttaagatttctatcacaacctcgtgagcaatgtttaatatgatatgatcatctctaagattntcatgagagcatatgagcatatcatatttatcttgaaaagctagattttcaatatttagcttttctacttggtccttaagcaacgtattcctatttactaattgagcgatacaatgtaaagc

SEQ ID NO: 8330 - DNA, 155 bp, Zea mays
catatatttatctacctctacgacatgctttagacaatattttattattagaccttataagtgccaattgatgggtccacagaatcctattagatggtgaacgcttaaaaatatatagacatttattatccgctaaaggattattagcatttgct

SEQ ID NO: 8331 - DNA, 374 bp, Zea mays
ctgtgagtagcgcacgctaatcaatgcgaatcgtctcaagccttgctacaggggcatagcgttcaccgaaatacaaacctttgactcgtgaataccccttggccacgagtcgagctttgttccttgtcaccacaccatgctcgacttgtttgatggggaagacccacttggttcctacaacactttggttaggacgtggaactaaatgccatacctcgttcctcgtgaaaatgtagagctcctcttgcatcgccatcacccaatccgaatcttggagtgcttcctctaccctgtgtggctcaatagacgaaacataagagtcatgttcacaataatgtgcaacacgagatcgaatagttacccccttatgaatg

SEQ ID NO: 8332 - DNA, 323 bp, Zea mays
  unsure (1)..(323): unsure at all n locations
ctgcagctctctctacatccatgttatatattgtgctatcatctgaatttactcttcagacctacaaaaatgtttctcaaccactcatgttatatgtgtggtaatatacttgcaccactggatggataactcattcaatgctaggactgaaatcaacatatttaagtatcttgacttcgtgaatgctanggggtgtgacaatgtatacacacatctttcatatcatgacattaatatgcgaacttaatcttcatatgagctaaaataactctttcatagaagaggcccctcttcttttgttctttatgtggcacttcatcctg

SEQ ID NO: 8333 - DNA, 342 bp, Zea mays
  unsure (1)..(342): unsure at all n locations
ctaagcttgaggccgctatcagccgctaccgacgacattatatcgacggttttttgttctattctaagtgcaaggcaaacaattctcttccacttttcattgttctaacgacgaaggagttttctgacaaacgttgtttttgcacaaagtatgctattaagtaaatgctgtgaagatgccacatgaccttgaagacaaaaaacatgaggttataattgaaggtntagagagcacaataaaagatcatgcaactgctcttgaaaagaaagatttctaacttcaaatagtggagggtttactggcagaagttgaagcccaaattgcaaaattgaatagcgaact

SEQ ID NO: 8334 - DNA, 415 bp, Zea mays
ttaagctctctgacaattaaatcacttcatctagtttcaactattatgcattaaagcatgaatgagtttttgagaagttaaactagatatgaagcacggatatgcatggacatgctttctcttcctcttaaacaagatatgtaaagagagtatagaaaaggaagatttaggtacaagtttaaatgaaaggagatagttttacctttttgtacctttacataaggacgctctcttcattgtgctttgtccttagtcttagatgcttaagacctattcttaatgacaatatatggaaatattttgcacaagagagagttctacaactagtaatctttttaagttattgttagcatatatcaaatggatcacaagttgcataaatgtatcatgaattctccttttaacttagtgcata

SEQ ID NO: 8335 - DNA, 272 bp, Zea mays
ttgttccagtgcacccaagatcacgaagaataccttcaggcgtatgttccaaggttcttgcgtctgaaggcacaggcgccaactgtgcccaatgaaattgtcattgaagccatgatcaaagggcgttggccacgacctactgtccaatactttgtcaggaaaccacctcagactctggagaaactgctccaaaaatggatgaatacatccccccttataatgactttcctctgaaaaaggacgaagcttaccgggtctccgcaatgaccatg

SEQ ID NO: 8336 - DNA, 183 bp, Zea mays
  unsure (1)..(183): unsure at all n locations
ttcttcctgttccgcgaactgatntgcatgccagatcctccaccttcccacctgctgctcccatgccaagaagaagtcgtcgtgtttgcgtgtgtggagtggaatnntaattacatgacctaggagggagaactaccagganagtcatgagatccctgcatattatcaccgagaatgagggga

SEQ ID NO: 8337 - DNA, 434 bp, Zea mays
  unsure (1)..(434): unsure at all n locations
actatccaatactcaagcttttcaaaatatccctagtaattatctctgtatttggtattgctattgattcaatgaagcccaaatctttctcctcagaaaggctcagcttcactccagcaacaactttcttttgctgagacatcccttccgaagtccttaaaaaagagcttttngatccgaagcttaaaatctagagaggcagccaaatatttgtggacagagagctatttgagtacgcatagcaaatggcaagatagcgtgccaaataaacttgtggtgagcccttatttatacacccagtatgtctaaaactggagggtcccgcttgacaatgactgctgctattctagcaaaaagaaggtgttntttcggaccttcggctcatagacttcgaccggatcgcaatataaatttatcttttacagaaattaata

SEQ ID NO: 8338 - DNA, 364 bp, Zea mays
ccagttctgaacaccaagatctattctagggtcacataatttaccgagattgactacctgcggatccagagaaggtatcaccgattctagattggaaagcaccataagatgtccgaggaatcaagagattccattggaatggtctgctattatccgcatttcattgagggtctctccaagaatgccagaccaatgacatccttgctacccaagaaggttgatttcaagcggaccccaatgtgcccagaatcattttgaatgttgaagctgaaattgactacagcaccggtgttggtttaccagatgttcacaagccattctcaaaataatgagatgcctcatacaccagactgagatgtgtgtt

SEQ ID NO: 8339 - DNA, 438 bp, Zea mays
caagcgtgagcctctcgattctcttctgaatatagtgaacgccatcaacatatccgccttagcctagatccatgttatacatgcatcgacaatccatctacattatatatataaaacattgtggacgcttttgtgaacatttgacataatcaaccacaacattcatgaaaataaacaaagaataactatttcaactatactataggagaggatgaacgtgttaacctttttcacacttacataaacgaaatcttgaataaattcttccaaaaaattggacaacacctttccgcttatacaatattatatcactttcatacgtaatacacaacagataagagaattaactcacacacatcaagaaatattacacatcaaccctcatacttatgtagccaatgaacaaagctcaaatatgatttgctagtgatttctatt

SEQ ID NO: 8340 - DNA, 393 bp, Zea mays
  unsure (1)..(393): unsure at all n locations
cactatacactactcaagcttcagtcttagcgttagtctcggtcttagttagttntagttagacagggtagtttgctatatcctgtgcatttatgtttgtcatgatgaactatgtttggtttggatctttgtaatgattgtcaccagagtgtgggtatcccctgcattttggtttacatactatgtcaataaagttagttatataggtgggaaacccattattctcctttcctctttatctgaaaagctgtgtggtctgtgttggagatcaatgaagatgctcatctgttcagtgctgttggagaattctatactctnttcttatgctgcaagctttgccagatcagttctgatgtgtggttgcgttctgcagatgtcagagaacaggcgtat

SEQ ID NO: 8341 - DNA, 376 bp, Zea mays
  unsure (1)..(376): unsure at all n locations
tgtggcgaaatagccacttgccggtgaccacgttggtgcttggtggacacggtactaggtcccangtgtggttggccaggaggaccgcgtactcctcctccattgcgcgtcgccagtgtgggtcgacgagagcggtacaaatggaggaggggaccacgaggcatccggtggagtggtaggcgtatcatctgccaagatcagccgatcgacgggtcgaagaacgtcggcggcgcgctgggtcaccatcgggtggatgtgcccggagtcgaggtggatggcgaccgggtggtacaccggtggctcggggcggggtctgcctggacgtccgtggtcgcgggcgtggccgactcgctgcagtgatagacgacggcggggt

SEQ ID NO: 8342 - DNA, 427 bp, Zea mays
tcgtgtagcatgagcttatatatgtagtatccctgttgacctttattcccagaacgagccacaaacaggctgtttccaagagttatgacgatcacttttcttctagcgttcctcttattttcagtagattactgcgtcgctgtgatccggctctgccatgtgattcaggtgacgaacaaaacaatacgagaaaccatccattatcgcagcagcatcatgtcatgttcccccacagcggccagattcgaacgaacgcatccattttaagcacctgcacaacatgacctaaaacataacttataaaacccggtcccgcggtcgtactagttaataactgggactggccaacaagctcaagctgacacgccgacatgtggcttcatactctctttatagaccgaacgatgccggatcggtagccagcctg

SEQ ID NO: 8343 - DNA, 435 bp, Zea mays
  unsure (1)..(435): unsure at all n locations
actaagctcttaagggagaacacgtgataggtctaactaatgtaactntcgaaaaatatttatcttgtgcagcttgtcaagcaggtaaacaggtgggaagctctcatcatgccaaaaatgtgatgacaacatcaagacccctggagttacttcatatggacctcttcggacccgtcgcctatctaagcatatgaggaagtaagtatggtcttgttatagttgatgattttcccgcttcacttgggtattctttttgtaggataaatctgaaacccaagggaccctcaagcgcttcctaaggagagcccaaaacgaggttgagctcaaagtgaagaagataatgagcgacaatgggtccgagttcaagaaccttcaagtggaggagtatcttgaggaggaaggaatcaagcacgagttctccgctccctacacacc

SEQ ID NO: 8344 - DNA, 421 bp, Zea mays
  unsure (1)..(421): unsure at all n locations
gacattccttaactgttggtaaccaaagccatcttttatgctcttgtgtctcccactatcaaacatgcatactagcaaatataatatttttcattttcaattacatgctcgataatatnactatatagttgtgcctatatgatcattcttgctgtaaattaaagcaaggtgatcatgaatagcatcaacatttacatctttacaatctatacatatagagacatgatcaacactagatgtagaaggtttgcaagcatttaattcatcaattttatcatgtaaaatagcattgacatttctaagattggtaatacacacattgcaaacatttaaatattcacccttagacattaactttccattctccatcttaatgctagccatagattcattccatctatcaatcttagcaattaaacta

SEQ ID NO: 8345 - DNA, 84 bp, Zea mays
atgtatttctatttttcctatgcaccttttcttcagagagaaaaggtttatgggcctagtgtatttttttttgttacccttcat

SEQ ID NO: 8346 - DNA, 373 bp, Zea mays
  unsure (1)..(373): unsure at all n locations
atctctgagtcacctgcggcatgcaagctngatgggagccttctttatatacactntattactcatacctatctatgctntanacacnatctttacccaacctaatgaagtgactatgcctacatatacccattctctcctaatcacccactattgactataanananatgagactccagaatttgaaccaattattaaactaaagctaaaattataaaccaatccttctgtatccnttttcttacaaatctcgacgatgagatntatgttaagggggtaggaattgtacagcccgaaatttgatganaaaataatacaataaagaaagaaatanataaaatagtaaattcngatatctcacaaatatacctg

SEQ ID NO: 8347 - DNA, 395 bp, Zea mays
  unsure (1)..(395): unsure at all n locations
ctttttggtggcatcttcgtcgagacctggattttacatgtttaaagacatggatggcaatgacatagcaaggtcttggaatgcagatgagcttcgaagatgttatgtgtaaattatgtaattttcttattttttcctatggcacccttttcctttcaagtggggagaaaggtttttaatggggccataagttgtaattttcatatttttgtttagccctgagcaatacaagggccagattcccccacatgtaaaatgtaacatcagggaccacaccatcgagtgcaaatagccatgaagaagctcaaaagtcgtccctaaggggatgtagagctaaaatgtcaactaanaggtgaagaagctacaaagtcattcctaaagggacgcaaagtaag

SEQ ID NO: 8348 - DNA, 419 bp, Zea mays
  unsure (1)..(419): unsure at all n locations
gcatatgctaataatatacgaattgtttctagcctttctacgggtgcataagattcatcgaaatccaaaccttcgacttgggagtatcccttggccacaagtcgggctttgttccttgtcaccacaccatgctcgtcttgcttgttgaggaaaacccacttggttcctacaacattttgattacgacgtggaaccaaatgccatacctcgttcctagtgaaattgttgagctcctcttgcatcgccaccacccaatccgaatcttgtagtgcttcctctaccctgtgtggctcaatagaggaaacaaaagagtgatgttcacaaaaatgagcaacatgagatctagtggttacccncttatgaatgatcccgaagatagtgtcgacagggtgatctccttggattgctaggtggactct

SEQ ID NO: 8349 - DNA, 370 bp, Zea mays
cccaaattgagagcacatcccccgattaacaaatgttcattctgataaagactggatttgttttgcatgccaagccgggaagcaagtggggtgtcatcatccacataagaacatcatgactactgacaagcctctggagctcctacacatggatctatttggcccgatagcttacataagcatcggcgggagtaaatactgtctacatattgtggatgattattctcgctctactagggtgttctttttgcatgaaaaatctcctacctcagaaaccttaaagggattcttgagaccggctcacaaagagttcagcttaaagatcaacaacattttaagccacgactggacagagtgctacaacttacaa

SEQ ID NO: 8350 - DNA, 413 bp, Zea mays
tgtggtagtggtgtgctatgtaatgtaatggcttgatgtaatgaataaaatatctagaaaaaaaaatggcatgtgcataatagcaactctcttcccatggcagatggcttcggatagaaccacgcctaccgcctcagggattggagcaagacttcctctaagagctgagggagaggctggcggagaagggggtgagacccacctccccgcacctccagaactaccactagacctagcccaaattctggccaatcaaaccagactcattgaagtcctcactcgaagcctggagaaccagcgcccaggcggtggaaggccccaggacaggatgggagaattcctgagactgaagccgcccacgttcgcggggtccagcaatcccctcgatgcagatgactggcttcgcacaatca

SEQ ID NO: 8351 - DNA, 304 bp, Zea mays
cgcggcggaacatactagatttcatctgcccctttctactcggactttactgcatgcatggctgttgcgatctacgtgcacattcgctggcagcgacgctgactcacatctcactggaccgacattgcgtatctcagactcctattctgacactactgacagctgcgcgaagcctcaccttttctcgggcctgcatagagacggtcattaaactgggtctgcacgtacaggatggccggatgttattttaatctgcagacacgaatgtttcttctttgtacttaatacaaactaaattatttgg

SEQ ID NO: 8352 - DNA, 407 bp, Zea mays
  unsure (1)..(407): unsure at all n locations
ttcatttctctctgataaagtacaacgagcagcttatccatattttcttgcaaattaaaaatctcaaccttctcctatttttatagataacaaaacatttatcccaatttcctaaatcatgagatgtgggcaaatatatgcttagttcatatatatggagcaatctgttatgaaaataaagacccagtatgaccaatgcaatccatattttgaaccttagttacgtgcagnttttcagaatatatgcaagtttaagactcagatgatggtggaaacacaaaactagcatatctacgatgttaaatcaaacacatatctgttaagggtactctgcatattcccattattgcattataaaataaattgatatctaatgattcatagattcagtcaaaaaagtgacagcg

SEQ ID NO: 8353 - DNA, 270 bp, Zea mays
ttttgcttgagcgtacaccttttcttttgtgcctggtggacttcagttggttctggcatctctcgagctgacgggctcttttgttgctctaaaagatctgtggtcacgtgaaggaagcctgcctaacttttcacgctacaaggatgtgcgaatgtcaaactcaaaaggaatagtcccgagtggcccatgtgggactgctaatgcttatcagacagcaccaatgtatatcaacctcgcctgatatattcctcgttatggatcgcaagctga

SEQ ID NO: 8354 - DNA, 425 bp, Zea mays
  unsure (1)..(425): unsure at all n locations
tgagccaaagtgggaaggcccctacatcgncaccatgaaaatcttgatgtatgcctacaagctgacgagtcaaacatgagtgctactagatcatagccagagtgtggacgatttatgcaaattctatgaccgacttcggtaagaagggccttcgataacgcccatgtaatttcaattttctttagaacactgaaacccaggccaggcccgtactcttttcctcaagaatggggtgaggtttttaatgaggcgaaaccttataataaagtaacacaagtccccctacacattagtcctgcggtcgaaacggctcaaacgagccccgcattcgaccacgaagtcagtgactgttacaacaagcaaaacctcgctagcaacgtgtgacaaccaaagatgcctaatggcacaaccagattcaaataaaa

SEQ ID NO: 8355 - DNA, 443 bp, Zea mays
actataccaaactatatcttacatcgacaccgcctcagactattgaaaaccagctgtaagtcttcgatgaagttttcagagttctccgttttgattaccatgtcatctacgtaggcctccacacgcttgccccaatgatcggctaaacatgtttgaatagctctctgataagttgctccagcgtttttgagaccgaacgacatggaggtataacagaaagcaccgaacggagtgatgaacgctgttttttcctcgtcttcctttgccaaactaatctgatggtatccaaaatagcaatccaggaaagacagcacagaacatccagcggtggagtccaccacctaatctatcctcgggagcccgaagggatccttcggacagtgcttgttgagatcagtatagtcgacgcacatgcgccaatccactttaattcttttgagtac

SEQ ID NO: 8356 - DNA, 247 bp, Zea mays
ctttgttaaagttgacctccagcggacagtggcctctcccaacttgcacgcgcctatcgctgacatgcctgtactactggaggatgcgttggtaattgtatgggtttgcgaaattccaaactaagattaacgtcacatcgtagacaaatacgccgcgataacttacagtctgggagctactattttctccctacaggggaaaatactttgcgaactcgtacaatgtgttgcggaaatgtctacgttt

SEQ ID NO: 8357 - DNA, 232 bp, Zea mays
actcagctcacttctcttcttaacctcgacatcctgctttgtattttctacaaaataagaaaggtgccgatctctacgacgaagtgtaaataacacgtcttagtttcttaccggcttatgatgaattctaacttcttccccgccattttttgcccccccactttccaaaatctggtgatgaacttattttccatgcttctggctaagcgtaggatatctttcaaaacttatg

SEQ ID NO: 8358 - DNA, 437 bp, Zea mays
tggattacgacatacgtggttgagtcattgagtgaagcttcaatgaattgggcaacgtgaagagtggagatcacgtgagggagttgtgtgcgttcaaaatgtcactgagaagctgacatgaagtgtattactggaataaggattgtagtccaggagataaagacagtttggataagaaatggagggttgggctgtggaataaggagagatattttccacttttgatttttctttttctctctttttcataaacttgaatagataaaacgaattctatgattaaggtataaaagaggcgtaaatgagttgggctaaaatgataccaggtacaatatttagacaatatttgatttggtagatagtaggtttcaggaaagtgttaatgtttggatgctactctaaatggctatctcgaaagatgatggaacataatacat

SEQ ID NO: 8359 - DNA, 434 bp, Zea mays
tctaaaggagaacacgtgatacggttgacttacgtgcaattcgtaaaagatagaccttgtgcagcttgtcaagcaggtaaacaagtgggaggagcacatcacagcacgaatgtgatgaccacttcaagacctctggagctgctgcatatggacctcttctgacccgtcgcctatctgagcatagaagggagtaagtatggtctagttattgttgatgacttttcccgcttcacttgggtgttctttttgcaggataagtctgaaacccaagggaccctcaagcgcttcctcaggagagctcaaaatgagtttgagctcaaggtgaagaagataaggagcgacaacaggtccgagttcaagaaccttcaggtagaggaagtccttgaggaggaagggatcaagcacgagttctccgctccctatacaccacagca

SEQ ID NO: 8360 - DNA, 103 bp, Zea mays
cttaattatgcacaaacttttaaagttttttatttaagaaaaacagtaaaagattccattgaaagaaactagacctttttggatttttgttcccggcttttgg

SEQ ID NO: 8361 - DNA, 432 bp, Zea mays
tgccttatgacaagtttcgactctggaaggtgaaaccaacacatcagccgctcctgctccgaaggttccccaagatccatcacaaaacactgttcaggcttcgttgtctttatttgtttcctcctcctgagcccctggcgtccaatcagcaatgaagtctgccaacgcctgggactgaatcgaagatctatgaacatattcaatacaaaattcattgagctctgcagcccattttccaatccttccagtagcttctcggttcctcataatgtccttcagaggttgtgaagaacgaacaattatgttgtaagcttggaaatagtgccgaagcttcctggaggccattaagacagcatacaataccttctccaactctgtataatttttctttgataaactaagaacctcggaaacaaaatatattggagcctg

SEQ ID NO: 8362 - DNA, 433 bp, Zea mays
  unsure (1)..(433): unsure at all n locations
tcgacctcttcgccgatccattgaataactccttcgggattgcctcagataaatttttgctctgatgagtatgcacccacctttgcaaaactatcttttagtttcctcacacaatccatggatactttgtagcatttttctctagaatcccgaagttcttcaatatttttctgcacccttgctgtttctatttcacttatttctttttttgccttcgcaacgtcaaaatcttcattcatttcagcaagtttcttctttaaaccttcaacctcgattttgtgagcttcggcttatgcgttcagctgggcttcgctggtttttagcctatccactaaggagagcagtattttgtctttttcaagagcttcattccttagtgtaataacttctgaccaaagatntccaagcactagctggcagctttcatcttcag

SEQ ID NO: 8363 - DNA, 92 bp, Zea mays
ctcataaagtttcaacacacatacctgctttaaggaacttttttaagttcctgaagtatcgttggtaagaactgactcatctgtcttttatc

SEQ ID NO: 8364 - DNA, 413 bp, Zea mays
tcgaggaattgacaatcaagcttctgcgaccaagagatcaaacttagcgagttctacgaagttgaagatcctgagcatctgttgggtgaaagcaagtgtcctctgacctattatgtccctaattcatcaacctgcataccatgatcaacctaaatgattgactacctttgtatttaccttgtccttgattaccttttgggttattatggttagcttcatgctattgctatactttaatcaatgaacatgatgtgaatatttacgatatgatgatgttatcttgactatgatgatgatcttgtgatactttaacgggactggagcggtttctcgagtgcctctccataatgactggttcgttggatgaccgcccgggaaaacagtgcaaccatgaaggtgatatgggacaccct

SEQ ID NO: 8365 - DNA, 345 bp, Zea mays
tgaaaaacaaggcttgcaaagtcgagggtgatctacttgaggagagctataacacaccaaggatcactacgtaacgactggacttacagccaatgaagtaacagctacagctatgcggtgtaagtcataaggctcaagaacaagctctaagaaagagatcaaggtctctataaggagaaccagtgtcaaaaccagaactggaagcaggccaaaagagctaacttcaccttgatatttacaaagggatgttcactatgtatggagaagtactatgtgacctttacatgatgttggagccaactcttgtcaatctagatcacgacatgctgacttgatgattatgag

SEQ ID NO: 8366 - DNA, 268 bp, Zea mays
ccggacttagcactgcgctcactttttgtttcacacctctctgaacctctctaaaatctacctgaaggcaagcatcctgtgggctctagggacagcatcctgacgccattaaatatacgatcgtttgtggcaagagtggccaagccttatgctatacaactatgagagaggaacaaataaagctccttctaccctgaaccaccattattgtattcttatgaatactgttatagaatgctcttgagcaacactgcgtgtcgaagtatca

SEQ ID NO: 8367 - DNA, 371 bp, Zea mays
taacctgtggactggtcgacttgaccttcagatgttcacgaacgactgatgcgcttcttgaagatctcttggacttgtgggttaagacccacacacgcttacgctgcgccactctgatcttgctggttaacgcttatcgcattgccttcattaaggctagcggctaacccccttataagagcgctgatatgcactaggtgaagatgctgacgactctgatcttgactgagtaatatatgttgcaggatgccatctggacaggtgcaaaatggaacactatctatagagaacgtaagcatagatggctctcagagagagaaaggagagcaccgagctacttaaccctactgcactcagttagtaaacggatg

SEQ ID NO: 8368 - DNA, 143 bp, Zea mays
acttaagcccgtaagacatcctgtgcgcacattagctgctgtcgtgtgtaactaagctcactgctctggcaaatgctataagcggacatgctacgatgacttcagccaattaggaatgcttaaagctgtccgcagagggtccc

SEQ ID NO: 8369 - DNA, 373 bp, Zea mays
tttttcaatccaatgcatcatttgattcttcatctcccctatgacgcaccaatggggggcccgtgcatggactttcgtgctatccaatcgagagatatctaaagactattcgaaataaatgtagaaataaatgctaaatcgaggcttccatagcagaggcattcattctataggaggtgtcaaatttcacaacaacttactatggtgacaaactaccgagcgtgcataatacaccccctccctacaatgatggcgacaatgaatcaaatctcagcatatattgaggccaactcggaagcgcaagtggctcgaccaccaagaccctgacacatgaagagtggctgcatatcatgctatatgtattgaccaacct

SEQ ID NO: 8370 - DNA, 325 bp, Zea mays
  unsure (1)..(325): unsure at all n locations
tcggctatggtcaaatatttggcagctaaacagtgcaataactatgaatgttgtggtaacttcacacctacatgtctgtttatatagtgccgcaagtgggaaggtgaatcgtcaagtcttccgcaccggacgaacagtcgcccgcacccgctgaatggtgggccacagaacccgataaggtgaatcgccaggacgcgtgtaccctccgcatggaatatcttaatcgtttctcagggaagggtgttttcggaccttcggcattccgaagcctaggagactttntcacggatcaagctcgttatgataaacgatctagcaccgcgaa

SEQ ID NO: 8371 - DNA, 410 bp, Zea mays
  unsure (1)..(410): unsure at all n locations
tggattcccaacgttagaagatggcctctcagtactgtcgaaagatgaattggccgatagtttggcatataatagtataaaggtgcaaaaattaatttttgtatttaaaaacaaantatttcatttgtttatacttaatactatactccttttgcagggcttgatccttagtaatgccctcaaggcacagaaaaatatcgaaaatgaagggtgcacaatggttgtgaacaaccttcgttcagaggtaattgaactaaggatcgaaggccttgaaaaggataaaatattaatttcgttggtgagcaaaataaaagaagatgaggctagttccaaagctcaagctgaggctcagaanagtgaaattgaagatcttcggaaacagttagccgaggccaaattaaagtgcgctg

SEQ ID NO: 8372 - DNA, 278 bp, Zea mays
gagcgagcgggagttgttggccacgaagcgtgctaaatgagtttgcggtatggccgtattatacgctcggtgcgttgaaaattcaaagaccccgcttgtcagtgaatgttgctattctagcaaagggaacgtgttttttcggaccttccgcgtaaagccttcttccaggtcgcaatctgaattcgttattataaacaaattaatattgcgaggggctactgttggggacccttcgctcccaagttctcaaaacatgattaacagtattttggatacca

SEQ ID NO: 8373 - DNA, 403 bp, Zea mays
  unsure (1)..(403): unsure at all n locations
atacaacgcatgagaggtaccaacgctcataatgcgggtttttatactcaaaactaaggtgtttacggtcgaacatagagatacgtgcaccattaaaccacattttatgtagtgtactacattgcataaatatctacaccatgtaacataattagtatcagtatataccataaactggttctatcgagcctaactgcatgtaacataattagtatcaatatataccataaactagttctaacgagcctaactgcatggctgttagagtgatcctataattatgaaggaaataaaacatttaaatataattatttgtttccatacataccaatctatttcctttcatgacatattatttgtcatcctaaattcgtatgcatgcagcangaaacaaattttacaa

SEQ ID NO: 8374 - DNA, 431 bp, Zea mays
tgtcactacgacagatccattctaccccgacgtcatcttcatcgggggaagagtggaatcaactcccatctctgacgatgaaccaaccgtactgggagaagaacctcttcagtgggaatctcgccgacgaaggaaccgacgccgaaatatctggcgacatcacgaagccgaagagcgggacccggcgcaacctgtgtcacgagatgagatctcggagatgggagaaactccagaagaacgggtcttcaaagaaagaaggaattcccgacgacgtgatcgtcggcaagctcaagagcaggctgaacaggaagcgagacaacgccgagagaaccctcttttcggacggaacctgaaccccgacttcgcccgagccatgaacacactgagtgaggtccgtggagtattggctcggatagctgatggcctcccct

SEQ ID NO: 8375 - DNA, 307 bp, Zea mays
  unsure (1)..(307): unsure at all n locations
gacagtgatctaccccaaacttgacacccagcgttgatactcacgtgatatcgccacgctactactgggagagatgttgatgggagatattcttctggttttttcggaaactaaccacgactaaggattgaacgctaatagttactagtcgaataagcaccgacgatcaactcaatgagttttgggagctactgattttctcctcacnaggttgagaatcatttgctgaactctgtatcaaccgcgttggcacgacctgcctacgttttacactaaatttactacgaacacttataattgcagtttt

SEQ ID NO: 8376 - DNA, 182 bp, Zea mays
tgtcaaaatcttctgctaactcattgggtaactgggttattatatctgcatggacatgatccttccgactcaaggcatccacaactagattcgccttgcccggatgataatgaatttccaagtcatagtctttgatgagctccaaccaacgtcgctggctcaaggtgagatacttctgagtg

SEQ ID NO: 8377 - DNA, 415 bp, Zea mays
  unsure (1)..(415): unsure at all n locations
tcttcaccatgtgatcacggttatcttgagaaggttgagtaatgcacttccctttcagttgtgtcgagctcatttttagcctctcattctcttctttgagcttttgatatgtatcatcttttgttcctgcagattctagctcaaaagaagatttgcttgtcgacggacaacaagcattagcacatgataatatagtattaatttgaatacatgtgcatgagtgaggttgttgggattttaagttttctatcacaacctcatgagcaatatttaatatgatatgatcatctctaagattntcatgagagcataggagcatatcatatttttcttgaaaagctagattttcaactcttagctttttcacttggtccttaagcaaggattcctatttactaattgagcgatacaatgt

SEQ ID NO: 8378 - DNA, 439 bp, Zea mays
gaccttaaaactcagcttacggcctcacgggaagctatccaaaggcttggatcgagcagaggagggctggaaaggggttggccatggtggttgccctcaggcggctctggcgggttgccggagcaatgggcgagctcatgggagttaggcgtggtacggaggaggcaacggggaaggcagccgggcactgggacgggctttatatccgtggcacaagcgtggtcacgggcggccgcgggcgcgcgggggttcgcgcacgggcgtgctctgagcgggcccccgagtgtcagcccacgtcgaacacgtgggagctcgcttctgccatggttcaacggcggatttgagcaccttatcgtgcgtatcttggcaaaaccactgtgtatggtctcttccctgctccatatactacctttttgctgcgagttccaagtcaagatgc

SEQ ID NO: 8379 - DNA, 407 bp, Zea mays
  unsure (1)..(407): unsure at all n locations
taagctcctttngttcggaacatgtcaggccattcacccttgtgtacatccacatggtgtggctgtgctaacaaagtgggtgctaccatcggttgaagaagtgggcgaggaccattgtcattgataccccagtggtcaccaacatctagatcctctccaacaccgagggaactccaaagctggccacgacaaggcctcctatgtcctggtgacatggactataacaacagtggcgaatgtgaggcaatcctatacattagtcatgacgtcagttctgctttcactgctacttgtgccctaatgggtccacagtgatgaacgatctgtggttgccattgtcatggtcctggaagtagcagccaccatagatggctcctcctatggtccatagaacgacgaagaaatgg

SEQ ID NO: 8380 - DNA, 242 bp, Zea mays
cctcgtaggtgaagcaaaaccctagcagattagtacaaaacctaatatgcctgattgaaacaagcgagaactaaaaatggtagcagagggaacaccatcaaagcatgtcctccagtaggcgagcaaagcatcccgtctccctaaggtaagcgtgaggggtagagatctatgagttgtaagggcagggggccgagaccttgccgctcccagaagggcggatggagatctctgcgtaacccatg

SEQ ID NO: 8381 - DNA, 328 bp, Zea mays
actaaaccataattgttgtgctaagacacaggaggtcaatatatgttggacagtttcatcttcttgaccacaaagtgggcaggtctcaagatggtttaatcctctctgttgcaatctatcggctgtccatcatttgttctgaattgctaaccacaagaacatcttacatttaggtggcacccaggatttccacaacctccttccaaggttaaaaaaatgatagaaccatttaagaaagcctcataacatgatttgtaagtgaatatgtagatcattatctggagagggaaataccacctccagaagcttccatagagagtgttattcc

SEQ ID NO: 8382 - DNA, 422 bp, Zea mays
tgtgaagattcttcatcccaacatgcgctagtcggcgatgcctaagccagcccaagttagtcttagcaattaagcaagtgttgagttcagctctatcaaaatctactaagtatagctgaccctctaacactcccttaaatgctattgaatcatcacttcttctaaagacagtgacaccaacatccgtaaaaagatagttgtagcccattttatacaattgtgaaactgaaagcaagttataatctaaagaatctacaagaaaaacattgaaaatggaatggtcaagtgatatagctattttacccaatcctttgaccaaaccttgatttccatccccgaatgtgatagctcgttggggatcttggtttttctcataggaggagaacatctttttcttccctgtcatgtgggttgtgcacccg

SEQ ID NO: 8383 - DNA, 225 bp, Zea mays
agcttgtgaaggaccagatcatcaaagcatataagtttctggatgaagaagtggtcacccaagttttgttgatgaagcaccagaagaccaatcaaggaaggaatccatgtgggagttcgcaagagaatggtttgcgtgttggcatcgttgcttcctcaataagctagctgccaagcgaaagctgaagcctgaagatgatctttgagtagccagaatcagcatttg

SEQ ID NO: 8384 - DNA, 226 bp, Zea mays
tcagcatcgttttgtgtttttttatccacagtaatagccttcggcactccgaagtgacaaacaatattttgccagaaaaatttctggatagtaaccgaagttattgtggctaaaggcttcgcctcaatccactttggaaaaatactctaccgctaccacaacatattttagatttccttgtgctggtggaagtgggccctgcaaatcgaggctcccacttttgtca

SEQ ID NO: 8385 - DNA, 232 bp, Zea mays
agcatgcatttttgaaaggggttaacatcccaatgtatattgcaatcaaaaggatcacctccccttgctgtgttggtggctgggtgcatgcggggaaaggggaagccaccgacacaggtctttactctattatgcacttcctttaacatacaatgcatttattacttaaactatacaaccctcactgtctctaattgatgcttgcaaaatctgtcaagcttctcccagttca

SEQ ID NO: 8386 - DNA, 199 bp, Zea mays
agcttcttttgaatgtttttctgtcaagaatattccaagaggctaaaatgagcatgcagatctgctagccaaatcagcggctcaggggctccctctaccttcggaagtattttttgaaacaataaaggcaccttcgtgactatggagagagcgggcttgccattttcatcatatgaaatgaggactgaatatattttct

SEQ ID NO: 8387 - DNA, 224 bp, Zea mays
tctaaagggataacacgtgataggattaactaatgtgcaattcgaaaaagatagaccttgtgcagcttgtcaggcaggtaaacaagtgggaggagcacatcacagcaagaatgtgatgaccacatcaagacccttggaactgctacatatggacctcttcggacccgtcgcctatctaagcataagaggaagtaagtatggtctagttattgttgatgactttt

SEQ ID NO: 8388 - DNA, 218 bp, Zea mays
atcttgtcccttttcaaatacaacatcctttagtcgtctaaccatgtctttctttagaaccttcttgagtgtgctcattccaacatgtgcaagccttctatgtcatagccatctaagagatgctttgtgaaagtcgcctagagggggggaggtgaataggcaaatctgaaatttataaggtttaagcacaactacgagccggggttagcgttagaaat

SEQ ID NO: 8389 - DNA, 227 bp, Zea mays
tgtgaaggttctttatccttacatgtgctaaatggcgatgccacaaccagcccatgctagtcttagcaattaagcatgcatctagaccggcctcctcttttgcaaaatcaactaagtaaagtttgccgtctaatacacccttaaaagctagtgaaccatcacttcttataaagacagacacatctacatttgtgaatagacaattatatcccatattcgcccccccc

SEQ ID NO: 8390 - DNA, 219 bp, Zea mays
agcttatgaagattcttcatcccaacataggctagtcggcgatgccacagccaacccatgttagtcttagcaattaagcaagtgtcgagttcagctttattaaaatcaactaagtatagctgaccctctaatactcccttaaatgctactgaatcattacttcttctaaaaacagtaacacctatatccgtaaaaagacaattgtagcccattttgcat

SEQ ID NO: 8391 - DNA, 223 bp, Zea mays
tgtggaggaccttatcatctaagcatataagtttctggataagaagtggtcacccaagttttgttgataaagcaccagaagactaatcaaggaaggaatccatgtgggagtttgcaagagaatggtttgtgtgttggcatcgatgcttcctcaataatctagctgccaagcgaaagctagaagcctgaagatgatctttgagtagccggaatcagtgttttca

SEQ ID NO: 8392 - DNA, 231 bp, Zea mays
aatcgactttttgcatgcattcttgcgagtactagacagagcaacaacatctaccagcacagcaactgtataccataccggtgacttggaccttcgcatgctgggggctagatacgattggaccttataagaaagctcaaggaggatacactgacgtgctggaagcaatcgacaaatttactaaatggatagagttcaaacccattgcttctttaacctcacctaaagccg

SEQ ID NO: 8393 - DNA, 223 bp, Zea mays
ctgttaacatgtattatcccaacatgggctagtcggtggcgccagagccaacccatgttagtcttaacaattaagcaagtgtcgagttcggctctatcaaaatctaccaagtataactgagcctttaacacacccttaaatgctattgaatcatcactttttctaaagacagtgacacctacatcagtaaaaagacagttgtagttccatttgacataattgg

SEQ ID NO: 8394 - DNA, 227 bp, Zea mays
attttttgcatgcattcttaggcttctttcaaattatgtattattcattgaaccttctctttcgtttcttttaccatatcaggcctgaaaaaccatctttctcctggttcagaccagtttaacggagtacgacactgtcgtccatacaaagcttcaaaaggtgctattttgatgctctcttgatagctgttattgtatgaaaactccgctaatggtaagcaatcatc

SEQ ID NO: 8395 - DNA, 220 bp, Zea mays
  unsure (1)..(220): unsure at all n locations
tgcattgcattttttaattncttgtattgcatctagggcttgtctaacctagttgagataaccgccaacaaagcgagtgaaaaagcttaactcggatcaaacttgacaagtcttagttttaagtttttagcacttaaattcttacttactatgcaattgttggttcttgaaatatgcatgaagtactgcacttatggggagtattcaaaactcaaaacac

SEQ ID NO: 8396 - DNA, 207 bp, Zea mays
atcttgtgaaggttcttcatccccacatgtgtaaacggcgatgccacagccagcccatgctagtcttagcaattaagcatgcatctagaccggcctccttttttgcaaaatcaactaaataaagtttgtcgtatagtacacccttaaaagctaatgaaccatcacttcttctaaagacagacacatctacatttgtgaataaacagt

SEQ ID NO: 8397 - DNA, 220 bp, Zea mays
ttaatcgcggctaggttgggcactacgccaatgtctgtcctaagaggaacccaacactccaacttgagatagtaattagggcaaacaaaatcaaactccacctaataacaaaggattcagtattgccagagttaattagatcagtgctgaggctaccactgatggttctgacattgctattggtacgttccttattaattcaactatgccatctatattg

SEQ ID NO: 8398 - DNA, 220 bp, Zea mays
ttcttcgcgagagagggtgtggccttgaagtgagccgtctgagttcgccccctttttcacccgcctcccttgggaaggccctaggcatccccttttatagatacaatgggagggctccagctgcacatatgggggttgtagcctatatgctaaccgtggcccggcgcgagaagtgccttgcagccctgttacaagccgtcagctgggagggtgcggcccc

SEQ ID NO: 8399 - DNA, 221 bp, Zea mays
ttttaagggtatatcacatgctgggactaacaaatgttcattttgagaaagacaagatttgtagtgcatgtcaggcagggaagcaagttggtgttcatcatccacacaagaacatcatgacgactgacaggccacttgagctcctacacatggacctattcggtccgatagcttacataagcatcgacaggagtaagtactgtctagttattgtggatgat

SEQ ID NO: 8400 - DNA, 245 bp, Zea mays
  unsure (1)..(245): unsure at all n locations
ttctttaacccccccacgaggaccttttcccgtttctttctaacccattaataaatggtgatatcggaatggtcatacctntgatgccattatctcacctttcatttgtctccccttggtattgaatgtacctggtttggttctcccacattttgaatgggatgaaactcgtatgtatgccttcgcannatcgcattagaagaacgcaaatccggtcccaaagagccccgaaggaaccttcgcag

SEQ ID NO: 8401 - DNA, 214 bp, Zea mays
aaggggctagggtgtgaaaagaaagaaggttgttagcatcctaagcatgcaagccacccgatctgtaaaagaagatgaaaaggctctaaagaaggcaaagacagccctagagccaaaggcgacaattcctaagaagcgaaagcttgatcagataccctctactgaaccgaaagtagacgaagcagcagagaaaagcccttcgtcgccgtctgct

SEQ ID NO: 8402 - DNA, 208 bp, Zea mays
agcttgaatggtgtaaatcctattgaccttgaaatggcagtattgtggttccacaccacctttattaattcgtctggccactttcctttcgggcggttgaagattgacttcattattcctattattataattctgtttgctatttctaccagtccatttgactccagatgtcttactgatacatagtgtattttttaccaatctggtc

SEQ ID NO: 8403 - DNA, 251 bp, Zea mays
ccctgatgtgacgctacactatacaaaacccaatcttgggtatgctccacggcctcaccaggaagctatctgagggctagcatcgaacggaggacgacggcaaaggggctggccatggtgcgccgctctccggcggcactggcggttcgcgggtaggtcgccggagctaatggctggctcgggaaagtcaggcgaggtttcgaagaagccacggggaaagcagtcgagcactgaggcgggctttttaaccc

SEQ ID NO: 8404 - DNA, 188 bp, Zea mays
agcttgtcgtctagtacacccttaaaagctagtgaaccatcacatcttctaaagacagacacatctacatttgtaaacaaacagttatatcccatattgcataattgactaacagatagcaaattatatccaagagacttacaaacacattaatataatgctcattgagattgcattacctaaccctt

SEQ ID NO: 8405 - DNA, 217 bp, Zea mays
tgagacgggaacaaccatagcatgcactaaatcccttgaagaaaatgtcaaggacttgaggattgccaagaggaaagaacaaaagaagaaaatcaatacctctgccaaaagcctcaccagtgcctccatgcaaggtaacatccaaggtaatgatcaagtcacacttcacactaagagaagtaagaagtgtaatgaatgctttgaaaagggacactcg

SEQ ID NO: 8406 - DNA, 103 bp, Zea mays
ctctacactcaactctgctagcatgcattttctatgcactaattgattacggtacagattgggtcctaacaacaacgaattcagcctatcatgcacctaactg

SEQ ID NO: 8407 - DNA, 228 bp, Zea mays
ttagagacatttgaattatttttgtaaaagatattgtagtttaggaatcaaacattactctataaatttgtccataccttgtaatatatttttttacctttccatccgtgtatatattgctttgatgtggacgaaacttgtattttttgagccgaaggcaaaaaacaccttcccttcttttcgtacacaacgaagcatatctttgcttctttatactcatcaaagtct

SEQ ID NO: 8408 - DNA, 223 bp, Zea mays
agctttggatgcacgagcccatgcatcatatatgtgagaagcataccattcggagccattattacttgtttggtaattatctacagttggaggatgttctgtatctgtagtcatatccagaccaccatttgaaattcctacacggaatgcaagattgatgctactgtcaacaatacactccagaaatctagcaaagctggaataaacatagttaacaaatagc

SEQ ID NO: 8409 - DNA, 214 bp, Zea mays
  unsure (1)..(214): unsure at all n locations
ttaggatctcttaacttggtataagacnaacccctttaaccactatttagggttaagtcctttaaccagggttctatttgcaaaacactttaaacaacacaacttgtttgaaatttttgcctagtgaatgcactctaggtgtgtcaaacatatgcaatgccaatgctatgatgccatgctcaagttttagttatagtaacaccaggggtgttac

SEQ ID NO: 8410 - DNA, 217 bp, Zea mays
agcttttccaccagaaggagccaatttttgaacaactagggagcctgcctgctctgtagtaattgttccaaaccagatttacccaaggaatatcataattattgaagaatttatgcaaaaacttgagcagcaaagctttgttgtgcgtctccagtctgaccactcccagccccccatttttttagtctgagtaaccatgctccaagcagccagagcc

SEQ ID NO: 8411 - DNA, 218 bp, Zea mays
gtgttaagtgatagtgatttgtcgtgttcttttgagctcttgcgcttggattgctttcttctttctcatttttcttgagatcaatactcacttgtaaccgaggcaagagacaccaattgtgtggtggtccttgcggggaagttttgttcccggttgatttgagaagagaaagctcactcggtccgagggaccgtttgagagaggaaagggggttgaaa

SEQ ID NO: 8412 - DNA, 217 bp, Zea mays
ttcttaatgaagatcagtagaaatgtactataggaaaaaactcaggatacttttgtaacaagttttgtaaatacaattgaactgttctcaaggaactttgtacataccttgtaatatattcttacccttcgattgagtcgctttgatgtggacgaaatcagtattttgagccgaaggcgaaaaaacaccttcccttcttttcgtacacaacgaagcc

SEQ ID NO: 8413 - DNA, 224 bp, Zea mays
tctcctggacatttgctgttcttaccgctgagtgcgaagctgccacatataataacaatggagcccctggcgttggtggagttaatgttgtcaaatctatcaaatattgcttcaggtcctcgaaggctttttgttggcttggtccccattgaaagacttcgactgatttcagtacttcgaagaatggtatatttctttctgctgatctggatataaatctatta

SEQ ID NO: 8414 - DNA, 219 bp, Zea mays
ttcaaacagggtaccatcttcagcactggcttgctaactattattatatgacgaactctgcaaatgataaactcttatcccaactgccgccatgcttcagagcacaagctcttaacatatcttatagcacttggttggttctttcggtctgcccatcagtttggtgatgataggctgagctaaaattcagctttgtgtccatgctctcatgaagactct

SEQ ID NO: 8415 - DNA, 248 bp, Zea mays
cgagacactatataaaacgacaccttcgacacccattgcttcgatttgcactccggaagtctcgccaaatttcttcgaagtagtgcttgaagactttattgtctccaatacatccaatacattaaccattctttttctcttgaaggtcgtcatcggcattggcacctcaatttttgctgaagcacttagaattttcgatgtctttgtttcttcagccctcggttcttctattttttccgtcgccggcc

SEQ ID NO: 8416 - DNA, 255 bp, Zea mays
  unsure (1)..(255): unsure at all n locations
gacactatgnaacactataaactacacaagcctttaaagggattatatgggaaaggtttaactaacgtgcaaatcgaaaaagatagaccttgtgcagcatgtcaagcagggaaacaagtgggaggagcacatcacaaaaagaatgtgatagaccacgtcaagacccatggaactgatacatatggacctcttcagacccgtcgcctatataagtatagggggaagtaagtatggtttaattattgtggatgactt

SEQ ID NO: 8417 - DNA, 207 bp, Zea mays
agctttagtgactagtgagagtgatttgtcgtgttctcttgagctcttgcgcttggatagctttcttctttatcattcttttcttgtgatcaaaactcaattgtaaccaaggcaagagacaccaattgtgtggtggtccttgcggggaagttttgttccccggttgatttgacaagagaaagctcactcggtccgagggaccgtttg

SEQ ID NO: 8418 - DNA, 209 bp, Zea mays
agcttcagctccatctatgttatggattgcttttgagtcagtccaattgccttcggcccttcttgcagcttcctgacttccatggatagcaatgggtccctgatccgaaggtatcttcatgcaaagataggcaggatgaaggattgcttcaaaggcattgagagtaccacgaccaataattgcattgtaaggatattccatgtcaacaa

SEQ ID NO: 8419 - DNA, 218 bp, Zea mays
tttaagggagaacacgtgataggtttgactaacgtgcatttcgaaaaagatagaccttgtgcagcttgtcaagcaggtaaacaagtgggaggagcgcatcacagcaagaacgtgatgaccacttcaagacccctagagctgctgcatatggacctcttcggaaacgtcgcctatctgagcataggagggagtaagtatggtttagttattgttgatga

SEQ ID NO: 8420 - DNA, 207 bp, Zea mays
ttcttgtgctgattggactttagccgacagatttagtcgagcacacttcaatcaggcaaacacgggcctattagacgttagtaggctagattttagtcaggtagacatcaattgtgacatcttcggccatatagcagtattcacaagaaaggaacagttgatctagtctaagactagttgagaagttcatttgaagattttgtttgg

SEQ ID NO: 8421 - DNA, 204 bp, Zea mays
ttgaaccgaatatgtaaattattgtaattcatttctttgtgatgcatgaaatttacacacacaccgtttttgagccttcggcgaaaaacaccttcccttcttttcatgcttcgtaaagaaaaagatccatgctttataaagaaagatatccatgctttctaaaaagagatcccttcttgtgacaaggctgataagactgaattt

SEQ ID NO: 8422 - DNA, 209 bp, Zea mays
atctttgaaaggaaatactgaatatattatccgtcatgcttcgggaaaaaatctctctaaagaagaagaatgggaagctcaacactatgcccagaagctgaaatatccaaagggggcattagtattcaacgacagcggagaagaggatttcttgtattgtctcctacatagcaaggagatttctgtctgctaggagataagcagaagct

SEQ ID NO: 8423 - DNA, 221 bp, Zea mays
ctttgattttacatattacatctttaggggattttggcccttgtattgcatagggctaaataagaatgaaaaattacaagctatggccccattaaaaacctttctcccctcctgaaaggaaaagggtgccatagaaaaaatgaaaaaagattacattaaattacacatagtaccgtcgaagctcatccgcattccaagacctaagtatgtcgttgccatcc

SEQ ID NO: 8424 - DNA, 200 bp, Zea mays
gcagcttgcatgctttatgaatgataccttcggcgtcacgtacgggcagcttcagccgaagctgtctctttctgcaggaccttcggcgacgaaacatggtcccaacaggagcaaaggaactgagagtgccctggtctggcgcaccggactgtccggtgtgccaccggacagcgtccggcgcaccaggaacgttcaatccc

SEQ ID NO: 8425 - DNA, 208 bp, Zea mays
tcttgcattttatatttaaatttcttgtgttgcatctagggcttgtcaaaccaagttaagataaccgccaacaaagcgagtgaaaaagcttaactcgggctcaaacatgacaagtcttaggtttaaacttttagcacttaatttgctacttactatgcaattgttgattattgagatatgcatgaggtactacacttagggggagtat

SEQ ID NO: 8426 - DNA, 204 bp, Zea mays
tgcttgtgaagccaatcacaagtttgttgaagagtgacactaagttcaattggtcttctaagtgtaatgaagcctttgagcaactgaagacactattgaccactgctccggtattagctcaaccggacatcactaaaccttttgacgtatattgtgatgcctccggcagtgggctcggctgtgtactgatgcaagagggccgag

SEQ ID NO: 8427 - DNA, 249 bp, Zea mays
gctagttagcgacactatacaatacccatttttttattttgggcatacttggaattcctcacaggctgcgtcctgtgcctataaatagtgaacagtattccgttactgttcacgcattctgataattgcggtcgcatcttttggaatccaacttttgccaaggcagaggtattattgtattcaatgattcaatatattgagaaaatataatgtaattcatctatgatttacttatcccttttatacctt

SEQ ID NO: 8428 - DNA, 199 bp, Zea mays
ttaccaaatggtcttgaaatttgccttcctcaatggactaatcaaggaagaggtctatgttgagcaacctcccggctttgaagatagtgagtacccctaaccatgtctatagactctctaaggcgctttatgggctcaagcaagcttaaagagcatggtatgaatgcctaagagattttcttatagctaatggcttcaa

SEQ ID NO: 8429 - DNA, 174 bp, Zea mays
agcttaatgccccttaaagattgtctaattttgttaagggcaaggcacccatggttcaggataatgagggctatattttgtatcatgctaattattctgagcacaaaatttggaaaattatgctagaaattattctgtttacatcttatattaatgagttacttagcaatatat

SEQ ID NO: 8430 - DNA, 240 bp, Zea mays
tatgggacactctcgcttgctgaccgagaaaataattattaaatgtcaagtatccgtaagaaaacagcaggcccatttcctcgccaagcaaaacaaatatctacattacctaaatcattctctaccaacgccattgagccacaaacaagttgactgattagaatatgttacaggccccaaaaaatattcagcttgcataatggcattaaactggccattatacaaccacatatcattttt

SEQ ID NO: 8431 - DNA, 214 bp, Zea mays
atcttgggaaaaatctcttaaataaaatcggaaagaaggattctcagtgaggagataatgggggaccgtgaatgccaaaattaagaattacaaaactcgatacaaagatcaagcatgttcaacttgatgggtaagtcgaatgatgatggtaacaattagaaaatatgtacctagctaagccgtctggcgagagccataagatggttatagggaa

SEQ ID NO: 8432 - DNA, 226 bp, Zea mays
tcacacgacttgtttgaataaagatgagactgggctttaagcccatctaaaagattctacggcatgcaaacctaacctatatggcccaaacggcagcgccacatgtgggcatgacttaaatcatcatgtcctagacttttaccacatcattttcagattagcgcttcttctcgatatcatatgaatcacccatttattatggatgcttaatctattttcctgtctt

SEQ ID NO: 8433 - DNA, 173 bp, Zea mays
  unsure (1)..(173): unsure at all n locations
tgcttcggttaacttttgatcgaggcagaaggagacaacaggaagtcattttttcttcgaatcatctgcaagctggacctgggatcttcgggttgattacctctaaattaacccgaagatcggggggcttgggtgggggcnatagnatactccccttaggggtccaccttaaa

SEQ ID NO: 8434 - DNA, 226 bp, Zea mays
ttgcaggagaatgagatgatgtgaaactttggggtgcttgagagagtcaagtcaattcttattaactcaagctatcaatcctcaatgatctatatccatgagtgacccaaggttattcttcaaattactatatcttaagctcatatcatctcgaaggaagatattgatgttgtaggaaataaagaattaatcctatgccgaaaagtcaagacctacaacttgaagg

SEQ ID NO: 8435 - DNA, 221 bp, Zea mays
agctttgggtaaaatagccatcactaccgagcattcaatttccaatgtattcttagtagaatcacttggttacaatttgctttctataagtcaattatgtcatatgggctataattgcttgtttacaaatattgatatatctgtctttagaagaagtgatgatttattagcttttaaaggtgtattagacaacaagctttatttagttgatttcactaaag

SEQ ID NO: 8436 - DNA, 227 bp, Zea mays
ttatcaaatggtcttgaatattgccttcctcaatggaccactcaaggaccaggtctatgtcgtgcaacctcccggctttgaagatagtgagtaccctaaccatgtgtataaactctctaaggcgctttatgggctcaagcaagccccaagaacatggtttgaatttctttttacatttgcttatcgcttttggattcccagtcagcaaacgatatatcctatttatt

SEQ ID NO: 8437 - DNA, 212 bp, Zea mays
tttttctaaagggagagcatattttaggattaacaaatgttcattttgagaaagacaggatttgtagcgcatgccaagcagggaagcaagttggtgcccatcatccacacaagaacatcatgacgactaacaggccactagagctcctacacatggatttattcggcccgatagcttatataagcatcggcgggagtaagtactgtctagtt

SEQ ID NO: 8438 - DNA, 220 bp, Zea mays
  unsure (1)..(220): unsure at all n locations
tttctgctttactacttcggcgctgtgtcaacctttgtagcttttccctttctgatacgagtccgaagatacctgctcacacattttaagccgcttctcccttgaagaccttcggcgacgaagcatagacccaacaccgactgttgcagaattgtagccgttggcgcaccggacactgtctggtgcacacncggacagtcggtgcctcctgccgaccgtt

SEQ ID NO: 8439 - DNA, 212 bp, Zea mays
tttttatgaagattcttcatcccaacatgggctagtcggtggtgccatagccaacccatgttagtcttagcaattaagcaagtgtcgagttcagctctatcaaaatctaccaagtatagctgaccctctaacactcccttaaatgctattgaatcattacttcttctaaagacagtgacacctacatcagtaaaaagacagttgtagcccat

SEQ ID NO: 8440 - DNA, 220 bp, Zea mays
tgatgtttagtttgacatcagcctctcccaaatctttcatttcgaaattgctcgatagaagatttttaacttcctcaatcacattgagatttgatccaaagatcaagatgtcatcaacataaaggcacagaataacagactcacccccaccataccgatagtatacacacgtgtcagattcatttacaacaaagccagatgttgtaagagtattatcaaa

SEQ ID NO: 8441 - DNA, 208 bp, Zea mays
ttctttctagatgccatcaaaacagcatataacaccttctctaattctgtgtaatttttctttgatacactgagaacttcagatacaaaatatactgggacctgcttcctggcttggccatcaagcttctcctggacaagtgctgcacttaccgctgagtgcgaagctgccacatataataataaaggagcccctggcacaggtggag

SEQ ID NO: 8442 - DNA, 222 bp, Zea mays
cttattatcgagcacacatgcatacactaaacataacatcgggcctagatgcggtaatataaagcaaactaccaattattgaacgataaagtttttgatcaactatagtacctccttcatctaagtctagatgaccatttgttgccattggagtcttgataggcttagcattttctaaaccaaacttcttgaacatgtccttcaaatattttgattgactta

SEQ ID NO: 8443 - DNA, 156 bp, Zea mays
ttcttataacaggaggatagaggcaagagctcgaccatatgttataatagaaggggaactatacaagcgtggggtctgttctccgttactcaagtgtatctaaccgaagataaagagaagaaacaccagctggtgatctacattgactagcttgtt

SEQ ID NO: 8444 - DNA, 221 bp, Zea mays
tttaaagggattaacacattttgggactaacagatgttcattttgagaaagacaggatttgtagcgcatgtcaggcaggaaagcaagttggtgttcatcatccacacaagaacatcatgacgactgacaggccactcgagctcctacacatggacctattcggcccgattgcttacataagcatcgacaggagtaagtactatctagttattgtggatgac

SEQ ID NO: 8445 - DNA, 202 bp, Zea mays
agcttgtgaagattctttatcccaatatgggctagtcgatgatgccagagccagcccatattagtcttagcaattaagcaagtgtcaagtttgaaagtcgcctagaggggggtgaataggcgaaacctgaaaattaaaactttatcccccaactagatcccttgattagtggtagaacaagatatacaaatatcggagaata

SEQ ID NO: 8446 - DNA, 220 bp, Zea mays
tgtgaaggttcttcatccccacatgagctaagcggcgatgccatagccagcccatgctagtcttagctattaagcatgcatctagaccggcctcctcttttgcaaaatcaactaagtaaagtttgccgtctaatacacccttaaaagctagtgaaccatcatttcttctaaagacagacacatctacatttgtaaatagacagttatatcccatattgca

SEQ ID NO: 8447 - DNA, 214 bp, Zea mays
tttgcattcttgcatgtcccaatttattagaagtataggctaaggtaagctaaaccaacttacctgttactatcatagtcaccagattcggggtctaaggcgcgtaatgcactaatgcgacccaagatcgacgacccaaaacgtgtatcaattagttttaatcgtcctgggatcgtcgaccttgagagcacctagagggggggtgaataggtga

SEQ ID NO: 8448 - DNA, 241 bp, Zea mays
gacgcgacactatacaaaacccaagacgtctattttgcacaacgcaccatagcaggcgctcatcctcaaaagagctccttttatcatccctagcctcacgtatagctgggagaggggacccgctaaccaaaacgccgtgggattatgcgctcttaaggatcgagtctgggtcaatatacctacccaaggacacacgtgatggattcatatgcaaccccgccggatgctggggcagggttat

SEQ ID NO: 8449 - DNA, 210 bp, Zea mays
tttgcatgcttgacaacaccatttgacatcttaaataaaatttctaagatcaagtatatttaattcattcctcaacatgcaaaagcgggttttatcaagaggcttagtgaaaatatctgctaattgatcttccgacctcactccttctaaaatgatatctcctttagcaacatgatctctaaggaagtgatgacggatatcaatgtgctt

SEQ ID NO: 8450 - DNA, 219 bp, Zea mays
tcttctaattggagaacacattttaagactaacaaatgttcattttgagaaagacaggatttgtagcgcatgccaagccgggaagcaagttggcgctcatcatccacacaagaacatcatgacaagtgacagaccactggagctcctacacatggatttattcggcccgatcgcttgcataagcatcggcgggagtaagtactgtctagttattgtgga

SEQ ID NO: 8451 - DNA, 221 bp, Zea mays
ttcttgtgaagatttttcatcccaacatgggctagtcggcgatgccagagccaacccatattaatcttagaaattaagcaagtatcgagttcagctttgttaaaatcaactaagtatagctgaccctctaatacttccttaaatgctactgaatcatcacttcttctaaagacagtaacacctatatccgtaaaaagacagttgtaacccattctgcataa

SEQ ID NO: 8452 - DNA, 227 bp, Zea mays
ttcttcgttaactccccctttttagtagcgcacctggtctatatctgcaagatatagcatactctttcagttcttctttttcagccttcgacaattctttcccaagtatatcttggaagttgaagtcctcttcttccgaaatatcctcggctttctcctttccttttccagccactatgcccgggatctcttcagcggctacagcagcttcttccgcggccgcatct

SEQ ID NO: 8453 - DNA, 219 bp, Zea mays
agcttctttctgttctcctttgagggcggaggtaccagaagagcagcttgatgagccttcacctcatttgtttccttcttccttgtgatctgcatccatttttccatagaggaggtggacaacggggttctccgggcagacagatcctcggctcctggcttgcaggaggtaatctttgctccgagcactggaggttatgctttttcctgcttcgctctg

SEQ ID NO: 8454 - DNA, 202 bp, Zea mays
  unsure (1)..(202): unsure at all n locations
tatcttggcgtgctgccgttttttggcttatggaagtatctgtatcactgccgtcctgggatggccggggggcaacatcaattggtcggtggtgccagtttagagatgcgccgggggcggaagaccgagtatctcgagatacccctcaaagacagcattaaccgttggcgtntggagtggtttataatggataattatggaa

SEQ ID NO: 8455 - DNA, 217 bp, Zea mays
atttttaatatcgattagtggtatcaaccaatactaaatgtatttttagtaccggttggtatcttcaatcgatattaaagccttgacattagtaccggttgcagccagcaaccggtactaaatcttctggcggttagaaccagtgctgaaactattaataatatggttttcttcaattaatttttgtaggaaactggtactaaaattaagtgacgga

SEQ ID NO: 8456 - DNA, 218 bp, Zea mays
  unsure (1)..(218): unsure at all n locations
tcgcacctctgttctaactttgctgcatcacttttcgctgttggccaatagaatcccgacctgaagaccttcccgactagtgtcttggatgctgcgtgtattccacattgcccagcatggacctcatctacaagttgcttccccatagatgagagaatgcatttcatgaggacacccgatgcgccccttctgtatagtgtnctccccaatgagtgtgt

SEQ ID NO: 8457 - DNA, 215 bp, Zea mays
atcttccacacgcttgccccagtgatcggctaagcatgtttgaatagctctctgataagtcgctccagcgtttttgaggccgaacgacatggaggtatagcagaaagcaccgaatggagtgatgaacgctattttttcctcatcttctttcgccaggctaatctgatgatacccagagtagcaatccaagaaggacatcatagaacatccagcgg

SEQ ID NO: 8458 - DNA, 224 bp, Zea mays
ttagtgactagtgagagatatttgcttgtgttctttcgcgctcttgcgcttggattgctttcttctttcttgattctttcttgagatcaaactcacttgtaattgaggcaagagacaccaattttgtggtggtccttgcgggaccttgtgttccaagtgattgggaagagaaagctcactcggtccgagggaccgtttgagagagggtaagggttgaaagagac

SEQ ID NO: 8459 - DNA, 259 bp, Zea mays
aatcacctgcagctgcatttttttggattgccatttttttgctcctgtacacctgcaaccctgcatggggtaggtatgccacattgaatgttgttcgtccccggtcggacttcagcctaagtcctcgcccctagggtttcgtctctgcttaacccgagggtggcgcttcaccgccgaggccggagcacctcccgtctctgggcgagaggggcaaccttcggcccgggacaagcaattcctcttcgagaacacacccccg

SEQ ID NO: 8460 - DNA, 222 bp, Zea mays
tcgtgaacggtgtcttcggcatcatgttcaagcagcttcagccgaagctgtttctttccgcaggaccttcggcgacgaagcatggtcccaacaagccacctcagagcactcgggcttcgcgcccactactggtcagaggttcgaaggttggcccctcggaagggttcaacggacgcctcaggccactcgggctccacgcccactactgatcaggggttcgta

SEQ ID NO: 8461 - DNA, 211 bp, Zea mays
tttttgagtcaatccttctgcaaaagattattgatgcacaaagaagtgataagggtatgagccatattcatgagaaaataaaagccactaaagcaaactgtttcataaaggatgatcaaggcattgtatggtttaataaccgcatagttgtgcccaagaatgataaagtccgccagcaaattttggatgaagctcatcttattcgctattc

SEQ ID NO: 8462 - DNA, 211 bp, Zea mays
ttcttgatgtttagaatgacatcagcctctcccaaatctttcatctcgaaattgctcgatagaagatttttaacttcctcaatcacattgagatttgatctaaagatcaagatgtcatcaacataaaggcacatcataacagactcacccccaccataccgataatatacacacgtgtcagattcatttacagcaaaaccacccgccgtaa

SEQ ID NO: 8463 - DNA, 194 bp, Zea mays
tcgttctttctatcaagaatttcgtatgtgatcttggagaagggacaaggggtgtttggaatgtccaatccaagctctaggtcagcaatgcaacaccagaccagctggaagaggacgtgagcgaaggcggggaaacaacggcctttccaagcgcgcgcgtcgagtgggccgatgtgggccaagtaggcatagtg

SEQ ID NO: 8464 - DNA, 257 bp, Zea mays
  unsure (1)..(257): unsure at all n locations
tttttatgtcatgcatttctttgcatgcaccaaaaacgcgtgaatgtcccactaaatcccgaacttcattcaggacaaaaatgcaaccatgcaatttcaccgcagtcttatctaccaccaccatccaatgcccagtggaatacagccgggaaaccacggctctcccgccagtnccataatccccttctacccaaaccaaaacattaccccatgtttctcggaccaccaaccaccatttctatctaggaccttcacag

SEQ ID NO: 8465 - DNA, 219 bp, Zea mays
tcttcctgtttatgcaaccataatgcgtatagtaaataatactctctctatatcaaaatagaattcatttcacttctttagtggattcatcatcatctagttgaatacaaacataaaaattaagagctaaaacaaatactattttaaaatggatagagtatattcgataagtaattgaaacattaatttaacaatctaaacaagactggtcgatagcgc

SEQ ID NO: 8466 - DNA, 208 bp, Zea mays
ttcttgctacaaagtagttgctcggaggcatggagaagaatacaaagacttggacgatgctgaatttgagaaagccgtcaaacagaatcagagaaagaaaatgaaggtaatggcggcatacattggacgagccatgtataatcatgtacaacatggcaaggacttaataatagctccgcaccactttaagtaagttatcgacatggtt

SEQ ID NO: 8467 - DNA, 220 bp, Zea mays
tgtgaagatttttcatcccaacatgggctagtcggtgatgccagagccaacccatattagtcttagcaattaagcaagtatcgagttcagctctattaaaatcaactaagtatagatgaccctataatacttccttaaatgctactgaatcatcacttcttctaaagacagtaacacctatatccgtaaaaagacaattgtagcccattttgcataattg

SEQ ID NO: 8468 - DNA, 209 bp, Zea mays
agcttgccaagcccttggacccggccggacttcaccggaggccccaaatcgacctcaccggacttcggtcttccgccgccgcgcgtggaccgagctatccagtgagtccccgcccaattccttgcgctcatatcttctctggcatcccgtggacctccctgacccatttgattgaactatctcgccgtgaccaggccggtctcctcgcc

SEQ ID NO: 8469 - DNA, 218 bp, Zea mays
ttatgacgattcgagagggtaacgtatataaagctgtatgtttgacgagctgacgcaagtgacagagacagtcacgtatggcagcagtacgttgacagtctatggatttaggtgttttatcgaataagcgggatgcgaggagccaaacaattacttgaacatggtcgatggcgaggtctgccgggagtgaatatcggcacacgacgcggcacgacaaa

SEQ ID NO: 8470 - DNA, 206 bp, Zea mays
agcttctaaagggagaacacgtgataggtttgactaacgtgcaattcgaaaaagatagaccttgtgcagcttgtcaagcaggtaaacaggtgggaggagcgcatcacagcaagaatgtgatgaccacttcaagacctctggagctgttgcatatggatctcttcggacccgtcgcctatctgagcataggaggaagtaagtatggt

SEQ ID NO: 8471 - DNA, 175 bp, Zea mays
ttgctctatttcgatgcaacaaaactgttgataacacaaccgagctcggcgccaagatctgtggcgccgagctcggtgccacgtcaacgccacggagtccgggttgtgccaacgcagcacgtacctcggagaccataacctttgcgccgacgcacgccaatggaaggtgtaagat

SEQ ID NO: 8472 - DNA, 198 bp, Zea mays
agcttgaaggactgcttcggcaggagagcttccgagcgtgatgactcgttcggtccacggagtcgctttatccgagcgcaagttacttatcgcagaaggtgatgagtgaggtatccgtatcccgaaggcgtaggagtccctcggctcggtcagccttggctgcttacgtgtacctcgtcgttccaggatccgctttca

SEQ ID NO: 8473 - DNA, 214 bp, Zea mays
tcttatgctttgtttcccctagaaggatgtaaccacctgatggttcgctacagtgccttatcaacacttctccaaacatattactcgcaacaataatggatcttttccaatatgggtctaaatgaacagcaataaaaacattgatctactttctaattgcttgttaacatcctaatataaaaaaaagcatcttcttactttactcgcaacaata

SEQ ID NO: 8474 - DNA, 218 bp, Zea mays
tgcttgaggaagttctcgcggtacccgcgaatgaagctcaagccgtgacctctatacgaccgactgaagaaaccaagagaatcaatcttgggttcgccgacgagcgcaaaactgctatcatcagttccagcctggatggcaaataggaaggcgcgctcgtccagtttttgcaagataaccgagacgtattcgcatggcaacctgcggatatgccggga

SEQ ID NO: 8475 - DNA, 201 bp, Zea mays
tggccgaacctcgggatatttccttgcgtctgtgtgctctgttctgtattgtatcctgactctctttctactcgcctttatatctgcacttcaatacttatctgtggtataagctttatttgaagtgcaggacattttgagacaggatcttctattccgctgcaacctacttgaggagtcttctcactccactgcgtacta

SEQ ID NO: 8476 - DNA, 220 bp, Zea mays
ttcttgtaaaggttcttcatccccacatgtgctaaacggcgatgccacagccagcccatgctagccttagcaattaagcatgcatctagaccggcctcctcttttgcaaaatcaactaaataaagtttgtcgtctagtacacccttaaaagctgatgaaccatcacttcttctaaagacagacacatctacatttgtgaataagcaattatatcccatgt

SEQ ID NO: 8477 - DNA, 225 bp, Zea mays
  unsure (1)..(225): unsure at all n locations
tctaaagggagaacatgttttaggtctaacaaatgtacatttcgaaaaagatagaccttgtgcagcttgtcaggcaggtaaacaggtgggaggagcgcatcacagcaagaatgtgatgaccacgtcaagacccctggagctactgcatatggacctcttcggacnngtcgcctatctaagcataggaggaagtaagtatggtctagttattgttgatgacttttc

SEQ ID NO: 8478 - DNA, 230 bp, Zea mays
  unsure (1)..(230): unsure at all n locations
atcttctgaactgggcgcatgaataaacaaaaggctaggggctagctggtaaaatatcctagactcagtgcgcagcacagggtggacggcgggtttattcatcaatactacgaggactcnttttgcaagcatgaagctcatgcgaaaaggggtatcnggtgagttctggggtcgctcccgaattagaatttccaatggctttcccgaaaattagaacttagaaaactact

SEQ ID NO: 8479 - DNA, 225 bp, Zea mays
tggctgacgacttgactgtcgctcccgcccgcctgccaccgccatcactgccggcccgtttttggccgcattgaccgtcgcgcctggctggcactgctgggtcgtacgcagggttgcctcgagtcgcggtactggttccgcagtcgaggaggcgtggcagtggtgcgagtggcggtgcagttgcttgcacgtagcgaccggcgcgccggttgcatgacgcgtggg

SEQ ID NO: 8480 - DNA, 177 bp, Zea mays
  unsure (1)..(177): unsure at all n locations
ggaaagccgttacagacacaacccatgctcttatgtgaggactacgagcaaggtgctgttgggctctcaattatccgaagaacaggagaaaaccttaataaggtttttgttcaacaacaaagatgtttttgcatggtcagccaatgatctttgcggnagttaacagggatgttattg

SEQ ID NO: 8481 - DNA, 226 bp, Zea mays
taattggattgtatctattttaagaccagatgacagattaatttcaaacaaagtggggtatgcttaggaacatggctatagtagtgttacaggaaggaggcaaataggctagggaagggatctaaacgagaatattgttcgtgagtcatgaagctccaatgatggaaaacccagattccattgactgggttagataggtcgcacgacgccgtaaacaaacgcagtt

SEQ ID NO: 8482 - DNA, 220 bp, Zea mays
tttttatagcagcatgtcaaggaacttaaaaaggagaaggcatccctccaagagtgtgtcgatgtagcagaaggcgaggaggccaacactcgtgaagcctaccgaaccctgaagatggattacgataagaagctaaagaagctcgcacccacgaagaaaatccaaaagaagaccaagagccaaggatgccagactaagcggaagaagaaagcccctccaa

SEQ ID NO: 8483 - DNA, 225 bp, Zea mays
tgctttacactatataacgccttggacaacctataagcatgattaggatatctagggtcttcaaacccgggtggttcctcaacatatactagttcatttatgaatccatttaaaaatgcactttttacatccatttgataaagttttatgtcatagcaggacgcatatgcaagaaggatacagatggcttcaagtcgaacaaccggtgcaaaagtctctccaaaa

SEQ ID NO: 8484 - DNA, 221 bp, Zea mays
ttttgcatgcatttttctgaaaccctatacttctagccatctcccggcagacagataattctttgttgtccgggaggcagtataaaaagtcatcttcgttcgtgccattgaatactaaggctcccttcggatacttcaattcccgggcatagtgattagcctcaaaaatctcttcttcagataatctttttccagaagcatgtcgtataatataattgagg

SEQ ID NO: 8485 - DNA, 214 bp, Zea mays
tttaatgtttttgcatcaaactgagttccattatcaactatgatggccttcggctcgccaaagcgacaaacaatattcttccaaaagaaattctggactgtggccaaagtacagaataggaagtaaaataaataaatattaaggcaaacaataggagttatattcatattgggactttattgtataattttaaatttgaagttcaaaataggaa

SEQ ID NO: 8486 - DNA, 225 bp, Zea mays
catttttggcgtgcattcttctgcttgccctgatcgaccttgacatacaaccattctgaattacagactgccggacatttgctacggaagctaattacaggaaactttgcggttttccggtatgcaaaattgtagcaaccgaagttttcatgaagcccatcttttctggcctttgtttgataatgcaattcatgaactcgacagaaactgtcagcaaaaggctcc

SEQ ID NO: 8487 - DNA, 218 bp, Zea mays
tgaagccatgtttagtagcataggccaataatatacgaattgactcaagcctagctacgggtgcataggtttcaccaaaatccaaaccttcgacttgcgaatatcccttggccacaagtcgggctttgttccttgtcaccacaccatgctcgtcttgcttgttgcggaacacccatttggttcctacaacattttgattaggatgtggaactaaatgc

SEQ ID NO: 8488 - DNA, 208 bp, Zea mays
ttcttgagtcggttcttctacaaaggattattgatgctcaaagaacagatgagggtatgaaatatattcatgagaaaatggaggccgacaaggctaattgttttatgaaagatgatcaaggagtaatacggttcaaagaccgcattgtagtgccaaaggatgctgaagtccgtcaacaaattctggacgaagcttgaaagggaattag

SEQ ID NO: 8489 - DNA, 221 bp, Zea mays
ttttcgccagtctgaacagttcgagcgagaaaagctagagcttaatgcaaaacttgaagccgaagctcaacaaaattcagatttgagaaaactattgacaagccttcaagaaaaatgtctggaatttagcaacaaatgcattcaacgcttaagaaagattttttactcagttggagccagcagtgaaaaattcaccccctcagctgaagatctaccgaaaa

SEQ ID NO: 8490 - DNA, 206 bp, Zea mays
agctttttcccttaaggatttcaaagaggcttaaggaccatccacctttggaataaaggcagcttatccttgttacaaggttaagctttaagctctttgacaattaaatcacttcatctagtttcaacaaggatgcattaaagcatgaatgaatttttgagaagttaaactagatatgaagtagggatatgcatggacatgctttc

SEQ ID NO: 8491 - DNA, 195 bp, Zea mays
ttcaaatcttttcaagtttcataattgtgaccagtgattagtgacttgagacagtgtgattttgtgtcttttcatattgctcctgttgcttggcttttaatcgtgctttcttcttctcattctaaacttttcaagagttctgtaaagcttgtaagagataattaattgtgtggtgacccttgcgggtcttattga

SEQ ID NO: 8492 - DNA, 210 bp, Zea mays
  unsure (1)..(210): unsure at all n locations
atcttttacangaagaagaaggagccttcggttgccgagaagcccgctgaaccaaaaaagcgaaggattattactgtcattgaggctattgaaggaacaccgtcgccggcctcaacgccgaaaactgcagcagccgaagttgctcctgccgaagcttgtacttccgaagctgcagcagccgaagccacaaatttggaaaacacacttact

SEQ ID NO: 8493 - DNA, 220 bp, Zea mays
ttgaaagaaaatattgaatatatcatccgtcatgcttcgagaaaaaagctctctaaagaagaaaaacgagaagctcaacactatgcctagaagctgaaatatccaaagggggcattagtattcaacgacagcggagaagaggatttcttgtattgtctcccagacagcaaggagatttctgtctgccgggagatgagcagaagcttcgaattcccaacat

SEQ ID NO: 8494 - DNA, 215 bp, Zea mays
ttatgctttcttgtgaagcaatacaaggtattagaaggggagaaggctgctttggctgatcagccgaagcccatgcttttatgtgaagatatagcagagcagaaggtattgctggggtctcaattgtctgaggagcaggagaaaaccttaacaaggtttttgtttaacactaaagatgtcttcgcatggtcggccaatgatctctgtggtgtgaa

SEQ ID NO: 8495 - DNA, 186 bp, Zea mays
ttaagggtaaggctcccatggttcaggataacgagggctatattttatatcctgctggttatcccgaacataagattaggagaattcattctaggaagtctcactctggctctcatcatgcttttatgtataagagtgaggcatctagctctagacaatcaacccatgttaaattgcctaaaaaga

SEQ ID NO: 8496 - DNA, 150 bp, Zea mays
agcttgaaggaactgcttacgctggaaagcagtccagcgtgcagactctctcggtccacggaggtaccctttatccgagcgcaatttacttatccaacaaagagatgagcgacggatccatacccccagagctggaatcctctgtcgtca

SEQ ID NO: 8497 - DNA, 219 bp, Zea mays
  unsure (1)..(219): unsure at all n locations
tcttacgcattggtncctgtataaagatgctgccaccggatggtccgctacactgccttatgcactcttatccatacatattactctgaacactaatggaccttttccaatatgggtctaaaacagcagtcaataaatacatagatctactttctaattgattgttaaaagtcctaatataaaccaaaacattttcttactttactcgcaacaaatatg

SEQ ID NO: 8498 - DNA, 220 bp, Zea mays
agcttctaaagggatgaacatgtgataggtctaacgaatgtacatttcgaaaaagatagaccttgtgcagcttgtcaggcaggtaaacaggtgggaggagcgcatcacagcaagaatgtgatgaccacgtcaagacccctggagctgctgcatatggacctcttcggacctgtcgcctatctgagcataggaggaagtaagtatggtttagttattgttg

SEQ ID NO: 8499 - DNA, 226 bp, Zea mays
taaccttgtaacgaggattttctgcctttgttccaaaggtggatggtccttaagcctctttgaaatccttaagggtaaatgcttaagatgtttctaacatgctttcataagtgcataaactgtcatgagcatcacacttatactatgacacagtgcacttcacattctgtatgatatagatatgttctctttaacctaattctgtgcaattggcatttaaggccaa

SEQ ID NO: 8500 - DNA, 134 bp, Zea mays
agcttgcagttgcttgtcactacagttgacggcggcctcctttagatgttcatactgctgcatcgactttataaatagattcgaatagcccaagaagaattctccacgttcgtggaaaggggcactgggcgctg

SEQ ID NO: 8501 - DNA, 226 bp, Zea mays
taaggatactattcaacttttttaagatgaagttgataagaggccaaggtatgaaaacttcctctccttcagttgttttagtattctatccttagtgggatgtaccatagtataggttaaaatccttgcaatataaaatgttcaatagtgcatataactttgacatcaactatatgtgtgcactaatttaagggaatttagtctatcattttgggtttcaataatg

SEQ ID NO: 8502 - DNA, 241 bp, Zea mays
  unsure (1)..(241): unsure at all n locations
ttttttttcccncttttaatttagggaaatgccccattcaatgcgcgtgtgctatcttttctatcatcctctttataagcactcaatgttattcagggcctcgataagtctgattgtcacatactctatcggactttgacttgtatagtaatgggtttgattgcttattattatgcagccataactttgaaaacatcctgagcgcatgattttgtgttctttatcccaacacttgctccac

SEQ ID NO: 8503 - DNA, 226 bp, Zea mays
  unsure (1)..(226): unsure at all n locations
acactctcgaaaagnctttctatatttttcgaagagttgaagctgccttctagggattttctgtcaaaaatatccctcgaggacaaaatgaccatgctgatttgctagctaagtcagcagcacaggggctgcccttaccttcggatgtgttctttgaaacaataaaagcaccttcggtcgaacttcttgaaagagcagtcctcaatatatctcctgtctatagcga

SEQ ID NO: 8504 - DNA, 216 bp, Zea mays
atcttcctggacactatcaacacagcatacaacaccttctccaattctgtatagttcttctttgataaactctaaacttcagagacgaagtatactgggacatgctttttgacttgtccttcaagtttctcttgtacaagcgtcgcacttactacagagtgtgaagctgccacatacaatagcaatggagcccctagcactggtggagttaatgtt

SEQ ID NO: 8505 - DNA, 227 bp, Zea mays
cttatgtcccattttctaactatggtgctactgaacgtccgcttcggcagaaagaagagcttcggagagaagaaaaaagtaaaaagtttctgactccccaaacttaaaatcaaatggcgagaattcgatctactgccaaagttgtacgtgagggagacgaagccgaaggttcaaacactgtgcccatcttcgaagcgatgcagcgctccggtctagtgactgcggaa

SEQ ID NO: 8506 - DNA, 208 bp, Zea mays
cccacatggtcgctaagccgggcgatgcccacagcccacgcccatgcctagccttaactattaagcatgcatctagaccggcctcttcttttgcaaaatcaactaaataaagtttgccgcctaatacacccttaaaagctagtgaaccatcacttcttctaaagacagacacatctacatttgtaaatagacagttataccccatatg

SEQ ID NO: 8507 - DNA, 208 bp, Zea mays
ttcttaaagccatggtaagtagcataggctaataatattcgaattgactcaagcctagctacgggtgcataggtttcaccgaaatccaaaccttcgacttgtgaataccctttggccacgagtcgagctttgttccttgtcaccacaccatgctcatcttgcttgttgcggaagacccatttggttcctacaacattttggttaggac

SEQ ID NO: 8508 - DNA, 203 bp, Zea mays
acaggggcgcgaagatcgaatccgctgggatccgtggttgacgccagcggatcggatccgcattacataaaccaacgcaacacgtactgggggtctgaaataattgcaagcgcggcgtggagaaaacgtggttatctttttatgttaatctggttatggagaaaatcgtggagtagaaatctaaaaatactagagctttttat

SEQ ID NO: 8509 - DNA, 210 bp, Zea mays
ttctttaatgttcaaaatcaagaacttcaagtgcaacttgaaaattgcaagaacatcaatgcctcatctttagtatttgaatctaagtctagctcaaatgataattcttgcaaacattgtgccaaatatcatgtttcttgttgtctaactaaccatgcaaggaagaatagcccacaggtgaaggtcaaagaaattttgaaaagatgctct

SEQ ID NO: 8510 - DNA, 219 bp, Zea mays
  unsure (1)..(219): unsure at all n locations
tgtgaagatttttcatcccaacatgggctagtcggcggtgccatagccaacccatgttagtcttagcaattaagcaagtgtcgagttcagctttatcaaaatctaccaagtatagctgaccctctaacactcccttaaatgctattgaatcatcacttnttctaaagacagtgacacctacatcagtaaatagatagttgtagcccattttgcataatt

SEQ ID NO: 8511 - DNA, 209 bp, Zea mays
agcttcttctcgtcgtcgatgagcgacgccaatgcgagcgccttctgctagtggtgtttgttcaaggtttccaagtaacaaacatggattcatccttggtgttggtttatgaaaatgactcacaagttagattcatagaaaaaatattatgcaaaataaatgccacacatgcaaaaaaggaatttaatttgaaaacattattcaaacaa

SEQ ID NO: 8512 - DNA, 219 bp, Zea mays
tgcacctgcgctcttcagaatgtggatttagtcattgtctgtgtatccttcttatttactcaaaattctcataattataggcaaaagctgttcgtctttctccagctgaagaaatacggaccattatggaccgaagtgtcagaggtgttcttgctacccattctcaggtacctaaactatgaaacaacaaatgtcattatatttgcattttatattgga

SEQ ID NO: 8513 - DNA, 208 bp, Zea mays
atctttaccaaatggacgtgaagagtgccttcctcaacggaccgatcaaggaggaggtctatgttgagcaacctcccggctttgaagatagtaagtaccctaaccatgtctataggctctctaaggcgctttatgggctcaagcaagccccaagagcatggtatgaatgccttaaagatttccttattgctaatggcttcaaagtcgg

SEQ ID NO: 8514 - DNA, 218 bp, Zea mays
  unsure (1)..(218): unsure at all n locations
tcttctggactagcgccacgcttactgctgagtgcgaagctgccacatataacaacagaggagcccctggcgttggcggagttaatgttgtgagatctatcaagtattgcttcaactcttcgaaggctttttgttgacttgggccccattgaaagacttcggntgacttcagcacctcgaaaaatggtaagtttctttctgctgatctggatataaat

SEQ ID NO: 8515 - DNA, 204 bp, Zea mays
atcaaaaagaccagcaaatctcaatgagcaagagctaaaaatttttagtgggccgaagcaaaaggcaagcgtgtgtaccaaatgaattcacgatgggttcttatttatacgcctagggcgttgaaagttaaaaggccccgcttgtcagtgaacgttgctattctagcaaagggaaggtgttttttcggaccttcggctcaaggg

SEQ ID NO: 8516 - DNA, 218 bp, Zea mays
acgaccgcctggcgcttctgtgcaactccctggcgatccttgtccatcactgcaaacacaacagcagcaatattccgcccgtaaggaaagactttccaagcacgaaccatgcgagatgtaaaaaagtcttcgccggccgcgcgggggacaggaacattcttaggccaccaacccccggtaacccacagcatccgcgccgaagactcccagagctcggg

SEQ ID NO: 8517 - DNA, 212 bp, Zea mays
tttgctttcatcagaatcgccaagaacaatcagttaggaggaggtcagttccagaggcagaatcagcaggcacctcgtcttcctgccctagcaaaccagcagaacagtcaggcagcaccagctcaggttgaaatagagcatgtttccactgcggagagaaggccactgggtgatgcaatgcccgaagaaggcagcccagcagcagtcaggtc

SEQ ID NO: 8518 - DNA, 215 bp, Zea mays
tatgttttatcccatcctctttcaccaaaaggtgctctatttcatccttaatgcacttaacttggttgaagtcccctgtcttcctctcacaggcaccaaccatcctatatatgtcctctccttcgtactcacacgttggtaaagatactcgtactctctacccttcgccgcacttacaagttacaactcgcttttttgcgatcttctttgctact

SEQ ID NO: 8519 - DNA, 204 bp, Zea mays
agcttgctggttaaaggcccattaaggcccaacaactcatagacgcacagaacgtccgtagaacgggtaaaacgtccgtagaacgcgcgttccgacgtttaaacgtcgcttaaacgtccaaaacggacgttctatgcagtttttttaaaacgtacggacactttaactcttaatcacgttttagcgcttaaacgacgcttaatc

SEQ ID NO: 8520 - DNA, 217 bp, Zea mays
  unsure (1)..(217): unsure at all n locations
tcttcggctttatctatattgnggattgcttttgagtctgtccaatttccttcaacctttctggcagcttcctgacttccatgaatagcaataggcccttgatccaaaggtatcttgatgcatagatatactggatgaagaattgcttcgaatgcattgagtgttnnacgaccaatgattgcattgtaggggtattccatgtcaacaatatcaaaca

SEQ ID NO: 8521 - DNA, 184 bp, Zea mays
agcttcttcaccatgagatcacggttatcttgagaaggtcgagcagtgcatttcccttttagttgtgtcaagctccttattagcctcccattttcttctttgagcttgaatgaacatcgtgtcctgcaaatcactcaaagaaattctgcacgacacaagctacacaggaagagtcaattaaaca

SEQ ID NO: 8522 - DNA, 226 bp, Zea mays
  unsure (1)..(226): unsure at all n locations
tctaggtcgactcgtgtatttttaaaaaaaaaaatgaaacgcgtccagctgaatggagccaagctgatattattacgagtcctgctctggtaaaccactaccccattctaaaatgcatggaccagtagagaaccaacgtgctcgtcgctatcgcccgcgcggttaagtttaccaaccaacaacttgggctantntaggtgcaaatggcatgcatgtatgcatgcat

SEQ ID NO: 8523 - DNA, 217 bp, Zea mays
  unsure (1)..(217): unsure at all n locations
agcttcggggagttctaagaccgaaaaacaccctccctgagctcgntgccgacaaacgattcagtttcccagcgcgtatcggccccaccttgtagagttactgtttgtctctgcggtccaccacgcagcgagtgcaagcgggtgtccgcctggtgtaaaaatcctggcgcttcgccttcttacctgcagtactatataaacagacgagtaggcgcga

SEQ ID NO: 8524 - DNA, 226 bp, Zea mays
cactttagcttcggtatctctacggaatatatgaaccgacttaaagatgaaaagccaaattggaccttgaagaattactatagagttattgataaatgtaaggggcatcaatgtaattttacaagggctccgtcctgtgcctataaataggttgaacagtacttcccgtactgtttcacgctgacttggcatgcgctttttcgcatcacgtttgttaccttttatt

SEQ ID NO: 8525 - DNA, 233 bp, Zea mays
cctgccacgcatgcaattcttgccttcctatgtaccatctgtccgcaagggaatctcaaactggaaaggctactatgtaactggcaccttccaggttgttagtggggttcgtgctgacaaagaaaaaaaatttagcagcttgcggagacaaaaacaaggagcatggaacaggaagtaatcaagctgcataaatgcttacaggacaaggatgaacaactgcattcattcacaag

SEQ ID NO: 8526 - DNA, 244 bp, Zea mays
  unsure (1)..(244): unsure at all n locations
actatanaatactccagtcttattacacacgactgctatttatggtacccgcgaacgctttctctaaggtgtcaccaaattccaagagaaggtcatcaagactggccaatgacatgtcctcggggtcggactggatcctgggagggttctcttcctgctgctcaaacagacattcctggattatggacttcttgcggatcaatgatggcgtggcaaggttattccatgtcttgaatataatcca

SEQ ID NO: 8527 - DNA, 207 bp, Zea mays
atcttgtgaagattttttatcccaacatgggctagtcgacgatgccagagccaacccatattagtcttagcaattaagcaagtatcgagttaagctctattaaaatcaactaagtatacctgacccctctaatactcccttaaatgctactgaacattacttttctaagacagaacacctatatctggaaaagacagtgtaccattt

SEQ ID NO: 8528 - DNA, 224 bp, Zea mays
  unsure (1)..(224): unsure at all n locations
tgaagccatggtaagtagtttttgctaataatatacgaattgactcaagcctagctacaggtgcataggtttcaccgaagaccaaaccttcgacttgggagtatccggaggacacaaatcgggctttgttcctagtcactacaccatgctcgtcttgcttgttgnggaagaaccactcggctcctacaacattttgattaggacgtggaaccaaatgccatacc

SEQ ID NO: 8529 - DNA, 143 bp, Zea mays
ttcttgaataggctgttattagttgctagtgtggtatctgattacggttgaacctaaacaaacatgatctaatgttatcagttacatattacattacaaatatgtgaactaaacggaaccttaggttttaggttaaatcaaaa

SEQ ID NO: 8530 - DNA, 246 bp, Zea mays
ccttctatagacacttaagcttctaaagggtgtaacacgtttttaggtctgactaacgtgcaattcgaaaaagatagaccttgtgcacccttgtcaagcatgtaaacaagtgggaggagcgcatcacagcaagaatgtgatgaccacttcaagacccctggagctgctgcatatggacctcttcggacctgtcgcttatctgagcataggagggagtaagtatggtctagttattgttgatgactt

SEQ ID NO: 8531 - DNA, 207 bp, Zea mays
tttttgtgaaggttcttcatccccacatgtgctaagcggcgatgccacagccagcccatgctagtcttagctattaagcatgcatctagaccggcctcttcttttgcaaaatcaactaaataaagtttgccgtctaatacacccttaaaagctagtgaaccatcacttcttctaaagacagacacatctacatttgtaaatagacag

SEQ ID NO: 8532 - DNA, 211 bp, Zea mays
  unsure (1)..(211): unsure at all n locations
ttatactatgtatctgcccaacactcaacacaccggtcagtcctttaattaggttgtcatccaaaccaccaaaacgcacaagagagctttcacttctccaccttaatagcggcatccttcggaagaggggggcaggagaccttgatgccacaaagcccctggcaaagcactcaccggtgaggtttnttagaaaagaggagaggaagaaagt

SEQ ID NO: 8533 - DNA, 210 bp, Zea mays
ttctttgagggagtgaatcatgtggatcttgatactgaagtgttgtggttccacaccactttgatcaattcatctggccactttccctttggcagattcaaaagtgatctcatgattcctaataagataatgtcattttctctttcaactagcccattggactctcgatgcctgacagatgtgacgtgaatgtttgtaccaacttggttg

SEQ ID NO: 8534 - DNA, 219 bp, Zea mays
ttctgtaccttttttatagccccatgatccagctacaactttgttatgggaatcatacccaaacttgcactagatcttgcttcaatctgggttcaaagattgacccaccccactgtcagaccaagtttcagtcattagtcagcctgacagtctgattttaagtgggattatctccaaatattccttaacaactatgctcacaaccttaagaaaattgtt

SEQ ID NO: 8535 - DNA, 209 bp, Zea mays
catcttgccatctaatacacccttaaaggctagtgaaccatcacttcttctaaagacagacacatctacatttgtaaaaagacaattatataccatattgcatagttgactaacagatagcaaattgtaaccaagagactcaactaaaaacacattggagatagagtgctcattagaaattgcaattttacctaacccttttaccttgc

SEQ ID NO: 8536 - DNA, 218 bp, Zea mays
taacattggttttacctaacggtacattgtcatattgttgtttctgtaagattaacattggtatacctaatgatacattgttgtttccctttttgatgtggatcatttagagttcatggcaccgcttaagtggcctggactcgtgatggactattttgtgaatgagtgttccaagatggttgaggatggttaatcgccagcgaatgaagggttttttt

SEQ ID NO: 8537 - DNA, 216 bp, Zea mays
tgaggagcttttttgagccagggaaaacaccattgaagttctcgaggatcagctgataaacactcaacaacaactcgaggaggctaaccagcacttggatatgcaccatcaggagattcaggacatggaggccaacaaggatgttgacatcgagggaggagtggagccggagcctgcatctagcctggaaactggtggctcacggagacccccttc

SEQ ID NO: 8538 - DNA, 218 bp, Zea mays
ttcttcatcacggtgaaacggtagacaatgtggcttcgacacaatgaaaaggaagtacaacgaagcacgcttcatcaagcaggctttgtcacgacgaagcaatgagacaatgcaaggagaaggtgttgctcaggattattaaatacaaatggcgatgttacccttgtaacattttgtaaactttgtatgtaatcgttgtgggcataaatgtaatagcg

SEQ ID NO: 8539 - DNA, 212 bp, Zea mays
tttgcattcttaagtaaaatgaccataaaatattactaagtatggatctaagtggcattcctacccttgaaataccaaaaaccctaataaggaccatggaaaaccctaaacctaaaccctagggggctaagtgcaaaattagtccacttttggactaaagtgcaaaaaaccatgatgttaaagtatcttaagtcatatggttcccaatcatg

SEQ ID NO: 8540 - DNA, 188 bp, Zea mays
tattcttgcttgttttttgacacctaggcaatggtgtggtgctgtggaggggttcagtgcccgtgacctcagcctgaatcgccggtaaccaccgtcaaaaaaaaacccacccacctagggaggtacattccttctttgataatccaattacattcctaagagtttcctttatatactatgctgccttt

SEQ ID NO: 8541 - DNA, 203 bp, Zea mays
ttctttgctaacaaagaagacaaacatcaacaatttacaccttatatggtccgaaagtaggcgtttgacttcaaaaacagcagataaagacatgaagatacttgaacacctccagccacatcatgaactcagtgagctgtcagtcaaggcctttgcaggcatatactttccaaattggttaagtaaactaactcaattgcaaa

SEQ ID NO: 8542 - DNA, 215 bp, Zea mays
tctaatttggataacacgtgataggtctaactaatgttcaattcaaaaaagatagaccttgtgcagcttgtcaagcagggaaacaggtgggaggctctcatcacaccaaaaatgtgatgacgacatcaagacccttggagatgctgcatatggacctttttggacccgtcgcctatctgagcataggaggaagtacccctggctcacccattgtt

SEQ ID NO: 8543 - DNA, 163 bp, Zea mays
agcttcgtcgcatgaaagacaattgccttggaggaaagatattatttcagttctccagtcctcactgtgtactggagaaatagtaagcattgctctttcctgactaaccgaaggtttatgtcaaaaaacttcaggtgggaccctgaccgtattggtcaattgc

SEQ ID NO: 8544 - DNA, 214 bp, Zea mays
  unsure (1)..(214): unsure at all n locations
tgagaagatatttccacctttcttcttcaatctgatgcagcatttgattcttcatctctcgtatgaggcaagaatgggggcgtgcagggacattggtgctatctaatcgagagatgtctaaagactattcgaaagaaatgtagaaataaatgcaaaatcgaggcttccattgcagaggcatacattctagaggaggtgtcaaacttnacaacaa

SEQ ID NO: 8545 - DNA, 150 bp, Zea mays
cgcatgcccaagcaggcaaagaaagttggagctcattatccacaaaagaacatcatgacaacggatagacccactcgagctgcggcacatggacctatttggcccgatagctcacataagcatcggcgagagcaagcatcgcctaccaac

SEQ ID NO: 8546 - DNA, 233 bp, Zea mays
  unsure (1)..(233): unsure at all n locations
cactctatgnaacactcaagcttgtgagccattcaagtactttttggaaaaggctgcttcgactgatcagccgaagcacatgctcttatgtgacgatatagcagagcagagggtgctattgggatctcaattgtctgaggagcaagagaaaaccctaataaggtttctgttcaacaacaaagatatcttacgctggtcagttaatgatctctgtggtgtccaacagggatgtt

SEQ ID NO: 8547 - DNA, 201 bp, Zea mays
atcttgaacttggcttgcctgcaatgacgaaggattagcatgcagatagccttgcctacaacagcttgaaatttttatactttggattgccattttttaattttagttatggtaaactatttttgtggtaattcttatcgttattatttgctcactctttgtttgcccaggggcttcaattctaagccaagggcccttgaa

SEQ ID NO: 8548 - DNA, 222 bp, Zea mays
tcggggcaacagcaaggcttcttttgaccaccagccccaagaggcataggcgccaggggcctcggcggaagattcggagatcaaccaagaagaatcaggatgtgcacaatgcttgttttgcggtgagaacaaaggccataccaccaggatgtgccatgttaccatccaaaagcaaaaggaaatagccgaagccgtagcacaccacgcttagccgaagcaggt

SEQ ID NO: 8549 - DNA, 235 bp, Zea mays
ctggcaggccatgccaagtcttatgaaagcatttcttcatcccaacatggcgctagtccggccgaatgcccagagccaaccccatattaatccttagcaattaagcaagtgttgagttcagctctatcaaaatccaccaagtatagctgaccctctaacactcccttaaatgctactgaatcatcacttcttctaaagacgtacacctacatcataaatagacagtgtacccatt

SEQ ID NO: 8550 - DNA, 223 bp, Zea mays
ttgggttgaaatgattaattttgtgaccgggtgggtgacttgcacgagaaaggagtctcggtgtagtgtctccgtctgagtcgattaagggccgtctcgatgtaagcctgctgaccgaggaccctttaactggtcacatgcctcgtcatgggtaagctttgcctcgggtggactaaggccagaataagataacacgaaatgggcccggagcggtggcgagagt

SEQ ID NO: 8551 - DNA, 208 bp, Zea mays
ttcttgagtcaattcttctgcaaaagattattgatgcacaaagaagtgataagggtatgagcaatattcatgagaaaataaaagccagtaaagcaaactgtttcagaaaggatgatcaaggcattgtatggtttaataaccgcatagttgtgcccaagaatgataaagtccgccagcaaattttggatgaagctcatcttagtcgcta

SEQ ID NO: 8552 - DNA, 231 bp, Zea mays
  unsure (1)..(231): unsure at all n locations
agcgacactatacaaaactcattcttgccaatacttgccaaagcaacagcatatgccaacacagcaactgcagaccataccagtaacctggcctttcgcatgctggggactggatatgattggacctttcaagaaagctcaagggggatatactcatgtattggtggcgactgacaaatttactaaatggatagaattnaaggntattggttntttaaaatttggtaaagc

SEQ ID NO: 8553 - DNA, 209 bp, Zea mays
tttttaaacatttatgagggatcgtcctacttataacatcgcacgcaaggacatatatgcaatataaacaagtagaacaataagaatggcattcacacaacagttgtgattcggtatggcttgctgtcacatggtgatccccatctccaataatctgtccatcacgatgatctccatctccatgatataggtatgccatcctccaggtg

SEQ ID NO: 8554 - DNA, 210 bp, Zea mays
tgaagccattttttttagcataggcaagtaaaatgcgaattgattctatccaagctacgggtgcataggtttcaccgaaatccaaaccttcgacttgtgaataccccttggccacaagtcgggctttgttccttgtcaccacaccatgctcatcttgcttgttgcggaagacccacttggttcctacaacattttgattaggaacgtgga

SEQ ID NO: 8555 - DNA, 209 bp, Zea mays
ttcttgttatctctgatcctagaggacttagcatcgtgaaaggcaagagttcagtcattacctctagaatttctgccacgtcaatagaagttgccgaaggggtctctgccgaatgcttcgacggagatggtctttcttcttctccatggctggatgacataatcttccttttctttgatgccgaaggttctggtgtcaactttggtttc

SEQ ID NO: 8556 - DNA, 199 bp, Zea mays
  unsure (1)..(199): unsure at all n locations
ttgctcagcatcatactctgcgaacaaataaccttcgttagaaaacatctatgttattaaaaaaacaataaaagttagagaaaagttgtttaccttgaaattggaataaaataaactaccgacaatgtgttgtcgtcggtagcggctgatatntgtttngagcttcggaaaaccgatactctttgatagagtaccgata

SEQ ID NO: 8557 - DNA, 105 bp, Zea mays
tttttcgcagtcttgggtgacaatgacatacaggtagggggtcctgatctggttgtggacagtacagaccattccgctgcgtgaccaccgacacgtgacagccac

SEQ ID NO: 8558 - DNA, 217 bp, Zea mays
tcgagtttagttttgatatttttgcttcagcttccgccagtaagccttcggctgcctggagctcaaagttctttttctcaaaagcatctgattgctcctttattttgttttccaaatttccgattataatttcatgctttttatcttcaagatcttgctgcatttgcaaggctttgctcaataacatactctacacaagcacaaccttcgtcagaca

SEQ ID NO: 8559 - DNA, 206 bp, Zea mays
ttcttgtagctaaattagacattaacatattcttggtcctcggagccagaagagccatatgtcttgaccactagactactagtgatgataatttgtgatagaaatatgaagatcttgtagagacctgttgtatcctctctacccctgatgatttcttcgtatgagagcagtactatctgttgttgaagacggatcctaggcggatg

SEQ ID NO: 8560 - DNA, 219 bp, Zea mays
tgcacacatattcttatttgaatacctttgatcatatctcttctatatgctatgactaatgtgttttcaagtctatttcaaaccaagtcataggtatattgaaagggaattggagtcttcggcgaagacaaaggcttccactccgtaactcatgcttcgccatcactccgagcaactctctattccttgggagaaatgagcatcaaaaaaaaaggactc

SEQ ID NO: 8561 - DNA, 200 bp, Zea mays
ttcttctaaagggagaacacgtgataggtctaactaatgttcaattcgaaaaagatagaccttgtgcagcttatcaagcagggaaacaggtgggaggctctcatcacaccaaaaatgtgatgacgacatcaagacccttggaatgctgcatatggacctttttggacccgtccctatctgagcataggaggaagtaattg

SEQ ID NO: 8562 - DNA, 215 bp, Zea mays
  unsure (1)..(215): unsure at all n locations
tcccccagtgcttacaggctcacaacgccaaacgacgaggacctagagcactcctggaacgtcgacaaccttcgcaaattttttgtttgacccatttagggccgatttcgcccttgtaattcgccgcaaacaatcttgtaccggnccgcactcttttcctcccggggggtgaggtttttaacgaggcggagccatgtaatatatgtgagaaaaat

SEQ ID NO: 8563 - DNA, 210 bp, Zea mays
tttgcattctttcaaggttgggaaagccgatctgactctttttactaagacatgtgatggtgatttgtttgtgtgccaaatttatgtcgatgacataatatttggttctactaaccaaaagtcttgtgaagagtttagcagggtgatgacacagaaattcgagatgtcgatgatgggcgagttgaactacttccttgggtttcaagtgaa

SEQ ID NO: 8564 - DNA, 205 bp, Zea mays
cggttttcatctcggtcatgagtttgtcccccgcattgaaagaatactccctctatgtatgtcatcgctcttccatgcctatgttcattagggatgggacgtgataatccctattttgttagcgtttggttcatgtcaaaataggatagaaacacccttgctaaagatacttggtcacctccattgttatatgcattataatttt

SEQ ID NO: 8565 - DNA, 203 bp, Zea mays
tgctttaccaaatggacgtgaagagtgccttcctcaatggaccaatcaaggaagaggtctatgttgagcaacctcccggctttgaagatagtgagtaccctaaccatgtctataaactctctaaggcgctttatgggctcaagcaagccccaagagcatggtatgaatgccttagagattttcttatcactaatggcttcaaa

SEQ ID NO: 8566 - DNA, 213 bp, Zea mays
tgccttgatttccatcaccaaatataattgaatcttgggaatccttattcttgacgtaagaggtgaacatcttcttctcccccgtcatatggtttgtgcatccgctgtcgataatccagcttgaacccccggatgcataaacctgcaaggcaaatttaggcttgggtcttaggtacccaactcatgttgggtcctacaaggttagtgcaaata

SEQ ID NO: 8567 - DNA, 426 bp, Zea mays
ctcactgtaaatatggttagtttcttttttagtagttgataaaatttattagcagctactaagtataagtagataccatcccaatcaaataatagatcacacttaataataagtcccacaatgcaatgcaatgcaaatgacagtttaagtttaattccataggttactcatgtgagggtccgagctgctcatgaccatgagcccagctgatatatcagctttacacactatagaggtggcacatctttacccataagtcgcgtataagttcagagatctttgcacccaaccatgactttgccgaccagcacaataccacactactaacgtgtggtggcatagggacgctaccaggtctttactaagctccacttacatgagaaaccccgctaccgtgtctggtggggactcgttctacatgctatg

SEQ ID NO: 8568 - DNA, 403 bp, Zea mays
  unsure (1)..(403): unsure at all n locations
gactctgcaacccagatttgtctaggtctactctcgnttggtggacctaagaatgtaactttgacctttccatttgcaacctttcttataacataatgagcattgaaagcaaatggtcttgaatgcttaagccaaggagttggtggtttggctttgcaattgtgggcaaaatgaccttcatttccacactcaaagcatttgataagcctttgagtctgctttggcttgtattgagtggtagcttttttttgcacaaaaacatttgatccaataccactcttgttgtctttcatgacagtggtcataagcagcttattctggaggtattgacccttgttgaacttttgcacacttgttgcaagatgttcattttcactttttagtttcttgacctcatttttaa

SEQ ID NO: 8569 - DNA, 390 bp, Zea mays
  unsure (1)..(390): unsure at all n locations
atggccggggggcaacattatttggtcggatgtcgccccccggagatgcgccgtgggcggaagaccgagtatctcgagatacccctcaaggacagcattaaaggttggcgtctggagtggtttataattgataattatggaaattctctccctccccgctcatgaagacagccagacgttcgtactctgagttggactgagtctcccacggatcaagaagtggccgaggcaggcgtgttgcttactgaagtcggattactgaaagagagaggtctgactgccgaagctgtggtcacagatttcgttttcaaaaacattcaccctcttaaaaacanggcctatccggcatatctttaccnatggctggccgactcaacccgagttaccaat

SEQ ID NO: 8570 - DNA, 447 bp, Zea mays
  unsure (1)..(447): unsure at all n locations
agctttacctactagcatattattcgctttctttgtgctgcatagngattctttgcgggaaacaccgcacgctgtagtacttaaggcataaggacatgcatgtgaagggcgtgaccttcaaagcactcgcctaagtccgccgaagcaacctgccaacatctcgccatctttattagttatgcagcctccgacacactaatcacgttaggttagctcttgtatatgatgcccatgtatatatattccggtattacctcaatgcatggagtaatttggcgtagaatcttaattaaattccacacttaaacactcaagcatacgtggatatctataaccgggtggaccctttcatcttccctcctcgctcgaggatttgtgcatcaacgttacgcagactgaaagccacgccagcatgctctgccggcctggccgcgaccgtgtacatgc

SEQ ID NO: 8571 - DNA, 355 bp, Zea mays
  unsure (1)..(355): unsure at all n locations
aagatccgcttgagagggtgtatatttttcctgatcctcccaacactgccgagtcaaagctaaataaataagtagtagcgatctgtaatatgagtagaaaggctacaagcacaagaaggactattagtccgctaacgagtgtttgaagctttcagatcatctatctgtctttgaaaaaagagggttccactgtgacaaagaagaaatctgctcatgaacagagcaccacacgatcttagctgagtcgacaccaagtacagaatcctctacagatgcaaaagtcagcaaagaaaacatccaccaacataagtatggtaaaacanggatgcacataccttatngtangaaatgaaca

SEQ ID NO: 8572 - DNA, 446 bp, Zea mays
  unsure (1)..(446): unsure at all n locations
agcttgaagatctttaccattctcatgattgttacttttgttggtaccgctgagactctatatagcatctattcttcatcaaaagctgggtcggcgctgcaggttactacgtatatcgcaagctggagaatgccttgttcgtgtttagattgctctttatcaaccaactttaatgtgcttatatatttagcttctactaacaacgcgatgtgatctatcttgtcttaatgatggaaccccatatgatatcttccatattatctaacaaactactctacatcacatccatgtgggaagccacgggccacggcaatctgcctgctgtcctttcatgtctgaacatcggctttcgagttgtntttctattgcttgtatttatttgcacctatcatgctctcctatcaatcagtcgcagagcacgtgctgcctgttcctaagcggacgga

SEQ ID NO: 8573 - DNA, 418 bp, Zea mays
ttaccttaccagatccgcagaccatcggtgatggatattacatatgagatgcagatccacagatctagtacaccggagtccatagcagaggggggaagcgctatggaatggggatacaagattctgttaccgacgacgtgccgaggacggggcatccaggattccatgaagcacgacgcgcgacggccgacgcctcgacgtcgacggaactgggtgcgaggcggcggtcgacggggaaccgagggaaccgggtgcgagcaccgcgagggaaccgacggccggcgagccgagcaccacgagggaaccgacgggcggcgaggcgagcacccacgaaggaaccgacgggcgacgaggcgagcacccactagggaaccgacggggcgaagcggcgactgggcgagggcggagcggacatcgg

SEQ ID NO: 8574 - DNA, 444 bp, Zea mays
  unsure (1)..(444): unsure at all n locations
agcttggatgaggtgtcatcatcattattattcgagctatcatccgagtcccattcaactaagtaggctttgccatctttcttcttgttatagtatttctttttcttcttgtcactttcatctttgcccttcttcttcttgcttggtgatagtcgcctagaggggggggtgaatagggccaaactgaaatttacaaatataaacacaactacaagccgggttagcgttagaaatataaacgagtccgcgagagagggcgcaaaacaaatcccaagcgaataagcaagtgagacacggagatttgttttaccgaggttcggttcttgcaaacctactccccgttgaggaggccacaaaggccgggtctctttcaacccttccctctctcaaacggtccctcggaccgagtgagcttctcttctcanataaagccgggaacaaaac

SEQ ID NO: 8575 - DNA, 450 bp, Zea mays
  unsure (1)..(450): unsure at all n locations
tgtgaaggttcttcatccccacgtgtgctaagctttgttgttttagncagcccatgctagtcttagctattaagcatgcatctagaccagcctcttcttttgcaaaatcaactaaataaagtttgccgtctaatacacccttaaaagctagtgaaccatcacttcttctaaagacagacacatctacatttgtaaatagacagttgtaccccatgttgcataattgactaactgatagcaaattgtatcccaaagactcaactaaaaacacattagaaattgagtgctcattagaaattgcaattttacctaacccttttaccttgccttgattcccatcaccgaatataattgaatcttgggaatccttattcttgacgtaggaggtgaacatcttcttctcccccgcatatgggttgtgcatccgctatcaataatccagcttgaacc

SEQ ID NO: 8576 - DNA, 317 bp, Zea mays
  unsure (1)..(317): unsure at all n locations
agcttcaccggaccccagtggccatcatttgttatctcgagcacggtccttttctaggagttagacacgtctcgccgcaacagtaacataatcaaattagcgatgtcgtggatcaacggagggaagcagcaccggtggctaggtacagncactaggcccagcagccgtgtggcggccggggcattcgcgtgccacggcggcgatcttaccccatccgcaaatattcccggtggaaagaatgcccgcgagcaccattcgggacgctgcatgaatcaccgcgccgatcaacaccggcggcgagatgccccccatcccgc

SEQ ID NO: 8577 - DNA, 362 bp, Zea mays
  unsure (1)..(362): unsure at all n locations
acatcttcccaaagctcatcatgaaatgttacctttttttggaccattctgatcagtgggtccgatcgctcagtgagtgtaacggtttaaagtttaaaactcacccatagaaaaggaacgacggccttgggcgttggcacaacatttgttgtttgcactctttgctttctgacagtttactctgcctttgaagcttgctctgagtgctttgctgccttcaaaccaaccttagccaacacaaagcaagggtttatttgctagaaatggtcagaaagcaatctgcccctggactgtctttggtgccttcttcggatgtctcanaacccaacggtgaaaaattgttcgtgataacagaagccact

SEQ ID NO: 8578 - DNA, 403 bp, Zea mays
agcttcgtgagtgtgccgaggcttttatgtttctcttcggtcgaccctggaggtgctatccagggacgttcccaggatcctccacgtaaggatttcacgtgtacctttcacgtgatcaaggcattcttcgtgacaccctgcttcccttcctcaggatctgacggatctgagcaccgccaagtcatcgttcatccgccgcgaggctgacgtctggggttcgctgtggtttctgagggccgcgcttgccgaggctaccgagcgccactcccaacggagcgccgaggtggcggaccttctgatgctttgtgacgagctgggggcggaggtagcggcggcacgcacagaggtgcagcggcggcagtctgagcttggccagtcatcggtgagcggaccaatctcggac

SEQ ID NO: 8579 - DNA, 377 bp, Zea mays
  unsure (1)..(377): unsure at all n locations
agcttggcctacgcaccgcaccattctctttgttggnctcggcgccgccaccgcccagatcggtctatgctcgacgccccgctgcccaagctcggactcgatcgggtcgccaacaccgacgcgccactgcccaagctcaacctcggctcgccagcaccacctcgtcggtctccgcgacagtataaggtcttctactactatttattagcatgtgcttaattttcgcaattgattaaggttttctactactattaactaattagtaatccgtacaatatggttaaagatgctagtttgctagttaaaaattgatgccgaattcttgggtagttcgtacaattgatgcataatttctcgtcactgaagattaatcgatg

SEQ ID NO: 8580 - DNA, 428 bp, Zea mays
agcttggacagtattctgcgatggttcttgttgaaccttcagtgcaggtgcagctgccgtcttaattgcaccttccaaagtcagaacatgctacgcagtgaaacttgattttagttgtacaaataatattgctgaatacgaagctttgcttttcggtcttcggaagttgaaagcaatggggataagaagggcggtcctcaaaactgatttccaagttatttctggccatgttgacaaaagttgcaaagcaagagatccgaagcttgaaaaatatttggatacagttcgaagacttgaagcctccttcgaagggttttctgttaagaatattccacgaggagaaaatgaacacgctgatctactagccaagtcagcggcacaggggctgccattaccttccgaagttttctttgacacaataaaagcac

SEQ ID NO: 8581 - DNA, 344 bp, Zea mays
catgcactggggggggtcatctttatttgctagcggcgatgccatagcccgcgcctgcgagctttaagccttaagcatgcatctagacccggctcttcttttgcaaaacaactaaacaaaaatggccgtctagtacacccctcaaagctagtgaaccactcacatctttctaaaagacacgacactatctacacgttgtgaataaacaactatattccatttcgaataattgactgacagatagcaaattatatcccagactctccactaagaatacatctgatatagaatgctcatttgaaattgcaattttacctaacccttttactttgcctgattccatc

SEQ ID NO: 8582 - DNA, 446 bp, Zea mays
agcttctaaagggagagcatattttatgattaacaaatgttcattttgagaaagacaggatttgtagcgcatgccaagcagggaagcaagttggtgctcaccatccacacaagaacatcatgacgaccgacaggccactggagctcctacacatggatctattcggcccgatagcttacataagcatcggcaggagtaagtactggctagttattgtggatgattattctcgcttcacttgggtgttctttttgcaggaaaaatctcatacccaagaaaccttaaaaggattcttgagatgggctcaaaatgagttcggcttaaggatcaagaaaataagaagcgacaacgggacagagttcaagaactctcacattgaaggtttccttgaggaggagggcatcaagcatgagttctcttctccctacacgccacaacacaatggc

SEQ ID NO: 8583 - DNA, 442 bp, Zea mays
  unsure (1)..(442): unsure at all n locations
atgaagattcttatcccaacatgggctagtctgcggtgccagagccaacccatgttagtcttagcaattaagcaagtgtcgagttcagctctatcaaaatctaccaagtatagctgaccctctaacactcccttaaatgctattgaatcatcacttcttctaaagacagtgacacctacatcagtgaatagacagttgtagcccatttgacataattgagaaacggaaagcaaattgtaatctaatgaatcaacaagaaaaacattggaaatggaatggtcatgtgaaatagcaattttacccaaacctttgaccaaaccttgatttccatccccnaatgtgatagctcgttggggaatctttgttttctcatatgaaganaacatcttcttctcccctgtcatgtggtttgtgcacccgctatcgagtattccaacttgag

SEQ ID NO: 8584 - DNA, 154 bp, Zea mays
  unsure (1)..(154): unsure at all n locations
actttattcactaaaacacttgacaatgatttgtttgttgcccaatttatgttgatgatatcatanttgggtctactaacgaatctacatgtgaagaaattattaggatcatgacacaaaaattctagatgtccatgatgggggaagttaaata

SEQ ID NO: 8585 - DNA, 438 bp, Zea mays
  unsure (1)..(438): unsure at all n locations
tgcactcgacgtcagataatgcacanacaatatagcttagtatgaatccatcatctaagtactctggaaactcagagcccttgccgtaaagacttgcataaaaccgattcaaaatctatcgctggacaaattgagaaagagtgcatagctagagagccggtcctcatgcaatacctatcagttgtgcagagtatagagaaatagttcaagggcttaacactccaaaacatagacaggaacaagaacgaagaagccgatatgctagcaaaggcagcaacaaaaggtcatcccttgccttcggatgtattcttccacgtgatagtgacacacgtggtaagaaaccccgaaggcctcaaaatcatagaagaccttgaagcccaaagaattgttaacttaatcatgagccaagactagagagcatccctaactctataccta

SEQ ID NO: 8586 - DNA, 400 bp, Zea mays
  unsure (1)..(400): unsure at all n locations
gatcttgaagcccaggacatacaagctgtccaatgatcaaggcgaggtctacaacaacgcttggaacatccaacaactacgtcgcttctacccttacgatgtttcaagtcgttcatataccctgttctctttacatacacaaatagagtctaaccatcaaggaagggtcagccttgcctctgcgaagcccgaccctccctcatgggctagaaggggggaaccccctctgcgtcaaaattttcctcgtaaaagttttctaccaaaaccacgtttgtgctttccgactatatcgatagcagaatcctacaaaacgagtaagagcgcacgtaagcggcaaggtccaccgagccgagggactcctacgcctncgggatactgacaccttactcgtacctttcgc

SEQ ID NO: 8587 - DNA, 397 bp, Zea mays
ataacagtctgaaggtacaagaattgtgtatctggaagtttatgaattttgaattattcttttgttcttatattaacccattcattcttttcatatagggtttaatacttatcaatgccttaagggcgcaaaagaatgctgaagacgagagttgcactattgctctcaacaaccttcaaacgaaggttatcaagctaaagaacaaaactttggaaaaagacaaaattctacttacattggtggacaaagtaaagggggatgaagctaacttcaaggctcgatctgaaatccaaaggaatgagattgaagacctttcataacaactggccgaagccaaattgaaatgcgctattgcccgaacttaccgacatgccaatgggtactggaaaaatgattt

SEQ ID NO: 8588 - DNA, 330 bp, Zea mays
attgaatgctacagctcttgcaagtagttcgcacgtggaaaacttggatgacctgaatgcggggtgcgtccaacatctctacatcacctctttctcctccttcttctctctccattcttctctacatcccctcactcttctactcctttttcccccctcacacctcttcttccctcctttcctttctccctcacccaacatcctccactctcctctccctctcacttcttctcccttcttctatcctctcccctttttgatcacttccttcacctctacttccctttcttcctcctccctctccctctcttccttcctccactctacctc

SEQ ID NO: 8589 - DNA, 440 bp, Zea mays
  unsure (1)..(440): unsure at all n locations
tcggaaacacatattgagggccgaagcttccaaggtcctattctattcttaatctgggccctccgagcccgccaagcagaaatcctgggaaatcggaggcatgattgagaaagaaactgctgaagcaagcaaaactgaaaaaacaggcattcctattcccgaaacattatcttatacgacatgcttcgggaaaaagattatctgaccaggagaagcaagaggctcaattttatgctcaaagattgaaatatccaaaggggccctggtattcaacagcagcggggaagaagacttcttgtattgcctcccagacagtaaagaaatttctgtctgccgagagatgaacaagagcttcagttccctacactanaagatgtgctctcantgttatcaaaacataaattggcccacaacttatcatacactagcttaaaagtgag

SEQ ID NO: 8590 - DNA, 444 bp, Zea mays
agcttgtaaaggtaaatgtcactatagcttttatcggcatactgaaagggaaatgcgcccttgggccatttctaagtattttggtgattgagtgccaacacaagtgcttaaatgtgaatttatgtccatggatgaacaaagtgccaatcaagagtaaaggtatgcttctaagccttagtacattggttttgtgtattaatatacttgtctaagtgttagaaaccgaaagaagaagaaaagaaaagaggtgccaaaggctggctgtgtacagccaagactcagctcagtctggcacaccggactgtccggtggtgcaccggacagtgtccggtgcgccaggctgactcggcgtgaggtggccgctctcgggaattcgccgacggcgtatggctaaaattcaccggactgtccggtgtgcaccggactgtcccgtgagccaacggt

SEQ ID NO: 8591 - DNA, 459 bp, Zea mays
tgagacattattgcttaatggtcatgtgttgtccgaatgactttcttgatgtcaacatatagatgcaccaaagaaccatataaagccttcaatgtccatacaatctctgtaatggaccacactcgttcctttgaaccaattcaaagaacttaaccaatttagatcagattttaagataagagggacttaaaatcttattcccgatgatactcatcaagtctcatcttatgggaaaaacatgaccaatagaattgttcataacttttcatttcatcccaacaatgggatgaccaattcaatcttacccgcatggtaagtaacatcacatgaaaagtttaacaaatgcaacacattgtacgagaggatgtatatagaatacaatccataaaaaatgtttccgagaaacacatgcaatatccatcactatcactttgtgtttccacatgatagaaattatat

SEQ ID NO: 8592 - DNA, 414 bp, Zea mays
  unsure (1)..(414): unsure at all n locations
acctgcagctgcaagcttcggagtagagtacaaccgtttcttttttctgctctctggcctcttctgctggtgcctatgcttcaacatcagcaggctttgactcagtgggccctgaaggctcagcttcggctttactctgcattattgtaccttcgaactctgtctgtttgtttcaatttgggtgtccttgaagcttcgcaattttcttgtacgagcacgattcaaggctcttgctggttctagcacaacatccagcacattcgccatcctctctttaggagttgtggtggagcttttttgcatcttcggcactgttgcctctggtgaagggcttaaaacctccggcattnttggtatctcttcaattcttcgccctccagttctatctttgccagccttcatttcaactagctt

SEQ ID NO: 8593 - DNA, 349 bp, Zea mays
  unsure (1)..(349): unsure at all n locations
atgcaacttgctatgcacgttgagatcccgatctgggttatggcctgtgaaacatttctatactgcttcggcaataagagatatctgttgtcggaaatggcataaaatataagacacctgaagctagaggtcggcctatctgcaatttcgtacgatgaacttgcagacagccttgcttataataacttgaatgtatgtttatttttgttgtaaaacaacttatgtttataggctctctttttattgcagcggtcctatatcattctattattaccggntgatcctaagtaaagctctttgagcccaaaaataaacagaatatgagagctgccaaataactcttggaatc

SEQ ID NO: 8594 - DNA, 336 bp, Zea mays
agcttaatgcccctcctaaaagattatataatctttgttaacggcaaggctcccatgcctcacgataacgagggttatattttataccctgccggttatcccgagcacaaaattaggagaattcactctaggaaatctcactctggctctcatcatgcttttatgtataagagtaaggcatctagttctaggcaatccactcatgctaaattgcctaagaagaaaactcctattgcataaaatgaacctagcatttcatttaagactttctatgcatcttatgttttaactaacaaatcacgcaaaatagttgccaaatatgttggggctaaacac

SEQ ID NO: 8595 - DNA, 427 bp, Zea mays
  unsure (1)..(427): unsure at all n locations
gacacaaaaactcagcttatcnatggacgtgaaaggccttcacaatttctatttatgaggaggtctatgttgagcaacctctcggctntgaagatagtgagtaccctaatcacgtatataaactctctaaggcgctttatgggctcaagcaagccccaagagcatggtatgaatgcctaagaaatttccttatcactaatggcttcaaagtcggaaaggccgatcctactttatttactaaaactcttgacaatgatttagttgtatgccaaatttatgttgacgatattatatttgggtctactaacgaatctacatgtgaagaatttagtaggatcatgacacaaaaattctagatgtcgatgatgggtgtcggcgaccataattaggggtacccccaagactcctaatctcaactggtaacccc

SEQ ID NO: 8596 - DNA, 378 bp, Zea mays
agcttctaaagggagagcatattttgttattttaaatgctcattttgagaaagacaggatttgtagcgcatgtcaagcacggaagcaagttggtgttcatcatccacacaagaacatcatgacgaccgataggccacttgagctactccacatggacctattcggcccgatagcttacataagcatcggcgggagtaagtactgtctagttattatggatgattattctcgcttcaattgggtgttctttctgcaggaaaaatctcaaacccaagagatcttaaagggattcttgagacgggctcaaaatgagttcggcttaaggattaaaaagaatagaagcgaccatgggaccgagttcaagaactcataaataga

SEQ ID NO: 8597 - DNA, 450 bp, Zea mays
actaagctgaactggacttgcgcttgacaagacaccttgtgtatttcttgcatataatagtctgaaggtatgagaaccgtatatttagaaatttataattttcaaatcattcttttattcttatactaattcttgtatatatagggtttaatattgagcaacgcgctgagagcgcaaaagaatgccgaagacgagagctatgatattgctttcaacaatctacgatcagaggttattaagctgaggaacgaagctctggaaaaagataaaattctgcttacattggtggacaagataaaggaagatgaagctacctctaaggctcatgctgaagcccaaaaacgcgaaattaaagatcttcagaaacagctagccagagctaaagaagaacgtatacttgaagagacaaaacgagagcttaacgatcaatgggccaatcatttagaaata

SEQ ID NO: 8598 - DNA, 418 bp, Zea mays
agcttgtgaaggttcttcatacctacattttctaagcggcgatgccacagccagcccatgctagtcttagctattaagcatgcatctagaccggcctcttcttttgcaaaatcaactaaataaagcttgccatctaatacacccttaaaagctagtgaaccatcacttcttctaaagacagacacatctacatttgtaaatagacagttataccccatatgacataatcgactaacagatagcagattatatccaagactctctactaaaaatacattagagatagaatgctcattacaaatcgcaattttacctaacccttttaccttgccttgattcccatcaccgaatataattgaatcttgggaatccttattcttgacgtacgaggtgaacatcttcttctcccccgtcatat

SEQ ID NO: 8599 - DNA, 414 bp, Zea mays
tgtgaaggttcttcatccccacatgtgctaagctgcgatgcctcagccagcctatgctagtcttagcaattaagcatgcatctagaccggcctcctcttttgcaaaatcaactaagtaaagtttgccgtttaatacacccttaaaagctagtgaaccatcacttcttctaacgacagacacatctacatttgtgaatagacaattatatcccatattgcataattgactaacagataacaaattatatccaagagactcaactaaaaacacattatatatagagtgctcggatggaatagcaattttacctaacccttttaccttgccttgattcacatcaccgaatattattgaatcttgggaatccttgtttttgacctatgaggtgaacatcttcttctcccccgtcatat

SEQ ID NO: 8600 - DNA, 435 bp, Zea mays
  unsure (1)..(435): unsure at all n locations
agcttttanggacaaggagattgtttctgttgttgagtgatataaaactaacgtgagaaaaactgagctacaaatgtaattactattgtaatgcaagttagtgaagtcttcaattttacaattgtttatttgctttggcactttgcttacgttgatgccttgctggacaatggacagctactggagtgctgctgtgcgcccgtgcttacgttcatggtgtggtcgtgtgttaccacctggagtccagtcttttaaattacatttgtgttactgctggattgtgatgtgttactgctggaccatcatggagtgttactgttggaccatcatggagtcgagatgaccagattcttaaatttgcttgtgaaatgtgaattgcgaccgatcgatgatgaatcctgtaagctatttcctgtggtgtgtgaactcgcatgt

SEQ ID NO: 8601 - DNA, 471 bp, Zea mays
ggacctataatactcagcttttattttccttaataaggaagtcctcttggctatcttagagttcatccttctcatgaatagcactaattagttcattcaatttctctttttgttgcatgttaagattggcaaaaagagtaagcaagttatcctcatcatcactagaattatcctcatcactagaggttgcatacttagtggaggatcttgattttaccttcttcttcttgtcgtcctttgccatgaggcacttgtggccgacgttggggaagagaagacctttgttgacgacgatgttggcggcgtcctcctcggaggaggagtcggtggagctctcgtcggagtcccactcccggcaaacatgggcatcgccgcccttcttcttgtaatatctcttcttttccttcttctttcccctcttgtcattgcctctatcactgtcactagaaataggacattttgctataaagt

SEQ ID NO: 8602 - DNA, 428 bp, Zea mays
agcttatcaagtccgatttccaactcatcttgtcccacctcatttggagattcctaggaactaaaggctacgcaaaaatcaaacagccacacggaaatcagctctgcagaaatctcgaagaggctccttcacattagcacctgaaaatacttttgtttcgtgtttatacctctctaaggctggttgttagtagtataaatacccccctatgtctatgatgtaaggcagctttggataatctaaaaatagaacccttttgttcagctgtgtgctaacaaatattgagagtggtctctacccctttgctcttgtgaattccatcgcgggattgcagaagcggcggcttcatccgctcccaagtggcgctcctactccctttgaggtctcctcgattgattgtaggctgtgttggttggttctttgagagt

SEQ ID NO: 8603 - DNA, 451 bp, Zea mays
ttccacctctgaactactcagctgcatactcttctctgtttgccaatagaatcctgacctgaagaccttcccgactagtgttctggacgctgcatgtattccgcattgcccagcatggacctcctccagaagtcgcttcccagaagatgacagaatgcacttcatgaggacgcctgatgcaccccttctatataatgtttccccaatgagtgtgtagtgagctgactgtctggcaatacgctcgaccgcatttctgtcattcggttcctcttcattctttatatacctaatgattggccttctccagtcattagagtctgactctagttgattcacaatattacactcttctgcttgatccattgagatgctcggctgtagtatttcttgtacaaaaactccaggtgggacctgaggtcgactggatcctagcttggacaatacatcgact

SEQ ID NO: 8604 - DNA, 309 bp, Zea mays
  unsure (1)..(309): unsure at all n locations
tcagaccgngcgacaggaccagcgtggcgcgccctcatatggaaactgtgctactttttatctgctagcataggatgaccgccacgacgcttgagagctgctgtggacctcatcgacccctgtctatccagtttgacgaacactctcggaatcatcgggatacggcccactcactaggtgaaatttggcgaaagctcatcttttgactctaacttaccatcagactgaatggccggcgccccagaaaaaggcccgggcggccggacacacgccaacgggattctgagagaggaaatgctagtcccgtct

SEQ ID NO: 8605 - DNA, 266 bp, Zea mays
cggggactctcacgaggcttagaaggatacatgccatgacaggtggtgagatctgactccttcgtagctgaaatctgcttttacgggccgatcgctaagcaacaggagacagcattctgtgtgctcggtgccagaatgctactccagagtaggagcaattgtaacaggactctcattctgacgcaccggagggaccgttgttagcactggccaggagcctacaagaggtagaatcatatattgattttctgtgcgacgaacacctg

SEQ ID NO: 8606 - DNA, 421 bp, Zea mays
  unsure (1)..(421): unsure at all n locations
agctttctcgccatgtatagcatggtttatgaaactccgcacaacgatgcagtttaatatggaaacttgatcatcaaatagattgttgaccttctgaccagtcagcactaaagtaggtcgtccacctttctggtagatttgattaagtcggcctttgaagcattggaagctaaacttccagagctttccaaaaagtacttatgggattccatagcttttgtgaatcaaaagatatgattgtttcttctggacggttctattgctggactgactcgaacatagctcttctttctgattcgcccttgatatgttttgtccttcctctntggtgaacctaagcaatatcaacatacatgacttagataacataaagttcttattagttattaattgaaattcatacagcagcgtgtgcacctcg

SEQ ID NO: 8607 - DNA, 333 bp, Zea mays
  unsure (1)..(333): unsure at all n locations
aacacaaatggtgggtgaatatcgtggagaatgcgtcgttgattggttggagtaagtttagtgcactaaatgacttgaataaaatttgcaagtgacttgttggtcctcatttgattgttttaactctaacaaatggtaaagtgttagaataattcaaatctctagatcatgacaattcttgaattatatagaaacttgaattcattgattgctgttntggactgcacgcactgttttaattgtgctgtatgtttgatgaactaaatggtgttttctgttnatatgtgctatannaaagtggtagataactttattatcttactggtgttaaaa

SEQ ID NO: 8608 - DNA, 431 bp, Zea mays
agcttctaaagggagaacatgtgataggtctatcttatgttcatttcgaaaaagatagaccttgtgcagcttgtcaagcacggaaacaggtgggaggagcgcctcacagctagaatgtgatgaccacttcaagacccctggagctgctgcatatggatctcttcggacccgtcgcctatctaagcatatggggaagaaaggatggtctacttattggagatgacttttaccgcttcacttgggtgttctttatgcaggataagtctgaaacccaagggaccctcaagcgcttcctcaggagggctcaaaatgagtttgagctcagagtgaaaaatataaagagcgacaaccggtccgagtataagaaccttcaagtggatgagtctcttgaaaagaagggaataagcacgattcttcgctcctacacacac

SEQ ID NO: 8609 - DNA, 367 bp, Zea mays
  unsure (1)..(367): unsure at all n locations
taatcttaactatctatgacgtagttagctgagaaccaaagaggttctatgtgtgtcaccaggactcgtggctacgtgacgtttcgtgcgcgtctgacccgactctgagtcttggttcttaattagttagtaatggtcatttgacaagttgcagagcacgaacacggcaagtcaaggaacttgcagttggtcgccggcttggtttacgttggccactggagcacttggccacttgtgcaatccacgcatatgcaactacacttttctttctttcatatttgngagctgtgatcgactgatgactattcttttagtgatgaaagacgttctcatccacagttacagttgaacaccatgaaattagggg

SEQ ID NO: 8610 - DNA, 330 bp, Zea mays
  unsure (1)..(330): unsure at all n locations
atccttaagncacctgcggcatgcaagctntgcactcctttaatcttcacttgtttttgttttacaggnngcattaattcgcctgatgctttagattggtattagctttctgtttaaactaaagtagaaggtccggtccatccttgcttttatttacatggcactatggctgttttttgctgcactactagctttgagttagctaaaaccttgagcagctttgtagtctagtaatgcttcgtatggtttcttcgtgcaacctcagttgcattgcatgtagacgtccatcgaatttacgttgtttcacggtgcagcttccaactgatatat

SEQ ID NO: 8611 - DNA, 451 bp, Zea mays
cttaaatctaactgaatgtgttcctcatatttttgaatgcaagtcattatatatacatctccgggatcagatagaaatattagggccactatatttacatcatatgtttcagttggagcgatacctgggagtattaaaaggttatgtgcgaaatcgcgctcacccagagggttcaatcatggagggatacagtacagaagaagtgattgagagctgtatagattacatcagtgacagaacaatgataggtgtgcctgtacctaaacatgagggtaaactatgtgggagagggagaatgggcaagacaacttttcgcgttgaggattacaagctagtacattgtgctcatggtagtgtactacaacatctcacgatagccgagccttacatataggaacacctggatgagcttcttaaagaaaatcataaccgcacagaggactggatcatg

SEQ ID NO: 8612 - DNA, 445 bp, Zea mays
agctctctaggattctgtctgatcataatcctcttttattgagtctgaaaaacagggtaagagatcacattcgtccttcatttttgagattggttggctatctcatccaaattttaaaaaatagttgaagatatttggaacaaaccatgccgagctaaaagtgcattggataaaatccagcaaaaactgaagttatgcaagcaatttcttaaaggatgggattggaacttaaaaggggaaagaaggaaaaagagagatcagattattcatgatctgaatacgctggaaatggatgaagagggcggttctcttaatattcaacagcttgaagcaagatgttatcttatgaaagagaattttctgatgattgatgaagatgaattgttttggaagcagagggcccatgaaaactggcttatgcatggggatggaaataatgaatatt

SEQ ID NO: 8613 - DNA, 396 bp, Zea mays
  unsure (1)..(396): unsure at all n locations
agacaggatttgtagcgcatgtcaagcatggaagcaagttggtgttcatcatccacacaagaacatcatgacggccgataggccgcttgagctactccacatggatctatntggcccgatcgcttacataagcatcgacgggagtaagtattatcttgtaattgtggatgattattctcgcttcacttgggtgttctttttgcaggataaatctcaaacccaagagaccttaaagggattcttgagacgggctcaaaatgagtttggcttaaggatcaaaaagattagaagcgacaatggaacagagttcaagaactctcaaattgaaggctttcttgatgacgagggcatcaagcatgagttctcttctccctacacaccacaacaaaatggtgt

SEQ ID NO: 8614 - DNA, 423 bp, Zea mays
agcttctagatatgtcgaggtgacaaatgtgtggtgtgaattggtagttacgaaggttgcagctaagcaacttcgtcggttgcccatcattcctcggctttcaaggttgttcctcaacaaggaaatagctctacatatgacgtggccaaagaatggtgtacgtctcgtcactgatccagacataatggtccatccgtcggacggtgatgcctggaaggcatttgacgagtttgatcccgaatttgcaaacgaccctaggagtgtacggcttggtctatcgacggacggattcacacctttcaataccagtgcaagcccgtactcgtgttggcctgtcttcattgtgccatataatcttcctcctgagttggtcaataaagaagagttcatgttccttgcactagtcatcccaggccccgagca

SEQ ID NO: 8615 - DNA, 457 bp, Zea mays
  unsure (1)..(457): unsure at all n locations
gcttctgactnggagagtgtgtagctcgctaattcccggtgtcttttgcgagagaggcttgaccggttaattacatctatagagtaaaatctgtagaacgcctctgattaagttgtgcatagtggtagtcgtatctacaggatgagtacacgatgtatgatgcgagtggcttttagaattgccaaaactcaatcatgactacgccattgtcacgttgattggtaaatgggatgttgttgatgaaggagatgactttcgcctcgtcggttatatatatatatatttagggcaggtataacgggagccctgggcttccaatagttaaaggaagcccaggccgaccacccctgcaacgtggttcaacctatcgccccgactcaactaggctgttggatgcgccacccgccccacgtctgtgtgcgcaaaanagaaatgcatgcacgagtcanacacgttc

SEQ ID NO: 8616 - DNA, 390 bp, Zea mays
agcttgggagctatcaatgtgccttgggatgatgtgcttgcctctgcattgcatgaggatgaatggaatgctggatggagtgaatggaaggggttggggttatatttatagccaccaaccactttctagccattgcccactttctgccaaccacggacggtccgcgctcctaacccggacgatccgctcctacacacatcaacgactgaaatcacaacggtcagcagtaatggctatatccacagctataagtgcattaaatgtgtcgtcaaatgttagataaagcagttgcgcacggtctgggcgtgcaccccagatggtctgtggggatgctaacaatgaatttactgaatctagcactttcaggtttatctagattccaatgggtgg

SEQ ID NO: 8617 - DNA, 144 bp, Zea mays
cactcaggcccacagcgggcctgacgcccacattggcggtccgagccgcacgtgtctgaaaaagaatctcagacgtatatagtcgacccatggaaaccgcgacttggatcatcggacccagggagccgacacatttgagcggtc

SEQ ID NO: 8618 - DNA, 390 bp, Zea mays
  unsure (1)..(390): unsure at all n locations
agcttcagcttcgtggctgatcctttctatttggccttcggggtcaccccttatgaagttctcctcacttgagaatgcgccaacgctggtgaagctggtttttattgtcttaacacattccatagatttttcatagcatcttttcttagatgcacgaagctcttcaacatttttctccanatggtttgcccactgttcactgatttctcgttttgtttcttcaagtgtgcgctcctctttagctctggctagctgttttcgaagatcttcaatttcacgcttctgagcctcagctngagctttaaaagtagcttcgtcttcttttattctatctatcaatgagtataatatcttatctctgtcgagaccttcgtttcttagttcaattac

SEQ ID NO: 8619 - DNA, 452 bp, Zea mays
ataaaactcagcttaaccgcatgaggtgaaccccttgcggtctttcttatccacgctccagtcttccacacataggttcggtcacaccattgaatgacacatttggaactcaaaacaggctgctccattaaccgaaccctttatgaaaattgagaaataaacttgaaaaatctacatggttggcctcacacttgatcacccatttatggttaaagttcgagaaaattatccagcaaaactgaaaaagatcattaatcaaggactcgcatccaaggcagcctggttgaacccaggccaacagcaacttctgaagcacatgtcggatcattttttttcaaagaaatgcatggtgcgaaatatgtacagtggtgctcaggaaaaaaaagtatatgtacagtataccatgcacaagttggtgcggcatacaagttacaacgaacaacaaaaagtta

SEQ ID NO: 8620 - DNA, 337 bp, Zea mays
agcttcttctcatcatcgatgagttatgttatcgcgagtgcctcctgccagtagtggttgttcgggtttccaagtaagaaacatggattcatctttggcgttggtttatgaaaatgacttacaagtcagatccatgaaaaaatattacggagaataaatgtcacacatataaaaaaggaatttaagttgaaaatattgtaaaaacaaagaaattgcatgcaaggctcttctttaaatactactgcctccgtccaaaaatataattcagtaatctcgttgataattatctactactacacattgtgcaagggtagcaggtgggatttgggagagatgt

SEQ ID NO: 8621 - DNA, 440 bp, Zea mays
  unsure (1)..(440): unsure at all n locations
ttggcgtcttggttatttcttcttcctgagcccctgtcttcttatcagcgatgaagtctaccaacgcctgngactaaattgaggatctatgtacatagtcaatggtgaattcattaagttctgcagcccattttccaatccttccagtagcttctttgttcctcataatgtccttcagaggctgtgacgaaggaaaaattatgcgatatgcttgaaaataatgccaaagctttctggaggccattaacacagcatacaacaccttctccaattctgtataatttttctttgacagacttaaaacttcgaagacgaagtacactggagcttgctttttgacttggtcatctagcttctcctgtacaagtgccgcactcaccgcaaaatgcgaagctgccacatataagagcaatggatcccttggcgaaagtggagttaat

SEQ ID NO: 8622 - DNA, 398 bp, Zea mays
caaatccgagactattgttaccggcgatcgagggaccgcaagtacgtccccgcgcggatgaagccatggcggctcgcgcactctgatgagcaattgccgacggcgcaattgattcaatgtcacgttccggccccgacgagcattaacggcgccaaacgaagcctcggactccttcccgaagcatgggcgacgctgacggctcaaggtgacgatggcgggcccactatggtatcggcggtggttctggggagctacactcgtgcgaggaggtagaaggaggggagaacggttcacgggtcgcccatgggggactggggggagcctaagggaggtctttctccacgacgcggtagacccggtcaagctctcggatttccgcgtggatgggtgaacagatc

SEQ ID NO: 8623 - DNA, 187 bp, Zea mays
  unsure (1)..(187): unsure at all n locations
aattgttatctaatctttcctctcctctctcttctctaacatctttcgatgtgatcttgtctctcacatctatctcccatttttatttctcgttctttcctaccccgctctatgtattatcgtaggctttcgttaagtcttccacttccttccctaatcttcctccccttcctctttnttttctctc

SEQ ID NO: 8624 - DNA, 444 bp, Zea mays
  unsure (1)..(444): unsure at all n locations
agcttcttcttcttctctgtcctgcatttagttattgtctcatttnctactcgncttcccgttgttgctcagcagcaagctcctctcgtcttttctccatcctctctttgtcctctgcatcccactttttaagattatccaaccccttcttgtctttctgtgatatttctgtgtcaatccacagctcaaaatcacaaagcggtggaggagtctccaaaacatgcaattattagtaggcaaagaaaacattcaccactccgagtcttcaaattgttaacatattacaagattattctaaccattaaattcagccgacgctgaacaatcgttggctcaaatgcaaagttagcacacatccaatacctctttcgatttcatgatcctcagacttatcaaccttacaaggatcaccacananacacataggcactgggaacacagttg

SEQ ID NO: 8625 - DNA, 445 bp, Zea mays
  unsure (1)..(445): unsure at all n locations
ctcagcttctaagggagaacacattntaggactaacaaatgtttattttgataaagataggatntgtagcgcatgtcaggcagggaagcaagttggtgttcatcatccacacaagaacatcatgacgactgacaggccactggagctcctacacatggacctattcggcccgatagcttacataagcatcgacgggagtaagtaatgtctagttattgtggatgattattctcgcttcacttgggtgttctttttgaaggaaaaatctcatacccaagaaaccttaaagggattcttgagacgggctcaaaacgagtccgacttaaggatcaagaaaattagaagcgacaacgggacggagttcaagaactcttanattgaaagcttccttgaggaggagggtatcaagcatgagttctcttttctctacaccccacaacaaaat

SEQ ID NO: 8626 - DNA, 95 bp, Zea mays
cgctttatgtaagtctttttgatgcataagattcaaaaagggagcagtgcgggggatcacaagtcccgatcttcacagacccactactacaagct

SEQ ID NO: 8627 - DNA, 378 bp, Zea mays
  unsure (1)..(378): unsure at all n locations
cctagctacgggtgcatcggnttcaccgaaatccaaaccttcaacttgggagtatcccttggccacaagtcgggctttgttccttgtcaccacaccatgctcgtcttgcttgttgcggaagacccacttggttcctacaacattttgattaggacgtggaactaaatgccatacctcgttcctagtgaagttgttgagctcctcttgcatcgccaccacccaatccgaatcttgtagtgcttcctctaccctgtgtggctcaatagaggaaacaaaagagtaatgctcacaaaaatgtgcaacacgagatctagtggttacccccttatggatgtcaccgaggatggtgtcgacggggtgatctcgttggattgcttg

SEQ ID NO: 8628 - DNA, 446 bp, Zea mays
agcttgtgaggttcttcatcccccatttgttattcggcgatgcaacagccaccccatgctagtcttagcaattaagcatgcatctagaccggcctcctcttttgcaaaatcaactaaatagattttgccgtctaacacacccttaaaagctaatgaaccatcacttcttctaaagacagacacatctacatttgtgaatagacaattatacctcatattacataattgacttacggataacaaattatatccaagcgactcaactaagaatacattagaaatagagtgctcatttgagattgcaatcttgcctaaacctttaaccttgccttgattcccatcaccgaatatgattgaatcttgggaatctttattcttgacgtaggaggtgaacatcttcttctcccccgccatgtgatttgtgcatacgctgtctataatccagc

SEQ ID NO: 8629 - DNA, 459 bp, Zea mays
  unsure (1)..(459): unsure at all n locations
actcagctngctcatgccttcttctttntctccatagcaggaacttgtgtggatcactaccccacttaanaggaatgagggtagatctcttgaatcttggggatttgaactccttgaagtacctcataacaaggttgttacggggccttcttctgctgttgctgcttgagcangctatggagagatgactggcacagggttgattctgggagaaccttcttcttatcttctcttcactatcttcttttctcttctcacttttcacttttcactgcctctttctttctctttgctcttcccactagaggattctatcaaagagtattactatcatacactggaggaaaccaaagactatgaaccatgtgcaacagtcttcaacccaagaatcaccaaccattgtgatcttacgagcaagggagtggaanaatggagttgcttgcgatttggcagacggga

SEQ ID NO: 8630 - DNA, 450 bp, Zea mays
agcttcggctatggacaaatttttggcatcattactttgcaatagcaatgaatgctatggccactttacacctacccgtctgtctatatagcgccgcacgtgggaaggtaaatcttaaagtctttcgcaccggacaaacagctgcccgcacccactgaacggtgggccacaaaacccgagaagaagaatcgccaggacgcgcgtaactgctgcatggtggggccacctcacgctcggattattttaatcatctctcggctctgagcttaaggaatgtgattttcggagcttcggaattccgaagcctaagagacttttttcacggatcaatctcgttactaacaatgatctatcaccgcgaaggggctactgttgtgggtatgctaccgaaccgaggatcctgaacaaagaaacaccttcggtggatcctctcaaaagcaacgacgaagc

SEQ ID NO: 8631 - DNA, 412 bp, Zea mays
gtagatctttactgcagatatttttgatccctattgaactgccactgcttgactgaactcacagcttcacccctttatttttcccagctccaagcaagaacaggggaaccgaccttaaggaaccttgttcaccaactaacccactatcaatcttccatacagatttaagccttataatccttaaatcaaacactaaacagctccaaagtcaggagaaaaatactgaaccaaatccacagtgactgattcaagtttgcatttccatgcctgatagacataattcgaacacctctttctctctattccaaacaaggatagctcaagcattcctgaacaaatttgttccccaaccatggctcttcaggtttactataaaaatccaagacccccaatatgtagatcacaagttatg

SEQ ID NO: 8632 - DNA, 447 bp, Zea mays
  unsure (1)..(447): unsure at all n locations
agcttcnattcgccaacggctggnctccgtttgttgcctgaggtagacctcgggagcaggggaacctgccgggggaggccgtgcgtggcggcgctgaccatcgcgcagtgaatttcacgccggcaggagctttcctccgcggagccgtcatttgccgcggccagctcccttcgtagccttcaacgtcggtaagcatgtccagcgtgtcccaatgtttcttcttgatgcgaatctcgttgtagatgggtaggggaagcctcgaatcgcctgatggccaactncggcgaggagtgcggctgctatcctgtgcgccgtcgcgtgcgacagtgagatgggagagaaagcggtgggccgtccgattcgctgtagatggccggatngagaatacgcgtactcccctgtgcggtttgatctgggtcgtacgggggtctgatcggacggttcggg

SEQ ID NO: 8633 - DNA, 346 bp, Zea mays
cggctcgcccaacctagctgagatgaccgccaacaaagcgagtgaaaaagctcaactcggatcaaacctgacaagtcttagttctaagctctcagcacttaaatccttacttactatgcaaatgctggctcttgaaatatgcctgaggcactgcacttatggggcagattcaaaactcaaaacactcatgaaaacccctagtgcaaggccaaaacgcaaatttcaccatttgcctatgttctctaaaaattatctagcctacggcacaactttttgaaaattatgagacaatatatgacggcgccaatacatgtcccaaccagcgttattctgtgcgagtataagc

SEQ ID NO: 8634 - DNA, 358 bp, Zea mays
  unsure (1)..(358): unsure at all n locations
ttggagcctcgggctgaacccttttggcgtggtatcgtcacagagactgctgataccgcgccgagtgtagtaaggccacgtnctgagcctcttccagctggtccaatgaatcctctccgctggtctggttgctttggtcgttgtaagcctttgtcctcggggaaccgtattctaagtccgtgggttagatggcctctaccccatagactacaaagaacgacgagaaactcgtggcctgtcttggcgtcgtcctcaaactccaaaccaccgagggtagcctctttatccaccgcttgccaaacttattgaggtcgctgtagatcctcggctctagtccctgccaaatcataccagttgc

SEQ ID NO: 8635 - DNA, 382 bp, Zea mays
agcttgtgaagattcttcatcccaacatgggttagtcggcggtgccagagccaacccatgttagtcttagcaattaagcaggtgtcgagttcagctctatcaaaatctaccaggtatagctgaccctctaacactcccttaaatgctattgaatcatcacttcttctaaagacagtgacacctacatcagaaaaaagacagttgtagcccatttgacataattgagaaacagaaagcaagttgtaatctaaagaatctacaagaaaaacattggaaatagaatggtcaggagatatagcaattttatccaatcctttgaccaaaccttgatttccatccccgaatgtgatagctcgttggggatcttggtttttctcatatg

SEQ ID NO: 8636 - DNA, 436 bp, Zea mays
  unsure (1)..(436): unsure at all n locations
tccactgagatacccttctattaataagaacagtttatatatataacagntcatacctattggntttgatcaacaggatggaacattgctaactaacagcaatggccgtaaaggtcgtggacggggaggtagaggtggaaggggaagtataagaggtagcaggggaggtagttctcgtggtggtggtggtagggttcccaggggtattggtagctcatccaggattcagttcagggatgacaatattgtgccctatgggagagcccctcgaaagaatgtacgtggtgggcgtacccgtggccgcggccgcggccgtggacttccaactgtcagacctcggcaaccatctgaattcagtgccacatcaattccaaagataaacctattgggcagctntagcatgttaagtaaggcaaatcacactggcaatatgcat

SEQ ID NO: 8637 - DNA, 443 bp, Zea mays
  unsure (1)..(443): unsure at all n locations
agcttcagcagccttcggaacgttctttttattataatcttcggcaccaccatcctgcaaacaaacaaatggtataaggtaaaaagtaattacaagagaaggcaagcaacaggaataagtcccataccggtttgtgtaagtttcgggcttcgtcaccagccagctctcgtccacccttagcccaaatctgtgttataaatatgttcccgatgctccaggcttcactggggatatcaaccaaatctattggagacaggctgaaggtcggtctattcacagtcattgcgtgcgtgcaaccagccttcataaatgctgcagctgtgccgcgagaagctagcaaggcacagaagtcaccgtgtccggctatcacttcatcaagcgcctcaacttcattntcaatatgttcgaaggtgttggtatgtcttaaccgaagtataatgtat

SEQ ID NO: 8638 - DNA, 433 bp, Zea mays
taataatcttcgggatatcctttctcgctgcacatgacaccagaagggtcaacccaacaagcgttggatgaattcagaattattgcagagcatatcagtacaagagacctggttcaggagtttttggctttcaaggtttttcctagtttaaaagaatgggaaatgccgaaggtaaagggggagaagaaaaaaggtgaacttgtgcgtttaccttactatttcaagtttaagaaatactttaaaacaccttgccaagagtggctggatacaattgaagtaatgtgcaatgaaatacttggaaattactccaaaaaagaagatcaattgatgactgcggccttctgcacccgtcccaagcgaagactgaatcgagtgctggacgccttgggttttgaataccctgactatgaaaatctgaataaaggtgccgggg

SEQ ID NO: 8639 - DNA, 301 bp, Zea mays
gcccatggtagtcttaaccattaagcaagcggcgagattaactctatcaaaaatcactaagcataggtgaccctttaacactcccttaaatgctattgaatcatcacttcttctaaagacaggaacacctacattcataaaaagacaggcggagcccattttggataaacgagaaacggaaagcaaattggtatctaaagaatccacaacaaaaacattggaaatggaatggtcaagagatataactaatttacccaactctttgaccaaaccttgggtccactcccgaatgtgatagctc

SEQ ID NO: 8640 - DNA, 405 bp, Zea mays
  unsure (1)..(405): unsure at all n locations
ttcngcccttctggcagcttcctgacttccatgaatagcaatgggcccttggtccgaaggtatcttcatgcaaagatatgctggatgaagaattgcttcgaaggcattgagagtaccacgaccaatgattgcattgtaagggtattccatgtcaacaatatcaaacacaacttgttcagtccttgtgttgttaataaatccgaaggctactggcattgtgattttgccgagtgctacaatctgccttcctccgaagccacaaaggggatgtgtggcatcatggatcttgtcttctggctcttgcatctgtctgaaggctttggtcaatatgatatcagacgcactgtctgtatcaaccaaaacattgtgaaccacaaatcctctgatcacaccagagataaccat

SEQ ID NO: 8641 - DNA, 442 bp, Zea mays
agcttctaaagggagaacacgtgatatgttttattaatgtgcaattcgaaaaagatagaccttgtgcagcttgtcaagtatgcaaacatgtgggaagctctcatcacaccaaaaatgtgatgaccacatcaagacctttggaaatgcttcacatggacctcttcggacccgtcgcctatctaagtataggaggaagtaagtatggtcttgttatagttgatgacttttcccgcttcacttgggtattctttttgcaggataaatctgaaacccaagggaccctcaagcgctttctaaggagagctcaaaacgagtttgagctcaaggtgaaaaagataaggagcgacaatgggtccgagttcaagaaccttcaagtggaggagtaccttgaggaagaaggcataagcacgagttctccgctccctacacaccacaacaaaat

SEQ ID NO: 8642 - DNA, 412 bp, Zea mays
gctatgactaatgtgttttcaagtttatttcaaaccaagtcataggtatattgaaagggaattggagtcttcggcgaagacaaaggcttccactccgtaactcatacttcgccaccactccgagcaactctctcttctttgggggagaaatgagcatcaaggaaaaggacttcctccttgggggagagagtaaaaagctcaaacgcaaaaggacttcgtctttggtataatcttaactcacttatttatgaccaaaggggaagattgcacttcgagggctctaatgattccgtttttggcgattcatgccaaaaagggggagaaatgagcccaaagcaaaaggaccgcaccaccaccaccaaattcataaacttagtgctttccaaaagtctttatcatttggtatcctatt

SEQ ID NO: 8643 - DNA, 433 bp, Zea mays
  unsure (1)..(433): unsure at all n locations
agcttcggtagatcacaacttcattttcttcatggcaggcagggacgttgttgtctccgccagcccttccaatagacgtttcccataagtatcttcccctcatgttctcaagatgactttgtttgatggtcgattttccgaaaatcgaatgacttggtctccagggccgatccttagaatcttcacccccactttctgcatcataactatcactgtcaccagtatcttcagacaggccctccaatatctccttagtaatcttctctgtatttttttgccattgactcgataaatccaacattgtaaggattcacagccttcttctcctcataaagcttctcctcttcaatcagcttcgtctcagcagcaaccttcttgtcttgagacattntctcttcagaaatgacgaanatgcgtctttttaaccgaagct

SEQ ID NO: 8644 - DNA, 445 bp, Zea mays
  unsure (1)..(445): unsure at all n locations
ctcaagcttggtgcttganagtgggtgtacaaatcacatgactcggtagaaatacattttaactccttgcagctaactcaagacgcacaagaaatcatgtttggagatagtggcaagagtgaagtgattggtatgggtaacatctccatcactgccaccagtcgctttcaaatgttttgttagttgattcattaagttacaacttgttgtccgtttcacaactttgtggaatggtgtatgattgtctatttactaatgttgatgtgaaaaatccttagaagggagggttcctctgttgcttttacgggtcacttgaagggcaaactctatcttattgatttcaatacaagtaaagtgacgtctgagacttgtttagtggcaaaattggacaagggttggctttggcttcactggctagctcatgttggcatgaggaatttggccc

SEQ ID NO: 8645 - DNA, 443 bp, Zea mays
agcttatgtaggtgacgggttccaagatgttcatatgaagtaactccagaggtcttgacgtggtcattacattcttgctgtgatgagcatttcccacttgtttacctgcttgacaagctacacaaggtctatctttttcgaaagtcacatttgttagacctaacacatgttctccctttagaagtttgtgaaggttcttcatccccacatgtgctaaacagcgatgtcacagccagcccatgctagtcttagcaattaagcgtgcatctagaccggcctcctcttttgcaaaatcaactaaataaagtttgtcgtctagtacacccttaaaagctaatgaatcatcacttcttctaaagacagacacatctacatttgtgaataagcaattataacccatattacaaagttgactaacggacaacaagttatacccgagcgac

SEQ ID NO: 8646 - DNA, 451 bp, Zea mays
actaagctacctaaaatagattgaagcccaatttgaattctaagttatagaatgctccccctaaatatgtgcttacttcaagaacctaattttggcctcagacgccaatttgcacatacttaggcaaatcgaaacatttctacaccttagcactttttagtatgcattgtggcaagaatcaaaccatgatgctataacacacaattgcacataatcagagttaaacaccattcaaaatagtggatatatcacaagaatatcaacctaccactattcatcattaagataccatttcaaactaataccaatttaaactaagacactaatttaagacaatcttaaagcaccattaaccatatggctatctattacactatagaagccaaataattcatcgcagcggaaacactagttcatatgatgcaacacatataatacttgcaagaagcat

SEQ ID NO: 8647 - DNA, 443 bp, Zea mays
agcttatctatatagaagccatggcaaattgatgtgttcttaacgagtataataataaaggaactaataaaaaattagagcgaatgtgataaatgcttgcacgtgtgatgccgtgttgcgctggttaattctagaaagtaattgtcatctttctaatggtattgattatgtatgcccgatgacgtgtagataactaatgctagtgtgtggttgtttacggtgtcttacgatttaatgattagtttgctaccgtctattttgggattatcttgtgatatatttcatcatgttcatacatatgcatactgcatctcatttaggaccgagagatgatgatcgtgcaagtgatgtggtgtcaaccacaagatgcagttggtggacgacctaaagaatggacttaaccagtggatgctcgtcgagcgagtacccaccccaacaaacac

SEQ ID NO: 8648 - DNA, 404 bp, Zea mays
ctgtggccgaagaggaccttatggagcaggcaaactgccatagtcagctcctcagaggtgtgtacctagtggaccgtgccaagcgcaaggaacgccaacccaggaccgctgctgagtcaccaccactggagggaatccctttgtatcctttgtcccacccccgcaagaggatttatgaatcggtgccacccacacctaccgcgtctgctcgtgaagccgaaggaagagaccccgaagaccgtgccatatggaccagtagccaaattgtttcggccgacccttaaaaagtcgagccatgaaattgtaccctattgtgtcatgtatgcctgcatgttgaatgaatgcttgtgtgatgtatgaatgctctcactagtgtgtattgtgtaagataatatatatataca

SEQ ID NO: 8649 - DNA, 329 bp, Zea mays
  unsure (1)..(329): unsure at all n locations
ttcacataaaataatgggccttggtttggctttttaagagaaaccctatgtgacactggggtgtcacagacttccctccttaaaggaatctcgttccgaaattctggccagagtccttccgacgtgaacccaanggtgagactgataggaaaagggtggggattgttattattatggcaaaactgctcttccaatgtcattctctttgcaacttcagaaggaagtccttttaagtcttactttatagtcacttcattctgaattaagatcatatttttggaaatttatattctaaacgcacgaggatgggttgggggtgattacatacc

SEQ ID NO: 8650 - DNA, 460 bp, Zea mays
  unsure (1)..(460): unsure at all n locations
ccttaagncacctgcggcatcaagctttaaaagaaagagacgctcttttctatatcttccggacaaaaatagatacagtaccttctttataagttcatttattcatgtctcctcttgttcaatgattggcgcatgcttattgcatgttgcgcgcttccttcatttcgcatgtgtgttattagaagatactcctgtgatagaaaatccagactagttccaagatgaacctcacgatttctatgaggaaggccagtggacatcctcctctgcctttctatttgatcccaaatcatgatgacaactaagcttactctttatgatatgcataatcttcatgggactacctacttaccattactagttttaccaacccataccttgaataaacctgggcttatcgctttgcttaatagctgataatgctctactccgtctaatgatgccactnctcttatactat

SEQ ID NO: 8651 - DNA, 403 bp, Zea mays
tttgactcggtttcgtgggcctttcttctctatgtcttcgaaaaacttggttttggtcagatctggtgtgatataataagtgggctgttagctacctcttctaccaggattttactaaatggtctgccaagggattggattgggcatcaacgcgggctgaggcagggtgatccactatcgcctatgttatttattcttgtaatggatgtcttgaatctgcttgtgcagcgagcttctgaggaagggcttcttcaacctctctctacaaggaatatgcagccccgtatctcgctgtaccccgatgacgcagtgatatttctatgtccgacttgcccaaacatcagtatggttatggatattcttcatttatttggttcaacttcgggtctaaggactaatatcc

SEQ ID NO: 8652 - DNA, 447 bp, Zea mays
  unsure (1)..(447): unsure at all n locations
agcttatgaagattcttcatcctttcattggtcagtcggcggtgccagagccaacccatgttagtcttagcaattaagcaagtgtcgaattcagctctatcaaaatctaccaagtatagctgaccctctaatactcccttaaatgctactgaatcatcacttcttctaaagacagtgacacctacatcagtaaaaagacagttgtagcccatttgacataattgagatacagaaagcaaattgtaatctaatgaatctacaagaaaaacattggaaatagaatggtcaggagatatagcaattttacccaatcctttgaccaaaccttngattccatccccgaatgtgatagctcgttggggatcttggtttttctcgtacgaggagaacatcttcttctcccctgtcatgtggtttgtgcacccgctatcgatgatccaacttgag

SEQ ID NO: 8653 - DNA, 368 bp, Zea mays
cctttaaaagagcaagagctgtgccccgagaatctactatggcgcataagtctgcgtgcccaccaataactatatcaagggcatcaacttcgcgttcaatatattctaatgttattggcagaatttcagctgaaggtgtaaatatcgaagagctagctccgacagagtgaaacacatccttcagccgctgcacacatcggctgccgaagcttaagcatttctcctgaagttctgtaaaggatttctgcagatttgagtatttatccacttcaattttcacgcttgcttcaagatatttcttttcttgctcgaatttttctgattgttggagcaagccattccttaatttgtcattctcactttggact

SEQ ID NO: 8654 - DNA, 416 bp, Zea mays
agcttcagccaaatcctcaagcaatggttatttaatgactacaagtctcggtccaagaaagtgtgctacaagtgtggtaagcccggtcactttattgcaaaatgtccattatcaagtgacagtgacagggataacgacaagaagggcaagagaagagaaaagaagaggtaccacaagaagaggggcggcgatgcccatgtgtgccgcgagtggaactccgacgagagctccaccgacttctcctccgacgaggacgccgccaacatcgccgtcaccaagggactcctcttccccaacgtcggccacaagtgcctcatggcaaaggacggcaaaaggaagaaggtaaaatcaagaatctccactaaatatgcatcctctagtgatgaagatcactctagtgatgaggaggataattt

SEQ ID NO: 8655 - DNA, 457 bp, Zea mays
  unsure (1)..(457): unsure at all n locations
cgtgccttnaatctcagctcactcatcatgtatggatgctttgagtcatttttttaccttcggcctttcttgcagcttcctgacttccatggatagcgatgggtccctgatccgaaggtatcttcatgcaaagataggcaggatgaagaattgcttcgaaagcattgagggtgccacgaccaataattgcattgtaagggtattccatgtcaacaatgtcaaacacaacttgctcagttctagtgttgttgatgaacccgaaggtcactgacatggtgatcttgcccaatgctacaatctgtcttcctccgaagccacagagaggatgtgtagcatcatgaatcttatcttctggctcttgcatttgtctgaaggccttaacaaatatgatgtcagctgcactgcctgtgtcaaccaagacattgtggaccagatatccttttgttacacaagagat

SEQ ID NO: 8656 - DNA, 418 bp, Zea mays
  unsure (1)..(418): unsure at all n locations
agcttcgtatcaccaggcatngtgtgtcctatcttggttccaacctgggttattggagcttcaacttctattcgcttactatcacctttgggttgcattatgtcagcttccgcaaccttccctgtgggagcgaggcttatggaatccgttgtttccacaatatctaatacatttaccatcctccttctcttaggagttgtggcagaactcttttctgccttcagcgctgtcgcttctgttggaggacttaaaatccctggcatctttgatacttcttcagtttttgatctttcagctttatgtctatcaaccttcgtttcaactaactcagccgaagatgccttccgcattatagctggctcttcagtcctctgcatgggaggaacatgttctcttaattcaccagctgaagaagcct

SEQ ID NO: 8657 - DNA, 445 bp, Zea mays
  unsure (1)..(445): unsure at all n locations
tcacaagctattatcgaagctgactgagcgactgttcgctttnttgtnagcaactggagtgggcaggccactgtggccgaagctcgggtggcaatggcgggcggaagagagcttgctggagctgatgaggggcgtttaaccggcgagggtgagcactgggccatgtgaagcacgccccgngaggctttatatgcgcgggcgaacaccactgagggcagggctctgacaaatgctcatggcgtgcgcgggcgaacgccagtgcacactctggcgcctagcacggcgttgagcacgaggcatcgcacagagaggtcgagttcatacgcggattggctccaaatctttaacattattgccatgatcccngtgagagatctcttcctctgacattcctttgttgcttgcgtgtggaggcttgcatgtttngctgactggatcaagagat

SEQ ID NO: 8658 - DNA, 369 bp, Zea mays
aaacctcattgcagacctacagctggtcttccacagtctacgacgatatcgacggaagcttactcccgaacaatgtgtttctcggggtacccacaagaaagttgctcgggtttattgccagtccccggcgaattgaagctcatctcataaaaactcgaagctatcatgaggatggcggcacccgcgatcacatatgaaagttcaaagactcaccggatgtatggcagccttgagcacattcatatcccggctggagaaaaggctaccatttatagtactaccgatgtggacaattcagtgacttaaaagccaggaaccctaatgcattgaaaagtctcgacacccaccaggctgaaccacacgttgagc

SEQ ID NO: 8659 - DNA, 461 bp, Zea mays
  unsure (1)..(461): unsure at all n locations
atctctaagcaccgcngctgcnacttggaaagattgggcctttttgtttgcttcctcgatcattagtttgagtagagttatgaattgacctaacgtgcctcgggtggaatctttctccgaagcccctggtcatttcagagaacctgaatgcttccttccttctttggcggaagtcattatcagctcgaatgtattcgtccatcttctggagcagcttcttcaacgtttgtggtggcttcctggcaaagtactgcactgaaggtcccggccgaagcctcttaatcatggtctcaatgacaatttcattgggcactggtggcgcttgtgccctcaggcacagaaaccttcggacatacggctgaaggtactcttcatggtcctgggtacactggaagagagcctgagcagtgactggctttgtctgaaatccttggaagctggttatcaacatatccttcagc

SEQ ID NO: 8660 - DNA, 434 bp, Zea mays
  unsure (1)..(434): unsure at all n locations
agctntataagttcataggtgtgccttctttgtcaagtcctatggtcaaggcactcggcaaagtacctctttgccaagtgttacactcggcaaagtgacaagaataccccttttattttttttatatattccatccaaaaaaacaaaacatatatcacataatcatcacatatacatcatagagttcatagaatcataacatatatcaaacacacgacatagctcacaaagataacaagtttcttcacaaagtcgcaaatatcacaaaatagttcacaacactaacaagtactcacataaatgagtccacaaacatccaatatatgccataaacatgtctcacaactaagtttagaagaacatcagtgatgtgggcaactagattggttcgacgatgggctgggtgatccataaggggttgttgatgccacaga

SEQ ID NO: 8661 - DNA, 409 bp, Zea mays
  unsure (1)..(409): unsure at all n locations
tatttgctttctcagtacatgcattagactatcttggcttattcatctccattcttatattcaaggtctgaccagtatagtagttagctagtcgaagggttgatttgattacatctgagccctatatcacactaagcccttgttcgtttgtgtcggattgcacccggaatcgttccagctaatcaaaatttatataaattagagaatcaatccgcttaggaaccgttccgacccatcaatgcggcacaaacgaacaagacctaaatgtgagacattacatcacgatcacccttcgctctgacatgtgcttangggtaggtgtactccatgcctctatgtaagcatgctctcatatctaagtaggtatgaaaaccggtgggattggtccggataaccactctcttgtttt

SEQ ID NO: 8662 - DNA, 419 bp, Zea mays
  unsure (1)..(419): unsure at all n locations
agctttcatgagaatatgagtacgaagttttattttttttcagcttatcaccctcacactgatggaccgactgaaaggactaattccgtattggaagatatgttgagagcatgtgcccttcagcatggaggaagtcgggataaaagtctaccttatgctgaattctcatacaataatagttatcaggccagtctgaagatgtcaccttctgaagctttgtatgggagaaagtgcaggactcctttgtattgggatcagactggagaaagacaattctttgggcctgaattgattcaagaagcaaaagaacaagtccgtataattcgagagaatttgagggtagctcanaccagacaaaagagctatgctgataatagaagaagaccactggaatttgaagaacgagaatatgtgtatct

SEQ ID NO: 8663 - DNA, 456 bp, Zea mays
ctcagctatgtgggtaccacacactctcaggataaccttgtcttctttcatgcatgcctgtcctcttttctcaagaggacgaaatcaatctggctagtgtgttggccactactgaaggtcaccacgtgggatgtcctcttcctaaagaaagtgtttgctataaacatgtcatatgctagggcaaagttcaggaattccgctccttcttgattcctagtcccaaagccgaagcctccatgcacaccctcgaaactggtgctagatgtacccacatggccattgagatctcctcctatgaagagcttctcgccaactggcacactactaaccatgttctccaggccttcccagaactccctctttgagttctcattaaggcctacttgaggagcatacgcgctgattacattgagaaccaagttcccaatgaccagcttgactaggatgattctatct

SEQ ID NO: 8664 - DNA, 442 bp, Zea mays
atgaagcttgaaaggattttactaactctcttaaatattggtatttggggtgctacagaaagggttctaaccaagagagccaaatacaacacaaaggccgccttggtctggcgcaccggactgtccggtgtgccaccggacagcgtccggtgcaccaccggacagtgtccggtgcaccagggagtttcagtttaaacttgccaccttcgggaatatgggaggccgctccgctataattcaccagattgtccggtgtagcaccgaactgtgtggtgtgccaagcggagcaacaactccaagcgccaacgatcgtctgcaacggtacaggaacagtgaacagtgttcactgcgcgcagaagtcagagcacgcgtcataaggcgcaccgcacagtgaacagtgactgttcggtgcaccaccgtactgtccggtggccccacttgt

SEQ ID NO: 8665 - DNA, 392 bp, Zea mays
  unsure (1)..(392): unsure at all n locations
acataatttagtatcaaaacaagagccagtgttaataggtgctaaactgtagcactgctctttcaatatgcttgtttgatttcatgtgctaaactttantaaagtgttgtagcactgtagaaatacaaggcctaaatatccaacgactgttgcagattgttgtcgcctctgtttcacattatgagggactcctatgttcatcctctataagagattcaggaagagccactctattgggattatggcttgtagcgcacaaaattgagaatcaaaatggagcatgatacctcgatcttttaacaaagaattacttcagacatcccgcaacattgtagaaatgataaagttggtacataataaaaatcttttattagttacaataagcttaacct

SEQ ID NO: 8666 - DNA, 419 bp, Zea mays
agcttgtgcatagctcactggaactgatcttttgttaaacccgcccccagtgccacatgttaccagagggtccaactcaaaaagcaatgtatgaattcaaaataattgcagacaatatcactacaagggacctggtccaggaattcttggctttcaaagtttctcctagtgtaaaaaagtgggaaatgcccaaactggagggggaaaaaaaaaagggtgaacttgtacgcttgccttactacttcaaatctaagaaattctttacaactccttgccaagagtggctagatacgattgaagcgatgtgcaacgaaatacttgctaatctattcaagaaagaagatcaatgatgactgcagcctttggcagccgtccaaacgaacgctgaatcgagtattggaccccttggctttcaatac

SEQ ID NO: 8667 - DNA, 449 bp, Zea mays
  unsure (1)..(449): unsure at all n locations
agcttatattctcgatctcatggttggttcctttcttatattaaatatcgcatcaatctttggctgataatcctcgtgatgatcataaaatagttctctgagttaaagaaaattctcatgtgatgctcttttgccaacaatccttgcttcgactttagtcacattgtctgagtcgtactctcatgggctccatctatttatgctatgtcgaattctcgctggttgcgtgtggtaatggtgttatgactaaacgactgatggtgccaccacgaaaccgaaagcctcttgtgggcgcgcacacaaggttgagctgctcggtacgcgctggtatcgcggataatagtcgtgatccattaccagactatactgatgtgctatcttttgtggatattctctcaaagtgatcactgcattntgtctcaacatgccgcgatattctatccacatct

SEQ ID NO: 8668 - DNA, 381 bp, Zea mays
  unsure (1)..(381): unsure at all n locations
ttttttttccatgttctggacaacgggcatgtcacaggcccctggggagctccaccgcccatatacaccttctcactgtcaggaatatggggggcattactctctccaatactgctcttctcaaataatctctccacattcttgcctgttagatgacacaattagttgctgcaacaactattgtgtttcaccaataccctcatgacatgggttttgatttctggggctataataaaccaatanctgataaaggaattctagccaacgataccccattccagcaacctttctagctaccattaatttggcatgtggaaaacctcctgatccgagtctatattcgtggtatcagtacccaaaaacccatataactggaagtgt

SEQ ID NO: 8669 - DNA, 404 bp, Zea mays
tgcgggtcaagatctctactctcttctgtttccgtgcactaaaataggtcgaggtggcaattcttcttttctctccttgctttccaacagggaaacaatagtcacgataaacaaatccgatcacatcaaaaaccttatttaatctcctttttcctcgagcccccaaagcaacgcgcctggccttgtcttatgcctttgtgtaggctcccagcagctcataactagttgcctcaacaacatctagccaatcgtcatttggttcgtcaaactggcttctataccgaaaggtgtatctaagataaactaaaccaccttggctggagccgacaacagtctctttcggcattttccattcattcacaagaggccataccttgtagcaatgtgttcctgtccaaatctct

SEQ ID NO: 8670 - DNA, 445 bp, Zea mays
  unsure (1)..(445): unsure at all n locations
nctaagggagagccatttaggataacaaatgttttttttaganagacaggatttgtagcgcatgccaagcatggaagcaagttggtgcccatcatccacacaagaacatcatgacgaacgacaggccacttgagctactccacatggatctattcggcccgattgcttacataagcatcggcgggagtaagtattgtctcgtaatagtggatgattattctcgcttcacttgggtattctttctgcaggaaaaatctcaaacccaagagaccttatagggattcttgagacgggctcaaaatgagttgggcttaaggatcaagaaaattataagcgacaatgggacggagttcaagaactctcaaatcgaaggcttccttgatgaggagggcatcaagcatgagttctcttctctctacacgccacaacaaaatggtgtagtgga

SEQ ID NO: 8671 - DNA, 443 bp, Zea mays
agcttgagacattattacttaatggtcttgtgttgtccaaaggaaacacttcaagtcatcatatagatgcaccacaaaagcatgtaaggccttcaatgtccatataatctctataatggatcacactcgttcttttgaaaacaattcaaagaacttaagacattcatgtctgattttaagataagagggacttatgtaacaccctagttgttgtcacgtgataagtaacaatttcgaacctaagcaatttatttagtgagtataataaactctaagccacatcctttctgtttatctcggtgatatcagagaccttgcataattcggattgtttcattgcgctaaataataagtccgagtcctgctcgacttcgtcgcaaactaaattagaaactcaacctcgtctcacgactattgtcctaaactgatttattagaactgga

SEQ ID NO: 8672 - DNA, 463 bp, Zea mays
  unsure (1)..(463): unsure at all n locations
tcgaccttaaaactcagctagtggcggaaatttnactggcattggaaaatgtctgtcgagggatggcccatgaaataataaagaagagcgaaaaagatacccatgacgctagggaagcaatgaaggcagctgataaagctgcggaacgcgaaaggcggataggtattgcttaatgggttttaactttattgtttatttttgtgacttcgaactgatttacattttctaccacagctgaactatctcctcccccgagcccttcgagtcattagccgacccagaagcaaaggaatcagcagaaattattagcatgactgaaactattgtagacgaagtcgttacccaactgccgaccgaagctgcagataaagttttgaaagaagaagaatagctattgtaaaaacattgctagaatattaatgtaacatttgctgaactatgtttgtaatatttggtgctcatg

SEQ ID NO: 8673 - DNA, 426 bp, Zea mays
agcttggaatagaaatgggcttctgtatattattataaactgattctgagggcttctgtcctgtgttcagcttacgcatgtgccatccaactgcgtgatgttttatttattctcgaacacgatcgcgagcagaagaactctttaaggccatttacaacaatagcgtgtaacgttgtgcactgtttacgaagtgtagttttgtcggcgtttcgagaccgggggtccctaagccgacgagtgagtgtgccgcgtgccccaccctatatgggtcgagcgcgtgggcgaccgcgaaggggggaagcgaggtggccggagaccggcgtgagagaggtggaaatcccgcggccttcgtgttcgtctcgcgcccaggtcgggtgcgcttgcagcagggggttaccagcgtccacgccggtgatggaagcgagc

SEQ ID NO: 8674 - DNA, 404 bp, Zea mays
  unsure (1)..(404): unsure at all n locations
gtggagtagntgatctagtatgagagaagaacagaacagaacttgctcaacaaaacagaacaggttagaaataatggatgtatgcgttgtggaacacgattttattgtaccacatggatcacatggttgtgtcacaactgatcttatttgtttgtgttgcatattaaatttgcttctccaaataaattactcctataaagtaggcattggagatgatagtttctaattatgaagtcttggatctatagaaactatgggtgatctcggcattgggagtgccctaactaatggaagatatttctcgttaattaaggctaaacacaaggtctttttttctatatttgaatagggtctaatgcaagtagagcatatctttcgtaaaagactatgctcacaaagacaaa

SEQ ID NO: 8675 - DNA, 442 bp, Zea mays
  unsure (1)..(442): unsure at all n locations
agcttagcaaaagaaattctagattttttttattgagctcatgcccaagtccggtaaaagattgttcatcaagtggctcggtaaagatatcggctaattgatctttagtattaatgtaagaaatctccatatcccccttctgttggtgatccctaagaaaatgataccgaatggctatgtgcttaatgcggctatgctcgacgggattgtcggccattttaattgcactctcattatcacatagcaaagggactttggttaatttgtaaccgtagtcccgcacggtgtgcctcatccaaagtaattgcgcgcaacaatgtcctgcggcaatgtactccgcttcggcggtggaaagagcgaccgaattttgcttctttgaagcccaagacaccaaggatcttnccaagaactggcaagtcctcgatgtgctcttcctatcgat

SEQ ID NO: 8676 - DNA, 455 bp, Zea mays
  unsure (1)..(455): unsure at all n locations
ctatcanatggacgtgaaaagtgccttcctcaatggactctctcttgaagaggtctatgttgagcaacctcccggctttgaagatagtgagtatcctaaccatgtctataagctctctaaggcgctttatgggctcaagcaagccccaagagcatggtatgaatgccttagagatttccttatcgctaatggcttcaaagtcggaaaagccgatcctactctattcactaaaactcttgacaatgatttgtttgtatgccaaatttatgttgatgatatcatatttgggtctactaacgaatctacttgtgaggaatntagtaggatcatgacacataaattcgagatgtcgatgatgggggagttgaagtattttctatggttccaagtcaaacaactccaaaaaggcacctttatcagccaaacaaagtatactcaagacattctaaccaacg

SEQ ID NO: 8677 - DNA, 426 bp, Zea mays
  unsure (1)..(426): unsure at all n locations
agctttgcatgagaaggagatgatatgattctctggggtgcttgagagagtcaattcaattcttattaactcaagctatcaatcctcaatgatctatatatccaagattgacccaaagttattttgaattgttatgtctaaaactcatatcatctcggggaaggtattaatgttgtaagaaataaagaattatcctgtgcggaaaaatcaaggcctacaacatggaggaaagccaaaggatggtaacatttatgcttttaagtgcaagtatcttaaattaccatttcttatgtgtcttgtgtagtcacataaaaaaaggaagcacttcaaatgtttgtaaactatgtcaccattctttgaagaaattcctctcatatggtgaatngcatattcatcatttctatactatggcaatctacatgcttg

SEQ ID NO: 8678 - DNA, 449 bp, Zea mays
actcagcttcaattatttaaaaataatctgatataatgcttgtgttctgattcgaacatcagtttcaagaaggcgaccaagaggaacaaacctgataagtgaagaaaataggttctggaagaacattggccttaatttcataatatactgaggtaagccattgaatctcaacatttccttctctaatccaggcgattgattaatgtttctgttagatttagagctcatacaaatctatgaagaatccaaaacacacataggtgcatatattgtttattgaaattcatgtccagttctaaaattacttgcttgctggatgttgtccagtgttgaaaataacatcgcacattcatcgatatactaatgtagcaataaggaggtagattaaataataaaatgaataagatgcgcactatgggttcatactgaagtgttgccaagctacaatg

SEQ ID NO: 8679 - DNA, 245 bp, Zea mays
cactggatcaagaaccggccatgggcccgaatgaatcgctgagccaatatgcccgaaggaaccggccgcgccgaacccgaagaaggatacgaaacattagcagggagatctggagcccccactggacgagcgcctttaaagggttccaacctggagacatgaaaaaatcacgaacttcggcccgggtcgggagagccaagccaaatgcaacctcccgtccctcgccaccttgctgaccaccaaat

SEQ ID NO: 8680 - DNA, 377 bp, Zea mays
  unsure (1)..(377): unsure at all n locations
attgtcataccgaaagaatcaattcacattctcgaagacatggtgagagcctggcggggaagaaacaccggatgggacaagagattgccgtatgcggagcactnctataacaacagagatcaggccaatatgaagaaggcaacaatcccggcgctctacggaaagagctgcagaactccgtcgcacagggatcagcctggagaaaagcaaaagcttgggccagacagatcgctcgaagcccacaagaacatcaagacggccccgagagaatcggaagacagcgcaaacgagggaactaatccacgctcacacaaaaaaaagagagcccagattccaagccggagacataaccaaccgaaagagccccccccacagga

SEQ ID NO: 8681 - DNA, 411 bp, Zea mays
cgagcagccactcaaggagaacacggaagtctttttgtgcaaacaaaaagaacacccggtggagctggtcaagcaggcaaacaggggggaagctcccatcacaccaaaaatgtgatgatcacaccaagaccctcggagatgctccacatggaccccttcaaacccggcgcctaactaagtataggaggaacgaagcacggcctcgtcatagatgacgacttctcccgcctcacccgggcaatctttctgcaggacaaatccgaaacccaagggacccccaagcgcttcctaagaagagctcaaaacgaattcgagctcacgtgaaaaagataaggagcgacacttgggcccacgtcagaacccccagcggaggacaccctaggaggaaggatcaacacgacccccgccccc

SEQ ID NO: 8682 - DNA, 451 bp, Zea mays
atgcaagcttgtctcatccatcgagcaacgtctgtgttgttttttacgacctcgacacccaatgatgaaaaatccttccccatcttgtatacggcatatatcacacctttagaggagccatcccttcgttgaaggtaggctccaatgacgtccacttctatgacgcctttttctccgtggaagagcacccccgacagatggatttggattcgagttttctccttgggtgtagcatcggagctccaattaaagggtgcctcagactgaatgctccggtcgatgacagggagctatggccccagaaaagtccctctgacgacatcccacaaataaaaccatagcctgtgccagctcttgttagaaaaggaaaggggaatcatgttgtactcgcgtgaccttctactgtggacgcagatgctggcacatccgactggccactcttacgttaccc

SEQ ID NO: 8683 - DNA, 404 bp, Zea mays
tttttattcctcaccatgccaaagcgggtcttatcaagcggcttagtgaaaatatacgctaattgatcttccgacctcactccttctaaaatgatatcttctttagcaacatgatctctaacgaagcgatgacggatatcaatgtgctcggtgcgagaatgttgtataggataattaacaattttaacagcactctcattatcacacaacaaaggtactttttttagaactacgccataatctagaagagtatgtttcatatataaaatctgtgtgccacaaacacctgcggcaatgtattccgcttcggcagctgacaaagcaacactaatatgctttttggatgtccatgatactagtgaactaccaagcagatggtctccccagaagacttgtcctatgaa

SEQ ID NO: 8684 - DNA, 354 bp, Zea mays
  unsure (1)..(354): unsure at all n locations
agcttcttatggaaaacaccgctgaattcttctangtcttttcaaagacccacacagagaagagtactaaagacattctacaagggttatctgatgatacccatgacagagatacttatgatgtggaaagtgggggcgaagactcccaagatcggccgtggcgaccaagtcacacagtcttcggaaaattaactattagggcaagtcatcttgataacatgagaggaaggtattttcgagacatatccatcgtgagggctgacaacagagaccggactgctcctgctcctgaagaanatgaagtcataatttaccgaagctttttcaaggctgggcttcggtccctcctaagca

SEQ ID NO: 8685 - DNA, 242 bp, Zea mays
aagataccgatgacagcgacaggtaagaagcggaaagtgggggcgaatactccgaaaatacggcctggagaccaagaaacgcaaccttcaggaaaccgactatcaaacccaggcaccttgaaaacataacacgaaaggaccaaccagaactatctactgtgagggctgacaacggacatacgactgtacctaggcctaaagaaaacgaagccgtaatctaccgaaactacgtcaagcccgag

SEQ ID NO: 8686 - DNA, 412 bp, Zea mays
agcttataacacgagaatagaagcaagatctcttctcatatgtcataatagaaggggagttatacaagcgtggggtctgttccccattgctcaagtgtttatccagatccgaaggtatagaattaatgaaggacatacatgcccgtctgtgtggatctcacattggatctaggtccttgcttgggaaagtttttcaccaaggattttattggccaaaggcagcttcggatgcagcggatttagttcaaaagtgtgaaggttgtcacaaatgtgcaagagatcaaaaacaaccttcgtctttaactcaattaatacaacccacttggccgctgcaaaggtggcgtctggatttgctacgtccattaccaccagcacaggggaacttaagatatgttgtggtggcagtggaata

SEQ ID NO: 8687 - DNA, 435 bp, Zea mays
agcttaccggtctacgaacgtctatgtgcaagtgctatcgtttttgcactcggcaaagacactctttgtcgagtgtaacactcggcatcttcatccacatattcttgttcgctagataaacctactcagtacaacctacgccacaagcgtgccatgacaactgccatggaaagttcttatatggataacttttctatgttctttcttctactacatgtcctccatttcagaaattattagatgatatttgtatatgtaccaattagttgcatgcatgtgcaacttgcccacggatgagtctgaactgtgccagctgggatgatgtgacaactaaaatattcctatacttatgtgttgatgatatgaattgaccgtgcggacggtccggccttgaggtcaaacagttccccgtctggaccgtccgcggtggtggcg

SEQ ID NO: 8688 - DNA, 423 bp, Zea mays
  unsure (1)..(423): unsure at all n locations
agcttgngttctccctcttgnggatgtgtgctttgcatttangaaacctaacgggcggctacagccccggggaatctttgtaaaggctacgtactgagactctgcctactcatcttgggagtgttcaagggtccgtacaacccgaggcaaaaagggaatcacggctcatgggtaaagtgtacaacctctgcagagtgttagaaaactgatatatcagccgtgctcgcggttatgagcggccaagggagctccagtgattagtggtacttgatcagagatgttcggtttgcaggtggcaatgaaaatgatggttcttggttttgactctggtaatggtaagtggtactctttcccgttggaaaggagtacgtttgggttaataacgtgggttaattctaaaacttggctttctctactagtaat

SEQ ID NO: 8689 - DNA, 449 bp, Zea mays
  unsure (1)..(449): unsure at all n locations
tccnctgcacgtcgatgctacgcagatctcagatgtcttgtcactagaagattgctcctgcagcaaacattagtagctccaagtactacatctgtgatgttcctgggcccacatgtcggggctcagttcccttgtacatgccccccttagctattaaaggggaggcatgcaacgttacgggggagaaaaactcagacagagactctcaactctcaagcttccacaacaatccatcatacagtggagtagggtattacgctccggcggcccgaaccactctaaatcctcgcgtgttcatgtgctcgatgatctcttagcaagacaggcaaaacgcttaagccccttcctcatcttaagatttatggcgggtgcattccgccacccggccggagaattccctctccgacacacacccttttggagcacggtttgtattccttccccctcct

SEQ ID NO: 8690 - DNA, 462 bp, Zea mays
  unsure (1)..(462): unsure at all n locations
ctgcggcatgcaagcttgagacattattgcttaatgtgacatttgctgtccgaacgacacacttgaggtcatgatatagatgcaccaaagaaccatataaagccttcgatgtccatacaatctntgtaatggaccacactcgctcctttgaaacaattcaaagaactcaacccattcagatcagattttaagataagagggacttaaaatctcatttccgatgatactcatcaagtatctatcttatgggaaaaacatgaccaacagaattgtccataactcttcatttcatccaacaatggaatgaccaattcagtcttacccagcatggtaagcatcatcacatgaaacgtttaacatatgcaacacattgtacgagaggatgtatgtcgaatactatccataagaaatgttttcgtgacacacatgcaatatccatcactatcactttgtgtttccaca

SEQ ID NO: 8691 - DNA, 381 bp, Zea mays
  unsure (1)..(381): unsure at all n locations
gactcgntatgtctgtcttgggtattttttttatctacaagggtaccggtgtgtcgatctttgtacccaccgncttttgatcttatgccatgtcgtattcgacgagtcttccttttccttgttgccttcacccccacctctgtcccgatttggattcccttttcgcgactaaccatgtggactccccgagcacagctctgtcgtgttttgacgaccttgtgcatgtctatcaccggtgtacgcgggatcgtacattgatcgtctctcgcgacgagccttcggtctaccaccctcctctccgtcaggattctcgctacatccatgcgatggtgactcaccacgccattgaaggccttccgcttgttgatcggcttgtctgct

SEQ ID NO: 8692 - DNA, 407 bp, Zea mays
  unsure (1)..(407): unsure at all n locations
accttcactacaccggcggaatatttcttatgttattgggcctanncagcgtgatggacattctaactccgactatattacacccctaatgaaggaccactgatgtgaccacagggggtgcatgggagccactacaaattatctacttgcgagcacgtgactttgatcccaaaacctcaacacgaaaaccctctagggactcaaagcagcagatcaaagttcaatgcacaccaacggcgttcgattgttccacaaacaatcgacaaacagacctaacttcctgtgaaaaatcacagtcggaaccactaggaaccacgagcgacagtgtctcacgtcagtctggcagaccgatggctgacactatcgggcacactggcgacaatgccaggccaagaaaactacccaca

SEQ ID NO: 8693 - DNA, 418 bp, Zea mays
  unsure (1)..(418): unsure at all n locations
tccactatgggnatgccctgtgcccctcgctcgtctgatttgcctntccatcctcctcccccggagagcaatgagtggcaccagcaggcctacggtgtgctatttatgtcagcagacgaccaagaagaagaagaagcctacattgatgatcgcgagcagtttgcccgcctccctaccatggggatccaaggcaatcatcctctcaccctccgcctccctacccgggtccgggacccattcctggtgaccctaggccatccggctctggttaccatcaccaccctccacctcctcctgatcatcgcacaacttccgcatctgtcttttctgctgctgatgagccacctacggactccacattccaggacaaagagacgaggaccctctttcctgaccacacactatacgctccatcata

SEQ ID NO: 8694 - DNA, 430 bp, Zea mays
agcttcagcatcataagaacccatgattgttgtttataaaacttaatcttagcaaatggatcatggtctggttcaggattatgatgatgacgtctaccattacctcccataccttgtcgattacgtgcgaggcgttgtcgcagtggtgcataaacatcgtcgtcatcgtcgttgtcgtccacaggagagtgagctgcggctggagttggtggtgggggacgagcctccagtacgtccatgtgtgtaacaagttcagcaactcgtcgatcaagctgctcataggatgtcgaggcagagtcctggtattttttaaaagcttcagtcatcgcgcgcatcatctctttcaattccatctgagagacacactcatcgtcgttaagtttacgccccttgtccttgtccatttgattctttggtcctgtcattgtta

SEQ ID NO: 8695 - DNA, 446 bp, Zea mays
tatagattatctagctacttgggtcgctttgttcttgttggattaaagaatagagcactggggcgtggggcagtgagttcgccagcgaagaaccaccatgtaatgctcgggcgccgccacatgccgtttgagaaagtgtgagggaaaggggggattaccatcggtcattgatcgcggatcagacgcctcggattatattcacatataccggttcgaccagatctgatgcgggtcgtttgatcatgatcgggcgcttgcgaattgatctatgcattctaaaatccaaagcgtcagttattgatccactggctcgggtgagttggctggtttggatctaatctccgcccttgatatcggatcgtgcggccgggatgctcctgtgcctcttcggtcaacgcattttgctaaagagacctttggtttttgataaaccaacccgccgtcct

SEQ ID NO: 8696 - DNA, 446 bp, Zea mays
  unsure (1)..(446): unsure at all n locations
agcttcatcttctccatgatggttccattattttttgcacatctttataaccctatttcttgtaactcgagtcaaattgtcaagaatcttaatgggatactccgtgtaagtcaaatcaccctgaacactaagctctctcattggtaactgttcctcggggacacggaggcacttcttaagttgagacacatggaatacattatgtacatcagctagattatcgggtaactcgagttgataggccatctctccaactcgccttaaaaactcataatggtcccccatagcgaggggacaattttcccttgactttgactctcctcattccacgaagtggtgacaccttgaggtacacatgatcaccttcttcaaattccagtggtcttctattatctgcgtagctctcttgcctggtttgagctaccctcanattctctcgaattata

SEQ ID NO: 8697 - DNA, 371 bp, Zea mays
  unsure (1)..(371): unsure at all n locations
gttatgcttgaagatttaatcgtctccaaaacatctaacacattaaccattctttttcttttcggggtcactgttggcccctttttaatttttgctacttcaatttctcctgaaggacttaaaatntctgatatttttacttcctcagctgaggtttttgcttcttcagtctttgattcttccatcttttctgttactggcacttcggccaactctttgatttctggcagcagggttggttctttaacttctgtggccgaagaggtctcaccggcgaactcaggcaccgtggctggttcaatatatcgtggccggtgtgtgaaaacctttacctcttttctcttcancgctggctcgctacgagcggctga

SEQ ID NO: 8698 - DNA, 451 bp, Zea mays
  unsure (1)..(451): unsure at all n locations
agcttatgaagattcttcatcccaacatttgcttttttacggcgctagagccaccccatgttagtcttagcaattaagcaagtgtcgagttcagctctatcaaaatctaccaagtatagctgaccctctaacactcccttaaatgctattgaatcatcatttcttctaaagacagtgacacctatatcagtaaaaagacagttgtagcccatttgacataattgagaaacggaaagcaaattgtaatctaaagaatctacaagaaaaacattggaaatggaatggtcacgtgatatnagcaatttacccaatcctttgaccaaaccttgatttccatccccgaatgtgatagctcgttgaggatctttggttttctcataggaggagaacatcttcttctcccctgtcatgtgggttgtgcacccgctgtcgatatccaactcgagccccc

SEQ ID NO: 8699 - DNA, 433 bp, Zea mays
cttaagtctgcatcttctgatgtgtaattcactaagtagagggtggtgtatctaaagcccttgaatatcattgattcatcatccatttttgttacaataacctctgatggagtgaataagcattgaagtgcaagatcacagagttgtcccactgacaataaattgaagctcacaagtgcaactaagagaacatttgatattgataaatcatttgagattgccaccttgccaagtccttgtacttttccttttgagttgtctcccaatgtgattttatcttgaccatcaaaattctcatctaatgacgtgaacatccgtgggttgcctgtcatatgtcgtgtgcatccactgttaataacccaatgcctcccacccggcttgtagttcatctacattcacacacaattcaatcttgagtattgagagccctata

SEQ ID NO: 8700 - DNA, 407 bp, Zea mays
  unsure (1)..(407): unsure at all n locations
aacgccgcgccggcgaacgcgggccgctccgaagcgcaccggcaggtcctcactcccgtcctcgccacgacagcgaggaagaggacggaatgttgcatcctaactgggcagcaacagttcgccttccccggcatggctggaggacgcctcctccgcagagctggaggatggtttccaccacccgaagctggaggaggaggtggccagccgacccgtgcgggaggtagagccccggctcgcctcgccccaccccagcaaggatgataaacatccctgaatctganggaggggcgggggccgcagcccggcttgcttctccccatccacgggctggtggtcaccgcctaggatgaccacccgcgaggggatgcagccgggctgcctgatgaaaattcttgaagccgaac

SEQ ID NO: 8701 - DNA, 373 bp, Zea mays
ctgccactcctgcaccttatcagaaagtgtttgtctatttcctgactttagaactaattgtctccacattttctatgacaccaatgattagacacttaagcaaagatatgctcctaatatagctctacaaatttgatgtattgaccctaaataaaatccttgtattcttaaaaatactgagctccaaagtcagccctattcaactgaattcagacttaatacatatggtttcatggggtactttttgcaaataagatcaaatcccataatttgaattgaaactcctcaaatgtgtgaaacataataattgggtgttcaatacttcggttttgcacttgggtcctaaactgcccaaaatttacacttaaacccc

SEQ ID NO: 8702 - DNA, 428 bp, Zea mays
agctcgcacttacgaccattttttacctatatctctatcacatccaatggctcaacaatagtggtaaggtcaacgtcacccagttggtaccaattaattctgctattggtctatatcgcgatgttgctgactgtgatgttgtgcctatggatgcctgtaatattctgctacgtagaccatggcacttcgattcacattgtatgcatcctggtagatcaaatcaatattctctcatacaccatgaatagaaaattatttcgcttcccatgtcctctgaagctatcgtgcgtgatgatgttgctaaagctacccaagctaaaactgacaacaaccacaatattaaacctgttggttataacaaagatgcgataaaattgaaaggacattgcttgcttgtcacaaacactgatcgtaatgaattattcgct

SEQ ID NO: 8703 - DNA, 440 bp, Zea mays
agcttgcacacgctgaggacaactctttttatttaacacgcggcggaggcagagtcaaaccacagtagcctgtgcagctttctagacagagcggaggccgctacccgcacataggtcgatcgagcgcatgcattgctagtggacgtgtactgacagcttggtgcacgtaccaccccctttgatgcgtcttgtaaagaagtgggcctccgctttctcagatggttgcacgaggagttggaggtgctaccgacgattgtgacgggtctcatgtccttcgcctcgctcgtcatctgcgaaggggccgtgaatgccttgttccatgagggatgcaggcatttcacagtctttgaccgatcggacgaagacttctaacgcggaattttccaggtcgaagacccggtgctaaagcgatctgctggggcgctctatgataggatgtg

SEQ ID NO: 8704 - DNA, 444 bp, Zea mays
  unsure (1)..(444): unsure at all n locations
actcagcttcggtcaaagtcgagaagcgcggcacctgtcgttgttgtatgccgcctgcatggctgcccgccccttccgcccgttggtctgggcaaaagtggggggtcgctcgtaaccgctggccggtcgtgcgcaccacgcgcggcggtttggcttcttctgccctgagccggtttgcatgacatgcgggacccagcccccgagtcgcaggggagggccttggagcgtgttggagaagactcatcccgcggcgtctgggggcgcacgtagggagagttgcctttaaaaggagggagactcctttcagaaggcaaccatgtcttcttcctcccttatgcgtcgtgtctttccatcttccaagcccccggatggggggtatacaccgtctttccgcctcctcttcngaggaacgcanactcctgggagttggtacctttagccatc

SEQ ID NO: 8705 - DNA, 431 bp, Zea mays
agcttcaacttaatttgctcctaattattttttcaaccttacagctcccccttcaatactacagggcatctagtaccaagtgactaagcacttcctttataaaataccttgttgtagtttgaactttgaacaactaagccattcccatatcatcacttcagattaagccttccatgtaatgagagttattgattcaagtacaccccaacatatgagcacttgtacctaacacaacatgattcaagatctggattgcttgattgctggccagaccatcatagactcagaaaaatttgacatagcacttgttcatctactatgtgagagctatcgtaacacaatctatatgacaggatcaattattgaaaggaaaaaacttagacggtatgacctgaaaccagtagaccacgaaatcagtgaaaaaacatact

SEQ ID NO: 8706 - DNA, 400 bp, Zea mays
  unsure (1)..(400): unsure at all n locations
ctgcttggccgtgtcaactattagctcggacggtactccgaagcggcaaacaatgttntgccagaagaatttttgggcagtctttgatgttattgtggaaacagccctcgcctcgatccatttggtgaagtactcgacggcgacgaaggcgaacttaaggttcccctgagcggtgggcaggggcccgacaatgtccaggccccancgctggagaggccatgtatgggcgatcaactttgtatactgcgaggggctgcctgaccggggagaaaacttctggcaggcttcgcaggaccttgtgacccgatttgcggcgcagatcattgcgggccaataaaagccctggcggatcaccttggcaactanggcccttggccctgcgtgtgaaccgcacgtgcca

SEQ ID NO: 8707 - DNA, 432 bp, Zea mays
  unsure (1)..(432): unsure at all n locations
agctttataaactaaagactcatggtattttatcgcgcaaaagctaaaatacgagcgggcgagagcaagtgacaaaagagcgtaccaaatgagctcgcggtatgctcttatttatacgctcggtgcggaaaaaattgaaagaccccgcctgtcagtgaatgttgctattctagcaaagggaaggtgttttttcggacctccggcttaaaagccttcgtccatgtcgcaatctanatttattattttaataaattaatattgcgaggggctactgttgggggccttcggcttccgaaggtcctcacaaacatgatttaacagtgtttctagagtgtaatgtgtgaacaggtaccttcggacttgtatcacagagggagaagctcanaagatacgaatggtgacacagcgccgaagctgtgaagcaggaaagct

SEQ ID NO: 8708 - DNA, 384 bp, Zea mays
ttttttgttgtaactgtgccccatggctgtgaaatctgcatcagagtcctagagcagtttccaggctgaatccaccaaacagtttgttttgcagagaagtgattgcttgcttatttcgtgaagggatttctgaaatgaactataaggctatgagttgaaaacaaagtagcttctctttcacttccgtcacataatcactttctacatataatttatcctattgaaacgctttcaaccatcgaattacttctcttattgaatcacttcccacagataacatgcctaaagctacaaagagcaacatacatttgataagacattttttagtcgacacttttatgacttatgtggtcaaattacattttctcttatcatttccgatgc

SEQ ID NO: 8709 - DNA, 441 bp, Zea mays
  unsure (1)..(441): unsure at all n locations
agcttatcgactntcaaagactcaatnttgcttaaaagcttactaatagtggatccttatgccaaactgttacttcacaattaagtacttttcctgaatctagaatggcctaatctagatcatacacttggcctaatctatctttcttttaatcctttttatgttacacttattatctacgatgtagggcagtgatccagtcttcatatcgagaagtaacggcgatccgaatcgattaatacccagctgtggatctccaaccataggacatatgtagcacttaacccttgcatatgtcacctcgcacccaggtttctcatgaccagaacgggtccccgccaaccgagagctcagtaccccaccatctagcctattgccaggtggatacacgttactctcgccatctctccactcccattgcgggtcggcctttctggtatt

SEQ ID NO: 8710 - DNA, 464 bp, Zea mays
ccttgaactcagctgagcgtctaaactgggtgagaaaattcatattgaaaaatcattgaaggatctccaagagaaatgcctaaattttggcagccgatgcgtgcagcggctgaaggacgtatttcactctatcggagccagttctgaaaatttctcaccttcagccgaaaacctgcccagcaccttggaacatattgaaggcgaggttgatgctcttgacaaagttattggtgggcatgccgatttctgcgccctggtagcttctcgaggcacagctgccgcttttctgaaggctggctgtacgcacggaaaaattgtgaatagaccaaacttcagcttgtccgcagcagacttgattgatatcccgagcctagcccgaagcatcggaaatagatttatgacccagatttgggtaaatggtgggcgaaggatggctggtgacgaagctcgaagtcaccttaagc

SEQ ID NO: 8711 - DNA, 443 bp, Zea mays
  unsure (1)..(443): unsure at all n locations
agctntacatctataagtgtcttatattaatgcacatgtccatcctaaagcacttgtgcctaactatgactaataagttggttcacatgtttgaattgatgcatccaaatagttctatccgagcattctacacatgtggtattatcgtgtaactaattgacaacaaaaagttcattatgctccgccctttgaaatttctattttggcgttcgcattctagcctaaggagaggtgctacttcattccatgaactaatgggcccaacaagcttgacccaaggttcctcattttcaagcattagtgcggacagtccaccgaccacgggtgaacggtccacgacctgataataagaagcactcgagcactgaaccgacaactttaagatgggcagactgtgtacccttcgaggccggacagtctgcaccctagagtagtactttccg

SEQ ID NO: 8712 - DNA, 359 bp, Zea mays
caccagtccaacgcctccggaggactacttggatcaagaaatccaaaacttggagatgctccatcaacatgtccaactgaagaaagaaaagatggctcgtctagctgaccttcaaaggcagatagacgacacctctgaagaaattcgtcgtcttgctcaagatgactagaaccgaatgccttcgcgcagagagcttcatcatgagggcttttacaacgacgacgactggtttgaagatttccatcatggaaatattgcttttgatgatacttctcctctgtcaacagaactgcaagctacaccttggtcccaatcttaccagccaccccaactccccatgtactatggtcattcatacc

SEQ ID NO: 8713 - DNA, 440 bp, Zea mays
agctttgtccacggttcagacggtctgtttaaccaggatttccctccatcagctaccaagcctgtagatcaatcggctgctgcctttctggttgagcaaccaaatctataccctggacaagttaccattgtcgccctcagtccactaaccaaccttgctctggtttgctctcctctccttcgcgttggttaaccactacagtacatacattggttgcacatatcaggtgcatctcttgcaatctagcttgtatgacctcttttagttgattttttgctgccggtctctgtttacctagacagtcgagcttgaccctttgttctcgaagaatatatggcagattatttttcttggcggtgtgtattcaattaatggtaatgtgaactatgcagctgaggcaaatgtgaggggtctcttctaatttcttcgatatgttcttt

SEQ ID NO: 8714 - DNA, 448 bp, Zea mays
  unsure (1)..(448): unsure at all n locations
cgatagtggagacgacggggagcgtccgataggatctgtatacggagcaccacttgcgtgtggagaaggcccgtggctttctacagagttactcgaccgtggtgcttggccctcgcatgagcttctctttgcgtaggggcaccaacgaggattagtcgaaaccatgcgtggttctcgatacctcggtaaaaatacttgtgtcatccacgagagtttgcatctgtaccttgctctttaccttccgcatttatattaagtatttaaatttcaatcttgtctttctagttagattatttagattgaaacttagcctttgtggtagagatagaaacacctacacaaaacctagtttgcacattctaatttaattatttgcataggttttgctctanggttttatntgtggcctaccttagagaaagttttagaagtcctaattcacctcccc

SEQ ID NO: 8715 - DNA, 433 bp, Zea mays
agctttgatccggataaacatcgtctttcactgggcgtcaagagattgatggtatatggagactctctggtagtcattagccaaataaacaaagaatgggattgttcaagtgattcaatgggaaaatactgcgctgccgtacgaaagctggaagataagttcgagggtctggaatttcatcatgtggaaagggatcgtaacacagcagctgatacactatccaagctcggatccggtcgaactcaggtcccacccggagttttcgtgcaagaaattacacgaccgagtatctcaatagatcaaacagaagagtgcaacatcgtagatcaacccgagtcagaatctgatgactggaggaggccgatcattaagtacataaagaacgaagaagagccagacgacaagaactcagcagagcgcattggcagacagt

SEQ ID NO: 8716 - DNA, 446 bp, Zea mays
  unsure (1)..(446): unsure at all n locations
ctcagcttcgtcttaaccgtgctgttgcataccctttatctatcttctaaggtacctggttacatatctctcttggaaaatattgtctaatcatgtttttgaggaccttcggaagccgaaggcccccaacacttataaatggcccaagggcacatttccctttcatattcaaatgctgattgtgcagggtgtaaaattgatagaaagagcacatcatggacttgtcagttcttgggaagatccctggtgtcttgggcttcaaagaaacaaaattctgtagctctttctaccgccgaagccgagtacattgccgcaggccattgttgcgcgcaattactttggatgatgcanacccttanggactatggttacaaattaacccaaagttcctctcctatgtgataatgagagtgcaatccgcatggcggataatgccgttgagcaca

SEQ ID NO: 8717 - DNA, 314 bp, Zea mays
atgccacagccagcccatgctggtattatcaatttagcatgcatctagaccggcctcttccttcgaaaaatcaactaaataaagtttgtcgtctagtacacccttaaaagctaatgaaccatcacaccttctaaagacggacacatctacattggtaaataaacaattgtaacccatattacaaagttgactaacggacaacaagttatacctgagcgattcaactaataacacattagagatggaatgctcggatgaaatagctatctttcttagtcctttaaccctggcttgattcccgtcaccaaatatga

SEQ ID NO: 8718 - DNA, 403 bp, Zea mays
  unsure (1)..(403): unsure at all n locations
gaactatataactcttataatcaccaagaagtgattctatgtntaactgaatcaaacaattcagttttcaaaatctgttctgtcagtggacagaacacaacaaccagtttgtaaaattcataactcttaaaccgtcaggcctatggttatgaaattttaacacaagcaagatgagaaaagtatctacaactttcttataatcgacaaggactgattctaacattaacttaagcaaacaatgcagtttctgaaatctgtacagaatttggacagattcagttactgaatttgtaaaaagcataactcgtaaacgatcagacttatgcctgtcaaattnttacacaagtaagataatagagttattctaccactttctatagcacatatctacagaaaatacaat

SEQ ID NO: 8719 - DNA, 405 bp, Zea mays
  unsure (1)..(405): unsure at all n locations
tcttcataccacatgtgcttttctgcgatgcctcatccagcccatgctagtcttatcaattaagcatgcatcatataccgtgcctcctcttttgcaaaatcaactagatatagttttgttagactaatacacccttaatagctaatgaaccatcacttcttctaaagacacacacatctacatttgtgaatatacaattatatcccatattacataattgactcacagacaacaagntatatgcaagcgactcaactaagaacacatctgaaatagagtgctcgtatgaaatatcaatttttcctaaccctgtcaccttgccttggttcccatcaccgaatatgattgaatcttgtggatccttgttcttgacataagaagaaacatcctcttttccccgtcatg

SEQ ID NO: 8720 - DNA, 374 bp, Zea mays
tgaaccgatggcccgcgtcaccggagaagccaaatcacgctcacctgagttcaagaactcgccggcgcacgtggaccgggtaaaccccttcaccattttccgattcgttgcgcgcacggcctttgtgtcaccccgtgaagctcctcgtgcaccctaattgacctatgccgccgtggtttggccggagcaggcaccgccgtcgatccccgccgcctgtgttcgtggacaatggagctccgaccacctctgacgccgacccgcacatcgacgtgaccgtcgcaacctcctgaacctcaccgaccacctcgccggacctacctcgccgtcggtaagccgcgccaccctttccttattcgcggctactgtttcaattg

SEQ ID NO: 8721 - DNA, 453 bp, Zea mays
  unsure (1)..(453): unsure at all n locations
cttcgactgcgtctatgttatggatcgccttttaatccgtacaactcccttcagctctcttggcagcttcttgactcccgtgaacagcaatggacccttgttccgaatgtatcttcatgcataagtacgctgagtggagtatggcttccaaggcattaagcgtccctcgaccaatgattgcattgtatgggtattccatgtcaacgatgtcaaagacaacttgttcataccgtgtgttgtggacgtaaccaaatgcaactgacattgtncatttgccaagtgccacattctgcctccctccaaagccacaaagagggtgtgttgcataatgaatcttgtcttctggttcttgcatctgtctgaacgcacttgcaaatatgatgtccgttgaactgctgtgtaaccagaacattgggacatatatccatgtgacacatatataccatggatcat

SEQ ID NO: 8722 - DNA, 516 bp, Zea mays
  unsure (1)..(516): unsure at all n locations
ctatgaaactcagcttgaaataacttaaaaggacttccttctgaagttgcaaagagaatgacattcanagagcagttaactagagaaacttggctaaaggaaaaaggcaacacactatcacaccttcttgctacccctaaaggatccctacccaaaatctcggggcgagattcctttaaggggggagggctataacacctcatgtgttaccaaggcactgacttcatataagcactgatgatttgttatcatgtggttaagtggaggagaagaagcacctaaaaccttggaagcatgggttagctaagaaaggttaatgacaaaagcttcacccacacattttgaacaattgtcatcttgagccaaggaggttaaaccctaaagacacctaaaggcactagacttccaagcaatggatcagtggataagttaatcaaattgccaaaccttgattctaatccttaaccatagtgtaagtaacattataacctaccaaatgcagatgggatacattac

SEQ ID NO: 8723 - DNA, 172 bp, Zea mays
gtatcaattatttttgtaagatacctccactatgtaataatatgtatgacatttatctctatacacttggtcattatatgtgttgttcttctttggcacacatatgatacgcacccgactttatcctttaaatctgggtgtgacaaaacgttggctccccatcgactgtgtg

SEQ ID NO: 8724 - DNA, 401 bp, Zea mays
  unsure (1)..(401): unsure at all n locations
tgnttggattgtaaggtgatacctggagagaatgttgtgccctatcataatcttgtggtgactgacttccgttttcggatcactacccataatgataaataagccaaaattgcgaagacaaagtggtgaaaactcaaagggaagacattcgaagtttttatggaaagagttcttgtggagggcgcttggtctgaagaataagatgcaaacaacatgtgggtgaagatggcaacttatattatgaaggtggcgtcagaggtgtttggagtgaccaaagggagcagcggtgaacctaaagatacttggtggtggaccgatgatgttcaaaaggcaataatgagacgaaagaatgttacatgagctcgttctatgacaggagcgcggtcaacatatagagatat

SEQ ID NO: 8725 - DNA, 394 bp, Zea mays
  unsure (1)..(394): unsure at all n locations
atacagctgactatctcatatcctatgaagtaccctcctaaaatgttcctcatgctcttgctcattctaggaatatataagaatatcattgatgaacaccactatgaacttgtcgagatagtccatgaacacactgttcattaagtacatgaagtaagctggcgcatttgtcaaaccgaatgacatgatcgtgaactcatatagtccatacttggtgatgaatgctgtcttcggtatatccgaaggtcggattctaagctaatggtagcctgacctcagatctatcttcgataacacactggctcctctcaactgatcgaataaatcttcaattctgggtangggtacttggtctngatagtgacttcattcatagatctgtggtcaatgcaca

SEQ ID NO: 8726 - DNA, 512 bp, Zea mays
  unsure (1)..(512): unsure at all n locations
tcttaccccgctcttataagcttcttactagcactactgtggctaacgatggccggtgtgacaacacttagagcatgtgtgtgattgcaaaggagtgcatcttctgcttatggatggcagttggacccgtgggtatggatacccgcgggtttcgtaccaagcgaatatggatactggtagaaaaactcactcgtgggtcctatcgggtcggatacccgaaatacatcgggtcgggtatgggtaaaatactttacccacgggtatccagtggatacctgaaatatcaatatacctctataaatgtgctacatccactaaaaatgtgttacattcactagaaaaactcacccgcatgtgttgttgattaatggaatattaattgtgtcgtgttaacagtcaactataatgtaatcgagaccaatgagacattgacaatgttatgactgtcaactgtcatgaactcattatagtnttaattctctgtactcagatttaaatttatnggatgtgat

SEQ ID NO: 8727 - DNA, 346 bp, Zea mays
ttcctgacattatggttgcgagttttgcagcttcagcagcagcgtctgcttcggcactcgcaacaatcactattttggccgctagggctgacggcggtgttcgctcgatggcttgcatcacgtctactattcttcgtttcttttgcccttaagccttctccttaatagccaaaggttgttctttcttctgtaaaaatttcgtcagttctagtcctagatgacttagcagcttgatgggcagggagtcagtcattacctttaaaatttctgctacttcggcaataaagggtgttgaatgagcttcgtctgtctcatccaccttcggctcatcagatgaagttatatc

SEQ ID NO: 8728 - DNA, 481 bp, Zea mays
  unsure (1)..(481): unsure at all n locations
atatatattctgagatgaccagnggcttcagaggaaggctccacccaatgcatgtcagaacaatacacaatcccaaccaaagtgaagacagaggcaatcacaaccaatgacatcaacacagttcctagtcatctaagatgcagcaaagctctttcagaccaccagccccaataggcagagggggatgaagctttggaggaagatttatctcacaaccaagaagattgttctgcttgttctgtggagaagataatgggcacataactaggacatgccaagttacaatatagaagcaaaaggagatagttgaggccgaagcatatcagaatcagctgaagcaagtcctacatactgcttcgtgctattcctcgtacattcttgagtatgtgggcaatcaatagctcattttacaacccacaatgttagtagcttctgcgagccactcccgagctgcatgggccttgccaccaccatctgtcat

SEQ ID NO: 8729 - DNA, 373 bp, Zea mays
ctatgttatggattgctgttgagtctgtccaatttccttcgaaccttgtggcagcttcttgacttccatgaatatcaatggtcccttggtccgaatgtatcttcatgcaaagatatgctggatgaagaattgcttcgaaggcattgagagtaccacgaccaatgattgcattgtaagggtattccatgtcaacaatatcaaacacaacgtgttcagtccttgtgttgttaataaatccgaaggttactggcattgtgattttgccaagtgctgcaatctgccttactccgaagccacaaaggggatgtgtggcatcatggatcttgtcttcaggctcttgcatctgtctgaaggctttggcaaatatgatatc

SEQ ID NO: 8730 - DNA, 356 bp, Zea mays
  unsure (1)..(356): unsure at all n locations
ctacagtgaaaataaacgctgattccgctgaagtaaaaggcgaagaagctcctaaaggaggcttgtagtgaaaaaacgtcgatcttcggcaaatatcattttgcataacatcacatcattacatcatttgcatagcataacatcatacatcatattgcatcaacgacgcaagaagggggtcttagtattgatattcgaagattgtttcgaagaaatagtgctagggcacaaaaatagctattgaagaactataccttcgtcaaactctgaaatgaaaagatctattggttattgattttacgaggattggttactgattntatgagaacaccgatattatttacgaatcatgaaaa

SEQ ID NO: 8731 - DNA, 362 bp, Zea mays
  unsure (1)..(362): unsure at all n locations
cactgtggcccttgctgctggctcactctatcatcatattgggttgaggtttgaattgatctaacgtgccctggatagaaccctcctccgaagcccctggtcatttcagaaaacctgatagcctgctcccttctttggcgaatatcatagtcgacacagatatactcgtncatcttctgaagcagcttctcaaagtttgaggaggcttgctatcaaagtactgagctgaaggtccatgccgaagtcccttgatcatggcctcaataacaatttcgttgggcaaccgtggcgcctgtgccctcatacgcaagaacctccggacatacgcctgaagtattcttcgtgatcctgtgtgcactgga

SEQ ID NO: 8732 - DNA, 379 bp, Zea mays
  unsure (1)..(379): unsure at all n locations
tgattatgctactntattaatgattgttgcaatcctcgatgaaagtgatacttctttaccaaactggattgagttctagtagcatacttcatgagaaacttattctcatactcgagactacatgagattactaagagaaagtgttagtctcaacatgatgaagatatagaaatgggcttctcctaaagatatgcatcatgtatttgaatgacttggttagatgcactctcctttaaagacaaataggagaattcattgaacatcttgatcaaggcatatgaaatttgtaaaaatcagcttatgtctggtattctcaaaatgagaaaggcttacaatacttacgaccacaccattgattaatttgaagatcttactggct

SEQ ID NO: 8733 - DNA, 386 bp, Zea mays
  unsure (1)..(386): unsure at all n locations
cagagtctgtatgttcatctttatatatttctacccttttttcataaccctaaaaacttgagtgaatattcgtaatcatttgcaccaggttggaaaagatgtcatattatatgccatgttgagatttggtttgcctgtggcttaagggacaattggttcaactaaaccaagcaccacagttggatgccaagtccttggaaggcaatattgtgaagttattgtaactggtgtgctaaaacgagatatagtttngcctctcccttgtgccaatgtggaaactatggctgatgcttacatgatgtcagtgcatggcccgacaagaaaatgatattccatatctaacttgcttatatttagaattatatgagccatcaacttaataatga

SEQ ID NO: 8734 - DNA, 434 bp, Zea mays
  unsure (1)..(434): unsure at all n locations
ttatactcaagcctcgacttcgcgctcttcagctttgtcgacttgctcttcatctttatcaatttgctctctagctncgtcatcctgtacatgtttaagtatggcaagaattattcaagttttaatggagaggtgagcacaaggtatgattttgttaccggcttaagatggcttcgagcttcgtcaccagccatgcttcgtccacccttagtccatatcagttgtataaacctgttttctatgcttccagcaagattggggatatcaactagatctgctagtgacaaactaaagttgggcctattaacaatatctccatgtgtacaaccagattttatgaaggcgacagctgtgccccgagaagctaccacggcacataaatcaccatgtctggctataatttcatcaaggtcatcaatctcaccctcgatatg

SEQ ID NO: 8735 - DNA, 333 bp, Zea mays
catggttcatgataatgatggctatattttatatcctgctaattatcccgaacacaaaattaggagaattcatgctaagaagtctcattctgtttctcaccatgcatttatgtataagaatgatgcatctagctctatgattctacacatgttaaaatgcctaaaaaggatactcctactgcatcaaatgagcctaacatttcatttaaggcttttgatgcttcttatgtgcttactaacaaatcatgcaaagtagttgccaaatatgttggggacaaacacaatggctccaagacttgtgttttggtacctaaggtgcttgtttctaatgtg

SEQ ID NO: 8736 - DNA, 169 bp, Zea mays
cgccttcggcattactaccggctctacgatctttcttgtgggaagagcacgtatcttttgatgcgagcacatgaatgaactttccgcgcatattcatgcactatggtcagttcaatgtaacgcggtctgaggcgaaagaccttcaattttatactcttccgcgtagcgc

SEQ ID NO: 8737 - DNA, 276 bp, Zea mays
gcaatactaataaacgctatggtgacttaacacctacccgtctgtctatatatacgctgcatgtgggaaggtgaatcatgaagtcgatcgcacccaatgaacagtcgcccacacacactgaacagtgaaccacagtgcgcgagaatgtgaatcaccatatcgcgtgtacccgtcgtatggtgggaccaccttgcactcggaatatttaatcgttcctggacaacgacctcacggaaggtgctgttccgaccttcggaattcctaaccctatgagaa

SEQ ID NO: 8738 - DNA, 401 bp, Zea mays
tgtgcagagatccgctcgaactaatcttcggagaaacctgtccccagtgcaatatgacaccagaaggtccaacccacacggcactggctgagttcagaattattgcggaacacatcggcactaaggatttggtgttggaatatctggcttctaaagtatctccatctctgaaagaatgggctatgccgaagcttatatgagagaagacagagggggagcttgtccgactaccttatcattataaatacaggaaatattttaaggcaccctgccaagaatggatcgacacaatcgaaataatgagcactgagattcttataaattactctaataaagaggaccatttgatgacaacactcttctgcacccgtccgaaactaaagctaaacatagtacttgat

SEQ ID NO: 8739 - DNA, 376 bp, Zea mays
  unsure (1)..(376): unsure at all n locations
ttatcagatggatgtaaaatgcgcattgttaaatggcttcatttatgtaactggatattgtgagcaaccacctggatttgaagaccctatatatcctaaccatgcattcaggttgtccaaggcgctatatgggctaaagcaagctccaagggctgggcatgagcgtcttcgcgacttcctcatcgaaaagggcttcaagatcgggaccgtacacacaactctattcacaaagaaacataacggtgatattttcatttgtcaagtatatgttgatgatataatctttggctcgacaaatgactatcatngcaaggaattnggtgagttaatgtcgaatgagttcgagatgtaatgattggtgagccgacgtacttcc

SEQ ID NO: 8740 - DNA, 435 bp, Zea mays
  unsure (1)..(435): unsure at all n locations
acactacccactactcaagctntatgggctcatataatatctaagcatagtgctactaaagtatcttctgttgagcttgtctatgggcaggaagcagagttacctgtggaaataagtttgaatgctgtcaggattgccagacaaaatgatctaactgctactgattattataactcaatgatggataatattgatgaggtgaccgacaagaggatgatagctgtatgagcaatagaaaaagacaagatcatggttgccagcgcctacaacaagaaagtcaaagctaaatcattccaagtaggagacttggtgtggaagaccattctacctctaaggaataaagaccgaaagttctggatatggtcgccaagctgggagggtcctcataaagagaaacacgtgatgtctggtaacgcttatttactacaaacatta

SEQ ID NO: 8741 - DNA, 342 bp, Zea mays
acccatgacaatgcatgtgaccagtttatggtcctcgatcatcaagcctacatacgcatccaatccttaatcaacctgggtagaacatcacctgttcctatcccaagttctgatttaagtacttccatccttaggattgtttgtgttccttaggatgaaaagagcatcacagggaactttgcagtaagatcccaccatgctcccaatgaaaatatattcttgcatgtagaagccatccttcgtcaggataacccctgagctatgcagtattgcaaaagacaacctctatccacaagatctaaccagggctaagcatttgtttaaatcatattgtgatacttc

SEQ ID NO: 8742 - DNA, 433 bp, Zea mays
tagcacggcacaccttggtatgatgttcctctccaagctataccctataatcgcacgttgctccattacttcgcttagttcaaccttcagcacatccaggaagaaccggatcttcttctctatgatctcatcagagaagttaactatattcggctgtttcttgaacgctctctgcagctcaccctcggacaccccgaagctccggtaaagggccaccctatgcagccacttctccctactaatgcatcacaaggcgcggatgccgtatggaaagcgcttctccgttacgcccaagccgagctccttgagggcctcgaagatctggcatatgcggtcgggcgacatcatgagcacgcccatctcgatgactactaacttcgagatagactcgctcgaagcccaagacagctgatggtgtcaaagcgggcccatg

SEQ ID NO: 8743 - DNA, 358 bp, Zea mays
gcgcgcaagagatattatcgacttatcatgggcagatggcaagtgcacgtaccataatgatgttgctgtatggccgtatttatacactctgtgcgttgaaagctgaaagaccccacttgtcattgaatgttgctattctatcaaagggaatgtgtattttcagaccttcagcgaatagcgcttgtccatatcgcaatctaaatgtattattgcgaacaaattaatattgcgaggggctactgttggggaccttcagtgtccgaaggttctcaaaaacaggatttaacaggtttgctgctgtacaatgtgttatcatgtaccctccgactatagtctgcattgcagtggaccggaataa

SEQ ID NO: 8744 - DNA, 458 bp, Zea mays
  unsure (1)..(458): unsure at all n locations
gctgtagcacatgagagcaaanacgaccctcggtttgcggagtttttgctgcgcgtaagcggtggaactaaagaaacaaatattgacagcgacattcgtcttcctgatgatgtgtgtgtgccttacagtgggagtgacaacgatcttgacaacctaatagacttcgctttcccaaatctcaacgaaaatatgtctgattccacctacatcacttcaagggcgatactgtcaacatggaacgactgggttgatatgataaatgttaagatgattgatcgttttcaaggggagcatatggtgtaccatagtttcgatagcgccatggatgatccccataactactacccacccgagttcctaaacacattgacgcctaatgggctcccacctcatagtttgaagctcaagattggatgtcctggtatattgctccggaatatagaccctgcatatggact

SEQ ID NO: 8745 - DNA, 394 bp, Zea mays
acatgtgcttagcggcgatgccacagccagcccatgcaagtcttatccattaagcatgcatctagaccggcctcttcttttgcaaaatcaactaagtaaagctggccgtctagtacacccttaaaagctagtgaaccatcacatcttctaaagacagacacatctacatttgtaaataagcagttatatcccatattacataactgactaacagttagcaaattatatccaagagactctactaaaaacacattagagatagagtgctcattggagattgcaattttacctagcccttttaccttgccttgattcccatcaccgaatattattgaatcttgggaatccttattcttgacgtaggaggtgaacatacttcttctccccgtcatat

SEQ ID NO: 8746 - DNA, 417 bp, Zea mays
  unsure (1)..(417): unsure at all n locations
tgagaatggctggccgaagcacagaagtcgtaggctgttgattgtctacatactctggaacatacagagagtagcatgaagcggtgtgtagaacctgcttcggctgattctgacgtgcttcagcttcagcaatttccttctgcttctgaatggtaacatggcatgtccttgttgtgtggcctttgtcctctccacaaaaaagactgtacagtttcctgggttggttgccaaaccttcctccactgaaacttcttcctcctctgcccctcggagctgatggtctgaaagaagtcatgcttgaagaactgagaatttgatgaccatgctgagcattgttggtcctgtcatcattggcattggagttgtgaatggagtggacatgcctatgatgaagcctncctctgaagcccctggtca

SEQ ID NO: 8747 - DNA, 292 bp, Zea mays
gtcttggctgtcaaattgcttgccattgtcaactgtgaattcggacgggactccgaatcagcaaacaatgttttgccaaaagaatttctgggcagtcttcgatgttattgtggatacagccctcgcctcgatccatttggtaaaatattcgatagcgacgaaggtgaacttgatgttcccctatgccacatgtatgggcccgatgatgtccattccccatcgctgaagatgccatgtgtgggcaattatcttcgtgaactgcgaagggcttcccgatcgtggagaaaatttc

SEQ ID NO: 8748 - DNA, 407 bp, Zea mays
  unsure (1)..(407): unsure at all n locations
tgccttcgcttcagtctatcatccgcagtccaacggtgtcgtggagcgtgccaacgggaaaatcttcacagctgtcaagaagatgctcctcgatgaanaaaaaggcagatggaccgatttattaccggaggcagtctgggcgttaaacacaactgagtgcagggcaaccgggttcactcctttccgccttctatacggatcggaggcgatgaccccccaagaaataaagcatgggtccccgcgtacagttccgtcagccgtccccgacgtggacgagccaacttcaaaagatctcattgacggagaccgggtcttcgccctacaggccctaaacaaataccaagcccagaccaaagcatggcgagacaagacgggcagggacacccttcgctggattcggcacacag

SEQ ID NO: 8749 - DNA, 470 bp, Zea mays
  unsure (1)..(470): unsure at all n locations
tccatcgataccacctcanactgttgaataccagctgtaagtcttcgatgaagttattcgagttctccgtnttgattaccatgtcatctacgtaggcctccacacgcttgccccagtgatcggctaacatgtttgaatagctctctgataagttgctccagcgtgtttgagaccgaacggcatggaggtataacagaaagcaccgaacggagtgatgaacgctgttttttcctcatcttcctttgccaaactaatctgatggtatctagaatagcaatccaggaaagacagcacagaacatccagcggtggagtccaccacctaatctatcctcgggagcccgaagggatccttcggacagtgcttgttgagatcagtatagtcgacgcacatgcgccaatccacttttattcttttgagtacaagaacagggttggctaaccactcanggtgtaacacctctctaataa

SEQ ID NO: 8750 - DNA, 409 bp, Zea mays
  unsure (1)..(409): unsure at all n locations
tccttcttctcttgttcgaagctctttgatttcgtggagagttcactatttaatctagcaatctcagcttgggcttctgccatcgaaccctccattgtttgaagcacgaaatctttcttctccagagcagcttcgtgatctttaattttgccttctaagccctcaattataatctcatttttcttgtcctcgaggtcttgttgcatcctcaaggttntacttagtagtagactctgagaaaataaccttcatcagaagtaaccttcatctcgaaaacaataaanagttaagggaagaactttaccttaaaattagaataaaacaagctaccgacgatatgttgccgccggtatctgctaagctcggactcaagcttcggaaagccaacactcttcaatatagtgctgac

SEQ ID NO: 8751 - DNA, 403 bp, Zea mays
  unsure (1)..(403): unsure at all n locations
agcagcttctgctgatcagccgaagcccatgctgctgtgtgaggatatagcagagcagaaggtgctattgggctcgcaattatctgaagatcaagagaagaccttgataaggttcttattcaacaataaagatgtttntgcatggtcagccaatgatctttgtggagtgaatcgggatgttattgaacattcgctcaatggtgacccatccttcagaccccgcaagcagaggcttcggaaaatgtctgatgacaaggccgaaggggctcgcaacgaagtaaaaagactcctaagtgcaggagttatcagagaagtgaagtatccagaatggctagctaacactgttatggtgaagaaggccaatgganagtggagaatgtgtatttgattcacagatctcaac

SEQ ID NO: 8752 - DNA, 360 bp, Zea mays
  unsure (1)..(360): unsure at all n locations
tagcttcatgtgcttatgctcgatttggcgatgcgcatcctcgatggtattttgccactcctgtagctggtccaacacaagttggggtctggctatgggagatgtgtcatcgtcgtggacgacctcgacttggtcgtttggtgatccatccatgaagcactcatacgaggggtagtggctccccctcacttgagcccatgctagatgatctcatagactcctatgcaaggaggtcatagatcaactttgatacgtagtccaccattcctgcgatgacctccgagagagaggtgctctgctagagaatngggcccaaacattgatgtgcgatacgtggacgagacatatgtcttatgggac

SEQ ID NO: 8753 - DNA, 375 bp, Zea mays
  unsure (1)..(375): unsure at all n locations
gaccaactacgcaccccaatntgagagtagacggagttttttttccttgcggcaaattccggtggacatgactctcccccctggtgccacggcggccaccgatatatagcgtcagggtagcagcgggttcggcaagatcacaaccaacccctcccccagttggccgaacaccccgggaaatgttgtgtaacaactccaccccaagagttccacggatcccggctaagtacggattgacgcgaggtagcggaaggtcagcagacccggtggcgccgacgttctggctccacagggcagtgaggcggttcatggtgatcaagtacccaggcttgcgcgaggtcaacggaagtggtccgacgaacgaccgcgccgcgg

SEQ ID NO: 8754 - DNA, 457 bp, Zea mays
  unsure (1)..(457): unsure at all n locations
ntgtcaccatccatggagaaccttatgctccctatcattgtgggctcgatcttcgaacccagcaacagaaagcaaaagaaagaggcccatagaagggtagagcatgtatgagaccaacgaccctacattatgaccaagtggtcccatattcctgttaccttctaacaggatgaccttcgtctcaaatactatccacatagagatgccatggttatctcgtgtgttgttaaagggttcgcggtacacaatgtcctggtagacacaagcagtgctgcaaacatcatatttgccaaggctttcaagcaaatgcaatagcccgaagataagatccaagatttagctcttcctcttcatggctctggaggacagcacgtgatggcactgggaaagctggctattcccattatcttcngctatgtcaacaatacatgcagagnggttttcctcttttctttct

SEQ ID NO: 8755 - DNA, 451 bp, Zea mays
  unsure (1)..(451): unsure at all n locations
tgcttaaaatgtttccatcatgctttcataagtgcatagtctgtcatgagcatcacacttttattatgacacattgcacttcacagtttctatgatatagatatgttctcattaacctaattatgtactcttggcatttaaggccaaaatttgtatttctttcaaggcacatattcagggggagcaatctatattatatagaactgtttgcgcttaattgacatatcctcttaccatgcctctttcccttggtacatttgcatatttcctatctctcttgtgccaaggctaagactaatatatttccatgagtatcttgtgtattaagtcttatattgaaagggaaatgaagtattaggcaaaaacatcgcttccactctacaccatcggtattatctatcctttgncggtattccgccatctctcaaaaatggataatcttcactcatat

SEQ ID NO: 8756 - DNA, 508 bp, Zea mays
  unsure (1)..(508): unsure at all n locations
tcttaggggggagcacatttaggactaacaaatgttcattntgagaaagacaggatttgtagcgcatgccaagccgggaagcacgttggcactcatcatccacacaagaacattatgacaagtgacaggccactggagctccttcacatggatctattcggcccgattgcttacataagcatcagcgggagtaagtaccgtctagttattgtggatgattattctcgcttcacttgggtgttctttttgcaggaaaaatctcatacccaagagaccttaaagggattcttgagacgggctcaaaacgagttcggcttaaggatcaagaaaattagaagtgacaatgggacagagttcaagaactctcanatngaaggcttccttgaggaggagggcatcaagcatgagttctcttctccctacaccccacaacanaatggtgtggtggagaggaagaatcgaactctattggacatgacaagaaccatgctngatgagtacaagacat

SEQ ID NO: 8757 - DNA, 457 bp, Zea mays
  unsure (1)..(457): unsure at all n locations
tcggtagagcaagtactgtgcncggaccctattgacggccctactgcgaagccaactactcctctggttcctttaattattcagctaagggtgttctattccaccctcatggttgcactgttatcctgtgttgtcactccccaaacaggtccttacggagaggcactcagaaaacagcctgagtcccctaaagtaatcacaagaacctcatcaggataacatcatcgtatcataaataatcacatcatgttcattgattaagttaaagcaatagcataagctaaccatgattaacccaaaaaggtaaacaagggtaaggtaaatacagactagtcaatccttaagtttcaataatgtaatgcgggacagtgaattataaagtaaagtatgacatgataggtctgaggacacttgccttcaccaaacaaatacttatggtctttagcctcgtagcact

SEQ ID NO: 8758 - DNA, 467 bp, Zea mays
cttcagctctatctatattgtggattgcttttgagtctgtccaatttccttcaatctttctggcagcttcctgacttccatgaatagctatgggcccttgatccgaatgtatcttcatgcatagatatgctggatgaaaaattgcttcaaatgcattgagtgttccacgaccaataattgcattgtaggggtattccatgtcaacaatatcaaacacaacctattcagttcttgtactgtggacaaattcgaatgtcactggcattgtgatcttgccaagtgctacaatctgccttcctccgaaaccacagagagggtgtgtatcatcatggatcttatcctctggctcttgcatctgtctgaatgcactatcaaatatgatatccgttgcactgcctgtatcataccataacattgtggactataaatcccttgatgacacaagatatgaccatagcatcattgtg

SEQ ID NO: 8759 - DNA, 466 bp, Zea mays
  unsure (1)..(466): unsure at all n locations
actcagctacatagacgaacaacgagagtagatgcaacgtatcgtatgggatatacaatacgatcataaaaggctagtgcgtgcgcttgataagtctactattgtaaatcttccttcgcacgaggttgaactgaaggaatacacacatgattcatcggctacaggttgtcacgaccagtcacaacccctttatgggatgccgatagacgtgtaccctgtgcaacaacagcctcccacgcacatcggcgataaatttgcctatttgcgcatgtccggaccgtccgcacgtgagcgcatactgtccgggccagcggcgaccgatcccatntttagaagcaaattaccgaggcctgcacccaagccgccacataccgtgcaaaccctagataacccattcggaccgtccacgtatgacgtcaaacagtccgaatataatgtcagacagtccggccacatggccggacag

SEQ ID NO: 8760 - DNA, 435 bp, Zea mays
gcctgccttctctggccgatgtcattatcagcccggatgttctcattcactttctatagcagcttctccagagtctgtggaggattgctggcgatatattgtgccgtaggccctggccgaacacccttgatcatggcctcaatgacgaattcattgggcactgtggccgcttgtgctctcagccgcaagaacctttgtacatacacctgaaggaattctttatggtcttgcgtgcactggaacaaggcctcactgagactggctccgtctgatagccttgaatactggtaaccaacatgtccttgagcttctgccatgacacgattgttcctggccggagagaagagtaccatgtctgggccacatttctgactgccatgaacaaggactgttgcgtgacaactgcgttgccttcatatgaagatatctgtgctc

SEQ ID NO: 8761 - DNA, 208 bp, Zea mays
ataatggatctccaattcataatctttaatgagctccagccatcgtctttgcctcatatttaactctgactgggtgaagatgtacttcaaacttttatgatctgtatatatgtgacagatattacccagcagatagtgacgccaaatctttatggcatgaaccacagcagctagctctagataaatgagtggatagtgctcctcatgt

SEQ ID NO: 8762 - DNA, 445 bp, Zea mays
  unsure (1)..(445): unsure at all n locations
ggcttctgccatggttcaacggcggattagagcaccatagcgtgcgtatcttggcaaagtcactgtgtatggtcgcttctctgctccatatcctacctttntgctgtgagtcccaagccaagatatggtcggggtagggagatagaggggggagaagttggctgtgtcagctgggtccaagccgagacaaaactggtgtcaagtcgtgtctaacgccctanggtaggtgtcatctctttccagggtgttctagggttaatttggcgccactttgtcaattgggtcgaagggtcttgaaatttgtgttaaggtgaacatgtggagtctttgttcaagggttagtttttatacttangcaaaatctgaattctcccttgtgctgaaccttaagtgaactctttaggaactttctgaanactntttgggggtacttgcttaatattaa

SEQ ID NO: 8763 - DNA, 422 bp, Zea mays
gtcgtatcactcggcaaagcatctttaccaatgcccatgtgttccttctttgccgagtgctataaccctgacactcagtaaagcacctctttgtcgattgttacactcgacaaagtgaccagtatacaccttttaaatttgattctcctatgtctccaaacaaacaatagatatatctcatatacatcacatatctcacaaagaccataaatcaaactagttatcacagcattaccaacatgttcgaacacaaacataagtatccaacactcaaaaacataagtctcaagtatctcacatagcattactaacatcaaacaagttcagaccgggtatctcacaagtattaacaacactaacaaaattatatctcatctatgtgggcggctggactggtgcatcgatgggctatgctattcatt

SEQ ID NO: 8764 - DNA, 506 bp, Zea mays
  unsure (1)..(506): unsure at all n locations
taggaccttagatactcagcttggattcatgctngcttttatgggttgtaatatctagatggcgtggacaagggtatgatggggcatcaaatgtgaggggagaatttcatggactgcaaagaagaatattagatgagaatccatatgctttntacatacattgcaactagttgttgtttcagttgccaagtgttgttccttattgtttgattttttcagacatctactctaattgtgaacactgtcaatgcatcctgtaagcgaagggatcaattggcccaacaacaccatgaaaatttagtgaacatgttggatagaggtgaacttgtttctgggagagggaaaatcaagaaaccaaccttgtgcgacctgnggatactcgatggngttcacatcataagaccttatgttgtattcttcacatgtgggatgcagttctagaggtgttagagattgtatctgatgatgcctctagtggggaaaagaaatacacaacagctggattg

SEQ ID NO: 8765 - DNA, 449 bp, Zea mays
  unsure (1)..(449): unsure at all n locations
agcttgtcaagcatattttggtacccatcgcttgatgggtccatcaaggttagtcaacaaagatctatgaacccaaaagtcctttgtgttatcacttggtaaactcattacctttctagcacaagttgcaattgtgggttgcctagttacatgtgaaataattgacaagctagaagttgagtagttaccaatgggacaatccttgcattgatgtcccttctttcggcatatgtagcaaaagcgatcttcaagtcttgaggatttcttctttccttgtttcttgcttgctacaaggttagttaatattttcttttctaacactatgcctttgtgtttcaaatagggacaagacttaattaagtgtcccttctttgagcatttaanacaaagtttatcatccgtgttagtaatcaagtcatttgtaatatanggacatgacctaatcgagt

SEQ ID NO: 8766 - DNA, 396 bp, Zea mays
  unsure (1)..(396): unsure at all n locations
agatagaccttgtgcagcttgtcgagcacgtcaacaagtgggatgagcacatcacagcaagaacgtgatgaccacttctagacccctggagctgctgcatatggacctcttcggacctgtcgcctatctgagcataagagggagtaagtatggnttagctattgttgatgatctttcccgcttcacttgggtgttctttttgcaggataagtctgagacccactggaccctcaagcgcttcctcaggagagctcataatgagtttgagctcaatgtgaagaagataacgagcgacaacgggtccgaattcaagaaccttcgagtagaggaattccttgaggaggaatggatcaagcacgagttcttcgctccctacacaccacagcaaaatggtgt

SEQ ID NO: 8767 - DNA, 382 bp, Zea mays
cttggcagcttctctaacaatgcttctatatcatctccaacatagccattgctgaacgcagcaacagtctgaagatcgactttttcatccagatgtatgttgttggtataaagctgaagataaaaccaatgacattagacttatgcaaaagaaagcaagagcatgaattcaatatttcacaaaagataatttgatatgctgccttagcttttttagattcaatacgtatacaatcatagggtcaaaaacataaaattacatctgtcatttgtcaacagaaatgcgaaagtgcctctagcataatgattaatgcttccgagtagcacctccagatcctatgttcgattccggacgaaattttggcttggtaaaataacatctc

SEQ ID NO: 8768 - DNA, 464 bp, Zea mays
  unsure (1)..(464): unsure at all n locations
gctggntagtggtgtttgtcaatttattgctttctttacatggataagccatccttaaatattcaacgcgctattgcataaaattggctatctctacaatagtgttgtgatggagctgatgtgagggctgagaaatcagctcattgagcttataagtgggttgggtacataagacctgggtccaatgagcttgggattgtcacacaacttgtttttggcttagtgggttcagtcccgagaaggtgagtcttgtattggtgctaccggccatcttatttatcatgttgttatgtgctccattttttgcttttattgtatcaacatttgtccttggcatgaaatcatctggaaacatctctcaactaanaacatganatcatctggaaacatctctcaactaanaacaatgtcagggatcaatctttntaccgaagtctctattcttgtctgaacattatgcaagt

SEQ ID NO: 8769 - DNA, 338 bp, Zea mays
  unsure (1)..(338): unsure at all n locations
cgatagatctgcaacatgagcagtgccacttaatcaacatataatgctgtccaaactgtcgtatacaacatcagcacacatgtattggcacaagcatttggcatatcaagttcaccccatgatgatctgatggtagatgctaaagccgaatgataatgagcaagctatacccgatgtattggtgaagctgccatacatatgtatagagaacccaatgttctatcatccatgcccataacggtttgagaccatcaaagttatgagaaacactatcttatgacactacattcttaaagaagatcgttngatgattgtgcccttctgagggtgggataatc

SEQ ID NO: 8770 - DNA, 427 bp, Zea mays
  unsure (1)..(427): unsure at all n locations
ttctacgcctatgtcttaaatctccataaaatggatacagagaatataaagggtagaaattatgagtaagcatgatgtgaacacactatcatgaagagggtccttagatgacacaaagctcatggaggagtgtcataagtgatgtacctttgcgttttaccttttcaaaggggtgttccacacttgtgttgtatttagagatcattctgcaatctcttgttggcataattgtgacatatgtccaagatatcaaatgaatattgtcattctgattaanagataaatcttgatacctgtagtctatatgtcacctaacattttatttattggagcacagaatctttgatacccatcaaaatatgcagtgcaagcgattgtctttgctgaagattctttctatttggactcacactaataaactgaaatg

SEQ ID NO: 8771 - DNA, 455 bp, Zea mays
aactctggtataaatctacggttatattcagccagtccaaggaaacttcggacctgatgaacagtggtcggtggtttccactccaaaatgtccttgactttgctggggtctaccgcaatccctctggcagatagaacatgtcccataaattgaatttcctccagccaaaatgcgcatttgctgaacttggcatataactgatgttccctcatgcgcgttaacacgatccgtaaatgttgggcgtgctcctcttcattcttggaatatatcaaaatatcatcaatgaagaccaccacatacttgtccaactctggcatgaataccgagttcatcaaatatgtgaagtgggccggagcatttgttaatccgaaagacattaccagatattcaaataatccatatcgcgtagtgaacgcggtctttggatatcttcatgccgaataccgatctgatga

SEQ ID NO: 8772 - DNA, 476 bp, Zea mays
  unsure (1)..(476): unsure at all n locations
tatgaagaattttcattccaatatgggcaagtcgacgatgccagagccnacccatattagtcttagcaattaagcaagtgtctagttcaacattgttattattaaaatcaactaaatatagttgaccatctaacactcccttaaatgctattgaatcatcacttcttctaaagacagtaacaccaacataagtaaaaaagacaattgtagcccattntacataattgagacacaaaaagcaaattataatctaaagaatctacaagaaaaatattggaaatggaatggtcaggggatatagcaattntacccaaacctttaaccaaaccttgatttccatccctgaatgtaatcgctctttggggatcttcattnttctcatatgaggagaacatccttntatccnctatcatgtggttggtgcacccgctatcgattatccaacttgacccaccagatgtataaacctacagaac

SEQ ID NO: 8773 - DNA, 422 bp, Zea mays
  unsure (1)..(422): unsure at all n locations
tttagccgtcttttctacttggaaaacctgtcaagacgctctagattgtacatgctcttactgtctaatgctatctccagcaacgttctctaaatttcattcgttaaaggaatattctctgttatttacaacacactctaaaagattctattatctcagtctccagtaacatcttctaaattcggttctctatagctacagtgttaacagatttctttttgtctatttctttagtttatatttaatttcttttcattacacgctaattcaaaaaaacatgcacgacaatagcgttttaaaaattntagattgcgtatttcttgacattaagactacgtaccgtacattttgaatagatgtgagtatcatgcaatatttacgtaaacatattaccagccatttccatatgttcgtagtcatat

SEQ ID NO: 8774 - DNA, 514 bp, Zea mays
  unsure (1)..(514): unsure at all n locations
ngggtcatttattgctaactggtcccgaaatgatagtgatcatgatcaatggaacaagagggagtaaaagaagaactataagaaggcaaagggcgaggctcatcttggcaaggagtgggattcggactgctcctcgtccgactccgacaatgagggactcgccgccactgccttcaacaagtcatccctcttcctcaacgagcgtcacacttgcctcatggcaagggagaagaaagtaagcattccaaatactagtacttatgcttcttcaagtgaggatgagtctagtgatgatgatgagatagattactcatgcttattcaagggattagatagaactaaggtagacaaaattaatgaattgattgatgccttgaatgataggaatatactcttagaaaagcaagaagatttgttgtatgaagaacatgatanatntgtagaagctcagaaatctcttgctctagaaattaagagagatgacatgctctctagtgannatatcttcttgcat

SEQ ID NO: 8775 - DNA, 361 bp, Zea mays
acatgtgctaagctgcgatgccacatccagcccatgctagtcttatcaattaagcatgcatctagaccggcctcttcttttgcaaaatcaaccaaataaagtttgccgtctaatatacctttaaaagctagtgaaccatcacaccttctatagacagacacatctacatttgtgaatagacagttatatcccatattgcataatggactcacagataacaatatatatccaagcgactcaactaataacacattagaaatagagtgctcggatgaaatagcaattttacctaacccttttaccttgccttggttcccatcaccggatattattgaatcttgggaatccttgttcttgacgt

SEQ ID NO: 8776 - DNA, 503 bp, Zea mays
  unsure (1)..(503): unsure at all n locations
tggtcattntattgctaactgtcctgatcatgatagtgaccattatattggggaacaagagggaatagaagaagcatcacaagaaggcaaagggcgaggcgcatctatgcaaggagtgggactctgattgctcctcgtccgactcctacaatgaaggactcaccgccaccgtcttcaacaaatcaaccctctttcccaacgagcgtcacacatgccttatggcaaaagagaagaaggtatgtactcacaactctacctatgcttcttcaagtgaggacgaatctattgatgatgatgaagtanattattctngtttgttcaaaggcttatatagatctaagatagactaaatcaatgaattaatcgatgccttgaatgaaaagaatatactnttagaaaacaagaagatttgttgtatgaagagcatgataaatttgttgaggcacaataatcctatgctntagaagttaagagaaatgatatgctctcttttgactatctac

SEQ ID NO: 8777 - DNA, 335 bp, Zea mays
  unsure (1)..(335): unsure at all n locations
aagccgtctatgggctaaggtgagggtggtgtcntctggaagggctggccatggtggttgtgctctggcatggattgctggcggtgtatagctcaccggaattggagtttttgctcggtgcgtgaggcaaagtgaatagcagactgctgcacaccatatgtacttatatgcgccctctggcatggcttgtgagcatggactgggaacatgagtctaccgtgcgcggcgcgcgagcatgggacatccattgcgcggtctatcgctggatcacgcgatcaaacacgtggaagtgtgattcttgccgagttcaaactcatgtttgccgacctaacata

SEQ ID NO: 8778 - DNA, 452 bp, Zea mays
  unsure (1)..(452): unsure at all n locations
ntctacgccgacatcgtccgtcttcatggagtgccgcagtccattgtgtcagatcgcgacccgatcttcacgtcgacattttggcgcgagctcatgcgcttggtgggcaccaagttacacatgacgacgaccttccacccgtagtcagatgggcagtccgaggcggccaacagagtcatcatgtaccttcgctgcctcacgggcgattgtccgcgtcactggctgcagtggctcccatgggcggagatcgtcttcaatacggcgtaccatagttcgcttcgggataccccgttccaggtcgtctacaggcgcgacccaccaaccatccggtcctatgagccgggcgacacacgggtggcgactgtngccaagaacatggaggaacgccatgatattctcgcccatatccgcgctcgtctcgagcaagcttaggcgcgttataaacaacacta

SEQ ID NO: 8779 - DNA, 414 bp, Zea mays
  unsure (1)..(414): unsure at all n locations
gaagctgatggtggggtaactctgttacaatcccattatgtggtaaaggtattgagtcgctttggttttagtgactgtgatcctgctccaacaccttatgaccccagtgtgctattaagaaagaatcggagaatagaaagggatcaattgacatactcccagatcattggctcgctcatgtaccttgcaagtgcaacaaggccagacatctcttatgctgtgagtaagctaaatcggtttgtgtcgaaaccaggagatgatcactatcgtgctcttgatagagtgtggcgatatttgaaaggtactatgacatacggtattcattataccggaaacccataagtgctagaatgctatngtgatgccaactggatttctgatgctgatgagacttatgccacaagcggatatgtg

SEQ ID NO: 8780 - DNA, 369 bp, Zea mays
tgctttatgtcgtgatgatgatgatcctacgaatgtctaaatccatgtttgcatgaatgcaatgcatgatgtgatgtaatatgcaaatgaatgtcccaatcgcacacgaagccacacccagactctacatccccctatgaacgactctggagtcgttaaggcctgcattcccttatgaacgactttggagcttcttaccttctattttggtggctgttagctctaatcccctcagaacgacttgagcttctcatctatatttcggggtatcggtctgcttcctaggaacactctagcttataactacccgcctccttagatgactctgtctcgactacctgcctccttagacactattgtgttttatct

SEQ ID NO: 8781 - DNA, 334 bp, Zea mays
  unsure (1)..(334): unsure at all n locations
acatgtgtcttgcggcgatgccacaaccaacccatgctagtcttagcaattaagcatgcatctagaccggcctcctcttgtgcaaaatcaacttatgtaagtttgccgtctaatacacccttaaaggctaatgaaccatcacttcttctaaagacagacacatctacattagtgaataaacagttatatcccatattgcataatngactaacagatagcatattatatccaagagactcaactaaaaacacattagaaatagagtgctcatatgagattgcatatttgcctaagcctctcaccttgccatgattcccatcacccaatatgattg

SEQ ID NO: 8782 - DNA, 356 bp, Zea mays
gagagcacatctcatgattaacacatgttctttatgttatagacaggagttgtagcgcatgccaagcagggaagcaagttggtattcatcatccacacaagagcatgatgacgaccgacaggccactagaactcctacacatggacctattcggcccgatagcttacataaccatcggcgggagtaagtactgtctagctattgtggatgattatgctcgcttcacttgggtattctttctgcaggaataatctcatacccaagagaccttgaaaggattcttgagacgggctctaaactagtcctgcttaaggatcaagataattataagcgacaacgggacggagtttaagaac

SEQ ID NO: 8783 - DNA, 414 bp, Zea mays
gctggaagcatcacatgtaatgaagtaaataaaacaaagaatagtgttttccgactcggtaatgcggattagagaaatgttacagcgtggatactaccatacttatgaggtaaaacataatcttcttggtgggaacccccacttatttcaaccaataatcgattttatatctcaactgacttgtcacatttactctcactctagcagtatatactgctattggttgtagcatgattgcctataacataacaaaactacaattctatatgaagacactgagaaactcaaatttactgaaggaacagatgatagacgtgcagcacctctcaacatatagagatgcaacagtacacggtcggtggtcattgcgaggattaacataaagtagtaattatttaagcccaaccctttttt

SEQ ID NO: 8784 - DNA, 458 bp, Zea mays
cggcttgaccacacgagagcatctccacgcttaacacatttattggtataacaacagcggtaagttcaaggtaacataaacaacatgggtgcatctttctattggctcttaccatgactttgctgatttcgatgtggtgactatgatgcttgctctctattactgggacatccctagagagtttgatactgatgctattcaccatggtagatctaagaaaatatctttcatgcataacggaaagagaattgtgttgcttactatgactcccactgagattgtccactttgaacatgagaaaaagactaatgctaaacaaaaaggtgttttgaactctgaaaatcagcaacctattaagttaaaactcctactctgctagccattaaatctgatctcgatgagatacatgtatctctggacttagaatgccttagtgtgcaaaatgcttctattccatg

SEQ ID NO: 8785 - DNA, 388 bp, Zea mays
gtctaaggtgcggctgctgaattagccagtcattcatgaatatctgggtttgcgaggtccttaataggatgcttatcggtggttgaaaaaaagatttgtttgtcttatcacttggttttttatctgcaggagatgtggttggagaagtgatgaagaggtctttttgaatggtgttggagggagagggaggagaggagaatagcatggtagcaggcgggcagtgattttcagctaaaggtcaacatccgtgggggtggacgggtcagcatccgtggcaccagtttaaacgttggaatgtctcagagcagatttattattagttactgtgtaccactgcttgtttatttcaatgcacaagatatcaaccatttgaaccctactttggaca

SEQ ID NO: 8786 - DNA, 511 bp, Zea mays
  unsure (1)..(511): unsure at all n locations
actcagctattccattatgggagatatggtttaatcctcgtgctccaattgtattgctacctctaccaccttctgaaatagtgaacttggatgctacacaacgttctgaattcattcttaagttacatgaaacaactaagtggcaaattgaaaagatgaacgaaaagtatcgtattgctgctaacaaaggcaggaaggaaatgaaattggaacctggtgactcggtgtgggttcatttgagacaggatatgtttcctgatttgagaaagtctaaacttatgccacgagctgcaggtccttataaagttcttgcaaaaattaatgataatgcatatacactngagttgccgccagattntggggttagtgcccacctttaacattcagaattgaagccatatatgggtgacaaagatgagatcgagtcgaggacgactccaattcaagaggatgaggatgatgatgaaatcacttctatacatacaatgaatggaccgataacacgatcacg

SEQ ID NO: 8787 - DNA, 463 bp, Zea mays
agctttatttcagtaacaccagtggtgttacttgcctccccccttataagaatctcgtcccgagattcaggatgaaagacttctaagagtagagaagcatgtaaccttgtccatatcagcgattaccgtgagacatttccaaataaatgcgagtgtctccggatggggtttctctagtgaatatagcatgtatcgccttgggctaattagaaatgttcaccacaagagatgttgtctgccagaggaacacataatgttccatgtgtgcagtttgctttttttctgatgacactgtactatctgagtctgttgagcgagcggcaaatatgcgattttacccaagcagaatcagatgcaccatcttgggtaaaacacatcgaaggatgtttaccaacaagtggtcacagtgggttcgtagcacacgatacggatgtggatgtcgaatactgtcgcggtaacatgt

SEQ ID NO: 8788 - DNA, 480 bp, Zea mays
  unsure (1)..(480): unsure at all n locations
tctcagcttcaccccatctatattatggattgccttggaatcagtccatctttcttcggcccttctggcagcttcctgactcccatgaatagcaatatgcccttggtccgaaggtatcttcatgcagagataagctgggtgaagaattgcttcaaaagcatttagggtaccacgaccaatgatggcgttgtaggggtattccatgtcaacaatatcaaacacaatttgctcagtccttgtgttattaacaaatccgaaggttaccggcatggtaatcttcccaagtgccacaatctgccgccctccgaagccacaaagagggtgcgtagcatcatgaatcttgtcttcaggctcttgcatctgtctgaaggctttggcaaatataatgtcagctgcactggctgtgtcaactangacattgtgaaccagaaaccctttgatcacacaagaaatgaccatagcatcattgtgaagatagtc

SEQ ID NO: 8789 - DNA, 351 bp, Zea mays
  unsure (1)..(351): unsure at all n locations
gcttcttnctttcttggtgggaatttcgtcattggtgaatggatgctcacagcaactcgtcattgttaattggatgaatcataacttttgcaagcctcttaactgatatcctgatatagatagtgcagaagttcaaatctattatttagttactactttctcatgaggatgtttatatagcttacaggctaacatccttatagtctgtgcatttatccaaacaaaagtcagacggtgctattgtgacctatatgtttgtattatttttcagtcgatcaagtttgattctggaatatttctctcgtgtttagataaagagaatgacacaatgttcaaatgatacaatcacac

SEQ ID NO: 8790 - DNA, 477 bp, Zea mays
  unsure (1)..(477): unsure at all n locations
tctanagggagagcacattntgngactaaccaatgttcatcttgagatagacagagtttgtagcgcatgtcaagcatganagcaagttggtgttcatcatccacacaagaacatcatgacgatcgataggtcgcttgagttactccacatggatctattcggcccgatcgcttacataagcatcggcgggagtaagtattgtcttgtaattgtggatgattattctcgcttcactgtgtgttctttntgcagganaaatcacaaacccaagagacattgaagggattcttgagacgggctcaaaatgagttcggcttaaggatcataaagattagaagcgacaatgggacgaagttcaagaacttacaaatcataggctctcttgaggaggagggcatcaagcatgagttctcttcttcctacacaccacaacaaaatggtgtagtggagaggaagaatagaactctatttgacatg

SEQ ID NO: 8791 - DNA, 448 bp, Zea mays
  unsure (1)..(448): unsure at all n locations
agcttctaaagggagaacacatnttgggacttaccaatgttcattttgagaaaaataggggttgtaatgcatgttaatcatggaagcaagttggtgttcatcatccacacaataatatcatgactactgacatgccgctatagctactccacatggatctattcgccccgatcgcttacataagcatcggctagagtaagtattgtcttataattgtggatgactattctcgcttcacttgggtgttctttttgcaggataaatatcaaacccaagagaccttaaagggattcttgagatgggctcaaaatgagttcggcttaaggatcaaaaagattagaagcgacaatgggatggagttcaagaactcttaaattgaaggctntcttgaggacgaaggcatcaagcatcatttctcttctccctacacaccacaacaaaatggtgt

SEQ ID NO: 8792 - DNA, 458 bp, Zea mays
  unsure (1)..(458): unsure at all n locations
tttaggactaacaaatgttcattttgagaaagacaggatntgtagcgcatgccaagccgggaagcacgttggcactcatcatccacacaagaacattatgacaagtgacaggccactggagctccttcacatggatctattcggcccgattgcttacataagcatcagcgggagtaagtaccgtctagctattgtggatgattattctcgcttcacttgggtgttctttttgcaggaaaaatctcatacccaagagaccttaaagggattcttgagacgggctcaaaacgagttcggcttaaggatcaagaaaattagaagtgacaatgggacagagttcaagaactctcatattgaaggcttccttgatgaggagggcatcaagcatgagttctcttctccctacaccccacaacanaatggtgtggtggagaggaagaatctaactctattggaca

SEQ ID NO: 8793 - DNA, 443 bp, Zea mays
  unsure (1)..(443): unsure at all n locations
tggaggcgtcgattggttgtctacttggtgtatactcctccttcttctcctccgttgccttgaatgcaacgggttgggcttcggatgtggtggcatcgtcaagctcgttgatcttcctcgagccttcgatcatgcactcaaaacttacaaaattcccgataacttcctcgggggtcantttggtatatctaggattgccacggattaattgaacttgagtagggttaaggaaaataagtgatcttagaataaccttaaccacctcgtggtcatcccactntacgctcccgatgttgcgcgcttggttcaccaatgtcttgagccgattgtacatgtgttgtggctcctcccctttgcgaagccggaaccgaccgagctccccctcaatcgtttcccgctgggtgatcttggtgagctcatcaccttcatgcgcggtcttgagt

SEQ ID NO: 8794 - DNA, 468 bp, Zea mays
  unsure (1)..(468): unsure at all n locations
ggccatggcgcgacgcctctgctccatccnctctccagcgcgctcctacatcttccatggaaaccagccgggctcctctcatcctccgcacatagccagcatcggggaccttcttcgccgtggaggccgagcccctctcccaaggacagcgcccctgtcttcttcctaggacagcccctccccttgctcatgttcattgtgcgcagggtgttctacaaaatgcctgagagggagatgtgttgttgcagcactgttgacgctcattgggtgtttgatgttttacgcagccccaacatcgacgtcgttcacccctggtgaaaccgcgatgatccttgttcgattccacatcggtgttgttttcctgtgattaattgtgtatgtgtgcctnttttgtggaggagaggaacctcgtgtntngcgtggaggagaaggaaagccgctcaacgctcgtctgatgttcggagctat

SEQ ID NO: 8795 - DNA, 184 bp, Zea mays
  unsure (1)..(184): unsure at all n locations
tgctcacaccttcggcgctngatcttccttcgtattattctggtctgctgggatgccgacttgagtccgaatatacctgttcacacattatactccagaaatactgttaaatcctgtttttgacgaccctcggaagccgaatgcccccaacagtatcccctcgcaaactaatttgtttaaataa

SEQ ID NO: 8796 - DNA, 469 bp, Zea mays
  unsure (1)..(469): unsure at all n locations
cttgatgatctggtccttcacaagcttgctacagagccttttctctttctccatagcaggaatcttactggaatactatcccacttaanaagaataagggttgatctcttgaatcttgcggatttaaactccttgaagtacctcataacaagggtgttacggngccttcttctgctgttgctgtttgagcagcgtgcggagaaatgactgacacagggttgattctgggagaaccttcttctcatcttctcttcactatcttcttttcacttctcacttttcacttttcactgcctctttctttctctttgttcttcccactggaggattctatcaaagagtattaccatcatacagaggaggaaaccgaagactatgaaccatgtgcaacagtcttcaacccaagaatcaccaagcattgtgatctcangggcgaaggagtggaanatggagttgcttgtgatttggc

SEQ ID NO: 8797 - DNA, 277 bp, Zea mays
ctcttgaacgcctaatttggggtattatttatctcttttactcaccaatagatggcatttctctcttttctattacagttgcgctccttcttcccaattccaaaccagtatatcgactggtgtccgcttcatgtataaacaacacctaagtgtcatgagtggtgcatcaccctgatgcccatttcattgtctgattgtcatgtgttcctctagccccgtttcagatttttggatcgcgatcggatttcacctagcggtcgcgcgtgtcatggggttc

SEQ ID NO: 8798 - DNA, 425 bp, Zea mays
  unsure (1)..(425): unsure at all n locations
ctaagcttccaatgtaaagatgcattctatgaatatgaaacttcattatgtttgtttactgtggctgntcctgtttgcctaacaaaaatgatcggatctgttcactggtaggttttgttaggtaaatggccgaattggctcttccaactatatggacttctttagagggatacaagttcttactgctagtagaatttcatgatttttggttgagtagtttgtgagatatcgaatttcgaagttaactatgctgctgactgaaacagattcagttagttatcttatcaaatgttttagaacttatagatggaagaatntaattatccattgaataccacagttgtagagtattttgtgtagatactcctagagtatttgtttgatgtcatcactcttattaatttaaagatacaaaattaacaaac

SEQ ID NO: 8799 - DNA, 447 bp, Zea mays
tatggagagaatatcttctatcctctgactagcttctgcttgctttctcgctctttttagatatttgagcatgaccgccttatcttcttggcttatgcgaacagttagttgtaagaagcttctttcttcctcctcatcctcatttgtgcttccgctataattttcattagccacacaacatatgtgggaatcgaaatgggaagacaaaccttttggagagatggattcatcgtttggtctccatcgttcattttcttcttcttccttcaaagggttagtctaacaaataccaaatgaagtagaagcacaaaatgaaatatcatgtttggactcatcaaattatatttaaattctagtccatatatcatgcgcatcatgaatagattcattataactcgatatgaaagcacgataatcttcattgtaagagaattacttaagatgcat

SEQ ID NO: 8800 - DNA, 90 bp, Zea mays
tactcagccctactctacgccgcattaacaatataacatgggcttatgtgtctttacgaatatctcaccggcgagtttgacatatttttt

SEQ ID NO: 8801 - DNA, 390 bp, Zea mays
  unsure (1)..(390): unsure at all n locations
agcttacctatacctatacttaacattngatctataagcctatactgaatttattcggacaaaccatctccaaatacattaaaacttttacccaacactactttagatatattaaacctcccacaaagtttcagcatttttggagctatatttctataactaaaacaagcgttatcaagttactttaattaatgcctaaacacaaaagttgttgttcaagcctaatgaatatttctatcagagagtactcaccttggtgaactcaacaaaattggtttcacgttnttagtatttttcagtaattntctaagtctcagctataatctgaaaatggaaagaaaagtacaaaaaaacctttntctatgcagctcccaatactttcatttcttc

SEQ ID NO: 8802 - DNA, 441 bp, Zea mays
  unsure (1)..(441): unsure at all n locations
ntagtgagtagagagagtgattngttgtgttcatttgagctctcgcgcttggattgcttctttctctcattctttcttgcgatcatctcatttgtaatcgaggcaagagacaccaattgtgtggtggtccctgcgggaactttgtgttccgatggattgagaagagaagctcactcggtctaagtgaccgtttgagagagggaaagggttgaaagagacccggtctttgtgaccacctcaacggtgagtaggtttgcaagaaccgaacctcggtaaaacaaatccttgtgtctcacttcttattcgctcacgatttgttttgcgccctctctctcggactcgtttctatttctaacgctaacccggcttgtagttgtgattaagttngtaaatattagattctccctattcacccccctctaggcgactttcaattggtat

SEQ ID NO: 8803 - DNA, 327 bp, Zea mays
  unsure (1)..(327): unsure at all n locations
aaatccttgaagtcttggttgtcaaactgcttgccgttgtcaactgttagttcgaatggtactctgaagcggaaaataatgtntttgccaaagaatttctatgcagtccttgatgttattgtggaaacagccctcgcctcgatccatttggtaaagtactcgacagcgactaatgtgaacttgatgttcccctgagccgtgggtaggggcccgactatgtccatgccccatcgctggagaggccatgtgtgggcgattagctntgtgaattgcgaggggctgcttgatcgaagagaaaacttctggcatgcttcgcatgaccttgtg

SEQ ID NO: 8804 - DNA, 222 bp, Zea mays
actcagctgatgcctcaatatggcccgcacaccggactgagtcactttcaaagcctttcggcacgggccgacaccatattaatgaggagggcatcggccacacctacacattatgttaacttcacccgcccaaatatgtgcctgcacatgttgacgtaagagacacatatggcttgggtaataatgcgacagcccacatttaggcttgatttgggacaaggg

SEQ ID NO: 8805 - DNA, 368 bp, Zea mays
  unsure (1)..(368): unsure at all n locations
ttgctcttgggtcttcgganattaaaggcaatgggaattagaagggcggttcttaaaactgattcccaagttatttctggtcatatcgacaaaagttataaagcaagagatccgaagcttgagaaatatttatacacggtccgaaggattgaggtttcctttgaagggttttctgttaaaatattcctcgaggagaaaatgaacatgctgatttattaaccaagtcatcatcacatgggctgcccttaccttcggaagtatttttcgaaacaataaaagcaccttcggtcgaacttcttgaaagagcagtcctcaacatatctcttgtctatagtgaagactggagaactgagatcatctctttcctt

SEQ ID NO: 8806 - DNA, 473 bp, Zea mays
  unsure (1)..(473): unsure at all n locations
actcgccgaacaacaganactgcaaggtggttgcctacatattctgggatgtaaggcgaatgatacgaagcagtgtgcatgacctgcttcggctgagcctgttgtgctgcaacttcagctatttccttttgcttctggatggtaacatggcacatcctggtggtatggcctttgttctcaccacagaacaagcaaaaaattcttcttggttgatcaccaaatcttccgctgaagcccctggcgcctctgcctctcggagctggtggtcggaaggagccttgttgttgccccgaagcctgtgaggagcactgtggcctttgctgctggctcccctatcatcattntgagtagagttgtgaattgatctaacgtgcctcggatagaacctcccttcgaagcctctggtcatatcagaaaacctggaatgcctctcccttctttgacgaaaatcattatcggctcgaatatactcg

SEQ ID NO: 8807 - DNA, 463 bp, Zea mays
agcttaagagacttttttcacggatcaagctctttactataaacgatctatcaccgcgaaaggtgctactgttgggtctatgcttcgtcgccgaaagtcttatatgaagaagtggttctcggctgaagctgtttgtataagatagccgaaggttcctcttcgtgaagcttcggtattataaaccgacttaaagatagaatgaccttttagtccataaaggtctgagtcaatgttgtaaacttttataaggggcatacttgtaattcctcacaggctgcgtcctgtgcctataaatagtgaacagtattccgttactgttcacgcattcgagtaattgcaatcgcatcttccggaatccaaccttttgccaaggcagaggtattattgtattcaataactcaatatattaagtaaatacaatgtaattcgtctatgatgtatttatcccctttatacccttttg

SEQ ID NO: 8808 - DNA, 428 bp, Zea mays
tggacgtgaaagtgtcttcctcaatggaccaattattgaagaggtctatgttgagcaacctcccggctttgaagatagtgagtaccctaaccatgtgtataaactctctaaggcgctttatgggctcaagcaagccccaagagcatggtatgaatgcctaagagatttccttatcactaatggcttcaaagttggaaaggccgatcctactttatttactaaaactctcgacagtgatttgtttgtatgccaaatttatgttgatgatatatatattgggtctactaatgaatctacatgtgaggaatttagtaggatcatgacacaaaaattcgagatgtcgatgatgggggagttgaagtacttcttgggatttcaagtgaagcaactccaagagggtaccttcattatccaaacgaagtatactc

SEQ ID NO: 8809 - DNA, 281 bp, Zea mays
  unsure (1)..(281): unsure at all n locations
cttcatactatcaatggtctcctgagatgattgtgcttaagccttcaaggtttccacttcttcctgaaagccatctttttcttgcttctcgatctccagttcatcctgaagttgttgagccattgcagaaacaatcgtcgtggagcttttcttggaggcgaattgaagaccaacattgcgtaaaaacacactggagcccgatagcacattaganacaacttctgtangagatgttggttgttgtccatcctgaaatggcgctgctaccatttctttcatgt

SEQ ID NO: 8810 - DNA, 474 bp, Zea mays
  unsure (1)..(474): unsure at all n locations
tcagctccatctatattatggatggctntngagtcagtcctattgccttcggcccttctggcagcttcctgacttccatgaatagcgatgggtccttgatccgaaggtatcttcatgcaaagataagcaggatgaagaattgcttcgaaagcattgagggtgccacgaccaataattgcattgtaaggatattccatgtcaacaatgtcaaacacaacttgctcagttctagtattgttgatgaacccgaaggtcactgacatggtgatcttacccagtgctacaatctgtcttcctccgaagccacagagagggtgtgtagcatcatgaatcttatcttctggctctcgcattngtctgaaggccttagcaaatatgatatcagctgcactgcctgtgtcaaccaagacattgttgaccaaaaaatctntgatacacaagagataccatgcatcgttggtggtaatcctgact

SEQ ID NO: 8811 - DNA, 362 bp, Zea mays
  unsure (1)..(362): unsure at all n locations
agcntgtgaatgttcttcatccctacatgtgcttatcgacgatgccacatccagcccatgctagtcttatctattaatcatgcatctagcctggcctcctcttttggcaaatcaactaaataaaagttgtcgtctaatacaccctttaacgcttatgaaccatcacttcttctatagacagacacatcaacatttgtaaatagacaattatatcccatatggcataattgactaacagatagcaagttatatccaagagaactcaactaaaacacattaaagatagagtgctcattgaaataacattttacctaatccttttaccttgcttgattcccatcaccgaatattatgaatctggg

SEQ ID NO: 8812 - DNA, 421 bp, Zea mays
  unsure (1)..(421): unsure at all n locations
atcatcatcatcatctgagctatcattcgaatcccattcaactaggtaggctttgccatctttcttcttgttgcagaatttcttcttcttatcatctccatctttgcccttcttcttcttgttagggaaattcatggcgatgtgaccgcgttccccacactcaaaacactttctatcattgaaagcatttcttcttgatgtgtggcctcttctaggttgacccctcttcttcttcataaatttgttgaatttctttacaaatagagccatatctccatcattctcacgtttcattttttcatcatcactatcttctgtttcaattgccttagaagctttagctctgagagcgatagattcattcttcaccttctttgccaaacttatagcatcggcttgagaattctngaatatatctcga

SEQ ID NO: 8813 - DNA, 463 bp, Zea mays
gcttcacgatgacgtcacatgccacctttagttcccgctaaaactacaaatagattatatgtcccaaaccaaaaaaatctatcgccgattgtgaaatcttaaccaccagaccctcataaatagtgtatctgatacactccctccatgatatcaacatgtttcatcgtcagttcttgatcaattggtcaccaaattctccaacaaccccattggacttgattaaccatcatttgacttggtcgagatggccagccttttggaatctcttgtccctcagtctatgcctggacattcgtccttgatcattcctagtccatcatcgttgattgtctccaagctccacacttgcgcatcataagccaaaggatatgttgaacaattctacactcacactaatgttactctacatacttcaaccatacgcaatcatctgctttacgatcactcatcatacttgaacatg

SEQ ID NO: 8814 - DNA, 453 bp, Zea mays
  unsure (1)..(453): unsure at all n locations
tgtcaatacttatcanaacaacaacatttaccagcgcagcaactgcaaaccatacctgtaacatggccattcgcgtgctggggactggatatgaatggacccttcaagaaagctcaaggaggatacactcatgtattggttgctattcacaaattcactaaatgtataaagtacaagcccatcgcttctctaacgtcagctaaggcagtggaattcgtacaagacataatattcaggttcggaataccgaagagcatcataactgacgtgggatccaatttcactagttcagagttctttgatttccgcgaacaaaaaagcatccagatcaaatatgcatcagtggcacacccgagagccaacgggcaggtagaaaaagccaacggaatgatatnggaagcacttagaaagaaagtcttcgacaagaatgaaaagttcgtaggaaagtggatc

SEQ ID NO: 8815 - DNA, 455 bp, Zea mays
  unsure (1)..(455): unsure at all n locations
accatggcctcctatctctcggatttctattggttcctgtgagaactatagactatcattctctagttcatttctatatttgccctttataagctagccatattcaactatgtcagatcatcctgaattggacttatccaacctgngatccttttctatgttgctctactcattgtcatataccaaaagaagggagatgcgtacatgtatactatgatatggaccccacctagatggaccccacctagcgaagactcaataactcctaacttgtcaaggtcgtgggggtgtaatgagtggcattccttggtcataccataatattcatggtatcttgatacagtggcggatatgacttgtcatcgatgctttgtttacctaccattgtgatgggtaccggagaccatgancgtgggtagacataattgctaactagtgattaatctatacttata

SEQ ID NO: 8816 - DNA, 442 bp, Zea mays
  unsure (1)..(442): unsure at all n locations
ttcatgataacgagggctatattttatatcctgctggttatcccgaacataagattatgagaattcattctaggtagtctcactctggctctcatcatgcttttatgtataagagtgaggcatctagttctaggcaatccactcattttaaattgcctaaaaagaaaactcctactgcatcaaatgaacctaatgtttcatttaaaacttttgatgcttcatatgtgcttactaacaaatcaggcaaagtagttgccaaagatgttgggggcaaacacaagggctccaagacttgtgtttgggtacccaaggtgcttgtttctaatgtgaaaggacccaagaaccgttgtgtacctaagaacaaggcctanacttgtnttgaggtttatgcatctggggctcaagttggataattgatagccggtgcacacaccacatgact

SEQ ID NO: 8817 - DNA, 303 bp, Zea mays
cttcattcccacatgtgtctttcggcaatgccatgaccagcccatgtttgtcttatcaattaatcaagtgtcaagttcagctctatcaatatctactaagtatagctgaccctctaacactgccttaaatgctattgaatcatcacttcttctatagacagtaacacatgtattcgtataaagacagttgtaacccattttacataaatgtgaaactgaaagcaagttggaatctaaagaatctacaagaataacatgggaaatggaatggcaggtgataaactattttccaatccttgacca

SEQ ID NO: 8818 - DNA, 514 bp, Zea mays
  unsure (1)..(514): unsure at all n locations
ntggaatagaacagacaaggccgagaatatcctttatctgggtaatacatctaattcgtaagctntcgacaaagcaaatggagataagtgattggcaaaagcgaaagaaataccaatatccatctgggacttgtcttcaacaacagataatactactctcatacgaaggagtcatcatgactaggaagaatacaacaggtctccataagatctttatatttctatcacaaattaccatcactgatagtattgcggtcgagaattgtggctcttccaatgccaggaaccaaggataaattaatgcctaatgtagcttcaagctctgtggtgatgtgggattccatggcatattttgtactcttcttacttctgttagatcatatatagattatggtaagcatgccaaggggtggaataatatgtatntctgctacataaaccccagatatatgtctattcagaatcgaccttcnaccatttgtttatagtatataccataccagtcaaaggacta

SEQ ID NO: 8819 - DNA, 421 bp, Zea mays
ctctcatgttgagataagacttaatgcacaaattctccctctttgacatcaaacaccaattaccatactctagcttgaacatatgatgatgtcaagggacagcatggtgttttatgaggaaaaacacactatcaacactcccccttacttattgaacatatgcaccaccaacatttaagttagatacatatacgcaaaaagattaatacttccttttgaacctttaccatgttgtagtgcacttcccatcttgaaagtatttaatctctcgagagcttctccacacttgtgcctgattctttatcctaaccttttcttgttgctaagacaccaaacttagaataagttatagaattgtgcacaagaagaaacttctattctaatgattatcaagagatgtcaattgaagcatactatcacg

SEQ ID NO: 8820 - DNA, 365 bp, Zea mays
  unsure (1)..(365): unsure at all n locations
ntgccatatagggcgcataattatacctgtaatatcttcccgtgttttaaagtcattcgttacataaaaccattctgtcatccagtcgtcgggccatctctttcgaaaggttggcacgggacagcttgacccagaccgatagacgaaactgtatcagccgaaattatcgtgatactgctccttaccccagggttttgtctcgtatgacaattcgtgtatattgcagaaactttttgcatcaggttccagaccctgtgctttcgcggcccacacgaagatattcatctttatgattgctccgggggtaagttggcgaagatagatttcaaatatcttcagcacctctacgacaaagctgctcagag

SEQ ID NO: 8821 - DNA, 295 bp, Zea mays
cattctaacactatatcctggaaagatagtaacatcgaagtgcggtggcctatgaatatccatcccttttctctaaaaggtgtcggctcaactaacgatgaagcttataacgcttaaaatgagctaaaccatgttctgataccacttgaaggaaacagcgacgcctaagaggggggcgaattaggacttctaaaaattatctctaaactaggccacaaataaatccctaaaacaaaacctatgcaatatgcattctagaatgaaaaactagattttgctaagtgtggtatctcta

SEQ ID NO: 8822 - DNA, 361 bp, Zea mays
  unsure (1)..(361): unsure at all n locations
aatgcccctaaaagattgtctaattttgttaagggtaaggctcccatggttcaggatagtgaggcttaaatnttatatcctgctaactatactgagcacaaaattaggagaattcatgctagaaaacctcacactgtttttcatcgtgcatttatgtataaaaatgaggcttctagctttaggcaatcaactcatgttaaattgtctaaaaataaaactcctgctacatcaaatgagcataacatttcatttaaaacttttgatgcttcctatgtgcttactaacaaaccatgcaaagtagttgccaaatatgcttcctatgtgtttgggtacccaatgtgcttgtttctaatgtgaaatg

SEQ ID NO: 8823 - DNA, 426 bp, Zea mays
  unsure (1)..(426): unsure at all n locations
ggctacagggcttcttctttntctccatggcaggaaccttattggatcactaccccacttaatatgaatgagggtagaactcttggatcttgnggatttgaactccttgaagtacctcataacaagggcgttacaaggccttcttctgctgttgctgcttgaccaggctgcggagagatgactgacatagggttgattccgggagaaccttcttcttatcttctcttcactatcttcttttctcttctcacttttcatttttcaccgcctctatctttctcttagctcttcccactggaggattctatcgatgagtattaccatcatacagaggaggaagccaaagactatgaaccatgtacaacagtcttcaacccaagaatcaccaagcattgtgatctcangggtgatggagtggaaaatgga

SEQ ID NO: 8824 - DNA, 318 bp, Zea mays
  unsure (1)..(318): unsure at all n locations
ctcgtacccgngatcctcttagtcacctgctgctgcagctatcaaaagaaatttctagaatcaagaatattgagctcatgcctaagtctggtaaaagattgttcatcaagtggctgggtaaagatatcggctaattgatctttagtattaatgtaagaaatctcgatatcccccttttgttggtgatccctaagaaaatgataccgaatggctatgtgcttagtgcggctatgctcgacgggattgtcggccattttaattgcactctcattatcacatagcaaatggactttggttatattgtaaccgtattcccgc

SEQ ID NO: 8825 - DNA, 296 bp, Zea mays
ttatataagctcatcagatcttaattctaactatcagacacctgcatcagctatgtactgggcatatgaaggtatctcttcccaaagaaactcttctagatacagtaaatttgctacaaccgttcttgttttctatggcgtaacactcctcaatttacatggatataggtaggttaagttaaactattctaactttgaccatcaatttcaacatctatgtagtgtcaccacatgtgaattgaaaggctgtctcatattgatctataaacatacatcttattctgtgaacatataca

SEQ ID NO: 8826 - DNA, 381 bp, Zea mays
agactgtgaagattcttcatcccaacatgggcttgtcggcggtgccaaagccataccatgttagtcttagcgattaagcatgtgtcgagttcagctctatcaaaatctactaagtatagctgaccctctaacacacccttaaatgctattgaatcatcacttcttctaaagacagtgacacctatatcagtaaaaagacagttgtagcccatgtgacataattgggaaacagatagcaagttgtaatctaaagaatcaacaagataaacattggaaatagaatggtcaggagatatagcaattttaccaagtcctttgaccaaaccttgatttccatccacgaatgtgataagctcgtggggatcttttgttttctcatat

SEQ ID NO: 8827 - DNA, 409 bp, Zea mays
  unsure (1)..(409): unsure at all n locations
gtgctcatcattacggaccatagatactcaggctacttctttctctcccgttgctcgtagattggattctggtgatagaagagcttgctatccacttcttctccagtattattgctgttcggctcgattcgattcaccctgctttctctctatgctcttggtctcggagctacagatctatttatttctacttggttatgtctactgactgactactgcttatccttatactgatctgtgccctctttcgtgtcttctcctcttcttctttgttctagcttcaggtatctagcgcatctactctagattcatggggttttcatgaccagtngtgactcttttaacctgccaatgatctttgtatggggttctcctctctctttccgtctctggagatttagattaatga

SEQ ID NO: 8828 - DNA, 367 bp, Zea mays
  unsure (1)..(367): unsure at all n locations
gctttatcaaatggacgtgaagagtgccttcctcaatggaccaatcaatgtagatgtctatgttgagcaacctcctggctttgaagacagtgagtatcctaaccatgtctataatctctctaatgcgctttatgggctcaatcaagccccaagagcatggtatgaatgccttagagattttcttattgcaaatggattcaaagtcggaaaagccgatcctacactctttaccaaaacacttgaaaatgattngtttgtatgccaaatntatgttgatgatattatatttgggtctactaacgaatctacatgtgaagagtttagtaggatcatgacacagaaattcgagatgtctatgatgggggag

SEQ ID NO: 8829 - DNA, 383 bp, Zea mays
tgaagccatggtaagtagcataggctaataatatgcgaattgactcaagcctagctacgggtgcataggtgtcaccaaaatccaaaccttcgacttgtgaataccccttggccacgagtcgagctttgttccttgtcaccacaccatgctcgtcttgcttgttgcggaagacccacttggttcctacaacattttgattatgacgtggaactaaatgccatacctcattcctcgtgaaattggtgagctcctcttgcatcgccattatccaatccgcatcttggagtgcttcctctaccctgtgtggctcaatagaggaaacaaaagagtaatgttcacaaaaatgtgcaacccgagatcgagtagttacccccttatgaatg

SEQ ID NO: 8830 - DNA, 414 bp, Zea mays
  unsure (1)..(414): unsure at all n locations
cttggtttgtctacgatgatgaaagatcagcttgcagatatccttgcctacagcagcttgaaggttagtatactttggcttgtcattttgtaacttttgttatggtgaactatctttgtggtaattcttatcgtcattatttgttcactcttcgtttgccagggcttgattctaagcaaggctctgaaggcccaaaaggatgcanaggatgagagctatcgaatagcgcttgcaaaccttcgttcggaggtcataacattgagaaatgaagctcttaaaaaggataagatcctactctctttggtggagagattaaaatctagcgaagccaggctttctgctcaagctgaagcccatgaagccgacatgcaagagctaaagaagaaagttgtcgaagcaatggacaatcttaat

SEQ ID NO: 8831 - DNA, 271 bp, Zea mays
acatgttcttatcggcgatgccacatgcagcccatgctattcttatctattaagcatgcatctagaccggcctcttcttttgcaaaatcaactaaataaagtttgccgtctaatacaccctttaaagctagtgaaccatcacttcttctatagacagacacatctacatttgtaaatagacagttataccccatgttgcataattgactaacagatagcaaattatatccaagagactctactaaatacacattagatatggagtgctcat

SEQ ID NO: 8832 - DNA, 433 bp, Zea mays
  unsure (1)..(433): unsure at all n locations
ntctatagctctctatgggcttaagcaagctccacgcgcttggtatgaaaagctcacggatttcttgttttccaaagacttcaaaattgggaaagtaaagatttatttatttgtcaaatttatgttgatgatattattttaggttaaactaatgagtcattttgtgaggagtttggcaaaatgatgtcaaaggaattcgaaatgtctatgattcggagaatgagtctctttcttggtcttcaaattaagcaattgcaagatagaatctttgtaagtcaatctaagtatttgaaggacatgctcaaaaagtttggcttagaaaatgcaaagcctatcaagactcctatggaacaaatgtcatcttgacttagatgaggganngtacaatgttgatcaacaactgtttcgttcaataattggtagtttactttat

SEQ ID NO: 8833 - DNA, 402 bp, Zea mays
  unsure (1)..(402): unsure at all n locations
tgcgaattgattctagcctatctacgggtgcataggtttcaccgaaatccaaaccttcgacttgtgaatatcccttggccagaagtcatgctttgttccttgtcaccacaccatgctcatcttgcttgttgcggaagacccacttggttcctacaacattntggttatgacgtggaactaaatgccatacctcattcctactgaagttgttgagtttctcttgcatcgccaccacccaatccgaatcttgaagtgcttcctctatcctgtgtggctcaatagaggaaacaaaagagtaatgttcacaatagtgagccacatgatatcgagtagttacccccttgtgaatatcgccgatgatggtgttcacggggtgatctcgttggatggcttggtggactc

SEQ ID NO: 8834 - DNA, 455 bp, Zea mays
  unsure (1)..(455): unsure at all n locations
tctaaagattagagagcattcctttatagtcgatggaatcttctgtcttctcctcgctcttgagtgataccttgttcgacatctcttcgaatagttagactcaagtcgagctctaatactagtcgatcgatagtcgtctagaggagggtgaattatggacacctaaaatttaaatacttaaaaataaaatatatcctaaattagtggttagagcaagaggagatttaatccaagttagggagataagttctcttgcacttgttgctcttataaatgcggaattatcttaagtagcaacacaagtgatttaaagtgaagatcaatcatgagaactaagagagagagagagagagagagggaagatcaaattgcaagcaaaaccaaacacacacaaagtgacatggtgattngatgtaccagagttcgggtccaacgaacctatgtctatgttgaag

SEQ ID NO: 8835 - DNA, 440 bp, Zea mays
gctttgaacacatgcagatgaacacctccacgtgttcgacgcgttctgcgcgcgccatagcacgcccgcgcccgacctctcgtgccccgcgtcgcgccaaataccatccgatgccatggtccacgcccgcgcctataaagcacctagggacctggaccatacccctgcgcacgcgctcgacctcatttgagcccaataccaccagcgtttgcccgtgcacggtgtgtccgcggctgcccgatccccctgccaccatagaccagccagcagaacccttcccagccctgtccagccctcggagaatattgtgcacacctcggtgaagctccccgagcgaggaatctaagtttgcttcgccggagaggccagtccacggtctgcggactccacccgaccgtcggcgagcgtagaccgggtaatcctctgcttcattcctcgat

SEQ ID NO: 8836 - DNA, 434 bp, Zea mays
ccttgcacgaatgtggtgacctctgaaagccttctagaattcctcccatgtcaccacgagggcagcgggtaacatggtgtggaaatggtcccaccatgtccttgcaggtccacggagctgttgtgcggcgaagcgagtcttcgcggcgtctaagcaagctcccgtgaggagtgggaacttggactctacaaccattagccatacatcagcgtctagcgggtcctccgccttggtgaacaactgcggttcgagtgacacccaacatcctattttgggagtcattaatgaatctaaaaaaacagaatatatatagaaattaagaatttaaaatgcctcctaatatgagtccctcattgtgttgtatcttctcctcagatttgctgggaatgcaacaaaatcgtctgaggaataaaccctaataacttttaaacaag

SEQ ID NO: 8837 - DNA, 298 bp, Zea mays
cctcatactgatggacaaactgaaaggactaatcaagcattagaagatatgtggagaacttgtgcccttcatcatggtggaagttgggacaagaatctaccatatgctgagttgtcatataataatagttaccaggccattctgaagatgtcaccctctgaagcttcgtatggcatgaagtgcatgactcctttatattgtgatcagactggagagagacagctcttcgtgcctgaacttattcaattggcagaataacaagtacatattactcatgagaatttgaaggttgctcaaa

SEQ ID NO: 8838 - DNA, 489 bp, Zea mays
  unsure (1)..(489): unsure at all n locations
tcanaactaanagcttagcaaatcttagtgcacaagagctatatattgttgagtgggagcagctggccagagagcgtatcaaatgagtttgcggtatggccgtatttatacgccaagtgcgttgaaaattaaaagaccccgcttgtcagtgaatgttgctattctagcaaagggaaggcgttttttcggaccttcggcgtaaagccttcgtccatgtcgcaatctaaatttattattttaaaacaaattaatattgcgaggggctactgttggggaccttcagcatctgaaggtcctcaaaaacaggatttaacagtatttctggagtataatgtgtgaacaggtatcttcggattaagccagcatcacagtaaccagagtatacgaatgttatacgagccgatgtgcagcatgaagcttcgccggtacanaagtgaaccgactaagatanaagctttaacctcacgatacttagatatatcagtgaag

SEQ ID NO: 8839 - DNA, 437 bp, Zea mays
  unsure (1)..(437): unsure at all n locations
ggcacatcggccgtctcaatgcgtctcggtcttcgtgatatggccttcattntctttgccttcggcgcactataagacgccgaagcgacaatttttcttttcaaacctttgtttccaaataggaaagcagtaatcacgataaataaacccgatatcatcaaaaaccctatttagccttgttttccctcgagcgccgaatgcgactatcatagcttcgttttcagcccttgagtaggccccaagcagctcatcacttgttgcctctatagcatctaaccaatcatcatttggttcatcaaattgacttctttatcgaaaggtatacttgagatagaccatgccattttggctggagccagcggtagtctccttcggcatttttcaaccacttgcaagggccacactctgtatcagtatgctcttggccatatctctcg

SEQ ID NO: 8840 - DNA, 410 bp, Zea mays
  unsure (1)..(410): unsure at all n locations
tatgattcttatggtgaaaagactngaccaatttttagctcctcaagtttggtgccttttgctccaactaaaacacatgtgataatggttcacaatgtgggtactgagggaaaaccctgagtaacacctgtggtgttatagccctccccccttaaaagaatcttgccccaagattctagtcgaggtccttcaggggtgaggaagaggttacaacttgctttcaaggtattggttagctttataaggttcactagaaaatctgctcttcgaatgtcatcctcattacaacttcaaaaggaagcccttttgtcataatttcttatcttanattggttntcattaagagcatctttcttatatttggaatcagagggcatggggctggggtatggttacgtaccgacttcctt

SEQ ID NO: 8841 - DNA, 454 bp, Zea mays
ctgctgctctgcagtatccggcttctgccgaaactcttgtatactactgttctacatgcacttcagcttctgacatgatgtgattgttcctgcccggttagatgacttcacgttcgtgccacattcttgaccgccatgacgaatgattggccatgactgcaccgttgcccacatatgaaaatatggttgctttgtagctcatcagatactatttcggatctgagtgcccatcatacatggggagccggggtggcttgtatgatggggccatggggcatcctgctgttctgctgacatacgggaagcctcatcaatagcataatttgcatgatggaaatcatcataccattcatcatcatcgtatgaattgtcctgacgaatctctctgcattgatgtcttcggtcctggtcatcttgagtgagatgacgcatgtcctcagtagcctattgatct

SEQ ID NO: 8842 - DNA, 354 bp, Zea mays
tgtgtaagtgtggagatcatcatctgctatattacctctctttcatgccaactattcgtaacagatagtgctgggaatttgggccgggcttttctggccagcacgagcacgacccgtaaataagagccaaagcacggtcctacactaaataatatgggcctggctagcactgaccgaatgctggcctggacctggcctcaaatatcgacccgtcgggccccatcacggcacgcatagatgggtcgggcttgggccggcacggtccaattaagcccattctgtgtaatctctttaattaaattagatattgactttatattgttggtatatttatagagtatgtgggtaaatcat

SEQ ID NO: 8843 - DNA, 391 bp, Zea mays
agactggaaattgaaactatgtgttcactacatagcattaatgtcaaagtctttacacctagtacaaatttcaacatgttctacacaagaattggatttgtttgctacttctaatttagcatttaaatcattgttgacacctttcaaagtagaaatggtttcatgacaagtagatagttcaaaagaaagcatttcatttctcttaacttctaaagcataggatttttgtgcctcaacatatttatcatgctcttcatacaacaaatcctcttgcttttctaaaagtatattcttttcattcaaggcatcaattaattcattaattgtgtctatcttagatctatctaagcccttgaacaaacatgaataatctacttcatcctcatcacta

SEQ ID NO: 8844 - DNA, 498 bp, Zea mays
tgaggccgatattagcggctaccgacgacaacatatcgtctgttgtctgttttattcaaatttcaaggtaaaattctttttgcctaaatttctgttatatttgtgatgaatcaagattttctgatatcagtttattttgacagagtatgctgctaagtaaataactgaggatgcaacaagacctcgaagataagaaaaatgaaatcataatcgagggcttggagagcaagatcaaggattacaaagcttctctagagaagaaggacttcctacttcaagcaacagagggttagcttgcagaaattcaagctgaaaattgttggagcgaaggcagaaacgccacccttcgctcgaagtctccgctgcatagccactgctcagacagagacaacaggcagggacacccttcgcttgatcggcaccagacgaagaccggcgacgaaggcatcccacagtgcggtctcatccagctcagaggcccacgtgcgatccggccat

SEQ ID NO: 8845 - DNA, 303 bp, Zea mays
  unsure (1)..(303): unsure at all n locations
atgtattcggtggatcctattgtgtggatcaaggtgtccacaatgcattttacnggcgctgctgcaatgtggctccaatctgttgagggacaagtgagccatctttcttggatggactcttgccatatgattcgagatcgctttggcaaggatcaacatgctgtcctcattagacagttgttccatattatgcaaaccagtagtgtggctgattatgtggaccgtttttcacagcttggtgataaattgcgtgcgtattgtccgaatctgatcctctttataatatcatgcgttttggtgatg

SEQ ID NO: 8846 - DNA, 503 bp, Zea mays
  unsure (1)..(503): unsure at all n locations
actcagctaacaagcacagtttactgcattagaggggccctgcaatactttatagatcagatccactcaatttgggcgggctctaaagggttacacagaacatcttacataactcttatctcttgcaactctattgatggtcatcactctgcagtaaaaaaaaggaaaatatggtacaaaaaaatatgtgttcttcgttgaaactagctcgagccatgagcggagtaaaagtaagtaaaatgtctttttgaacgagtacaccaaacagcatcacattcaaatttcaatgaactaccattgtcggaatataacaggaaaagatatgatgcanaaggaatgatttacactaaatataggcgattgatgtcaaaataaggaagtacataccaagcagctataagcaacatcacacatctgattccccaaagtagatagttcccaatcaataacgccaattactcngtcctgtatacaagcagaatctaattgcttacanatcatgt

SEQ ID NO: 8847 - DNA, 308 bp, Zea mays
cgggtccgcgggtgtatcatttgggagagcgttgcttcgcttcgctgggtccaatccgatcgcagtgctgactcggatttaaaccgagatctcgtctgccccacaccctgttccatccgtatgccatagacggaccttccatgggttgctttagagaactaatagagatgctcttataaccagactagaaaaagagactgctttctcatggtcaaagtaaaacaacatgcagaatcaaataaacaacatattatatactgaaacggcacatgctgcagaagatgggcgaaggcaacacaacagcgaga

SEQ ID NO: 8848 - DNA, 395 bp, Zea mays
tctcatactcttgctccaacatccagagctattcttggtgctctctctaatgtaggctcatcaagatccagctctgcgctgtcaaatacatgagaggcagcaatggcggtataaaccatgcggacctctcctgctatctactgctagcaagcaaaagatggtcacagcttatgatatacgtgacagtgatgttgtgatgaaatgggaagttagcaatctagtaatgggaatggaatactccagcccactacaatggcgtatcagggggaaagtagtaatcgctgggagtgaatcaatagggctgtgggatgtgaattcacttaacccacaacccttgttgtctgttgcttctggtaagatagtgtactgccttcacgtgaataacactgatgctg

SEQ ID NO: 8849 - DNA, 330 bp, Zea mays
gggaggagtgcggtgcatttatgatacctaacgggtggctacagccccggggaatctctataaaggctacgtagtgatgccctgctgggtcaccttggtagtgatcaatggagagtcatgatctccgggcagaaagggaatcacggcttgtgggtaaagtgcacaacctctgtagagtgtttgaaaactgatatatcagccgtgctcgcggttatgagcggccaagggagctccagtgattagtggtactagatcagagatgttcagattacaggtggcaacgaggttgatggttctttggtttgactctggtaatggtaagtggtactc

SEQ ID NO: 8850 - DNA, 427 bp, Zea mays
  unsure (1)..(427): unsure at all n locations
ttcgatcttttcatatacaatctgttctgtcatgttttccttgggatcagtacgctccatctcggtgggcactgaatgaccatcttctgcatcagcttgagcttgcgtagcttcggtttctgcttgcctggtttcggcttcagcctgtaatttggcttcagtttgagcaactttctttgcatgagcaaggctcatcgccttcgtagtttacagcacagcatccagcacgttggccattctcctcctcttgggagttgcagcataagtcttttgcgccattggcagtgttgcctctgtcagagggctcataatttctggcactngcatcatgtgtttagcacttgacccttcagctgtatcaatcttatcttcgactgccttgactgtatgcgtcttcagcatcatggtcggctcttcngtgctctgt

SEQ ID NO: 8851 - DNA, 450 bp, Zea mays
  unsure (1)..(450): unsure at all n locations
tactcagcttcactcgctngccncagtgatcggctaagcatgtctggatatctctcctcgtaagtgctccagcgttcttgaggccgatagacatggaggtatagtagaaggctccaaatggtgtgatgaaggcagtcttctctcgtcctctttcgccagactgatctgatgatatccagagtagcagtctaggaaggagagcatagagcagccagcggttgaatcaactacctgatctatcctatggagttcgaagggatccttcgggtagtgtttgttgagatcggtatagtcgacgcacatgcgctaatcaactntattctttttttttgtacaagaacagagtntgccaaacattcagggtgtagtacttctctaatgaatcctgccgacactaggcgagctaactctgcacgaataacttctcttttatcgggcgtgaaacaacat

SEQ ID NO: 8852 - DNA, 349 bp, Zea mays
  unsure (1)..(349): unsure at all n locations
agcttacccatgacatggcatgtggctatattaagggtcctcggtcagcatgcccacatcgacatggtccttaagcgactcagacaaagacactacaccaagacttccttctcgtgcaagtcacccgctcggtctcgtctttatcatttacaacccataatttgatacctaacagaggtacatctttacagatgttgaatccatcatggtcatgatggattcaccatcaagtcttttctttgaaaaattcccatcccagatgaagcatcatcttttgtttaaaacataacattgtgttttctatagcaaggctaagcatcaaaanaacttntaagtaaaatcgggtatc

SEQ ID NO: 8853 - DNA, 354 bp, Zea mays
  unsure (1)..(354): unsure at all n locations
agctaaaacttagcagatcacagtgcacaagatcttttaatgagtgagcatgagtggttggccataaagcgtgcaaaataagtttgcggtatggccgtatttatacgcttgatagcgttgaaagtgaaagaccccacttgtcattgagtgttgctattctagcaaagggaaggtgtgttttcggaccttcngcataaagccttcggtcatatcacaatctgaatttattatttcaaacaaattaatattgcgaggggctactgttgggggccttcgagcttcgaaggtcctcaaaaacatgaattaacaatgtntctggagtataatgtgtgaacaggtatcttcggacttgaa

SEQ ID NO: 8854 - DNA, 264 bp, Zea mays
tctcacctcgaattatgcgactgatcgctgcaccaatggtagcggcatttcacggcggcctcaatctcttgtctggcgacaagccttgctcgatggtgctctgctccttccgatggctttgatgctcaatatatagatcacaaggcaaggggcgagtccgagaacggtgatttatggccgatcgatggacctccccaatatccattgcgagtttgttgcgcgcccgcccagtctattccgcggacatggtgtgcgttcgattcg

SEQ ID NO: 8855 - DNA, 380 bp, Zea mays
  unsure (1)..(380): unsure at all n locations
ntgtattaattagagcatcaatcaactcagaggtcttctcaatcttgtttctatgtgaggctttgatccaactatgtatccattgcgagcaccgtaagtacacacaatgggtgtaacccctgagatttgaatcaatctgagcatcaattaactcataggtcttcacaatcatgcttatgaaatgatctggttcgccgaattaaacgcgattcattgggctgaaatctagccaactaaaatccgaccgactgaagtcgagcctactgatacctgaccgactggaacctagccgatggaggtccgactggattgcgctcggccatggttttagcgagaccactgactatgctcaaccgatagatgttcggtcgactccaatt

SEQ ID NO: 8856 - DNA, 283 bp, Zea mays
cttgtggcgccctcgggcgtcttgtcgcatctcgatgtaccatattcttccacttggaagccttgggaccgaacccttctggcatggtatcgtcgtatagactgctgataccgcgccgagtgttataatgccacgtcccgtacctcttccagatggtccaatgaatcttctcggatggtctggttgcctcggtcgtagtaagcctttgtcctcggggaaccgtattctaagactgtgggttagatagcctcgaccccatatactaaaaagaacggctagaaac

SEQ ID NO: 8857 - DNA, 429 bp, Zea mays
  unsure (1)..(429): unsure at all n locations
ctctanagggagaacacgtgataggtataactaatgtacaattctttttatatagaccatgtgcagcttgacaagcaggcatacaggtgggaagctctcatcacaccaaatatgtgatgaccacatcacgacctttggagatgctccacatggacctctatggacccatcgcttatctaagtataagaggaaggaagtatggtctcgtcataattgatgactttggccgcttcacttgggtattctttttgcaggataaatctgaaacccaagggaccctcaagcgctttctaaagagagctcaaaacgagtttaagctcaaagtgaaatagatcaggagcgacaatgggtcctagttcaagaaccttcaagtggaagagtacctcgaggaagaatggatcangcatggagtcttcgctccctacacac

SEQ ID NO: 8858 - DNA, 383 bp, Zea mays
ttgacgggatcccctaacatggcgtgccgtcgccattcattgtggtgaccttgccactaccggagctacagaggctgggcaattgggcattctgccggtgcccttggggatgagcggcatctatcccggtgtggggtgccctggtgcctccggtgcatgataggcgatgagcgtggtggcaagagatacatgtcgaacaactatacatttgatttgtctctgaagattcaaagttatatcaagccacaatttagcgatctatatagatttggagaaatcctgcttcaataatataaactcgcaataggttccttgcatttttgtatagtagtgcagatggcaactagctgcaagctatatgaattgcttatgatagcttcatc

SEQ ID NO: 8859 - DNA, 415 bp, Zea mays
  unsure (1)..(415): unsure at all n locations
cactacacaanacacaagctagcgataggtcttcatccacacatgtgctaatcggagatgcctcaaccattccatgctagtcttagctattaagcatgcatatagaccgacctcttcttgcgcaaaatcgactaaataaagttagtagtctaatacactcttaaaagctagtgaaccatcacttgttctaaagaccgacgcgtctacatttgttaattgacatgtattttccatattgcatacttgactcacagatagcagattatatccaacagactctactacaaacacatcagatatggagtgctcattataaatcgcaattttacctatacctgttaccttgccttgatacccatcaccgaaaatgagagaatcttgacaatccttattcttgacgtaggaggtgaacatc

SEQ ID NO: 8860 - DNA, 477 bp, Zea mays
  unsure (1)..(477): unsure at all n locations
cttgactgggactgcgatcacgacgaatgataatacaatcacgaagctgtgtgcagaagatcttcggtataacggcatgaagaggaaaccgacttatagatgaaaagccgaatcagaccttgaagaattactataaagttattgataaatgtaaagggcattaatgtaattttgcatgggctgcgacccgtgcctataaatatgtgaacagtattcccgtactggacacgctgacctgtcatctacttttgcgtcacacttgtattcttactccttcgagctgaaggtacacttataatttattattgtttacacaagtgatataaataaaaataggttgataatcatgttcatataaattatattactccttatactttgcatgaatattgtctgtttctttatcatgatcatgaaggtatgtccttcatgaccttcgtcctanattcattatatccgaagggaaataatgattca

SEQ ID NO: 8861 - DNA, 499 bp, Zea mays
  unsure (1)..(499): unsure at all n locations
tttaggacctatgaaactaagcttctaagggagaacacattntatgactaacatatgttcattntgagaaagacaggatttgtagcgcatgtcaggcaggatagcaagttggcacccatcatccacacaagaacatcatgacgaccgacaggccgcttgagctactccacatggatctattcggcccgattgcttacataagcatcggcgggagtaagtactgtctagttatagtggatgattattctcgcttcacttgggtattctttttgcaggaaaagtctcaaacccaagagaccttatagggattcttgagacaggctcaaaatgagttcggcttaaggatcaagaaaataagaagcgacaacgggacggagttcaagaactctcaaatcgaagggcttcttgaggaggatggcatcaagcatgagttctcnttctcctacacaccacaacataatggtgtagtggagaaggaaaatagaactctattggacat

SEQ ID NO: 8862 - DNA, 217 bp, Zea mays
tgtggacgtgcctgaaaattttgaaatccaccttcaccaacttaattccgaatcgatcatatagatgaatgatttcttgtgggctgtgacgagccaaagcttggaacctgatgcaaagagcttctgtcatatacacgaattgtatacgagacacaaccctgtggtaagaacaatatcacaacaactgtggttgttatatcttcagctctcggtctgg

SEQ ID NO: 8863 - DNA, 395 bp, Zea mays
  unsure (1)..(395): unsure at all n locations
ntctcctcgctccacccgctacctctttcttggctactcttctgaccacaaggggtatcggtgtctggacctcgacttccaccgcatcatcatctctcgtcacgtcgtctttgatgaggatgtgtttccccttgctggcccctccctacccactgatctcgactccctcctcgagtccgatccggtgctcccattctcatatgcgccccaccttgcgccgttatccgcaccccgtgcggtctcgacacctatgtccactccacgcgtggtcccattggtaacgcctgcgccatgcgtggtcccgccgaccacgcctgtgccacgcgcagccccgtcgaccaagcatgcaccacgcgcggaccctccgaccccacgcgcgtgcccgttgacgccca

SEQ ID NO: 8864 - DNA, 407 bp, Zea mays
tattttggtgttccactgatgtccctttaatgtcttaatgagaatttaataagaattctatgtgaactcattgaagcgaggtttattattttcccttcttcttatttcctttgcgcctttaagatgggtttgaactaccagctatattaataaatttccaaaaaatctgcaataattacagtggcttcgtactggtgtataagtctttctcaaaatatggggtttaaaaagtaagtagttcttgttggataaaattattaaatattacggcaggaggggtgttttgaactacaaccatctttttgcagtgagttattttctaagactatttgtgctggcatttatatgttataacatgactgttcacaaatttctagccattaatacttattagtgtatttattatg

SEQ ID NO: 8865 - DNA, 413 bp, Zea mays
  unsure (1)..(413): unsure at all n locations
gacactatgaaactcagctatgaagattcttcatcccaacatgggctagtcggcggtgctatagccaacccatgttagtcttagcaattaagcatgtgtcgagctcagctctattaaaatctactaagtatagctgaccctctaacacacccttaaatgctattgaatcatcacttcttctaaagacagtgacacctacatcagtgaatagacagttgtagcccatttgacataattgagaaacagaaagcaagttgtagtctaaggaatcaacaagaaaaacattggaaatagaatggtcaggagatatagcaattntacccaatcctttgaccaaaccttgatttccatccccgaatgtgatagctcgttggggatcttggtttttctcatatgaggagaacatccttttc

SEQ ID NO: 8866 - DNA, 404 bp, Zea mays
  unsure (1)..(404): unsure at all n locations
gcttctggtgggcccatgcttcgttgcgccgaatgtcttgcgtgaataatcatcttctgctgaaatcgtccccagtaaatggccgaaggttcctttttatagagcttctgcgttgcnaaccgacataaagatagaatgacctttttatccatagaggtctaagataatgttgtaaacttttgtaaagggcataatngttattcgtcacatgttgcgtcctgtgtctataaatagatgaacagtacccccgtactgttcacacgaacctgtcatttgccttcgcatcacacttgtgttcttcaagaccgaaggtacatttgtaatttggaggcatttacatttgtttattataataaaaatgggagatgaatttatgataaccattaagtattctcatatctcat

SEQ ID NO: 8867 - DNA, 522 bp, Zea mays
  unsure (1)..(522): unsure at all n locations
acattacggacctatgaatactcagctataagatcttattccacatgggctagtcggcggtgccagagccaacccaagttagtcttagcaaccaagcaagtgtcgagttcagctctatcaaaatctaccaagtatagctgaccctctaacactctcttgaatgctattgaatcatcacttcttctaaagacagtaacacctacatcagtaaatagaccagtgtagcccatttgacataattgggatacggaaagcaaattgtaatctaaagaatctacaagaaaaacatttgaaatagtatggtcatgtgatatagcaattttacccaatcctntgaccaaaccttgatttccatccccgaatgtgatagctcgttggggatcttggtttttctcatatgaggagaacatctntntctccccggtcatatggtttgtgcacccgctgtcgagtatccaacttgagccccagatgcataaacctacnaaagcaatntagttcttgactctatgtacccaaacg

SEQ ID NO: 8868 - DNA, 331 bp, Zea mays
actggcttcctctgaaatccttggaagccggttatcaacatatccttcagcttttgccatgatgtgattgttcctggcctaaaggaagagtaccagtttgtgcaacactcctgacagtcattacgaaatactttgccatgaccgttgtgttgccaccataccaagatatagttgcctcataactcatcaagaattgcttcgggtctgaatgaccgtcgtacatatggagctggggtggcttataatactgtggccaatgtgtaacctgctgttctgttgacaggggagaagtatcatcaaaagcaaaatttccatgatggaaatcttcata

SEQ ID NO: 8869 - DNA, 391 bp, Zea mays
  unsure (1)..(391): unsure at all n locations
tctacatcatatgatgatgattacctatgtgttctcccaagtagatatgtatgagatgcgatattggttattccatttatggtgattaccattttatttttcgaaatttggtcaagcacagggtagtggagtcctaagcattggctgcggtatgttccttgaatatatcagcccagagaccatgctttcangcagcaaaagttttgcccactactgngagatctactccactgtttcattacatggagattatctancgttgtgtccaccaatttcaaaaatcctctggtacactntatgtgatacctataattctccaacatataaagatatgatatattttgcaacatattacacatcanataatggttaagccatttggacgatatta

SEQ ID NO: 8870 - DNA, 299 bp, Zea mays
cgttaagcgtgcatctaaaccggcttcttcttttgccatatcaacttaatatagtgtgccggctaatacaccctggcaagctagtgaaccatcacatgttgtaaagacagacacatctacatgtgtaaataatcaatgatatgccatctgacataagtgactgacatatagcaaattatatccaagtgactctactaaaaacacagtagagatagagtgctcattagaaatagcaattgtacctagcccttttagcttgccttgatgcccatcaccgaatatgatcgaatcatgggaat

SEQ ID NO: 8871 - DNA, 479 bp, Zea mays
  unsure (1)..(479): unsure at all n locations
acccttctccatattagtaataacatgttaggatgtacttatcaagccaagataaaataaaataaaaaatcacatatgtcatcctgatcttctagtattctgaatttgctattttttaatcatatctttgcatccatgttgggtaattaatatcatgcaaacccaacctttcctgcaggagtacttctcaaaatggggagaaagtggcactgttgacttgaagtatgagttggagcacctcatcatactgacagctagccggtgcttgctgggaagggaggtgcgagaaaagctgttcgacgatgtttctgctctcttccacgaccttgacaacgggatgcagccaatcagtgtccctcttccatacctcccaatccctgcacataagcgccgcgacagggcacgtgcacgtctggcagaaatcttngccccatcatcaagtcccgcaagggctctggacagtctgaagaaaacatgct

SEQ ID NO: 8872 - DNA, 371 bp, Zea mays
agtccacttgaattaatcttcggagatacccgatctctctgcaacatgacacccgaaggtccaacacaacaagcaatgagtgaattcagaattattgcagagcatatcagcacaagggacctggttcaagagtttttagctttcaaagtttttcccagtttataagaatgggaaatgccgaagctacaaggggagaagaaagaaggtgaacttgtacgtttaccttactacttcaagtttaagaaatactttaaaacaccttgccaagagtggctggaaacgattgaagcgatgtgcaatgaaatacttggcaattattctaaataagaagatcagttgatgaccgcaaccttcggcacccgtccgaagcg

SEQ ID NO: 8873 - DNA, 291 bp, Zea mays
gagcttcaacttggaatttatcaataacccattcttttacgacgactgtttcgaactaaccctgatctttatgtcagcctaggaacccattcacctattgtgcactgatcccgggcggctccacgaaaagccttacaagagcactccaaaaccctcaaccccttgatgccacagtttacattataataaaaaaggaaaaggcgatatgaaaatccatcatgtcttgatagagtaacattgataaacctactatattatcacccatattgtaacatgactggaaacaatcta

SEQ ID NO: 8874 - DNA, 396 bp, Zea mays
  unsure (1)..(396): unsure at all n locations
tctttctccggctgtagggtagtctcttctcccccgaagcgtaatagcttcttgtgattttcagtaaaatagcctgactctaccatcttggacagatcagccttcgaaacagtagatttcccgaagtccaaatggctgggtttgcttggtgtggcaagatgataatcatcttcggagtcagtttcctcagcatcttctccttctgcttcagcgattgcttgttctgcatcgtcaataggaatcttttccgaagtcactagcccggatcgttgcatggcttcggagatagggacagtctccgaagcttccgtttcgtccccctcacgttcaaccctggcggtagagcggactctggccatttaactatgaacttgtgaaactntaatacntttctcc

SEQ ID NO: 8875 - DNA, 292 bp, Zea mays
  unsure (1)..(292): unsure at all n locations
tcttttcatctccgagctttgtgaanatatcggcttattggttgtgggcgctaacatatgcaatgtcgatatccccctttggtggcgatctctcaaaaagtgataccagatgtctatgtgcttattgcggctgtgtataacatgattatctgccatgcggattgcactctcattatcacatatgatatggtctttgctcaacttgtanccatagtccctaatggtttgcctcatccagagtaaattgacacaactatgtcctacaataatatactccgcttcggcggtggat

SEQ ID NO: 8876 - DNA, 447 bp, Zea mays
  unsure (1)..(447): unsure at all n locations
tctatagggagaacacatgttgggactaacaaatggttcatttgagaaagacaggagtngtagcgcatgtcaagcatggaagcaagttggaacccaccatccacacaagaacatcatgatgaccgacaggccgcttgagctactccacatggatttattcggcccgatcgcttacataagcatcggcggtagtaagtattggcttgtaattgtggatgattattctcgcttcacttgggtattctttctgcaggataaatctcaaacccaagagaccttaaagggattcttgagatgggctcaaaatgagttcggaataaggatcaaaaagataagaagcgacaatgggatggagttcaagaactctcatatcgaaggcttccttgaagaagaaggcatcaagcatgagttctcttctctctacacaccacaacataatggtgtact

SEQ ID NO: 8877 - DNA, 226 bp, Zea mays
atgtcaagcatgatagcaagttggtacccaccatccacacaagaacattatgacgaccgacaggccgcttgagctactccacatggatttattcggcccgatcgcttatataagcatcggcgggagtaagtactatcttgtaattgtggatgattattctcgcttcacttgggtattgtgtttgcaggagaaatctcacatccaagagactttaaagggcgtcttg

SEQ ID NO: 8878 - DNA, 303 bp, Zea mays
  unsure (1)..(303): unsure at all n locations
agctggaaatctgaatgaccggcggtatgaccagctatttcttgttcttcacacngatgtacagcggttgggggtttccattccaaaatatccttgactgtgctaggatccaccgcaatccccttggcagataatacatgtcccacaaattggattttctccagccagaatgcgcacttactaaacttagcatataattgatgttctcttaagcgcattaacacgatccgtanatgccgagcatgctcctcttcattcttggaatatattaagatatcatcaatgaataccaccacaaattta

SEQ ID NO: 8879 - DNA, 397 bp, Zea mays
ctctacgacttatagcatctgccaccacattagcctttcttgtttgttatcgaatctccatgtcataattgttgattagctctagccaccttctttgtctcatgtgtagctctgactgtgtgaagatatactcttcaaactcttgtgatccgtatataagtgacgtatattacctagcatataatgacgctgaataataatggcaagaactattgcggccagttccaaatcatgtgtggggcgatgttcctcatgtcggtgtagctgccttgaagcataagctattactcgtccttcttgcatcatgacgaatacaaccccactacctgatgcgtgacaataaacatcaaatggcttctcaatggccgggtgggccaaaactcgtgcaccggtcaac

SEQ ID NO: 8880 - DNA, 430 bp, Zea mays
tgtcccatcactccgcatgctcctcctcagccgaggcggtgtccctctctacagtccaacccggtggcaaggcggacggccaagtcactccagcaaccatgtcctccagagaacctgtaaaattatgccacaagcaaggctgagtatactaatactcagctagacttacccggtgtgaggagtctactcctctacctctagacatgcagctgtttggctgtggggtttggttgccaaaaacactagctgagtttctaagtcaagtttttactttgtcaaaaattaagtgtgactctcttaaggctaagtatgtactatctactcacacatagtagcaaacatttaagcaatcaacatcttgtatcatctcatcatatttccacttggtactcaatgtagcagcatggatcaagcagtctcattaactgcg

SEQ ID NO: 8881 - DNA, 382 bp, Zea mays
ttattatgctatacttgttgcatccaggaagatgagccactgtttttatgcacacacatttgtggtggcgacctgcttcccgttaagggccattctccacaactctaacgccacaagcaatatcgccaagtgggccacagaacttgctgagttccaactggacttccagcctcgccacgctgtcaagagccaagtcctggctgacttcatcatggaatggaccccttccccgagcgctcttgggggttcagataccgattcagaccccacacctgcgaagcctagggctctagtcttcaccgagccccactggacgctctttttcgacggatctgcccgccaatagggtggcggtgcttgagtggttctcatcgacccaagc

SEQ ID NO: 8882 - DNA, 310 bp, Zea mays
cttaggatatccaagagaaactatacagaattagagaacgtgttatatgctgtcttgatggcatccaagaagcttcggcatttctttcaagcatacaatattgttgttccttcttcgcaaccgctgaaagatattatgagaaatagagaagctactgggcgaattggaatatgggctgcagagctcaaatgaatttgcattgattatgtgcatagatcttctatccagtcccaggcgttagcagaactcattgctgactggacgccacgggctcaggatgaagaaacaaataaagatgccgaagtattga

SEQ ID NO: 8883 - DNA, 126 bp, Zea mays
gaaatccaaaccttcgacttgggagtatccctcggcacaagtcgtgctttgtttcttgtcaccacaccatgctcatcttgcttgttgcggaaaacccatttggttcctacaaccttttgattatga

SEQ ID NO: 8884 - DNA, 295 bp, Zea mays
tggagatgtgttattgagcaaccatgtgactctttcttattgctgggagagcgcgccgtggtcagaatgagcacgttcctccaccgacaccgccttccactctgcaggagctcatggcccagcagaatgagatcctgcgacagctggcacagcgtcagccgccaccacagcactatggtggtggggaccatcagcgtcaccctgtcgctgctacctaccaggatttccttagtactcagccaccactgtttaccacggcagaggacccacttgatgcatatgtgtggttgatggt

SEQ ID NO: 8885 - DNA, 292 bp, Zea mays
  unsure (1)..(292): unsure at all n locations
cgcgctgngcgttcttgcaatcggaacgcctgtgctaatattcagagcccgctgctgtcttcggtaggtgcgcacgagttcttgcacccgatgtgcaattttctcgccacgaacgcccacgagcacctgcgcagttctcgccatgctgcttcgcctcagcgatccaacggcggagccttgtctctcccccgctctccgcgttcacgtcgacggagtgccgtgccccgctgcgtccgtcgtcatgcgcgccaccgacgtgagctcgccccatcttctctctcagttcccattc

SEQ ID NO: 8886 - DNA, 308 bp, Zea mays
tgtgaagattcttcatcccaacatgggctagtcggctgtgtttgagccaacccatgttagtcttagcaattaagcatgtgtcgagttcagctctatcaaaatctactaagtatagctgaccctctaacacacccttaaatgctattgaatcatcacttcttctaaagagagtgacacctatatcaatgaatagacagttgtagcccattttgcataattgagatacaaaaagcaaattgtaatctaatgaatctacaagaaaaacaatggaaatagaatggtcaggagatatagcaattttacccaat

SEQ ID NO: 8887 - DNA, 272 bp, Zea mays
  unsure (1)..(272): unsure at all n locations
ctcagcttcttaagggagaacacgtgatatgtttgactaacgtgccattctaaaaagatagaccttgtgccactttgtaagcacgtaaacaggtatgaggagcgcatcacagcaagaatgtgatgaccacctcaagacctctggagctgctacatatggacctcttcggacccgttccctatctgagtatangaggaagtaagtatggtctagttattgttgatgacttttcccgcttcacttgggtgttctttttgcaagataagtctgaa

SEQ ID NO: 8888 - DNA, 345 bp, Zea mays
  unsure (1)..(345): unsure at all n locations
gcatataagtttctggatttatatggtcacccaagttttgttgatgaagcaccagaagaccaatcaagagaggaatccatgtgggagttcgcaagagaaagggttgcgtgttggcatcaatgcttnctcaataagctagctgccaagcgaaagccagaagcctgaagatgatctttgagtagccagaatcagcgtttgcaatcaacaaccggatgctcctgaaaggccagaatttgtttgaagtccatctcctcgaagagttgcanagtgaagatatgtagctgaagtaaagctatacacataacccttctaaaccgaatctcgaggacgagattcccttttagt

SEQ ID NO: 8889 - DNA, 365 bp, Zea mays
tcgattctaagctggcttcagccctgctcggccttatagtttaatataacttgtggctagctcttcagtcacatcatgattgaataaattaaccacattgagatgcctaaagatatagtatctctcattgcatttgatagccccaatatgcatcactacacgtaacgagaaataatgacaatcccaagctacggatataacagatataccacctgagaatgcttgatgacacatatttaacataacaaacctttttgaatttgttcaaaaattaatacaggattgtcactactatcaaatggcatttcatttttcacaatttctcagatactatgatggagagaaaataaatgactacactttta

SEQ ID NO: 8890 - DNA, 469 bp, Zea mays
  unsure (1)..(469): unsure at all n locations
tcagttgtctaaatgtgttgcttgctttggtatttctgctggcacaataatgtacggattttacattttcgaacttgttagtcataggttcttaatcaactatatcagttaaatgctaagttggtaacggtgatttcatgagattttttaatgggacttcagtcacatttctttatatatttccttctaccaatgtgctctgtcagtcgcattcatttaatcagatgtcatttgtttgtcgagttacttatccttctgtctggtgcaattgctgatacaattcttatctaaagttgtgatgtttaacgctgttgtacggtaacgttgttgccaaaagcaatgaattctttaatttagaacatctctatcataatttgagaaccgngtaatattcttctaagtgttttggatttagaaagtcagtgtctaaagctcatagaaataagctgatacacatttctactaatga

SEQ ID NO: 8891 - DNA, 424 bp, Zea mays
  unsure (1)..(424): unsure at all n locations
ntttccaaaactgagaatcattctgtctctgcttaactgatataatatgttttcccttaatatatcttttagcaataatattttgccataagccatttgaattttccaaattccaaagccactttgtcaacaaggcatcattcatataacccaaattcaaaactcctaatcctccttgacttttaggagagcaaaccaaattctagttaaccaaatgaattttttttattgtgagccaccttgccataaaagtcttttcctgtacaaatccaatttcctaataacagatttaggagccggataaattgacaacatgtataaaggaacattaganagacaactattcaataaagtcaatctttccccaggcgtaaaaatctcccttgccaaccagcacgtcttttatccattatttccatcatgg

SEQ ID NO: 8892 - DNA, 364 bp, Zea mays
  unsure (1)..(364): unsure at all n locations
taagatctgtanaatcgatgcacattcgccacttgccattggccctttttaccataacagtgatagccagccattctgggtacttcacttctctgataactcctgcactgaggagtcttttgacttcgttgcgagcaccttcgggcttatcatctgacatcttccgaagcctttgctttctgggtctgaaggatggatcgacattgagtgagtgctcgataacatctctattaactccgcagagatcattggctgaccatgcataaacattcttgttattgaacaaaaaccttatcaagggtntctcctgctcttcggataactgagagcctaacagcaccttctgctctgctatgtgctcaca

SEQ ID NO: 8893 - DNA, 325 bp, Zea mays
actcagcttatgcccctttaaagattgtcaactttgtaatggcatagctcccatggttcacgataacgaggcttacattttataccctgccggttatcccgagcataagattatgagaattcattctaggaagtctcactctggctctcatcatgcttttatgtataagagtgaggcatctagttctaggcaatcaacccgtgctaaattgcctaagaagaaaacttctactgtatcaaaagagcctagcatttcatttaaaacctttgatgcatcatatgttttaactaataaatcaggcaaagtagttgccacatatgttggg

SEQ ID NO: 8894 - DNA, 324 bp, Zea mays
ctagatgcactgaagatattcttgaccacaccaccattattttagaccgcccggcgagctacgccgactcaaccggctgaagatttgctgttgtatatctcttgcacgactcacgtggtaagcactgcgtgggtagtacatcgagtggaagaacggcatgcctaaccggtacaacatcctgtttaatccatgagcgaagttctaggtccctcgaagaaaaaatatcctcaggttcataagctattatatgcattacttctgactgaccgcatgctgcgattctactttgacgacccaaagtcatagttgttactgggtgtccat

SEQ ID NO: 8895 - DNA, 357 bp, Zea mays
tgtaccttataacaggaggatacaagaagctggagtggttgtctgaagactctttaactgcttgaagcattagtgtatatctggtgcttttttgactgatcaactctggagcagctacagtgatgtagttgtgggcttttgaactgcttcaagctggagtgatgtcgctgtggcgcttttgtgactgatcatctctggagcttttgtgaatgatctagctagctatctgtaaatgatctagttgtgaatgatattattattgtgatgcttttgtgaatatataattgtggcgctgttgtgtttatgtgatggatatatgactgtcggatactgattaactgtatatagttttatgat

SEQ ID NO: 8896 - DNA, 367 bp, Zea mays
  unsure (1)..(367): unsure at all n locations
ntgaanagtccggtatgaatctgcggtaatatccagccagttcaacgaaacttcgaacctgatgaacagtggtcgggggtttccactccaaaatgtccttgactntgctggggtctaccgcaatccctctggcagatagaacatgtcccagaaattgaatttcctccagccaaaacgagcatttgctaaacttggcatacaactgatgttccctcaggcgcgttaacacgatccgtaaatgttgggcgtgctcctcttcattcttggaatatatcaaaatgtcatcaatgaagaccaccacaaacttgtctagcttcggcatgaataccgagttcatcanatatgtgaagtgggtcggagcatttgt

SEQ ID NO: 8897 - DNA, 324 bp, Zea mays
tctaaagggagaacacgtgatatgtttgactaacgtgcaattcgaataagatagaccttgtacagcttgtcaagcaggtaaacaagtgggaggagcgcatcacagcaagaatgtgatgaccacatcaagacccctggagctgctacatatggacctcttcggacccgtcgcctatctaagcataggaggaaagtagtatggtctagttattgttgatgacttttcccgctttacttgggtattctttttgcaggataagtctgaaacccaagggaccctcaagcgctttctaaggagaagctcaaatgagtttgagcttcaagt

SEQ ID NO: 8898 - DNA, 271 bp, Zea mays
ggagtgaggagagatctgtcttgctcgcagaggcggagtgtctcttctaaatgtgacaggagtcgtgaagaagcttcttggctgtgctcagatcccacgcgtgcgctgggatcccacggatctcaatatccatcaagtgagataaagacgtagccaacgcatgtgcaaatttttgccattgcttgaacacgagcgagaacatatggcctctgaatggctttccttcattaagcactcttgtcgccactttctcatccgacaaaaacagaac

SEQ ID NO: 8899 - DNA, 344 bp, Zea mays
tgatcatgccaacaataaggtgtctttttaataaaaaggtctctgatatccaaagtgcttgacaatttctgtaaaaccggtgaccagaaacatccagtcttagcattggttggactgcccagagatatggtgattttactagactgggataccccttgctcactgatgattggccagtagcaatattgttgacaatccacttaatattgacttccaatataacacatatgcaaactttgaatgcagaagctttaatacttatgtaaccaatgtatcaaaaccaaccatttctcatacggttaggttatcgtgcctaatggtagacactgtagtaagcatcttaa

SEQ ID NO: 8900 - DNA, 380 bp, Zea mays
actaagcttcttgtagctgatgccaaaaatgagaggagaactgcgttcctctatctgacactatcttcttcggcacaccatgaaggcggactatccgtgacatgtataactcggctaacgttgctccggagtatgttgtcttcacaggtatgaaatgggccacctttgttaagcggtccacaaccacccagatggaatcataaccggcccgggtacgaggtacgccaactataaaatccatcccgatttcattccacttccactgaggaatccgcaatggctgcaacaatccggcaggcctttgatgctctgctgtggttctctgacagctatcacagatggcgacatattctgcgatctcttctttcatgccataccac

SEQ ID NO: 8901 - DNA, 467 bp, Zea mays
  unsure (1)..(467): unsure at all n locations
agcgtancgctagacaaacgcacatgggcggcagcttgcttacactcatgcgctaggcgtgtatcaatctgcatgcgcaaccacaacgccatataaagatttgctattgctcagcaaaaccgccagtaccaacacacatgcacacaggctcaagcacaagccgacaagcacaagccgagcgtacgggtaaggaacacctgacacgttaaataaatcataataggaccaaaatatgtgttagcattcttacatcattagtgcaactaaaataaaggagggacaaacaatataatttatatggtttagtccctcttaatcacccctttaaggactagagaataaaatagcttagtctatatattagtccaaccggctagcaatttagagattaactaagactaatatggagaccattaatcgtagcccctcgaaccgcctgacatgcatgcatacatgcaccaagtgca

SEQ ID NO: 8902 - DNA, 271 bp, Zea mays
gcttctaaagggagaacacattttaggactaacaaatgttcattttgagaaagactggttttgtagcgcatgtcatgcacggaagcaggttggtgctcatcatccacataagaacatcatgacgactgacaggccactcgagctcctacacatggacctatatggcccgattgcttacataagcatcggcgggagtaagtactgtctacttattgtggatgattattctcgcttcacttgggtgttcttgttgcacgaaaaatctcatacc

SEQ ID NO: 8903 - DNA, 122 bp, Zea mays
  unsure (1)..(122): unsure at all n locations
tgaatcactnttatacccctgagataccagaaaccctaattttaaccctggataaccctaaatcaaacacctagggcttatttgcgaaaatagaccactttntggcctaaagtgcacaaaac

SEQ ID NO: 8904 - DNA, 364 bp, Zea mays
ttgaccaattgtccaattaattgaatctagcttcgtctcacataactgaaatggctagagtcaggtctactgccagagtatcaaacgaaggagaagaagctgaagctactaagacgacccctatttcagaaatgatgaaatgttctatgttaattgtacgagaagaggaagagtctcttctgacaaaatatgttgttgttgccgaagctgaaccaactattgccgaagctgatagtgatgatgaagaggatgacaacattttgagtccgagcaaacctagccacattgagtttggaaaatccacagttaaggcggaagatttgggtttaatgaagaaattatgatattttggagaaaatgatga

SEQ ID NO: 8905 - DNA, 300 bp, Zea mays
gatctcaatattattggtcgaaccgtctttaagatgaattgacttaaagacccatgatggtttgtgtcattattgtagcccattggtaacgacatagatgtaattttacgcaagttgcatcctgtgcctataaataggtgaacagtaccccgtcactgttcacgcgatcctgtatcactggcacggtacgctagaattatttgcttccctaaggcgaaggtataaatgtgcccaaatatatgtttaatactatatactctataataaacatgtaatatatttatactttatattcatttc

SEQ ID NO: 8906 - DNA, 351 bp, Zea mays
  unsure (1)..(351): unsure at all n locations
ntatcaaatggacgtgaaaagtgcctttctcaatggacctatcaatgaagaggtctatgttgagcaacctcccagcttttaagatagcgagtaccctaaccatgtttataaactcttaaaggggctttattggcttaagccagccccaagaacatggtatgaatgcctgtgagaattccttatcactaatgggcttcaagtcggaaaaccgatcctacactcttttctaaaactatngcagaagatttgtttgtttgccaaatttatggtgatgatatcatatttggtctactacacatctacttggaagagttagtaggacatgatcacaaatccagaggctatgatggt

SEQ ID NO: 8907 - DNA, 415 bp, Zea mays
  unsure (1)..(415): unsure at all n locations
ggacattgtctccctatgggaagccaatgccatccttaatctcattgtgtctcccattatagagcatgcttctagcaaatttaaatttttcattctctatcgcatgctcattgattttactagttagttgtgctatgtgatcattttgttgtttaattaaagctaagtgatcatggatagcatcaacattaatatctctacatctagtgcaaatagaaatatgttcaacagtcgaagtatagggtttgcaagatcttaattcctctatcttagcatataaagtgacattctcatttctaagacaggaaatagaatcatggcaaacatntaaatccttagccctagcaattaatttaatcattttcatcttaagactagaaatttgatcattcaatttggtcatcttaaccattaa

SEQ ID NO: 8908 - DNA, 270 bp, Zea mays
agaaagagcacaatctctacttatgattatttatgaaatatgttaagagagatcgtattagtaacacaagcgatagtttccaatttagcaacctctagtatatgaatgacaagacggctactaaaataaggaaacctcatgatatgaactaaattacccttacaagcatcatgcataacatcaattgaaaaaaagatgaaagtagcatgaatatctatttaaatttataaggcaactctagattataacatagtgagtgatctatggaga

SEQ ID NO: 8909 - DNA, 371 bp, Zea mays
tcacacctctggactaactcgactgtgtcactcttcgctgttggccaatagaaacctgacctgaaaaccttcccaactagggtcctggatgctatgtgtactccacattgcccagcatggacctcatccagaagttgctttccagtagctgagagaatgcatttcatgaggactcctgatgcacctcttctgtatagtgtttccccaatgagtgtatagtgagctgattgtcttgcgatgcactcggctgtattcttgtcatctggctcctcctcattttttatatatttgatgattggcctcctccagtcatcacaatttgattctggttagctcaaggtattacattcttctgcttgatccagtgagat

SEQ ID NO: 8910 - DNA, 440 bp, Zea mays
  unsure (1)..(440): unsure at all n locations
tctaaagggagagncacatttgtgactaacaaatgttcattttgataaagaaagggtttctagcgcatgtcaagcagggaagcaagttggtgttcatcatccacacaagaacatcatgacgaccgacaagccgcttgagctactccacatggatctattcggcctgatagcttacataagcatcgacgggagtaagtactgtctagttattgtggattattattcttgcttcacttggatgttctttctgcaggaaaaatcacanacccaagagacattgaagggatttttgagacgggctcaaaatgagttcggattgagaatcacaaagattagaagtgacaatgggacggagttcanaaactcacatatagaaagctttcttgaagacgagggcatcaagcatgaggtttcttcctcctacacgccacaacaaaatg

SEQ ID NO: 8911 - DNA, 415 bp, Zea mays
  unsure (1)..(415): unsure at all n locations
ccctggactacttacatggatgtatttggacctacttttttatgttattgccggnggccacctctactgcctagagattggtgaagacttctcaagatacactcgcgtgttctttctccatgacaaagctgatgctgcatctatattcaagaagtgtgcctagaaagcacataatgaatttgattgctagattaagaagattataagtgacaatggctaagaatttgacaacaccaacattcatgagtactgtgatgacattgggatcaagcatgaagtatctgccacatacacacctcaacaaaatggagttgttgaaaggaaaaatacgaccttgaacactcttgctagaacaatgattgatgagtataacacaccggacacgttttgggccgaagctgtcaacacctgttgc

SEQ ID NO: 8912 - DNA, 280 bp, Zea mays
cagttttattgtctatgaatgctgtgggcactccacacctactcgtcagattatatagtgctgcacgcaagaaagcgaatcgccataatttttacaccaagcggacacccgctcgcactcgctgcatggtggaccgcatagaccgaactagaactctgcaatgtggggccgttacacgctgggagattgaatcacttctcgactacaagcttagggagagtgaatttataccttctgcgctccgaagcttaatagacattttttacagatgaagctcgat

SEQ ID NO: 8913 - DNA, 352 bp, Zea mays
  unsure (1)..(352): unsure at all n locations
tcggagccgaagcaactccagctntgaacgaagccatcatctcataaagtggatttgagttcaccagaggtgggcgccaatgttggggactctnattcaacgcttcatattccaacaagagatccaaaagaggctccgatctcccccatttaacctaaaacccttccatccaaaacctatcaccattgacaaaagaatactaacttctcattatttacttttgatccctttatatcatacctcttatgataaggaaaaactcaaacaatttcattattcaactacatacattttccacttttttaaaaactgacctccttggaaacaatttttttgcacttttaactttaat

SEQ ID NO: 8914 - DNA, 236 bp, Zea mays
ccatataaactcagcttataagactacttcatatggatccggaattatattctatctgatctgacgccgccgaaaacattgttatcttaccgagacattgcctgcctttcctgcccatggcgctgagtcaccctattttggaccaacgggtcgttgatcaagataggtccattaaggacgcatcctatggttgcagcatcaccccaatacccctcgggaagtgcctccatgtttat

SEQ ID NO: 8915 - DNA, 349 bp, Zea mays
  unsure (1)..(349): unsure at all n locations
tgcggagccaggcggccgagcttctagacatcattgctcatacctagtctatctttntgacagaagaaatagatccttgcactccatgccgctatgatcagcgctggccgcagcaggcggcgggggcgggcaccggcgtccctgcccacgaccacgaccgctgcttcccgccggaccgagcactccatctcctgctggttagtgaactgcacggtctcttacctatcactctctatactgttgaaggtcgatctaaatagcatccttacttgattcctctctcgtcttttatttctttcttcattnttaagaaagtagagggaagtgacacttacttttttctctctta

SEQ ID NO: 8916 - DNA, 307 bp, Zea mays
  unsure (1)..(307): unsure at all n locations
ggaccctaaattggctgtgtaccaccaaaaagcccgtagttataattaaccttactttgtcaatttaatcatttttgttactaccacattgcatatcatggcatacatatatctcactcattgcattcattagattgcaacctcgctgatgaagagtacgtgctcattcctgagcaaggagttgttcacgaggaagaccaggaagccagctccgagcctgtcacagaggatcttcccgcagccccagtatttgaaggcnangccccgattttatgcataaccaacttatatatgctactttactaca

SEQ ID NO: 8917 - DNA, 228 bp, Zea mays
  unsure (1)..(228): unsure at all n locations
gctttactccgttcttgggcttttctcattgaggtgctttctcaccttggatctggaaatatttggcgaaatttgattgcgaatctgttggcttcttcttccactcaagtgttgttaaatgggtctactggtcttcctattangcatctgagaaggcttcgccaggtgatccccttttctccatgctacttgttctaatcatggatgtcctcagtagtctgtttctgc

SEQ ID NO: 8918 - DNA, 285 bp, Zea mays
  unsure (1)..(285): unsure at all n locations
ctggatattcttcatcagaacactatggatatcgntgngattaatganaattcttcttcacgaagcatgaaaagaatggaaggtgtttttttcctcaaagactcaaanacggtacgtatgtaaaatttcatgcatcgtaaagaattaaaccataaaaaacaagtatattacatacagagttacaagatattacacatattacatttcagatgtttttacaataagcacctagtcttccctaagtactatcttccgcagcttcgtcaagagttgattgacaacttt

SEQ ID NO: 8919 - DNA, 370 bp, Zea mays
agaatagtcataaaatgttcccaagaatgaacttgaatcatatttatacccctgagataccaaaaacccccattggaaccctggaaaaccctaaatccaaaccctaggggcctatgtgcaaaaactgtgcacatttggactaaagtgtaaaaactacaatgttaaagcatattaagtcctttggttcacaaatatgtggatttgcaagtgaaaccctaagttttggggctatttgcaaaaagtaccacttgacctctatatagcctaagtctgaaattagtgtgattgcttcaactttgaacatttgtatcttttaaaatctagggtttttgccctaagtcaccacataaaacttatagacctatcaaag

SEQ ID NO: 8920 - DNA, 299 bp, Zea mays
actgggatgggaaagatgagaattatgaagggtacgttcattgacagcctttaatccagacataaatatcgcacgggtcaaaggcgataactcacaagggtgttacataaaagatgaatgctcagaagagccagtggtacaaatacaacaaaagaatggaattaagtcaaggcctacatgcggcaaataagaggatatatccaacggtgagataagctaaacacagctctcgaattgtatacaatagagtgatttaacaagctacctattaaagcatcaagcaagatctcatatacaaa

SEQ ID NO: 8921 - DNA, 387 bp, Zea mays
aagcttggggaggttcttcatccacacatgtgctaagcggcgatgttccttttatctcatgcaagtcttagccattaagcatgcatctagaccggcctcttcttttgcaaaatcaactaagtaaagtttgccggctagtacacccttaaaggctagtgaaccatcacatcttctaaagacagacacatctacatcttgtaataaacagctatatcccatattgcataattgactaacagatagcaaattatatctcaagagactctactaaaaacacgttagagatagagtgctcatttgagatagcaattttacctaacccttgtaccttgccttgattcccatcaccgaaatatattgaatcttgggaaatcttactcttgacat

SEQ ID NO: 8922 - DNA, 291 bp, Zea mays
  unsure (1)..(291): unsure at all n locations
gcctctactatatccctcagatgcatttatttgtatcctatggcacttatatcttgctcaagaagattgcctgtacggacgccctctcatatatgaaggacgcattaggctgaacaacacctattatcacatggtgtatatgcatcgatggagaccaatacgactaatcctcctcttcacagagttcgcctttcaaaaccacttnacctatgtgctttattgctaatgggagtgatattgaaagccaagtgatgttaggaagaccacattgtgtattgccataagatgatc

SEQ ID NO: 8923 - DNA, 334 bp, Zea mays
acttatctttggagaaatctgtcttctatgcaatatgacaccacaaggtccagccctgaccaccgggctgactctaaaactatcgctagagggccattgcgccaaagatgtggtgcatgagactctggctttcaaagtatttccaactatgaaagaatggtctatgccgaagcttataggagagaagaaagagggggaactcgttcgactaccctatcactataaattcacaaaatattcttatgcaccctgacaagaatggcttcgaacaatcgaaataatgacgactgaaaatccttggaattactgctataaagatgaccattgatgacag

SEQ ID NO: 8924 - DNA, 241 bp, Zea mays
gctttgctggctgctctgggtgtgatttgccctgtcatcatatatgctgggactgtggattgttctgacatgcctgtggaggagtcttacttcaaagaccttagtgatctcagaatacctgttgagcgttctctcttctctggcgagaatcatcgttagcgtggatatactcttccaacatctggagaagcttctcacggtttgcggcggctccctatctaaatattgcgctatcgggcct

SEQ ID NO: 8925 - DNA, 391 bp, Zea mays
aggaatacattgaagaggtttctactcaacttatattggtgtgcgaatctgacaccgacgagatactattggaagagaagcttgcctttgtccaggagacctgacatgcctttgggaggacagcgctgctcttgagtgggggtgcttcactagggtctttccatgtaggtgtaggtgtattgaaaacattggtccagcataacttctgcctcggattatagcaagatcaagcgctggttctattatatgctcgattgttgctactccaccatggtctgagattgagagctctttcacagactcatcacagaccttgcagttctttgatgggatcggtggattctttgcaatgatgaagcgtgtcaccacttaccgtgcactgcatgacatt

SEQ ID NO: 8926 - DNA, 286 bp, Zea mays
ggttaccttagtgggtggagtccctaccttgcaaatacttttgtctccctctttctctacacaaactaaccaaacagtagctcctgccctttattgagaaaattgcagatcttctcccaagctggaaggcagagttgttgaacaaagctggcagaagaattctagtgcagcatgtcctaactagtatgacaatttatactgcaatggctattgatttttctaagtgggctttggatgcaattgataaaattataacgggattcttatggagaggcacaaaggatgc

SEQ ID NO: 8927 - DNA, 303 bp, Zea mays
  unsure (1)..(303): unsure at all n locations
gcttacattttggtattgtgaacttcttattttttttcttggcaccctnttcctttcacgaggggagaaaggtttttaatggggccataagttgtaattttcatttttttgtttagccctatgcaatacaagggccaaattcccccaagaatgtaacatgttacatcagaattcgcaccatcgagtgcaaaaagaacagggagaagctcaaaagttgtccctaatgggatgcagagctaaaatgtcaccaggagggtgacgaagctacaaaattctgtcctcatgggatgcagagtatatttc

SEQ ID NO: 8928 - DNA, 320 bp, Zea mays
ggagaggaggtccatgttggagtgagtccgtctacgacgtctgtgccgcctgtgcccccttcctccttttcaaaaagccctgcgcatgcccttttatagatacaaagggatggtctaactgtacatatgggggtgttgctatgtgctaacgtggccgacggagaagtgctagtgccctgtaaaagcgtagctggcggtgcagccctgtgtcctgctgacgtttcttttgcttcatagagagcttgaggactatcgacgtcatggacgcatgcgaggaaccattgtgacggagcctctgcagtcattaagcccacctacag

SEQ ID NO: 8929 - DNA, 378 bp, Zea mays
  unsure (1)..(378): unsure at all n locations
gactctgcaactacaacaaccccactattttgaatatgtctaccctcatcgtatgcgtgtgtgtggaaattgaatctgtttatggtatagctattatacttgtatgcaaccatcattggtgtcttggctaaaattttaatctcgtctgatgcttctttacacgtttcttccacctgaatttgatgatgcatgcgattaaagtatatgtgaattccatctcaaataaatctagtaagtttatttcttacttacatgncaacctagccactcgtgaaaggattgatgttgcatgcngctgatgtctcattattttgaagaccaattgatgatagatagtgagcatgcttgcttgcatggtcattttattacttctacatg

SEQ ID NO: 8930 - DNA, 456 bp, Zea mays
aaactaagcttgccttttaaatacaacatccttcaatcctctaaccatgtctttttttagatatttctagagtgtactcattccaccatgtgcaagccatctatgccatagccatccaagagatgctttggtaaagaggcagatccttatgtttgcatcttcagaagagaaacccactaagtataggttgttgtatccaaatcctttgaatatcactgactcatcatccatcttagacacaacaacctttgtaggagtgaataagaactgaaggcctagaacacaaaattgacccactgtatacaagttgaagcttaatggcgcagccaatagaacatttgaattgaaagaacattaagaattggcccttgccagcccttgaactttcctattgattatccccaaagtgaattatcttgtcatcacatcttatttatgaggggacaatcatggttg

SEQ ID NO: 8931 - DNA, 361 bp, Zea mays
accttaaatctaagctatcctaaggatatgtgttagtggttattgcgtattgatattcatatcatatgccttttgcagatatatgtgttgcatcatatggactagtgtttccgctgctatgaatttattggcatctatagtgtttattctgtaatagatattcatgtggttaatggtgctttaagatttacggtgctttaagattgttttaaattagtatcttagtttaaattggtatcctaatgatgaatagtggtaggttgatattcctgtgatatatccactcaagtgaatggtgttaactctgattctgtgctttgtgtgtatacgcatatggttgatccttgcataatgcacccac

SEQ ID NO: 8932 - DNA, 230 bp, Zea mays
gaaaatgctccctcatgagaaaaaacgctgatggaccgagtttttaccggaggcagtctgggcgcttaacacaacctagtgcagggcgactgggttcactccgttccgccttctatactgatcggaagacatgaccccccaagaaataaatcatgggttcccgcgtacagttccgtcatccgtccccgatgtggacgagccaaccttaaaagatcttattgacggagacc

SEQ ID NO: 8933 - DNA, 376 bp, Zea mays
gcgttcactctaacatgttatctattaccagagtcttgagttagaatcctgacagggctctatttgtgcctccattcatttatatccacgtttgtgcctttctctctggttgcacttgagtgggggtgttgaagagtataactggaattggctaccttctcccatcaggctaaactttagggttgaactggttactgcgtacactctaacaatgttcaacaagaaatgggaacctatttctacatataatattgatgcaggctagataagtaaagtggaagaatgtgtcatgggctattgcacgcttggctttaaagacactaacggaaaattaacacttgactttctttttctcgaatgctgatttatgtgacaa

SEQ ID NO: 8934 - DNA, 348 bp, Zea mays
  unsure (1)..(348): unsure at all n locations
tgagtaaactcaagatgctgtcatcactactaccttcgtatcgtttntttaaacaaatttctatattcgtgttcattccaatttttagataatagaactagatctgccttatctcttgtcacctaaagaatcatagcatttattacaaaaatgtcacccacacaaatatcttactcaaaaaataattttaagaatatgaggctgtccaaagaagcaaaaagattcattgccacctcctctggcacctaaagaatccattgtatctccctgatgatgtgtgcaaagaagaacgaaaaataatggttntaactacataatgtatatcatctaagaataacgaaaatagta

SEQ ID NO: 8935 - DNA, 372 bp, Zea mays
  unsure (1)..(372): unsure at all n locations
ttagcagaatgacagccagagtccttcattctcaaattgcttgaatgtgctgacctatgtngatgatatcatagttaaaggcacgaagcaagaaaatcacattgctgatctacaagagatatttgccaacttcaggcaagctggtttgaagttaaatccagaaaaaatgtgtttttgggtaaagaaaggcaagttccttggctgtctagtatcaacgaagggaattgaagctaacccaagcaagattgaagctatccttcggatggaaccgccaagtacaaaaaaaggggctcaatggctggcaggtagactagcatcattaaacagattcatatctagaccagtagaaagaaatctgccattctttgaaat

SEQ ID NO: 8936 - DNA, 349 bp, Zea mays
  unsure (1)..(349): unsure at all n locations
tgaggttgacttgccgaagctacataagccgcagggtggttgtctatgcattgttttacataaggcggatgagacgaagcattatgcataacctgcttccactgaacttgttgagatgcaacttcggctagatccttttgcttctggattgtaacatggcacgtcctaatggtgtggcccttgccctctccacagaatatgcaaaacagtctccttggctgatctccgaatcttccgccgaaacccctggcgcctctgcctcttggagctggtggccgataggaagattgttgttgccccaaacctggaggagcactgcngcctgtntgctgactccctcatcatattc

SEQ ID NO: 8937 - DNA, 319 bp, Zea mays
  unsure (1)..(319): unsure at all n locations
tcctatggcgcctttggagggcctggcttcctgtcagtatctctctgtcaagtgtcactgcagncgaagaggcgcaggcggcgctgtccttctgtcagaccggtcagtggagcggcgaattgacgggggtcacttcngctctgccggaaggcgcgcgtcacgataaaggtgtcacgccacctttgcgttaaatgctcctgcgacttggtcggtccgtgcggcgatataatcaggggtgcttcttatcgaaagcanggcctcnggcgagccgaaaatgtgtccgccgttggaggggggcctctggcgagacaganattct

SEQ ID NO: 8938 - DNA, 262 bp, Zea mays
  unsure (1)..(262): unsure at all n locations
tctgccttcggaggccgaaggtttaattgaatgaagctgtctaagaatgccagagggccttcggcgcagtctgttctttcattgggacaagagacttattacaagagcatattgccttcacgggttggccgctcgcggagaattgggaaatgccactagataccgtgaaagaagccgacgaaggtggacttatcacgttgaagtacacttttaaatttggagacgacattcgtgagccagatgatgactggctaaanagtat

SEQ ID NO: 8939 - DNA, 378 bp, Zea mays
  unsure (1)..(378): unsure at all n locations
ntatcaaatggacgtgaaaagtgccttcctcaatggaccaatttatgaagaggtctatgttgagcaacctccgggcttngaagacagtgagtaccctaaccatgtctataagctctctaaggcgctttatgggctcaagcaagccccaagagcatggtatgaatgccttagagatttccttattgctaatggcttcaaagtcggaaaggccaatcctacactctttactaaaactcttgaaaatgatttgtttgtatgccaaatttatgttgatgatattatanttgggtctactaacgagtctacatgtgaagagtttagtaggatcatgacacacaaattcgagatgtctatgatgggggagttgaagtattttct

SEQ ID NO: 8940 - DNA, 408 bp, Zea mays
ttcaatcggctagagaaatcgaaggagacattacttggtgttacatgctcaatgccaattccttgtcctccattgcaaactgatgcatcaaaatataaagtccagggagtaacagtgaggtatgatatgtctagtttatgagtatcatcaatccgatgttctataaaaaatctgctacgacctgccctttcatagatttcaatggtttataggccaagtcatattatatgagtgcataagcccatttactaatcctaccactcataatcgggtgttgcaacatgtatttgatcacatcggtttgactatcaacggcgcaatgactagatagtaaataatatctatacttggtccatgcataaggaggcataacataacttctcataaaagtgtccttgttcagcttca

SEQ ID NO: 8941 - DNA, 305 bp, Zea mays
  unsure (1)..(305): unsure at all n locations
gagaacacgcganagggcttgactatacggacaattcntatattgatagacctgtttctttttgtcgagcaggtaaacaagtgggaggagcacattacaccaagaatgtgatgaccacttcaagacccctggagctgctgcatatggacctcttcggacccgtcgcctatctgagcataggagggagtaagtatggtctagttattgtaaatgatatttcccgcttcacttgggtgttctttttgcaggataagtctgaaacccaagggaccctcaagcgcttcctctggagagctcaaaatgag

SEQ ID NO: 8942 - DNA, 312 bp, Zea mays
ggggctcatttttcgtggcccggaacccacacgacacggatgggagctcaccgagccaatgcgcaccatgcttatttaaacagtcataggtgcgagattagagccccctaacaatcaatgatttgccctctgacgactgaaccttactcctagggtgagccacggatgcaaaacatagctgcgcgccgacgacctcacaatattcctaaaagagccgacttagacactgagacccgtggacagaatgatacgacgcggaccccaaactacatacgaacgactgaggaagcgacacagcgcctggcgagctga

SEQ ID NO: 8943 - DNA, 349 bp, Zea mays
  unsure (1)..(349): unsure at all n locations
actaagcttactttgttgatttgcanaagaagaggccggcctacatgcatgttttattgctaagactagcatgggctggttgtggcatcgctcgcttagcacatgtggggatgaagaaccttcacaagcttctaaagggagaacacgtgataggtttgactaacgtacaattctaaaaagatagaccttgtgcagcttgtctggcaggttaaccggtgggaggagcgcatcacagcaagaatgtgatgaccacatcaagacccctcgagttgctacatatggacctcttcggacccgtcgcctatctaagcatatgaggaagttagtatggtttagttattattgatga

SEQ ID NO: 8944 - DNA, 405 bp, Zea mays
  unsure (1)..(405): unsure at all n locations
tncaccatgaatgtggagaggctgcttcgaactcatgactttgtgactcagcgatatagctttcatcactacaccaggcctgcacttccaaaatttgatatgcatatatcatcctaaaacctttggtttcttatatgtttcccctaagctttgtcttctcttatgttagtccatcttcagtttcaatggtgccgatgtatctggctttgattcatttcgtaaagattttcctgatcataaaaaggtatgcattgagttgtctgcatgacatattcaaaatgttgtaatcccgtgtgggtctgttaactagcttgctacgccaatgactgcagatcacgttgagcaagaaatatcgctccacacgtgcaattgttgaagcagcaactgctctaattagaacaacac

SEQ ID NO: 8945 - DNA, 342 bp, Zea mays
taggatgaagacacgctccagtaatatctggtttgaatattattagagtgtttacctacattgacactaaggcactaacattaattacagatgatgcagtaaaattcagaacacagaacaagagatagaacatgctacctacatacaaagactaagtgcagagaagacaaacctgcgcttgcttgactcctccgtctcaaacatcatcgcgaatctcattccaactgatgggtgcagatatgtggccatatggtaccttgcgagaggaatcacaaatggcgacgggctggtcctatagagatttcaaggacacatgtatgttaatatgcctacgagaaaagc

SEQ ID NO: 8946 - DNA, 348 bp, Zea mays
  unsure (1)..(348): unsure at all n locations
ntagtatacagggattattccaaatagaaatggagtagaatctttgattgataagagcctcaacgcaaggatggtgtggtggaggtgccaaggcaancagataggatcatcttagttaaacattggagatattggtgcaaatgttagccatagaaccaaagttggatggatgaagtatcgccaagcatctaacattctctatgacaaggggtgccacanaagctaacagacaagttttatagaacggcgattatacccgctatgttgtatggagtagaatgttatgttggccaactaaaagacgacatattcaacaactgagtgtngtagaaatgtatatgttgcact

SEQ ID NO: 8947 - DNA, 225 bp, Zea mays
ttattgacgatgaagactttggattacagagtacaatacttcttcaagagattctttgaggccttgcaaagggtataactttctgaggtgttttatggtccatgagttccccacttctgtgtcgtccatctgagtaagccgatatgatcccggccgcgtgacctctgatacaacgaacgacccttgccatggtggtgacagcttgtgtcatacctcccccgttag

SEQ ID NO: 8948 - DNA, 359 bp, Zea mays
  unsure (1)..(359): unsure at all n locations
ntaccanatggacgcgaagagtgtttttcttaatggaccattcaatgaagaggtctatgttgagcaaccacccggctatgaagatagtgagtatcctaaccatggctatcgactctctaaggcgctttatgggctcaagcaagcccccaaagcatgggatgaatgcctaatagattccttatagctatgggtcaaagttgcgagggcaacctactttttactaaactttgacatgattgttgatggcaattatgtgagatttattttggtctataacaattactgtaagaatttatagatctgaccanaaattgaatgtcatatggggagtgagttttttagattccagcaacactcag

SEQ ID NO: 8949 - DNA, 220 bp, Zea mays
tcgtgttcagttctgatattgttgcttcatcttccgccagttaaccttccgctgcctggagctcaaaggtctttttctcacaagcatctgattgctcttttattttgctttcccaatttccaattataacttcatgctttctatcttcaagatctgctgatttgcaagctttgctcaatatcatactctacataaacataaccttcgtcagacatgtttt

SEQ ID NO: 8950 - DNA, 469 bp, Zea mays
  unsure (1)..(469): unsure at all n locations
tcatgcaactgctgccagaaatgagaggtgaactgcgtttctctgtctgacactatcttctttggcacaccatgaagacaaacgatccgagacatatacaattctgccaatactgcactgctgtagttggtcttgacaggtatgaagtgggcggacttggtcaagcggtccactactacccagatggaatcgtagccggctcgagtgcgaggcaatccgactatgaaatccataccaatttcatcccatttccactgaggaatctgcaacggttgcaacaatccagcaggtctctggtgctctgccttaattcttcggcaactatcgcacatagccacatgctctgcgatttccctcttcattccgtaccaccagaacttcttcttcagatcttgatacatcttctcactgccagggtgaatcgaataagctgtctcatgagcttncttgagatcaactccgaatggac

SEQ ID NO: 8951 - DNA, 380 bp, Zea mays
  unsure (1)..(380): unsure at all n locations
tgactnttcttgcaagaccacaaaaacttaccctaggtaactccatagtaagattccattcatcatactttgttagttggcatgctaaatatgggctattgtggaaaacacatgaaagcttgatggacctcaagattatgaagacattcatgacaggatcaaccttcatatttgtttttgggtttgcatggtggacgactcgaaaattccacaatcgccccgtggagactatagtggatcaagcatctccagcttgtcgctagaacatgatggaggatctcgttgagattttcaacattttttcaatttatagtctgagtcagacaagtaaataacttgaatagatcgagtttgacttcaacatgaccaaacattcttag

SEQ ID NO: 8952 - DNA, 370 bp, Zea mays
  unsure (1)..(370): unsure at all n locations
tactcacgcttcggcatgttcgcagaagagggaaccgacttaaagatgaaaaggccatttagacctctattgattgctatggaattatcaccaaatgtaaagggcatgtatgtaattctgtatgggatgtaccccgtgcctataaataagtgaacagtactcccgtactggacacgttgacttggcatttgcttttgcgtcacacttgtattttcatctccttccaagccgaaggtacatttataattcaatattgtctctatttctctatgatgagttaataaagttagatgaataatgttatatgattatntatgctatcttttatgtttcatatgcttcgtcttttactaatgtatgctgtaatgat

SEQ ID NO: 8953 - DNA, 405 bp, Zea mays
  unsure (1)..(405): unsure at all n locations
ctaagctttacaagcagaaaagaagattagtatttgtctatttaaacatgtatagtatacacatgtgtgacagctcaaaaatatcacctgcatcccttcctgcatcttttgaaggcaactccaaaatgtttcacgttggtcagcattagatgcatctataaaaccaaagtgtaattatatcattatatgtatgtagcataatttttggaaaagaaagaacaagtatgaattgtgcaaagcaattatacctagatacttgcgtcacatccaatcttgtgagcgcataagcgcctccaagatctctggagtaagtcngctgcagtgctcgctaagaacacgaccacttgtgcagcggcggcatacctgtgagacnggagacctgngtcactgggtgcgggagagtgg

SEQ ID NO: 8954 - DNA, 348 bp, Zea mays
ccataccagtaacttggcctttcttatgctggggactggatattattggacctttcaagatagctcagggcggatacactcatgtattggtagcaatcgacaaattcactaaatggatagagttcaagcccgttgcttctttaacctctgctaaggccgtggaattcatacaagacataatattcatattctggataccaaacagcatcataactgacttatgatccaacttcacaagttcatagttctttgacttctgcgagcaaaagagcattcagatcaagtatgcatctgtagcacatccaataaccaacgggcacgttgagcgagcccatgggaatatactgg

SEQ ID NO: 8955 - DNA, 422 bp, Zea mays
cttagaaactcaactgagcacgctcacggtctcaccatgaagctacctgtggtttgtatcgaatggatggggactggagaggggttggccactgcgtggttcttggtcagcactggcgggctacagggaggtctccagaggcaatggctggctcgtgcgagtccggcgaggtacggaggaagaaatggggaatgcaaccgagcgctgtggcaggttttatatgcgcggacgcggtcggggcgtcggatcgaccgtttggcgctacgcggtcacgcagagcgcgcgcgccggcgtgctcttgcgagctcatagcgcgtcgaacacgtggcgcgctgcttctgcacgtgttcttcgctctgctgactgccaggcgtacgaatcttgccctaccgtctgtgggagaacgattcctgcacctagag

SEQ ID NO: 8956 - DNA, 379 bp, Zea mays
cttggacactaaatttctaaagacaggcttctcaccaaaacttaatggttgctcatcttctattaccatctcagcaaagacatctctaagtgcttcttgatcaaacctccaagtggcaagagcttccccatgacatgcttgcaaggtgccttgcttcgagtccttgttgaaaacatgaagattgcgtttgcatgtaccaaagtgtttcttcaacgcagatgttccatgcccccttgtgtcagccttgatttcacggtgggaatatttgcaccttccagcctttagagaccctttgtcatccttgatcttgataaattgttgccacatctcaaaccttgaagccagtctcctcctctcgactttctctttcttcttctct

SEQ ID NO: 8957 - DNA, 349 bp, Zea mays
  unsure (1)..(349): unsure at all n locations
tagatcttcgtactaagatntcaatagatattgcaagatgttatataataaaaggtacaaaagaggtagacaagtcatagacgaattatattatattttcttaatatatccaatcattgaatacaataatacctctgccttgacaaaaggttgaattccagaatatgcgattgcagttactagaatccgtgaacagtaaaggaatactgttcactatttataggcacagggcgcagcctgtgagggattacaagtatgccccttataaaagtttacaacattgactcagacctttatggactaaaaggtcattctatctttaagtcggtttgtaataccgaagcttcat

SEQ ID NO: 8958 - DNA, 203 bp, Zea mays
  unsure (1)..(203): unsure at all n locations
tttaccgacacttaaatctcagctgagctggtgtaataccgcctttttgcggacttctaacaanatcttgcctctttgagttctttgaccaatggccggccaagtgtttcaaatgacctttctctgctccatcgatcaaatacacgatgatttcaagacgcttctcacccatatggcgatgaatttgggatgattcggctgca

SEQ ID NO: 8959 - DNA, 326 bp, Zea mays
tcgtgtagctttggaggacatagcgtgcattctataacatgactctttggtgttccaagagtatttggacaagtgagagcacctagaggggggggtgaatatgtgaacctgtcaaaacttaaaacttaaaacttaaacttgattaaaggttagcacaatgaaatcaagttgctaaagagagctcttgtgaaccacaattgacacagtgagaatagtcaccagagacacaaggattatcccgggttcggccaagaccatacttgcctaagtcactttgtggcttccaatggacgaaagtgcactcactcttttcagtgatccatgat

SEQ ID NO: 8960 - DNA, 273 bp, Zea mays
  unsure (1)..(273): unsure at all n locations
ctngaagaaaatttgaatagtcgcggttacatatgtgctntttcgggcgccagggggattgctaccattntggagaggaaaggctgtgaccatgtgaacctcttggcacaatccgaagccgccttatcctctgaagatataaaagacccctcggcccgagcaagccangtcggtggaaaatttttcaccgacatctgggacaatggtggccgagaaatggcccaagaaattataccaaaaagcgagaaaggtatccatgacgctagaaaagta

SEQ ID NO: 8961 - DNA, 203 bp, Zea mays
  unsure (1)..(203): unsure at all n locations
tcataactttctaggaacatgaacaatattcttcctatgcacatgatgaatatntttcctaggcatatctctaccatgcatataggaagagctggangcatacatagcataagagtcataggcatgtgaatcaaaagtattacaactcctatgagactgtcttctatcacngtacataaaagcatgggtctttntagtactac

SEQ ID NO: 8962 - DNA, 406 bp, Zea mays
  unsure (1)..(406): unsure at all n locations
ttcatctaagctcacacgaatgngtaccttgcaccaagattcaagaacgtagtctacactcttttctttaagactcacaaggttctatcacgattcacacacgaatggctagctctatggctgatttcctcttttggtcacttgggatgcttttatttctttgggagtcttgctctagtgtattagagttattgatcagcttctgtgtattgaatgcgttggctggaagngcatctatagccattaaacatccactgcacaatctgcactgttgccgggtgcattagacctttcattataacagttctagtgcacaccaaacctcttccaccctgctcgttcagtggcctttctatataatttgtcacgcgtgtgatggcatcatattggtctgtggcacacttga

SEQ ID NO: 8963 - DNA, 400 bp, Zea mays
gggatttggagaggattgatctcttgagtgtgtctaaatgaatgcctactctgtagtggtggaagtgtgaaaactggatcaatgaatgggggtggttggtggtttatagtcccaccattaacttccctctgctttctgacctctcattgactctcatcctttcctcccctctctccccttttctctcctatagaccctttctgatctactactctacttcttcttgtctatactttccccgttccctttccccccacttttctctctgctcatgctcttctcctctttttcctttactttcttcttcgcctctttctttctgtcctttttttctaggttctcctcttttctttcttatctctactctccatttcactcacatatccttctctccttctct

SEQ ID NO: 8964 - DNA, 306 bp, Zea mays
  unsure (1)..(306): unsure at all n locations
ccgatatcagccgctaccgacgacatgcatatcgnctgttgttagttctattctaatttcaaggtaaaaacttntcttcggctcttcattcatttaacgacaaaggagttttctgatgaaggttgtctttgcacagagtatgctattaagtaatgctgtgaagatgcaacacgacctttatgacaaaaaacatgaggttattattgtattgttagagaagcaaataaaatatcatgccgctgctcttgtatataatatttcgaactttaaacattagaggcttacctgcctatgctgatctaaatt

SEQ ID NO: 8965 - DNA, 244 bp, Zea mays
tatgaagatcttaattccacatgggcttttctgttgtgctttaaccaacccaagttaggcgtagctattgagcaagtgttgagttcagctctttcaaatctatatattacagggaccctcaacacgcctaaagctatgatatacttgtcaaagacagcgaccctactagaaataacagtgttgccattgacattttgtatacggaaaggagttgaatcaatgaataacatgaaaacattggaat

SEQ ID NO: 8966 - DNA, 351 bp, Zea mays
tggtcgtggctttctggatcacaaagagaaagctctctgaggtataatgatggggggcctcgtagacaggcgttgtgtaactggttctgatggcactacagtatataatttctctcaaacatttccaccactctactgtatgcacagggtgtcattattcctcatcttctcgatgaaaagggttggttttacccatatagtatgataataacactgtgaacagaagctgtctagtattgggagaagatgcatgaacatatagctccggtgcaactgcactagggtctacatgacgctgaacggtgggtggactgtgtctatcggttcactcatattgtcaccttaagtact

SEQ ID NO: 8967 - DNA, 347 bp, Zea mays
  unsure (1)..(347): unsure at all n locations
tgtgaagccaatcacaagtttgttaaagaatgatacgaaatcttactggtcctcaagatgcaatgaagccttcgagcagctgaaggtattattgaccactgctcctgtattatctcaaccggacattgaaaagcctcttgatgtgtattgtgacgcatcangtaatggtttaagctgtgtcttgatgcaagaaggtcgagttatagcatatgcctcaagacaattgcgccggcatgaggaacattattcaactcatgacctagaattagttgctgtggttcatgccctataaatatggcgtcattatcttgctgggaatatctgtcatatctataaagatcataaaa

SEQ ID NO: 8968 - DNA, 416 bp, Zea mays
  unsure (1)..(416): unsure at all n locations
tccatgtatatatntatntcgtattaattactagatccaactctatcgatctatggttctagagttatcttggtcttgcaggcgggattgccataagactggtgtccacgctgaggtgagcggtacgggtgctgagtcccgacgggagcggtggaaccaccgtccagataacgacgttccgcgcgctcagcccgcagcatggcgatctcagcacgagccctactcagctcgtctaatgcatggtccagctccgtgtttagcacggcggctaggttgactgtgctgctcaacctangattgccctcaccgacaggtgagacaatcacgcctcctgtgctgccagatgaacggcggnggtaatacttcatgtcaagaccgtcagctggcccaccgaataccgagcagtagtgcgaaag

SEQ ID NO: 8969 - DNA, 396 bp, Zea mays
  unsure (1)..(396): unsure at all n locations
tatggtctntatactcttatggctatggtcttatggagttattgacttatggntctgtgtgtgtgtgctgtgcaacaagctataatgtttatggatgattgatgctgcctgctggatgtttttttttgaattatgagctacacttttggtattatatcatgctctatcctctatggctgtgtactgctactatgctgcaagctataatttcagtttatagttatggtgtgtgtgctgtgcagcaagctataatttcattctatagttatgaactttcaaattttatcatgggctatggttgctggcatttttatttcatttggagttcagttttttgggtacttgaatgtaccagtacctcttgttcccggcaattgattcataagtttcttacac

SEQ ID NO: 8970 - DNA, 360 bp, Zea mays
cttgttcgagtagagcccacaactcatgtggcgttttcaaaatacagtgctaacaatatgggtgtcaacccacacacaagcatgagagaagaatggatgaaccatgcccatgctctagtcatctcatgtagccgggtataataagtgctcacaatatccataagacatttggccatctgcaacaacatgggaatagaaccctgagtaccggaatgtactcagctagactgacccgtccaaaaccaggaaataagaaagtcaaagacaccaaggatcatgcacagctgtatttggagctggctctttactttgtaagagtggaaagatttatgtcagtattaacagcttaactgggttatc

SEQ ID NO: 8971 - DNA, 386 bp, Zea mays
tgccagatcagttctgatgtgtggttgcgttctgcagatgttttatgaacaggcgtagaggtggaaggcgtgctcagcaggagcgagccgctccgcatgatgaggtgccccagcagcagcacctgccgcccccgcccccgatgttcatcgagcagatgtttctgatgcagactcaagcagttcaagccatcggtcagactctggccgccattcagcagcagcagcagcagcaacagcagcaggctccaccccagcctcagatgcctcagatgcctagagataagcgtgctgaattcatgagaggtcatccaccaacgttcgctcattcttctgaccccatggatgctgaagattggctgcgcactgtggagcgggagttgcatacc

SEQ ID NO: 8972 - DNA, 374 bp, Zea mays
  unsure (1)..(374): unsure at all n locations
nggctgacgacgtgaccgctgctcccgcccgcctgccaccgttattactgccggtccanttttggccgtattgaccgtcgcgcctggctggcactgctgggtcgtacgcaaggttgcctcgagtcacggtactggttccgcagtcgagggggcgtggcagtggtgcgagtggcggtgcagttgctcgcacgtagcgaccggcgcgccggttgcatgacgcgtgggcgtgggcccccatgctgggtgcgttggaaattggaggggcgcgcccacttggcgcggttgcatggcgcctgcatggctgcccgccctttcgctcgctggtctaggcgaaagcggaggaatgctcgtaaccgcggggcggttgcatgcac

SEQ ID NO: 8973 - DNA, 217 bp, Zea mays
aagagagaaaggtgcttcggctgatcatccgaagcccatgcttctatgtgaagacatggcagagcagaaggtactgctatggtctcaactatctgaagagcatgaaaaaactttgataagggttttattcaacaacaaagatgtttttgcttggtcggccaatgatctctgtggtgtcaacagagacgtcattgaacattcactcaatgtcaaccca

SEQ ID NO: 8974 - DNA, 319 bp, Zea mays
  unsure (1)..(319): unsure at all n locations
actggtnatcatcatgtccttcagcttctgccatgacgtgattgttcctggccgaagagaggagtaccaggtttgtgcaacattcttgacagccatgacgaaagacttcgccatgactgcagtattgccaccatacgaagatatggttgcttcgtagctcatcaaaaactgcttcaggtctgagtgtccgtcgtacatgggaagttggggtggcttgtaagacggnggccaaagtgtagcctgcagttctgctgacagaggagaagcatcatcaaaagcaaaatttccatgatggaaatcctcataccagtcatcctcg

SEQ ID NO: 8975 - DNA, 440 bp, Zea mays
  unsure (1)..(440): unsure at all n locations
tctaaagggagaacacgtgataggtctaactaacgtgcatntcatataagatagaccttgtgcagcttgtcaagcaggcaaacaggtgggaggctctcatcacaccaaaaatgtgatgaccacatcaagacctttggagatgcttcatatggacctctttggacccgtcgcctatctaagtataggaggaagtaagtatggtcttgttatagttgataatatttcccgcttcacttgggtattctttttgcaggataaatctgaaacccaagggaccctcaagcgcttcctcaggagagctcaaaatgagtttgagctaaaggtgaagaagataaggagcgacaacgggtccgaattcaagaaccttcaagtggaggagtatcttgaggaggaaggaatcaagcacgagttctncgctccctacacaccacaacaaaatg

SEQ ID NO: 8976 - DNA, 354 bp, Zea mays
ctagtctatatccgagtcttctgagtgtgacgcgccaaggaaaatcttaaagctgtcaaaaagatctcctcgatgataaaaaggcatatggaccgattgtacccgaggcagtctgggcactaaacacgactgagtgcagggcgaccgggtttactcctttctgccttctatacggatcggaggccatgaccccacaagaaataaaacatgggtccccgcgaacagatccgtcagccgtccccgacgtggacgagccaacttcaaaggatctcattgacggagaccgagtcttcgacctacaggccctaaacaaataccaagcccagacaaaagcatggcacgaccacaccgtca

SEQ ID NO: 8977 - DNA, 348 bp, Zea mays
  unsure (1)..(348): unsure at all n locations
tcggcgatggttaanacattttggcagcanaacagtgcaaatagtaatgactgctgtggtaacttcacacctactcgtctgtttatatagtactgcaggtaagaaggcgaagcgccaggatttttacaccaggcggacacccgctcgcactcgctgcgtggtggaccgcagagaccaaacaataactctgcaggtggggccgctacacgctgggaaattgaatcgtttctcgacaacgagctcanggaaggtgttttttagaccttcngcgctccgaagcttaagagacttttttcatggatcaagctcgttacgaaaaaccatctaacaccgcgaaggggctattgt

SEQ ID NO: 8978 - DNA, 348 bp, Zea mays
  unsure (1)..(348): unsure at all n locations
ctaagcttatctgtgcccaatactatacttgtctaatgttggtgtcttagcaacaaganaaggtcatgataaaggatcaggcacaagtgtgaaggagctccctatagataaaactntcaagatggaaatcttaaattgatggcaaaaggaactccgcctacttagatggaaagtacaccataacatggtaaaggtacaaaaggatgtattgacccttttgtgtatttgtaccttaattttcctccaatgctcgtggtgcatatgcttaatgtgtaagggggagtaatgttagtgtgttgcattttccctgcttaataccctgctgtcccttgacatatcctatgttct

SEQ ID NO: 8979 - DNA, 353 bp, Zea mays
  unsure (1)..(353): unsure at all n locations
cactccagaaaactcaagcttcgtcgtctgaaagacaataccctgaaggaaagagatgancttatttcttcaatcttcactataaacaggggatatgtagaggattgctctttcaagaagctctaccgaatgtgcttttattgtttcaaaaaatacttccataggtatatgcagcccctgggctgctgacttatccaatagatcagcgtattcattttctccactaagaatatctttgacacagaaaccttcgaaggaagcctcaatccttccgactgtatttaaatacctttcaagcttctggtctcttgctttgtaacatttgtcaatatgaccagaaataactcgagaat

SEQ ID NO: 8980 - DNA, 315 bp, Zea mays
aagcttaatgcaatgggtataataagggcaatcctcaaatctaactcacaaatcatcataggccatgttgataaaagcagcatagcaagagatccgaagcttgagaagtatcttgatacagactgaagaatggaagcctcgttcgaaggtttctcagtaaagaatatcccaagaggagaaaatgagcatgcagacttattagctaagtcagcggcacagggcttccactaccttcggaagtattttttgaaacaataaaagcaccttcagtcgagctcatggagagaccagtgcttacaatctcgccagtacata

SEQ ID NO: 8981 - DNA, 392 bp, Zea mays
  unsure (1)..(392): unsure at all n locations
tagccttttctttttgaacctctatttcctagaatgggctattgtgtcccatggcaatccactgtgatatttacagatattttggaaaatgttaaaccactgtcgtagttcaaacctaccctagaagccatgaaataagaatcaagaaagggaaatatgaaccatggaaaaacttactgccatnctagaactctntataacttatccactgagatatatagaggcaataccaattacctatgcctacccctagcataacctagacctagaaataataagcataaaccattaaatagccacatatgacccgaaaaccctaagttactcatcaacttagtttttcttctcttagcataatggtgggaaatcttgcataatcatgacatacatgt

SEQ ID NO: 8982 - DNA, 368 bp, Zea mays
  unsure (1)..(368): unsure at all n locations
ttgaacgtactaagcacatgnccgtgaaaatggtaaccggtttacctagtacctgagtgaagctgggcgcggactntatccctcatgcgacctgagactgggtctcccatgctagctatggtgggtacaagtgcggtcactgcacggcggcagccggggtcagtggagccttgtatgccaaggcggtgaggcctggacgcgaacggngaatcaatggggacagttgacatgtgtgaggacggagtgccctaacatgtcgtgtgtttaggtttaccttgcaaggttttaaaactcgattcgaatcgtctgcttctcgcagctaatgagactgcttgaccccttgtactgcatcgagtaagaagtgaaat

SEQ ID NO: 8983 - DNA, 413 bp, Zea mays
  unsure (1)..(413): unsure at all n locations
ggtgaaggttcttcatccncacatgtgctaagcggcaatgcctcagccagcccatgctagtcttagcaattaagcatgcatctagaccggcctccccttttgcaaaatcaactaaatagagtttgtcgtctagtacacccttaaaagctaatgagccatcacttcttctaaagacagacacatctacatttgtgaatagacaattatatcccatattacataattgacttacggataacaaattatatccaagcgactctactaagaatacattagaaatagagtgctcatttgagattgcaatcttgcctaagcctttaaccttgccttgattcccgtcaccgaatatgattgaatcttgagaatctctattcttgacgtaagaggtgaacatcttcttctcccccgtcatg

SEQ ID NO: 8984 - DNA, 440 bp, Zea mays
  unsure (1)..(440): unsure at all n locations
gctcggaagccacactcttcgctagagtgctgacaaccttcgccccagttcggtcccgaaggcatcctaagctctcttcatcgacgcccccgaagagcaatgctcctgngtgatagccgcatgatattgcataatccctcagctcttccttctcagccttagacagctnttgaccaagtatgttttgaaaattaaaatccttttcctccgaagtatcctcggcaatctccttctctttcccgggcactagggccagggtctcttcggtagctgtagcagtttcttccatggccatatccaaaatcatcttgtcaatatcagaaaatacgccctcaagatttgtggcttctgccgccgcagcttcngcgggagcagcttcngtagctggtgtttntgacgctgaggccgacggtgacgtttcttcaatggcatcaataaca

SEQ ID NO: 8985 - DNA, 377 bp, Zea mays
  unsure (1)..(377): unsure at all n locations
agctttanagggagagcacattntaggactaaccaatgttcattntgagaaagacagggtttgtagcgcatgccaagcaggaaagcaagttggtgcccatcatccacacaagaacatcatgacgaccgacaggccgcttgagctactccacatggatttattcggctcgattgcttacataagcatcggcgggagtaagtattgtcttgtaatagtggatgattattctcgcttcacttgggtattctttttgcaggaaaaatctcaaacccaagagaccttaaatggattcttgagacgggctcaaaatgagttcggcttaaggatcaagaaaataagaagcgacaacgggacggagttcaagaactctcaaattg

SEQ ID NO: 8986 - DNA, 471 bp, Zea mays
  unsure (1)..(471): unsure at all n locations
acataagaataagaattgaagcacacanntttgaatttaagcttatagaatgctccccctaaatatgtgcttacttcaagaacctaattntggcctcagacgccaatttgcatatacttatgcagttcgaaacatttctataccttagcactttttgggatgcattgtgttaagaatcaaaccatgatgcgtataacacacaaatgcacagaatcagagttaaacaccaattaaataaatataccataggagtatcaacctaccactattcaccattaagataccaattcaaactaataccaatttaaactaagacactaatttaagacaatcttaaagcaccattaaccatatggctatctattacactatagaagccaaataattcatcgcagcggaaacactagtccatatgagcaacattgcaagaaacatatgaatatcacacttcgcaaagctcaaactaacaca

SEQ ID NO: 8987 - DNA, 373 bp, Zea mays
  unsure (1)..(373): unsure at all n locations
atcttcttgctcctattatggatggggagaaaaccttgctctacatcgatctgtcaagcatgttatgaactgaacattgtttagatgactaaagctggttcagntttggactgaacagagaatctccacgcctatggtgtcttacttgtgtcaattagagctgtagtgtatgtagatgattaataaggtggttaatgaggaaaaccccatatcgtctcaattatctgagtcaagtggctcgatggttattcttagtccgcgatttttttcgtgcgtcgttcttatcagctgctattgatccttggatggacacatagtaactggcgtcgcacacatagctttggggccaatgcacacccctgcaccttctcta

SEQ ID NO: 8988 - DNA, 398 bp, Zea mays
  unsure (1)..(398): unsure at all n locations
tctatcatgatcatctccattgtagaagcttctatcaagatcattcccatgatcatctncagtgtagaaacttccatcatgatcttcagctgattgacgcttcaataaatcttcagttaacatgccatcagcatcctgatgttcacatacaggtacactgggcttccttaaaaagctcaagcaacaccagcaaccgatgtctgtgaggtgcgccattcacaatgagtaggtgccagaaacctaaatgataaaaacaagggacaaggtttaaaaaaacaccggaataaaaaaagccgcaactttttctgctacttttctggctgtcatatcgtcactgaagatgatatgaaactacaataatagcatacatgcagaaaccacaaatgtgactcaatctc

SEQ ID NO: 8989 - DNA, 384 bp, Zea mays
  unsure (1)..(384): unsure at all n locations
tgcgcncacctgtgtgcatagatgtgtgtccccgcccacctcttctgcgcccaatctttacccgtcgtccgcgccgctgttccatcctcgcacccacgcccgagatccacatgtgccgcaccccagccgtgctccggatgctgcaccgcccttccatcctccgcatgcagcaccatgttggccgccgccctgaaacctcgctaccacggagctgcaagcccccgcttccaaaccagcaccatgcagacttccaatttgttttttgtttggagcactggtgattttttctcgtttntttgagaacattacattgcccgtctttcactgttcaacttttcttaattaaccatttacatttaccaaaaacttattcaacttttcact

SEQ ID NO: 8990 - DNA, 348 bp, Zea mays
  unsure (1)..(348): unsure at all n locations
ctcagctaatggccctaaaacaagctnntctaatttgtaagggcatggctcccatggtttaagatagggaaggttacattntataccctgagaactatcttgagcacagaattagaagaattcatgctagaaaatctcatattatttctcacatgcttatatgtatagtaatgaggcttctagctctaggcatacaactcatatcaaaatgcctaagaaaaagacggttgatgcatccaatgaacatagcatttcatttaagacttttgatgcatcatatgtgcttactaacaaatcaggcaagggagttaccaaatatgttgggggcaaacacaagagtctaaaaac

SEQ ID NO: 8991 - DNA, 343 bp, Zea mays
tctaaagggagaacacgtgatatggctaactaatgttcaattctaaaaagatagaccttgtgcagcttgtcaagcagggaaacaggtgggaagctctcatcacaccaaaaatgtgatgacgacatcaagacccttggagatgctgcatatggacctttttggacccgtcgcctatctgagcataggaggaagtaagtatgggttagttattggtgatgacttttcccgcttcacttgggtgttctttttgcaggataagtctgaaacccaagggaccctcaagcgcttcctcaggagggctcaaaatgagtttgagctcaaagtgaaaaagataaggagcgac

SEQ ID NO: 8992 - DNA, 403 bp, Zea mays
  unsure (1)..(403): unsure at all n locations
acctgntcctccacaagctngctacatgcctncttctttttcttcatattctgaactctgctggaacactaccccacttaaaatgaatgagggtcgaactcttgaatcttgnggatatgaactccttgaagtacctcataacaagggtgttacgaggccttcttctgctcgtgctgcttgagcaagccgctaagagatgactgacacacggttgattttgggataaccttcttcttatcttctctgcactatcttcttttctcttatcactgacaccttctttgtctgtgctctttccactggatgattctaccaaagagtattaccattattaagaggatgaaaccaaacactatgaaccatgtcaattgtcttcaacctaagaatcatcgagcattgtgat

SEQ ID NO: 8993 - DNA, 411 bp, Zea mays
  unsure (1)..(411): unsure at all n locations
cctcagcttgcctcttctaaatgttggcaaagctccctaagttgctactcattctcatgtngtnactcacaatgagagtctcaacttcttttgattgtgattctaatatcaaatggataacaaaatcatcctttaacttcatataaaaggatttgatcttacttatgtttatagcagagtggatgtaccaatgaccgctagttctcgagtcggcttgttttttttattatttatgcgggtgtgaagagtgatcacaaccaacatttttatcgctctctccgcgatgacgcgagaagtcatgctgaccggatctgatcgacctataaaattatcaaatgtggttctgtgagggaatcgactcgcctccgtgatgcgctcttgtcgctgtactttaatctgcagagactgatg

SEQ ID NO: 8994 - DNA, 379 bp, Zea mays
actaagcttgtgcccgcacccgggcattgtgtcgcactttatagcagcttctacacaccctcaagcctcgcattgaacctgctcgacgaaaagcgcagcaagctgcgtgtcgttcgtccctgcagcaacaccattcttcacttcgcgtcatacatcgcatagccttcatcgctgcgcattgtccgcattgacgcagcagcccttccgttcattctccactcccctcgttgcgtgtcatcaatctcgtgcttgctgcgcagcccatcctcgtcgtcaaaacccttggtgagcccctcgctagtacccccactgtttttttgatctcgggtgcttgataaaatgtttgaaccactgggtggttttaattgcagctagatgt

SEQ ID NO: 8995 - DNA, 409 bp, Zea mays
  unsure (1)..(409): unsure at all n locations
actaagcttagcttaggcacaacaanganacacatctatgagaagcatctgattnttaagggactcacatgaataattgtagcacaaacaaggtaaaacaaaagtgggaaccattaccccgaagggaaatagaaccagagcgtcaaacaagggaaagagtaagtaaccgcgtcgctgccgccatggaaagaaaggacccctgccgcacggaaccggaggaagccgacatgagcaaaagggatggagggagggagacgagtgtaatggattatggggacactacactagcgcaaaacaaaattttcgaccccataaaactagaaactaatgcggntatagatcatggaattatcactagacgcgtanggtagcggaagacgtcttgatgtatacgaacatgtcgagcagt

SEQ ID NO: 8996 - DNA, 396 bp, Zea mays
  unsure (1)..(396): unsure at all n locations
ntaaatgtgttgtcatcaatcaccaaaaaggtggagattgaatgtgcattcatcccttttgtgaagtttggtggattggataacaacacatttaaaggtctaacaagtttgctaagtgttgaacaggaaattcagtatgatgaacatacttgaatagtgtataatgatcagtgaacaaaggttcaacacaaggttaaatccagtgagacaatgcaaatggatataatatgatctctatattggtttgaatatatggacaagacctgagaaatcactacatacatatgaccagaatagaggacaaagtgatttagaggatcggtcaagccaaagagaataagatatgaggaatcgtgaattggcttgccatattactatcaatccatatatgcttct

SEQ ID NO: 8997 - DNA, 367 bp, Zea mays
  unsure (1)..(367): unsure at all n locations
tcacggcttcactgggaagcgatccangggctatggcgaggctggagttcaacaganaggggtggccacgatggccgagcctgtgcagggatggcgggcggcggtgctcgcttttcacggcgaactccggtgatctctggctcgggcgaggctcggggtgtgcggtgccaacgactaaggcctcttggacgcatttataggcgagggcacggcacatgtgcgcanggcggngcgaccacgcgtggggcgcgcgctgccgcgaccagtccgtgctcgaccggtcaggcaagcgatcgaacacgtggctttttgcttcttgccgagttcaagcgcctatagggtgaagatcttcgtgaatttgggcatg

SEQ ID NO: 8998 - DNA, 247 bp, Zea mays
tctcgcgaaagagacatggtcctgtgactgtggggcgcgcgagtgagcgccatcaattcttattacctcaagcgatgactctacaaagacctacatattcgagatcgtcccagagctatttcactctatgctgtcttggaccacatatcatctggggaggagctcgttgttgtgtgagatctagaaactatcctatgccgctgagcctagacctacttcatggatgtaagtcgctggatgctgacac

SEQ ID NO: 8999 - DNA, 415 bp, Zea mays
  unsure (1)..(415): unsure at all n locations
tatgaaactaagctattgaaatacttagagagatgtaatggccattggagtattgatgaatgatgatttctttagatagaaaataaaaacgattcatcattcataagtcacatagatatgaagtaaacttcttaacattagtgcacatctttaaaaaggagtatgcactatttaaacatttgatcaatcataggaattttacttcttcatattgaatttattaatcattacttagaagcaagtcaatatgataacatatatagcaaaggtatgaaatagattctaatggacaagtacatttatgaaaatgagattgaatgcacatctagccgactttggtccaataaagaatctattcttcacatatgtagaataagatanattagagttaacaaccattgatgggaactatatt

SEQ ID NO: 9000 - DNA, 339 bp, Zea mays
  unsure (1)..(339): unsure at all n locations
tcgganaccncatgcttctagccatctcccggcagacggattattctttgttgtccgagaggcagtataggaagtcatcttcgtctgtcccattgaacactagtgcccccttcggatatttcaattctctggcatagtgattagcttcaaaaatttcttcttcggataatttcttccccgaagcgtgccgcacaatataatcgtatattntggaaggtgcttcgggggcaccagtgtcagtttcttcaaccaaaattgtctctggtatttttattttttcgggtgcctctgcaatgttcgtttcttcggcttcaaaaggttttaccttggctggctctg

SEQ ID NO: 9001 - DNA, 439 bp, Zea mays
  unsure (1)..(439): unsure at all n locations
tcggttccgcagtgcgaatatgtcaacaaagacaaaagatgatatcctcaaggctatgacaataatgtccctagtntgatttgtagtccatgtgcataggactgaggacatggttgtaatttttatgaagctgcggtctaccactataaatagaggtacaatactatgtagacgggtacatcttctaggagggagaaaatcaaattgatccacctatgaagcttgtatctgctccttttaccttcgcgttgtttttttgtaaagccgaaggttcaattgtaatcattacttaatctctactacttattaatgcagtaaggggtaggctgccattatgtgttctgccattcccattccctgtactgcctttccgattcctccttcccacagtccatctgatttccctctccccgcacagttcatttcgattccacgtaca

SEQ ID NO: 9002 - DNA, 421 bp, Zea mays
taagctctggactctagtaatattcagcttagcaggatcaactgtgcttttgtagtgctcttgccgaataagcccgcgcctgtgttcgtcagtgacttccgccctatctgccttcaaaattgcagcgtgaagatcgtttccaaaatccttaccactcggctgcaacgtgaaattcacagcctcatctctttggatcaaaccggctttcttaagggcaggtcgatctctgaaaatttcgtgtatgccctagatctcatccaatgctgtcacaagaggaggtctcctaccatcgcgctgaagctggattttgcgaaagcattcgactccgtccactgtgatgcactgtgatgtgtcctgcgcgctcgagggtcagtgaacgatggcagaagtggatagatcaacttctcaatacatcaatgac

SEQ ID NO: 9003 - DNA, 427 bp, Zea mays
  unsure (1)..(427): unsure at all n locations
aagtacatgtntgaacctaagcagcattttcatcatttccaactgtaaacatgggtgagcttattttctactgtcaacaccacaatatggtgaagagttcactggcctctgctacacaagaggctgagaagagaagagcacacagcacaaaaagagcatgtatgtagtgctgctgcagatgctgttatgggctngcaacagccttaatccagataggaatgcagtacacatctgcagagactgacacattatgtgtatatgtttaatttggtatcccaggatgtgctgcagaaaattactgatataggttccactcttatttgtcaagcacgctgtgattcatatagataaaaagactggcaatggttaagtattcaacacacatctatcacttatctatgtaaatctaggagttcactgataatgg

SEQ ID NO: 9004 - DNA, 412 bp, Zea mays
  unsure (1)..(412): unsure at all n locations
cggcaaaagcactacatatactttataatcaccaagaagtgatttcttgtttattctataatcaaacattacaggtttgaaatctgttctgatagaggacagaacacagcaatcagtttgaaaaattcataactcttaaactatcaggcctgtgtttatgaaattttaacacaagcaagatcagaaaagcatctacaactntcttataacaaccatgaacagattgcgaaattaaattgaacaaacaatacagtttctgaaatctgtacagaatttggacagattcagttattgaatttgtgaacaacataactcctaaactgtcagacctatggctgtcaaatttttacaccagcaagataataaagttatctaccacttttctatagcccatatctacagaaaacacaat

SEQ ID NO: 9005 - DNA, 432 bp, Zea mays
  unsure (1)..(432): unsure at all n locations
actcaagctggctataggccttcttcnttttctccatagcttgaaccttgttatatcactaccccacttgagaagaatgagggtagaactcttgaatcttgcggatctgaactccttgaagtacctcataacaagggtgttacggggccttcttctactgttgctgcttgagcatgctgctgagaaatgactgacacatggttgattctgggacaaccttcttctcatcttctcttcgctatcttctnttctcttctcactattcactgcctctntctttctctttgctcttcccactagaggattctatcaaagagtattaccatcacacagaggaggaaaccgaagactatgaaccatgtacaacagtcttcaacccaagaatcaccaagcattgtgatcttatgggcgatggagtggaaaatggatttg

SEQ ID NO: 9006 - DNA, 483 bp, Zea mays
  unsure (1)..(483): unsure at all n locations
actaagcttatatcttggacccattgaatgtgtcctttggatttgtattagatgcctgagtacccacacaatccttattgtggcctttctctttgtgcaggcacccacatatacttgacaaccatcttacatggtttcaagtcaatatttaatcacacagataaaagtaagagttaagaataggagccttttctccttttcttgatacatcgttgtgttgccttctcgatgatgaacctagcttgaccttgngtgcacctagcttatcaaggttagtcgcataagcattcataacatgaagacaagttatgcatggaatttacaacttagtgatccaattcaatgtgaagcatatggataccgatttaagtagatctctaagatatgaacatatgggtgtccaaatcttagagagtatggatcacntaatngtacctttacacgttataaatcatatccatcgtagtgcatatgtatgtcatg

SEQ ID NO: 9007 - DNA, 429 bp, Zea mays
  unsure (1)..(429): unsure at all n locations
nggatggggatttgtgatggatcttgggggtatcttggtgcttgagcagttgnnttcctagtcgcactctctaaagtcagaacatcgttagcaataaagttagacttcagttgtacaaataacattgccgagtacgaagctcttcttttagggcttctgaagctaaaggcaatgggaataagaagggcaatccttaaaactgattcgcaagttatttcatgccacgtggataagagcaacaaggcaagagatccgaagcttgtaatagtattggatgcagtccacaaattggaagctttctttgaaggttattcttgaaataatatcccaaggggagagaatgcgcatgcagaattattagctaaatcagcgacacaagggctccctttgcctcggaagtatcttttgaacaataaaagcactctcatc

SEQ ID NO: 9008 - DNA, 366 bp, Zea mays
  unsure (1)..(366): unsure at all n locations
ctaagcttatgtaagtgcgggacattttgagacatgatctctgattttgntgttcctactcgaagagtcttctcactccactgcgtatcaagtcttcgagtagagtaagaatctaactcttaaagtaataagttgtattcgcctattcaccccccctctaggcgacatccagatcctgttcctgggtcaaagggaactctcagaaagatgacaccacagtcaccgggtgagactcgaagtagtgtcgcaacttccgctgcgttagaatcaccgcgtacagtagcttctgaacttgtgggtagcggatctttgtgtccgacagtacctcactgatgaagtacacctgcctctggattggcaatgcat

SEQ ID NO: 9009 - DNA, 371 bp, Zea mays
  unsure (1)..(371): unsure at all n locations
tgtcaattaattcatatgtgactaagcaacccatatttgcatcttatgctatanaggtaatgagtttaccgagatagcacacaggacatttaagttcttagatctttgctggcaaaccttaatggacccatcaagagatcgggaccaaaatatgcttgacaagctttgcaggggaaagaagatgatatgaagctttggaggtgcttgagcgggttaattcaattcttattaactcaagctatcaatcttacaatattttatatctataagattgacccaaagttattttgagttataatatctaaaactcatatcatctcgagcaagatattgatgttgtagggaataaaggattatcctgtgtggaaatc

SEQ ID NO: 9010 - DNA, 356 bp, Zea mays
  unsure (1)..(356): unsure at all n locations
tcggcatctntactcgcttcttcttcctgagcctctggcgttcattcagcaatgaagtctgctaacgcctcggactgaatcgaagatctatgcacataatcaatgcataactcattgagttccgcagcccattgtccaacccttccagtagcttctctatttctcataatatccttcaatggttgtgaggaagggacaattatattgtatgcttgaaaataatgccgaagcttcctggaagccatcaaaacagcatacagcaccttctccaattctgtataatttttctatgataaactaagaacttcagagacgaagtatattgcggcttgcttctgactttccttcaagctctc

SEQ ID NO: 9011 - DNA, 365 bp, Zea mays
  unsure (1)..(365): unsure at all n locations
ngcacaagggagcttcngctaaatctcataanaggtaaccgtcttataagggaaaatactattcagtcctcatagattnttctataagccaatagtaaatgtaaagggcatgactgtaatttctcataggctgtgtcctgtgcctataaataggtgaacagtaccccagtactgttcacgctgactggtactcacttttgtgtcatacttgtactcacttgccttntatcaagtcgaaggtacttttgtaattcagtattgntcttacctttccatgattatataattaagaatgaataatatgatatgaatgtttgtgttgttttctatatgccatacattccttcttctatttaacatataat

SEQ ID NO: 9012 - DNA, 312 bp, Zea mays
gggagaacacgtgatagggttgactaacgttcaattcgaaaaagatagaccttgtgcagcttgtcaagcaggtaaacaggtgggaggagcgcatcacagcaagaatgtgatgaccacttcaagacccctggagctgctgcatatggatctcttcggacccgtcgcctatctgagcatatgaggaagtaagtatggtctagttattgttgatgacttttcccgcttcacttgggtgttctttttgcaggataagtctgaaacccaagggaccctcaagcgcttcctcaggagagctcaaaatgagtttgagct

SEQ ID NO: 9013 - DNA, 141 bp, Zea mays
  unsure (1)..(141): unsure at all n locations
gagctcgtccatatgtcatattgatggtgagtcgtcaaacanggcagttgtgctccgctgctcaaatgtctatccagaaccgaaagtgtagtagtaatgaaagaaatacatgcaggcctgtgtggatcccacatctgatct

SEQ ID NO: 9014 - DNA, 388 bp, Zea mays
taagcttatgaattctctatctgatgaattgaaaagtgaagtggctgctatgtgtttggctgcctgcttagatttaagccacatctattgtcgagaaagttgcttatctggctgatgctgaagcttaacccacaaacaatgaaattagagattggtggtgggaaagagattcaaatcaccgaacacagtgtttggtgtgttttgcagttaccaaacgttggcagtgatccgccccccatgtctgatgcagatgctcgtgcattgtgggacaagctgtgggagcaaatttgtgggaaatcttatagacgcatatctggcatcaatatatcttgtatcactgatatgatgcagaagaagactctcaattgggagctgggcctgagatcct

SEQ ID NO: 9015 - DNA, 243 bp, Zea mays
  unsure (1)..(243): unsure at all n locations
gcgtggaccgagctaaccatggagtctacgtgtaattccttgctcccacatcttacctagcgtcccgtgaagctgtctgaccgcgtcaatcgaactatcgcgccgcgagtaggccggaatgctcatcatcgacgagcatctaacgctgcgcacgtggaccgtgcgactcctaccatacccgaccgcgacgcgcacatagctgagatncccgagacctactctacgtcctcgactacctcaccg

SEQ ID NO: 9016 - DNA, 389 bp, Zea mays
gcttctgtagctgctgccagaaatgagaggtgaactgtgttcctctatctgacactatcttcttcggcacaccatgaaggcagactatccgtgacatgtataactcagctaacgttgctccggtgtatgtcgtcttcacaggtatgaaatgggccacctttgttaagcggtccacaaccacccagatggaatcgtatccggcccgggtacgaggtatgccaactatgatattcatcccgatctcatcccacttccactgaggaatccgcaatggctgcaacaatccggcaggcctctgatgctctgctttggttctctgacagctatcacagatggcgacatattctgcgatctctcttttcatgccataccaccaaaacctccttttt

SEQ ID NO: 9017 - DNA, 245 bp, Zea mays
ccacttatcttagctaagttggatccaaggtactaagagtaccactcaagggtctcacataagtaaggtttaactctatctaactcaagtagaccatacaccatcaaaatgtgaaattactaaagcacatttcatatcatgcatatatctcacgcattgcattcattagattgtaatctcgccgatggagagtacgtgctcatcctcgagcaatgaactgtccaagaggatgaccaggagcaagc

SEQ ID NO: 9018 - DNA, 406 bp, Zea mays
  unsure (1)..(406): unsure at all n locations
tcacggacctatgaaactaagcttatcaatggcgtanaagtgcctcctctcggaccaatctatgaagaggtctatgttgagcaacctcccggctntgaagacagtgagtatcctaaccatgtttataggctctctaaggcgctttatgggctcaagcaagccccaagagcatggtatgaatgcctaagagatttccttattgctaatggcttcaaagtcggcaaggccgatcctacactccttactaaaactcttgaaaatgacttgtttgtatgccaaatttatgttgatgatattatatttgggtctactaacgagtctacatgtgaagagtttagtatgatcatgacacagaaattcgagatgtcaatgatgggggagttgaagtattttctatgattccaag

SEQ ID NO: 9019 - DNA, 373 bp, Zea mays
ggtcatgttactcatataaaatgtcctcttgtctttctagctgtttatctttttcattaagtgcatcaattaattcattaattttgtctactttagctctatctggtcttttaagcagatcagtgtaatctacttcatcatcaaaagattcgtcatcgctagaagaagagtacttaggggtgtctcgaatacgtaccttcttctccttagccataaggcatgtatggcgttcgttggggaatagcgaagatttgttgaaggctgaggcagctagtccttcatcctcagagtcggaggaggagcagtcggagtcccattccttcccgatgtgtgcctcgcccttggccttcctgtagctcttcttcttcttcct

SEQ ID NO: 9020 - DNA, 354 bp, Zea mays
  unsure (1)..(354): unsure at all n locations
tcagcttcaccgagacacgcagaagctctctcgatggtcggacagggctgtgaatggctanggtggccggtctacagtggtcggtcctcgggcggccgcttgcacgccgtgtgtagagcgatcgccggtgaacttgcgctcctgcgaggttgatagcgagccggggcgtacggtcgaggcctcggtcggctttatatgcacaggcgcgggcgtgggcacgggtttggcttgacacggcgtggtgcgcgcggagccaaacgatggggcgtgctctggcgcgcccgaacgcgtcgaccacgtgggcgtttgtttctgcctctgttcaaacgcttgcanggatcacaaacgtgtgaa

SEQ ID NO: 9021 - DNA, 309 bp, Zea mays
  unsure (1)..(309): unsure at all n locations
gcttaaccttgacgccctgaatagctccaggaccaccagcaatgccattcagaggccaagtgtttcctccaacagcatgaatgaagtgcccagggcgtctgaagatcagttggaggactccaatgatgatgatgatgcgaggtcttgtagtcctgctgggaagtaaggcttaatgcctttcccttgngttgtgcagatntatctgtgcccttgatgttggaaactnttggtggttatttatgtataactacaagatagcccgctatgatgatgtgcatgtggcacattttttggttgccacaacaaact

SEQ ID NO: 9022 - DNA, 358 bp, Zea mays
  unsure (1)..(358): unsure at all n locations
tggggaggttcttcatccncacatgtgctaagcggcgatgcctcagccagcccatgcaagtcttagccattaagcatgcatctagaccggcctcttcttttgcaaaatcaactaaataaagttggccgtctaatacacccttaaaagctagtgaaccatcacttcttctaaagacagacacatctacatttgtaaataaacaattatatcccatttgacataattgactgacagatagcaaattatatccaagactctccactaagaatacacttgatatagaatgctcacttagaaatggcaatttacctagcccttntaccttgcctcgattcccatcaccgaatatgattgaatc

SEQ ID NO: 9023 - DNA, 310 bp, Zea mays
  unsure (1)..(310): unsure at all n locations
tctanagggagagcacnatttatgattaacaaatgttcatcttgagaaagacaggatntgtagtgcatgccaagcaataaagcaagttggtgctcatcatccacacaagaacatcatgatgactgacaggccactggagctcctacacatggacctattcggtccgatcgcttacataagcatcggcgggagtaagtactggctagttattgtggatgattattctcgcttcacttgggtattctttttgcaggaaaaatctcatacccaagagacattaaagggattcttgagacgggctcaaaatgag

SEQ ID NO: 9024 - DNA, 443 bp, Zea mays
  unsure (1)..(443): unsure at all n locations
taagcttctataacaccatcatgtacataaggaaaatactacaaagagcatagtgacattctaacagatacacaagtgaagttcaagaatatacatgatgaggtgcaaatgcatatatattgcaaaactgcaaagaaagatgaaaatgcagaaaaatgcaagataaagaaaaaaaatcctcaaataaaagggaaaacacacatccaactcccttgcaaatgtgcaaaagtggacatattgatgtaataaagtactatntccgctattactttgagcaatgtgtgatgatgtccaactatgtaatcgatgtgtacatgaagttttgatcctggcacgtacatggttcgcattcggtttgccttctaaaactgggtgtgacacggagcgtcccttctcgagtgttccctcgtcgtgaagacgacgtgctatgtatgcaccgacaa

SEQ ID NO: 9025 - DNA, 437 bp, Zea mays
  unsure (1)..(437): unsure at all n locations
tactaagcttgacgcacgcaacaacagagaaaagaagggaggagatctcgcgcgtgggtgttgggaagcctgctggtcggctggccaggccgctacctgcgtgacagtgcaggctcgcagactcggctggccatggccagggagcagagcacgcacgccggcaaggaggcgagcagcgcgcgccatgtgagaggtcggccgccgctgcaggacggcaagggtacaggggtggggcgacatcggcgggaggagggccagcangctggccgcgctaggcctctgaccgcgcctgttggccgcgcatggggcacgaaggggctagggacgagcagtggcagggggccatggctactctgccggcgagcagcagcgatcgctaagcgcggggtcatggacgaccggacttggagccactgggtgcaacgaggactcgacca

SEQ ID NO: 9026 - DNA, 399 bp, Zea mays
tactcaagcttgaacataatcatatgccccgaatttagcctccacatcattcattaactgatgcttacttgtgagcagacccttgagacgctgaacttccatccatcggcctgcattgcccttcatgtgcatagtggcggtagtgatccacaaatgttcaggaacattatagaaatgaaagaaatcctcacagtgacgtctccaaactctagggtcgcggcctataaattctgggaaatccaacttgggaattggaggccgaaatcccatgtttccttcagtttgatcacgcggaaaaacaggcgaagtgcggcgagggtaatgctcaccgtggtgttgctgggagggccactgttgatgcgggtagtgctcacgaggtgttctggagagaatgtcgta

SEQ ID NO: 9027 - DNA, 483 bp, Zea mays
tcttcccttctctggcggaactcattatcagcctgaatgtactcatccatcttttctgaagaagcttctctagggtctgagggggtttcctggcaaagtattgagctataggtcctggctgaagccctttgatcatggcctcaatgacaatttcattgggcactatgggcgcttgtgctctcaaacgcaagaaccttcgagcatacgcctagaggtattcttcatggtcttgcgtgcactggaacaaagcttgagcagtaaccggcttcgtctggaacccttggaaactagtgatcagcatgttcttcagcttctgccacgatgtgattggtcctggccagagagaggagtaccaggtttgtgcgacattcttgaccgccatgacacaagatttcgccatgactgctgtgttgcccccatatgaagatatgggtgcttcgtagctcattagaaaattgttctggtctgagatccatcatacat

SEQ ID NO: 9028 - DNA, 395 bp, Zea mays
  unsure (1)..(395): unsure at all n locations
gtcggtcgaccagataagtctcaccgccgtcgatctgtcgctgttgcacgccacgtgcctctgcgttggtcttcaccgcggtgactcaccggatgcatgtccggcgatcaccggaaccactgccacgatgaaagccatgttttttcccgcacagagctcccctcccctctccgaccgccagcacaacttcgtggaattggacaccaccgactacaggaactataaattgagcacctcctcggctccgccatggattccagcatctactgcacctacctatatccccaaaccctcaccattaagcactaattntggattcttctcaaatccaccaagaacaccgtgcggtgtatacttcccatggtcagcctgttccaggtgacttcatacttctc

SEQ ID NO: 9029 - DNA, 317 bp, Zea mays
  unsure (1)..(317): unsure at all n locations
gtcgctgctagccaagttgttgcatctacctttatctatgatcaaangacatgaacgctccttaatgacacactntgtttgaaacaacgtatgtctctgattctgctctgccttctccatttgtgcactaagcacacgctgtacaatgaggctctcataatgctctgcatcatctgcaccaatctgttcttcaggtggttccttagtgcctgcatcatcagtcgcaagcatagcaagtgtagcttcatccagatcactagcagatgaatacccaccatcgtcttttaccaccagaacacgctgattatgacaatcac

SEQ ID NO: 9030 - DNA, 401 bp, Zea mays
  unsure (1)..(401): unsure at all n locations
tatgaagattcttcattccaacatgggctagtcggcggtgccttagccaacccaagttagtcttagcaaccaagcaagtgtcgagttcagctctatcaaaatctaccaagtatagctgaccctctaacactcccttaaatgctattgaatcatcacttcttctaaagacagtaacacctacatcagtaaatagacagttgtagcccatttgacantaatgggatacnggaaagcaaatgtaatctaaagaatctacaagaaaaacattggaaattgtatggtcaggtgatatagcaattntacccaatcctttgaccaaaccttgatttccatccccgaatgtgaatagctcgtggggatctcggtntttctcatatgaggagaacatcttcttctcccct

SEQ ID NO: 9031 - DNA, 407 bp, Zea mays
  unsure (1)..(407): unsure at all n locations
actcagctattaaagaaaaattatttagaccacgaatcttgtatagttttgttcgtcagtccagaattttgaagttttagtgtttaagtttacatgttaaatgtacatttagttagttatgattcgtgaaaaggtacacataagcacgtattgtacgtatacttccgctccgacacgggtacgacaccattttcgacattacaaaaatctgtatcctgctacgatcggctntcatgacggggaagggttgattagtttctatctgaagagctcagtaatcatatcttgataaatattcaagcatagtactatatttaaatataaattacaaaaaaatgaacatacaaacttctcgtgtgatgataaaatataattatacgagtgctctttgacaccattatgacata

SEQ ID NO: 9032 - DNA, 402 bp, Zea mays
  unsure (1)..(402): unsure at all n locations
ctataagcctatggccacagtgaacagaagaagttgtcttgtacacctaaggtttaccatggctagagcacaccttggtgctaaggactgtgatcacatgtggtaataacttaaggagaacataagaaccttggagaccatgtgttaaccaagatttgctaatgacctaagagcatcactcaagcttttgtgcactcactaccttgaacaagaggagagaaaaccctagacctctcttgaaccctatcttccaaaaccatggttgataggggggaaagaataagcaaatgtgcaaccatgagttaatcttcaaccaaaccttgagtaactctataaccagcaattgtaggaaggaaatggtgcaaaagacccctggagaaacccanatccatccctaagtag

SEQ ID NO: 9033 - DNA, 373 bp, Zea mays
  unsure (1)..(373): unsure at all n locations
agtttcatttatgctatgaggagccattgtctagagccagacgccaactacttctgcaatattcacgaattgtcctacccgacaaatgagacgaaggcagttgggaaagagtagtatcataacaacttcagatgctatagctctgtgtaccggtctgatgtgaggtgtcctgtgccaatgtctcgggaaaaatggtcgggctcatggatgaaatagtgngtctatgttaaaaatgatttgagtgaaagggatgatgtgaagagcataatttagcgccccatacgatcatgcttcggcatcatgagacattcgatcatatggtggaatgaagcacaagcatgcttgatggccttcaacatagtgtgcacctata

SEQ ID NO: 9034 - DNA, 198 bp, Zea mays
tgtcacgctagatgactgcttcttctgaacagatttattatcttctttcacgctttgatgtcagacgatcatgtcacaactcgcaagagccaccatatgtgcaagttgagactagaaccttgctgcagactccacacatggtgtatcctatagaggaaccacctgatttgcagtaccactgtccacattaatttgctt

SEQ ID NO: 9035 - DNA, 138 bp, Zea mays
cacaccatgaagacaaacgatcctggacatgtacagctctaccgatacttcactgttgtggctagtcttgacaaatatgaaaggagctgacttggtcaggcggtccactactactcaaatggaatcgtagcctgctcg

SEQ ID NO: 9036 - DNA, 319 bp, Zea mays
  unsure (1)..(319): unsure at all n locations
tcaatctcagctgcacncaggtcattggtccttcctgggattgagcaatgtggtccttggcgtaccgatcttanctccgcgaaacattgtctactgtgcataatgtgttccacgtgtcacaattgaagcgtcttctggttcctgatcgaaccgttgaagagactgatgttgtcctggaaccagatttaacatactctgagcattctattcgagttctggatctgaaagatcggattacccgactagagactctctagttctacaagatacagtggaaccagcattctgtagatgaagcttactgtggaactcaagactt

SEQ ID NO: 9037 - DNA, 454 bp, Zea mays
  unsure (1)..(454): unsure at all n locations
ctcttagatactcagcttctnagggagaacacgtgataggtctaactaatgttactttcgaaaatatagaccttgtgcagcttgtcaagcagggaaacaggtgggaagctctcatcatgccaaaaatgtgatgacaacatcaagacccctagagttacttcatatggacctcttcggacccgtcgcctatctaagcataggaggaagtaagtatggtcttgttatagttgatgaattttcccgcttcacttgggtattctttntgcaggataaatctgaaacccaagggaccctcaagcgcttcctaaggagagctcaaaacgagtttgagctcaaagtgaagaagataagaagcgacaatgggtccgagttcaagaaccttcaagtggaggagtatcttgaggaggaaggaatcaagcacgagttcttcgctccctacacaccacagcaatat

SEQ ID NO: 9038 - DNA, 364 bp, Zea mays
  unsure (1)..(364): unsure at all n locations
tcgcacctctgaactaactcggctgtatcactnttgntgttggccaatagaatcccaacctgaagaccttcccgactagtgtcttggacgctgcgtgtattccacattgtccagcatgaacctcctccacaagttgcttgccagtagacgatagaatgcatttcatgaagatgcctgatgcgccccttctgtataaagtctccncaatgagtgtgtagtgagctgattgttcggtgatgcgctcgactgcataattatcgcctggctcctcttcattctttatatatctgacgatcggccttctccaatcatcagagcttgactctggttgatcacgatattacactcttcttgctgatctatt

SEQ ID NO: 9039 - DNA, 384 bp, Zea mays
  unsure (1)..(384): unsure at all n locations
tctncagggattgaggaggcttcttggcaaatcactgcgctgttggtcctggacaaagtggcttgatcatggcttcattaacaatctcatttggcaccgttggctcctgagctctaagacgtaaaaaccttcggacatacgcctgttaatactccttgcggtcctgcgtgcactaaaatatggcttgagcagtcactggcttcgtttgaaagccctgaaagctagtgactaatatatccttcaacttctgccacgatgtgattgttcccggccgaagagaagaataccacgttttgagcaacacttctgactgctatgatgaaggatttcaccatgacggcactgttgccaccatatgatgatatggttgcttcataactcatg

SEQ ID NO: 9040 - DNA, 272 bp, Zea mays
  unsure (1)..(272): unsure at all n locations
atgcaccagcaagcnctcgccctgatgcacgccgtcgctagctgttgctgcccgcgcggctgctactgcttcgaagtcctgcggctatgctgggcgactggaggtaggagatgtactggagccggttgatccccaatggcccatggttttctccggcgttgcgtcacctctcgtagccatgacagctgactcggcttccgcctgtgtcgcccacgctcgcgtacatacagcagccgcgccgctgcgcctgtctactacgcgacgatagagcg

SEQ ID NO: 9041 - DNA, 270 bp, Zea mays
ctcaagcctagctacgggtgcataggtttcaccaaaatccataccttcgacttgtgaatacaccttggccacgagtcgagctttgttccttgtcaccacaccatgctcgtcttgcttgttgcggaagacccacttggttcctacaacattttggttaggacgtggaactaaatgccataccatcgtccttgtgaaattgttgagctcgtcttgcatcgccatcacccaatccgaatcttgaagcgctttctctaccctgtgtggctcaat

SEQ ID NO: 9042 - DNA, 420 bp, Zea mays
  unsure (1)..(420): unsure at all n locations
tactcacgcgcccactactccaactcctgacttggtaagacttttttattctaatgtgatgcaagtggagttggcattggtgctgttttgatgcaaagaggtaaacccgttgcatattntatgaactcgaatgtgtgaaattgaatggctctgttcttaattattccacttatgataaagaattatatgatctcatacgatctntgcaaacatggaaacattatttgtggtctaaggaatntgttattcattctgatcatgagtcacttaagcaactntgtagtcaaacaaatctgaaccgtagacatgctatgtgggtagaatatcttgaaacttttccttacatcattaaatataaaaaaggggaatgataatgtgattgccgatgctttgtctagacgctatgctatgttgtctcaa

SEQ ID NO: 9043 - DNA, 273 bp, Zea mays
  unsure (1)..(273): unsure at all n locations
ctggactacgtcatcccangtggagatctgccacttatgcaggtgctccaaccaagcgcgagcggtgtctgatagaaacatgnggaggttgcagatgatgacgttgtcatgcgccgttccacccacctggcaagccatacagtaatccgcgagccacagttcctgtctcgtctcccctgagatactttgtgataatagtcagtggtcggagaccagtccgaaacagcgcccgtctgatggcccagctgtatgcctgtcgaccaagtggatccc

SEQ ID NO: 9044 - DNA, 395 bp, Zea mays
  unsure (1)..(395): unsure at all n locations
tccaatctctccaagttccacaactgagataagtgattgttgtgggccttcgtctttcgaaggtccacaaaaacatgatttaacaatgcttctggagtataatacatgaacatgtacctttggactcggatcagaaccacagtgtgagaagcacaaagaatatgaaggttgacgcagcgccgaagctacacgcaagggagcttcggcatgacagcagataagggaaccgganaaggccatttagacctcgatggatcactatagagtcattagcaaatgtaaagggcatggatgtaattntacatgggctgcgtcccgtgcctataaatagatgaacagtgctcccgtactgttcacactgacttagcattntcttttgcgtcacgctcatacct

SEQ ID NO: 9045 - DNA, 416 bp, Zea mays
  unsure (1)..(416): unsure at all n locations
ntaccaaaacgctatctccaatctgaaactctctgtcagatctatgcttatcagcctggagtttcatccctatttgagcagctgccaacttctccttcagcatactagcatgtaactgtctatcagccaacacctcagtcacagaactaggagcaaccccagaaagcataggagcagcagcaaacacagggtcataaccatacaaggccttgaatggagaacaccccanagctgtgtgatatgaagtattgtaccaaaattcagcaagggccaaccatttcttccaagtattaggtgcctcatgaatagaacagcgaagatacatttccaaacactgattcactcgctctgattgcccatcagtttgagggtgatatgcagtagtgagagccaatttgatccccaaagcctgaaac

SEQ ID NO: 9046 - DNA, 371 bp, Zea mays
  unsure (1)..(371): unsure at all n locations
catcactcgatcttcctctacctcgcagatgtgccatatgtgaagcgaactgctagttctagtgcaatctaaaatgtaaacgcttgtgtttacatgaagcaatccccatcaaccagcatgcaccggtgagattccaccggtgccaatccccatccattctatttctacctactactagtcctagagagcggggcanggtaccctgtctcctgatggcttcattaatgtcatgcgagcaaacatggcagtgcaagggtcacctgaactgtatcgtgtcagcaatatcaacgcagtgcgaaagatggcacgggcacggcgtggatcgaggtgcattaccgcaggcgcaagccaaggacactggacacggcagc

SEQ ID NO: 9047 - DNA, 446 bp, Zea mays
  unsure (1)..(446): unsure at all n locations
catgcaagcttaaaatagagtcaatataatcatgttattatatcatagactttttggacttatacgacatgtattctcaaaaaaatatctagggagccaaaatcgaagcaatttcaaacggcaataatgtcgaacggttcgacgtcttactcaaacaaggatacacatatacattgtataaagttgcattctgtctaaactgggcggaggttcaatttcggaatattgcgcatgggctacagttgggattgataacacatactattgtggagccattcaataaaccaattcaatttcctccatttccaaaatatcttatgccatttcatgatgtttaccaacaaccgcataagacgttcgtangtaatcacccttccctccatatggtatataacttaacatcttaagtttgcaaattattcatagggtactaatcacatgtgaat

SEQ ID NO: 9048 - DNA, 331 bp, Zea mays
accagctgtagggtcttatgaggtcatggaccttatcggattcaatttcgcccaggggtcacatataagaaaaagaaatacactattgtgcattctttaaaagaacatggttaagtgaaataccttgtacacagtggcagtagaataattagaacccacttagatgataagtgtaatttggtaagcccacaaatattacacctattttcatgaaggtgttttcaagctaacacgatatgctcttcccctcttcccctacacacacacacacatacaaaggctcagattgtatgacaggtgacaaattcattaatttgatctgcagaaacac

SEQ ID NO: 9049 - DNA, 377 bp, Zea mays
  unsure (1)..(377): unsure at all n locations
agctcagcaggatgactgctaaagtcctctgctcgcangatgacaggaatgttctaacatatgttgatgatatcatagtccaaagtactaagcaagaaaatcacatcgctgatttacaagaaacatttgccaattttagaaagggaggcctcaagctcaacctanaaaaatgtgttttcagggtgaagaaggggaannattctgggtgtctcgtgtcaacaatgggaatggaggcaaacctaagcaagatagaagcaattcttctgatggagccaccaaagtcaagaaaagacgcccaaaggctgacaggaagactggcctcatngaacagatttatttcaagattggtagaaagtaacttgtcattctttgatata

SEQ ID NO: 9050 - DNA, 340 bp, Zea mays
  unsure (1)..(340): unsure at all n locations
gaacggacacacgtcccctgnggtggtccggagctgtgtagccgcttatcctggtcccgtaccctaagcctacacgcaccaccactctgcaatgagtgccctagtatttggagctatgatccanggggtccggacacatgaattggcttcccggtctaaatcctgcaggtcctgttgcgtgaatcaaaggataaaagataccagttagtgggccctatgggtgcactactaaagcttcctatccaaggctgtgtgcangtccaggtcccagtcgaggctacctcctatggaccaggtcaccaattatttcttaagtatactggcatccagcctcgacacg

SEQ ID NO: 9051 - DNA, 448 bp, Zea mays
  unsure (1)..(448): unsure at all n locations
agcttcggttcagtagcaganaagaaaccgacttatagaggaaaatgctatttagtcctcaatagattgtcctaatgtcaatagtaaacatgaagggcaagaatgtaattttgcacaggctgtgtcctgtgcctataaatagatgaacagtacccccgtactgttcacgctgactggtactcacttgtgcgtcacgcttgtacttttaccttctatcaagccgaaggtacatttgtaattcaatattgtttctgtctttccataataatataatgagaatgaattaacaatgttatatgattggttgtgttgtctcttatatttcatatgcttcttcttttattaacatatatcgcaatctacgaaggtatgtccttcatgaccttcgtctgaagatcattatatcctaagggaaataatcctttgaggacgaagggattaacattta

SEQ ID NO: 9052 - DNA, 373 bp, Zea mays
  unsure (1)..(373): unsure at all n locations
aaaattgaaatacccgaagggggcattagtgtttaatggcagtggggaagaagattctttgtactgtctcccggataataaagagatatccgtttgccgggagataggtagaagcatcggattctcagagctagaagatggcctttcaatattatcaaaggatgagctcgctgacagtttggcgtttaatagcataaaggtataaaagctaattctgtattttgaaaatgaaatattttatttgtttatacttaattctgtcctcctcttgcagggcttaaaccttagcaatgcccttagagcacagaanaacattgaagatgaaggatatacaatggctgctaacaaccttcgttccgaggtaatccgaata

SEQ ID NO: 9053 - DNA, 449 bp, Zea mays
  unsure (1)..(449): unsure at all n locations
agcttgtagagctatgntaggtggtcaagtntgtttaagagactaagcattggtgctgtacaaaaattaaagaaaaatggactagaagtcacgctgtcagtcagatcagatgttanggtttgactgatagtgagctcggatgaactntagaggctgaattctgtataattcggtgagaattcgatcaaggtcattataacaaaattcaaactgggttatagagcaacaactttggtgcagatggatcggtagctcttcacatgaaaaatggagaatggagcttctcaatctgctatgttaggcacaatgaaaggaattcacatggtacagtaacctaacgaagattgaaaggttcagtgcaccgccactggtgatcccgtgccgtgatcctcgccggcattgtgattcgtgcccggtggcgcgccgatccctatgtaaagtgaaagatc

SEQ ID NO: 9054 - DNA, 174 bp, Zea mays
gtatcatgacatggaaggagtcttttcattattatgtggtagtgatgactctttcacccagaaaacttgcccgtcttctaattctcagaccttctatagcccgcggcgctaccatctgggaactctaagtttttcaaccatttcatcaattgtgtcttccttttacgtttaata

SEQ ID NO: 9055 - DNA, 309 bp, Zea mays
  unsure (1)..(309): unsure at all n locations
atcttttgatgatgagggccatctcttcatcattaagtccggccgcctcaatttgtgctaccttgctgggtaacgcctccttgctccttgttgccttgagagcaacaggttgaggctcattgattggaccgtttagagcgtcgtccacgtaccttgcttccttgatcatcattcgcccgcttacaaattatccaaggacttcttcgggcgacattttggtgtacctgngattctcacgaatattattcaccaaatgaggatcaagaacggtaaaggaccttatcatcaatcggacgacgtcgtggtccg

SEQ ID NO: 9056 - DNA, 363 bp, Zea mays
  unsure (1)..(363): unsure at all n locations
agcttaatgcannaattgaagccgaagtccatataagatcaaatntgaaaaaaatcattgacaagccttcaaaataaatgtctggagttcagtaatcgatgcgttcaacggctgaagcaagtcttctattcagctggagccagcagtgaaacatttactccttcggctgaagacctgccaggggccttcgaacatatcgaaggtgaaattgatgaccttgatgaagttattgctggacatggtgactntgtgccctggtagcttctcggggcacaactgttgccttctgaaatctggctgtgaccatggaaaggttatcaatagacccaacttcagccagtcaccagcagatctggataatat

SEQ ID NO: 9057 - DNA, 330 bp, Zea mays
  unsure (1)..(330): unsure at all n locations
cctactggaaggattggaaagtgggctgcggaactcaatgagttatgcattgattatgtgcatagatcttcgattcagtcccacgcgttagcagatttcatcgctgactggacgccaggggctcatgaagaagaagcaagtaaagatgtcgaagcttggacagtattctgcgatggttcttggggaaccttccgggcaggtgcagctgccgttttaattgcaccttccaaagtcagaacatgctacgcagtgaaacttgattntagttgtacaaataatatttctgaatacgaagctctgcttttgggtcttcggaagttgaaagcaatg

SEQ ID NO: 9058 - DNA, 415 bp, Zea mays
  unsure (1)..(415): unsure at all n locations
agctntangccctataattcttgaaaagggaattatacttntttttgtttcgggcattgatactatctctaacttgcacatttaatgttttaagttttcgtattatgttctcatggttagtaatcagtctgagtgcaatctagaactcactntttttatggagtagtttcctcgagctaataatgcaaagctttctggatcagatgcattatcaagtcgctgtgagaagattagttttaattgcagttgcaatatgtaactgcttgttagcttgtgcttgtaacagcaaatgatactatcttttatgcttaaactatcaaattgttctgcaaagctgtattatccctctttggaagctttcaaaagtttggtttgatatttctatcgctatgtcttggtgattctagtgtctaca

SEQ ID NO: 9059 - DNA, 355 bp, Zea mays
ggctggaacctggaactggtttatacttgtatgtccggccagccataacctctcttatttgcaaacttaatgttattcctagctttaagttgttagtctcagcgctgtccatgtatatggctgttaaaatgcttgggcttgtttctgtactacctgctgtttggtgtctgaatgaagtgttttcttcagtggttctgctcgacatgtctgctcactgttgatgaggcacatcatcgctgctgctcttcacacaaacaagatgactgacagattcaaatattttgagcgtccacatgtttgtttagatagatgccaatttctccggcgttctctctctctctctctctctctctct

SEQ ID NO: 9060 - DNA, 452 bp, Zea mays
  unsure (1)..(452): unsure at all n locations
agcnttgaagtggcctttctgctatgtcgaatgtatgatctcgcagacagccttgcgtacaatagtctgaaggtacagaagttatggacttataagcagattattnttctcttattcttatgctgatccttcttctcccccttttttgtacggcttaattctgagcaacgctttgagagcacaaaagaatgctgaggatgaaagctgccagatagcccttggtaaccttcggtcagaggttatcagactgaggaatgaagttgtagagaaagataaaattctgctttccttagtagacagagtcaaggctagcgaagccaatcttgtcgcgcagtccgaagctcataaagccgaaattgaaaacttgaagaaaaaacgtgccgagaagaatgaagactttgaagtggctaaagcaaaacaggaaataagcgagtggactagcgtgagattgc

SEQ ID NO: 9061 - DNA, 349 bp, Zea mays
gctaagcaaaacctatggcacggagcgtggaggcgtgcgacagtgcagtacatatggggttttcccgggtcagatgtcgtttccaaaaagtgcccagtcatcacccagcagttatttctaaaacgctggcgtgccatgtcatcactcagctgctatttctaaaaaagctggcgcgccatgtcatcactcggccgttatttccaaaatggccgacacggctcatattgactcagctgttgtttctaaaaacgctgacattatctgactccactcggctattacctccacagtgtgcgacacggtctgattatcactcggctgctacctctaaagcaccgacgtcgccagt

SEQ ID NO: 9062 - DNA, 277 bp, Zea mays
agcttaccacataaaaattgtagaatagggctcctcacgttgctttgtcagaatgactgatgaagatcacgatggtatagtagatgaaaagatctttagtgccgtgaacccgccgccggtgatctccacgccgcgatcaacgccggcgctgtgattcatgctcagtagcgtgcgaataactgctatcggtgaaagatcttggcgttgggatgagctcgggccctgttgccgctcagttcgtcgtacccacttgcacgacgacgtggtcggacgatca

SEQ ID NO: 9063 - DNA, 278 bp, Zea mays
ctctcatcatccgcataagaacataatgacgaccgacaggtcactggagctcctacacatggatctattcggcccgatcgcttacataagcatcggcgggagtaagtactgtctagttattgtggatgattattctcgcttcacttgggtattctttttacaggaaaaatctcatacccaagaaaccttatagggattcttgagacgggctcaaaatgagttcggcttaatgatcaagaaaattagaagcgacaacgggacggagtttaagaactctc

SEQ ID NO: 9064 - DNA, 397 bp, Zea mays
  unsure (1)..(397): unsure at all n locations
agctntaaatattatntagactccttgggtaattattggtatgattgagaccatgtttgatgcttaaaacccataaccctaacacctgccctatgaacttcactaaggaaagttgtattctcggagacctgcanggttgtctgaggtccgttggacaaggacaactatangtgggcctaatgactngggaggttctgtcacaagcctcttcccaatccctggaacatagagcatctccgtatgtttttcccataaaaacaagcttggggattcagttttcttcctttgtaactaagttgcgcatatatgtacaccagcccagtgaggtccgccctcataaacccggtctgttggcctacactcatgaatatcaagttataaagaaacgattcacccc

SEQ ID NO: 9065 - DNA, 212 bp, Zea mays
gttgacgtcgtttgtccgcataactcttttgtcgagcttgtacctctttcaagctatgtatgagtcgttgaaccctttcttccatttctttcaccatgtcacgcctgaaaaaccacatttctcctggttcataccaattcaaggcggtacagcaccgccgtccatataatgcttcaaatggtgttgtccgagaggaaattctccggccgggt

SEQ ID NO: 9066 - DNA, 209 bp, Zea mays
  unsure (1)..(209): unsure at all n locations
tatggaagtgcagaggagtggngatattcttgttgaggtgtctgtaaagggcnggagtggcttcanatgtgtagtcaacctagctgaacgaacttgtacttgtagaaaatggcaagtctcaggcatttcttgcaaacatgccattgcattcattacatctcttagggaaccattggagaattatgttgacatcgcatactcggtgtact

SEQ ID NO: 9067 - DNA, 272 bp, Zea mays
  unsure (1)..(272): unsure at all n locations
ccggcctcctcttttgcaaaatcaactaaataaagtttgccgtctaatacacccttaaaagctcatgaaccatcacttcttctaaagacagacacatctactagttgtaatagacaattatatcccatattacataattgactaacagatagcaaattatatgcaagggactcaactaanaacacattagagatagagtngctcattgaaattgcaatcttgcctaagcctttcaccttaccttggttcccatcaccaaatatgattgaatc

SEQ ID NO: 9068 - DNA, 413 bp, Zea mays
  unsure (1)..(413): unsure at all n locations
tagcctcatgtgtttgcaagataaaagttcattttcaacaagaagattgtcatgatcaaatttaatttgagtatagtcttccttgatcttaactagtctattttgcaactccctattagcttcatttaatttgtcatacttctccttggcatcttttagggagtttgtgagctcatttatggttgatgacatagnnttattttcttcttttatttcatcactagcctttataactatgtcatacttggcatttaaagattcattttcatttttcaacctatcacatttagcttttgactntctaatgatttgagtatattctttaagtaagtcagctaactcatcatatgaaggtgaagcanattcttcatcactatcactatcactatcatcatcaatattaatatcatttt

SEQ ID NO: 9069 - DNA, 351 bp, Zea mays
  unsure (1)..(351): unsure at all n locations
atgacactcgagagacaataaaagcagctgaaaaggctgcggagcttgagagacgaatacgtattacttaatggtttttaactttgttgtctatttntgtgacttcgaactgatntacgttttctaccacagctgaactatctcctcccncaaagcccttcgagtcactggccgacctatatgcaaaggaatcaacagaaattattaacatggccgaaactattgtagacgaagtcattacccaactgctgaccgaagctgcagataacagtttgaaagaagaagaatagctatngtaaaaacatngctagtatattaatggaacacctgcttaactatgcttgtaatatt

SEQ ID NO: 9070 - DNA, 373 bp, Zea mays
  unsure (1)..(373): unsure at all n locations
ttaagtcacctgngctgcagcttgattgatgccttccaaatttatagtagtaccattttttatttttggttggatacctcttctaacagagatcttggtaatttgaacttatatggtcatctggtgcctgagcttggaaaattggagcatcttcagtatttataagttcttacccaaatgaattatatcttggtagttgttcacaataggatgtcagactttacattcacttgttcttttttaactgcattgggcaatagggcacataattctgatcatatatcaatgacattatgccccttgaaaaggtttatgaatccatttgtagttgcagttgcaaacaccaattacttgactaggatcgaactatttt

SEQ ID NO: 9071 - DNA, 326 bp, Zea mays
  unsure (1)..(326): unsure at all n locations
catagtcccaacagtagcccctttcgcggcgctagatcgttnttcgtaacgagcttgatccgtgaaaaaagtctcctaagcttcatgaagccgaaggtccaaaaaacaccttccctgagctcgttatcgagaaacgattcagtttcccagcgcatagcggtcccaccttgcagagttactgtttggtctctgcggtccaccgcgcagcgagtgcaagcggctgtccgcctggtgtaaaaatactggcgcttcgccttcttacctgcagtactatataaacagacgagtaggtgtgaagttaccacaacattcattgctatttgcac

SEQ ID NO: 9072 - DNA, 289 bp, Zea mays
  unsure (1)..(289): unsure at all n locations
gctntcctgctcacagcttcggggctgngtcgaccttcgtattctttgggcttctcccactgtggtaccgattccagtccgaagatacctgttcacacattatactccagaaaccatcgtaaatcatgtttttgaggaccttcggaagccgaaggcccccaacagtagcccctcgcaatattaatttgttagattaataaatttaaattgcgacatggacgaaggccttaagccgaaggtccgaaaaaacaccttttctttgctagaatagcaacattcactaacaagc

SEQ ID NO: 9073 - DNA, 360 bp, Zea mays
ttcgaaaaatacttccgaaggtaagggcagcccctgtgctgctgactcggctagcaaatcagcatgttcattttctcctcgaggaatatttttgacagataacccttcataggaagcctcaatccttcggaccgtgtctaaatatttctcaagcttcgggtctcttgctttacaagtcgtgtcaatatgaccaacaataacctgcgaatcagttttaagaaccgcccttctaattcccattgcctttaacttccgaagacccaagagcaaagcttcgtactcagcaatgttatttgtgcaactgagatcaagtcttgctgcgtagcacattataactttggagggtgtgaccaacacagc

SEQ ID NO: 9074 - DNA, 472 bp, Zea mays
  unsure (1)..(472): unsure at all n locations
agcttatgttgattatagggtctaagatgaggccaacatgcacaaccaataattcgtagagatgagtactcatgtttgacacagaataatcattccaagggtgaagtataggaaattactttgcttggggtacgattaattaggaaggtagcagcaagaaaggcttcataccagaatttgagaggcataaaggcttgtgcaagaagagatagacccatctctacaatatgtctgtgtttgcgttcagccgacccattttgctggtgtgtatgaggcaggaaacatgatgagatatccttattttcttgaaaaaggaatgaagtttatcatattcaccaccccaatcggtttgcatagtaattatttttctatcanagagcctctcaacangtttctgaaactcatggaatttttgaaaaaacttcagatttgagcttaacgagataaatccaggtgaacttgctgtaatcat

SEQ ID NO: 9075 - DNA, 376 bp, Zea mays
tagcctcgttgatggacctcgtcaacataagcaacacgaagtgcctcatttttcttcattaaagttaaaatatcttctgcgcgttgatctttagcaattttctgctttccatatatctggcaagtgacaacgtaggtgtacttcatgagagcagcaccatcttcctgacctttaaacaggtggcttacagtactggttcctctgtctaacctcctttgtggttgccgccggaaaccaccattcatgggatacacatcattctcatgcctaactgaaccaaaggatgcaagatgtttattaccctctgtgatgtctacctcggaggcggtatcaagaaaagcaagcatcttgagagctctgtggtagtacatcattc

SEQ ID NO: 9076 - DNA, 461 bp, Zea mays
  unsure (1)..(461): unsure at all n locations
agcttatgaagattcttcatcccaacatgggctattcggcggtgccagagccaacccatgttagtcttagcaattaaacatgtgtcgagctcagctctatcaaaatctactaagtatagctgaccctctaacacacccttaaatgctattgaatcatcacttcttctaaagacagtgacacctatatccgtaaaaagacagttgtagcccatttgacataattgggaaacagaaagcaagttgtaatctaatgaatcaacaagaaaaacattggaaatggaatggtcaggtgaaatagcaattttacccaaacctttgaccaacccttgatttccatccccaaatgtgatagctcgttggggatcttntgttttctcatatgagaagaacattcttttctnccccgtcatgtggtttgtgcacccgctgtcgagtatccaacttgagcccccggatgcata

SEQ ID NO: 9077 - DNA, 329 bp, Zea mays
  unsure (1)..(329): unsure at all n locations
gctctatgggctcaagcaagccccaagagcatggtatgaatgccttagagatttccttattgctaatggcttcaaagtcggtaaggccgatcccacactcttcactaaaactcttgacaatgatttgtctgtatgccaaatttatgttgatgatatcatatttgggtctactaacgaatctacttgtgaggaatttagtacgatcatgacacagaaattcgagatgtctatgatggtggagcttgagtatttcttatgattncaagtaagcaactcccaggggcaccttcatagccaacgaagtcactcagacatctaacaagttggat

SEQ ID NO: 9078 - DNA, 422 bp, Zea mays
  unsure (1)..(422): unsure at all n locations
agcttanaggggtaatatagattagtaatattcccaaaacatggtagaagaatatgcaaattaaagccaccaaactgacaaactaattgtatattacttactaactgaataatggaatagctgtgaagaatcccacagaaattagtttgtattataggaaattctaaacctatatcggtggtgaggctaagcaaaccagtaaaggtgatgttgaaacctataggagaattgacttgttcgtacacagcaacagagaaattcctaccaatgaattgcagtcctgtccaaaacaaaaaagtgactggtcagcatcaattttcactgaaataaaaagccttcaaatctatcttgattaacctcaatttgtacctctctgccaacattccatctcttcaacgcaaaaatacaagccaacatggata

SEQ ID NO: 9079 - DNA, 320 bp, Zea mays
  unsure (1)..(320): unsure at all n locations
gccggaactgtggctcgcagactaccggctggcctgccagctgggtggaacggacgatgacaacctcatcatccgcaacctccccatgttcctctccgacgccgcccgagcctggctggaacatctgcctcctgcgcagatctccaactgggacgacctggtcgaagccttcgccggcaacttccacggcacatacgtgcgccctgtgaactcatgggatctccgaagctgccgccagcagccgggagaatccctgcgggactacatccaacgattntcgaagcagcgcaccgagcttgccaacattaccgactcagatg

SEQ ID NO: 9080 - DNA, 405 bp, Zea mays
  unsure (1)..(405): unsure at all n locations
agcttgaatagctagctgtggaaaaaactctaataactcttgtattaacctttgtaaagaatattgtaatttaagaattagattctactgtgntaaatttgtccatacctttgtaatatatttttacctttccatcaatgtgtgaaatgcttctatgtgaacgaaactttgttctttttgagccgaaggcgaaaaacaccttcccttctttttgtacacaatgaagcatgattctgctttcgaagctgcattcttagagccgaagcaactgtatgatatgatgatgatgatgatcctatgtatgtctaaatgaatgtttatttatgcattgtatgatgtaatgtatcatgcaaatgaatgcccaaacacacacatncgaagctttattcacaaccttcattccct

SEQ ID NO: 9081 - DNA, 413 bp, Zea mays
  unsure (1)..(413): unsure at all n locations
gagttatgacccacacacgcttcgactgtgccactctaatcttgttggttgacgttgatcgcattgtcttcattggggttagtggctaacccccttaataggagcattgatacgcacttgatgacgatgttgctgactctgatcttgactgattgagataggttggaggttgccaaccggacaggtgcaagagggaagggtatagatagaaaaggcaagtatagatggattaaagagaganaatggagaacactcaactacctaactctatggcactcacttagtaaactaatgccattgcggaccaaggtccacaacacatcaacactcatcacatagaggcgaatcagtcataacacatagacaaacagctcaagcatactacaacanacatattgntgctatacattaat

SEQ ID NO: 9082 - DNA, 397 bp, Zea mays
  unsure (1)..(397): unsure at all n locations
agctnggtgccaatggagaagcagaaatccctgttgtcttggctgtcaaattgcttgccattgtcaactgtgagctcggacgggactccgaagcggcaaacaatgttttgccagaagaatttctgggcagtcttcgattttatcgtggatacaaccctcgcctcgatccatttggtaaaatactcgacggcgacgaaggtgaactttaggttcccttgggccgtgggtaggggcccaacaatgtacaggccccagcgttgaaggggccacgtgtgggcgattagctttgtgaattgcgaaggccttcccgaacgtggagagaacttctggcaggcttcacaagaccttgtgacccgatttgcggcgcagatcatggcgggccagtagaaaccttgac

SEQ ID NO: 9083 - DNA, 432 bp, Zea mays
  unsure (1)..(432): unsure at all n locations
acacataaatacncagctngacacaccatntgacattttacataagatttctgagatctttattatttagntcatttctcaacctgccccccgggtcttatcaagaggcttagtgaaaatatccgctagttgatcttccgacctcactccttctaaaatgatatctcctttagcaacatgatctctaaggaagtgatgacggatatcaatgtgcttggtgcgagagtgttgtacaggattattatcaattttaacataactttcattatcacacaacanaggtaccttttctagaattacgccgtagtctagaagagtttgtttcatatataaaatatgtgtgcaacaagcacctgcagcaatgtattccgcttcggcagttgacaaggcaacactatttntgcttttggatgtncatganactagtgatct

SEQ ID NO: 9084 - DNA, 356 bp, Zea mays
  unsure (1)..(356): unsure at all n locations
atactattcatacttaagtagattaagttgataagaggccaaggtatgaaaacttcctctccttcagttgttntaatattctatccttagtgggatgtaccatagtataggttaatttccttgcaatataaaatgttcaatagtgcatataactttgacatcaactatatgtgtgcactaatttaaaaggaatttaatctatccttttgggtttcaagaatgatgattcattctccatccacatataaggattatcatttgtgaaaccctcccttgtgtttctaatgctctcttttctaagtgttttaataaggtctttccaagtgctttcaagatggattcaaaatctacggata

SEQ ID NO: 9085 - DNA, 262 bp, Zea mays
tctcactctacaactcatgcactcaaatgcacgttcactattccctatccaggcagaagaatatgaatattagccggcggctcaacgaggacatctttctcgcgaacgtatgccaaagaatcaactaatgaaacactaagaggttgacgacaatgctgctgagcgttgacaatactatctccgggcaaaacaaccctccctttcggccaggtccgcatgatttgcgcggaccaacatctgtacgtcaaacaagcaaaggaag

SEQ ID NO: 9086 - DNA, 408 bp, Zea mays
  unsure (1)..(408): unsure at all n locations
ctcgtgcgattgtccggctgctgaaatgtggtgagttccctgacgacacggatgtggtttggaatgctccggctcgccgcccactgcctcgttgcacgttgcaggtgagtgaggttcttagattcccccgaactcagcccatctctgacgatccattgttcatccataagagaatgcatcctttgtgtacccagttgttacctacctgcagagatgcatgcttttactgcctcattcagttatggtcgtgtagcatttgtgaanactagacatgttcaggcaagaaactaacatgaccaatgaatgccagcgaagtgactacatctacatataaaccacatactggcagaaaaacatcacatgaaaccttggactgctaataaaatctttaatgaggaatatgatatc

SEQ ID NO: 9087 - DNA, 473 bp, Zea mays
  unsure (1)..(473): unsure at all n locations
agctntgatccatggatngaacatcgccatttcattgggcatcattatactgatggtgtacggagactctctggtagtcattagccagataaacaaagagtgggattgttcaagcgattcaatgggaaaatactgcattgccgtccgaaagctggaagacaaatttgagggcctggaattccatcacgtagaaagagatcggaacacagcagccgatgtgttgtccaagctaggatccagtcgaactcaggtcccacctgcagtctttgtgcaagaaatactacagccgagcatctcaatggatcaaacagaagagtgtaatattatagatcaacccgagtcagactctgatgactggagaaggccaatcatcaagtatataaggaacgaagaggaaccggacgacaagaattcagccgagcgtattgtcagacagtcggctcactacacactcattgggaaaacattgtaca

SEQ ID NO: 9088 - DNA, 306 bp, Zea mays
  unsure (1)..(306): unsure at all n locations
aatcaactaagtatagctgaccctctaacactcccttaaaagctactgaatcatcacttcttctaaagacagtaacacctgtatccgtaaaaagacagttgtaacccattttacataattgagatacagaaagcaagttgtaatctaatgaatctacaaganaaacatcggaaatggaatggtcacgcgatatatcaattttaccccatcctttgaccaaaccttgattgtcatccccgaatgtgatagctcgntggggatcttggctttctcatatgaggagaacatctctttctcccctgtcat

SEQ ID NO: 9089 - DNA, 381 bp, Zea mays
  unsure (1)..(381): unsure at all n locations
agcttantataaatagagaagaaatccatctaattattaattcaggccaccattccatgataacagaacgacccttaactggaatatgtctgtagattgcgtctggaccataggacaacaaaaagtgcacaacacaacagcttgtaacaaggccatatgctctatacccctattcctcttccgaacaggtgaacttttactgtctggagcaagtgaacttgatagagaaccatcgatgatcaagtagacataactgatatctggttccattctacttgggattccaggctcccagctttcgaccaacccttcagctcgactccagtcctgatcaggtagatatactctttgagtactanatggatgtaaagtacttgtatg

SEQ ID NO: 9090 - DNA, 388 bp, Zea mays
agcttaatccagaaaaatgtgtcttcggagtaccagcgagaaagttactcggattcattgtcaaccaccgaggaattgaagccaacccggagaaaattgaagctatcatgagaatggaagcaccacgatcgtagaagaaagtacagaggcttactagatgcatggcagctttaagcagattcatatcaaggctatgagaaaaaggcctaccattctacaaattgctcaagaaggtagataagttccagtggaccccagaagctcacgaagcccttgatgcactgaagaaattcctgacaacactgccagtgttaaagccgccacgccgagccacgcttagtcagccggctgaagatctattgatgtacatctcttgcacgactcatgt

SEQ ID NO: 9091 - DNA, 456 bp, Zea mays
  unsure (1)..(456): unsure at all n locations
agctntagtgattagagagagtgattngtgtgttcatttgagctcttgcgcttggattgcttctttntctcattctttcttgcaatcatctcaattgtaatcaaggcaagagacaccaattgtgtggtggttcttgcggggaagtttggttcccggttgattgagaagagaagctcactctgtccgagggaccgtttgagagagggaaagggttgaaagagacccggtctttgtgaccacctcaacggggagtatgtttgagagaaacgaacctcagtaaaacaaatccttgtgtctcacttctttattcgcttgcgatttgttttacgccctctctcggactcgattatatttctaacgctaacccggcttgtagttgtgattaactttgtaaatttcagtctcgccctattcaccctcctctaggcgactttcacaaccagagtattggactgt

SEQ ID NO: 9092 - DNA, 415 bp, Zea mays
  unsure (1)..(415): unsure at all n locations
gtactgttagatctattaaatactgcttcagctcttcaaagccttctgttggattggtccccattgaaagacttcggctgacttcagcacttcgaagaatggtaagtttctctctgctgatctggatatgaatctattgagagatgccaaccttcctgtcaatctttgagcccccttttttgtagttggtggctccatccgaagtatagcttcaatcttacttggattagcttcaattccctttgttgaaaccaagcatcctagaaatttccccttctttactccgaagacgcatttttctggattcaactctaagccagcttgtctgatactggcgaaggtctcctgcangtcagcaatatgaatctcctgcttcgtgcttttacaatgatgtcatcacataagtatgacattt

SEQ ID NO: 9093 - DNA, 418 bp, Zea mays
  unsure (1)..(418): unsure at all n locations
agcttatccagatttccagagggacaggcatgttctcggtttaacttaatattcactccttgtggtcccaaaaccagaaaacagaaccgatcaaccgacccatcacatcccctctattcttctaacctaacacactatttagggcgtgtttgcgcctggctggctcggttccctggccgtctcggtctatccaactggtctaggctgaggctagtctatcccagctattacaactcactntatttatgcacttgtaagaagccttgcgccatgaacagtcaggctcttaggaaacggaccttgatcttgtttctgtggagccaatctaaaaggccaaatttgcacgcgcacaaccagactcccgcgtacagctagactcccgagcaagccaggtagacgcaaacacaggagttacagt

SEQ ID NO: 9094 - DNA, 392 bp, Zea mays
  unsure (1)..(392): unsure at all n locations
cttgagttgatgatccaaggctctaagaatatcaacgagctattttttctctccacgtacgaagcacaacccgtcnncctcaggcgacggaagataagatagaggaatctacatcaagtagaacacccatcgacgcctccaagctcgacaacgaggaaatggcgctcatcatcaagagcttccgccaaatcctcaagcaaaggagggggaaggactacaaatcccgctccaagaaagtatgctacaaatgtggtaagcccggtcattntattgcaaaatgtccattatctagtgacagtgacaggggcgacgacaggaaggggagaagaaaggagaagaagaggtactacaagaagaagggtggcgatgcccatgtttgccgggagtgggac

SEQ ID NO: 9095 - DNA, 385 bp, Zea mays
  unsure (1)..(385): unsure at all n locations
agcttcgacttcatctatattgtggattgcttttgaatcagcccaattcccctaggcctttctggcagcttcttgactcccatgaatagcaataggtccctgatccgaaggtatcttcatgcaaagatatgctggatgaagaattgcttcgaaagcattgagtgttccgcgaccaatgatagcattgtagggatactccatgtcgataatgtcaaacacgacttgctcagtccttgtatttttgacgaatccgaaggtcactggcatggtaatcttaccaagcgctacaatctgtcttcctccgaagccacaaagagggtgcgtagcatcatgaatcttgtcttcnggctcttgcatttgtctgaaggccttagcaaatataata

SEQ ID NO: 9096 - DNA, 383 bp, Zea mays
  unsure (1)..(383): unsure at all n locations
gacccctaacgctatcgttaggcttattgtttatatctgggcactccgaagccaagcagtggaaccatttgcggacagcttttgccgggttcacgagttgcattatcaaacaaaggctagaaaggatggattgcacgacaattttggttgctataacttcgcctatcggaaatctacaaagtttcctgtaattagctaccgaagcaaatgggcagcacgctggaaatcagagtggctctatgttaaggttgatgacgacaaggaaaagcttgtgcaaagtccactcgaattaatcttcggagaaacccgacctcgctgcaatatgacacccgaanggtccaacgcacaagcaatgaatgaattcagaattattgcagagcata

SEQ ID NO: 9097 - DNA, 452 bp, Zea mays
  unsure (1)..(452): unsure at all n locations
agctntagctcgttctgcccatagggttagtcttattgtgacatctctgcacattataattatatggtgaatttaaaaaaatgcaaattttatctaaaaatgtgttacataaaagtaaatgtttcatacttgatatcttttatgatgatctcttttatgacatttgagctttcccgggtctgtgtccgaactggttttaatgcactcacttgagtgataactccgagcacatctaatacatcatataatagtaacagaagtgttgatattggaaaaagacataaaacaggtcaatataacatccgacattaataatttgtaaataattttgatgtgatgaacttaccaaggaagtattcattcttttgaatataggattcgatttgatgcaatggagtcagatgatagacatatctatgaaatgttgacggagaatcaagtgatgccttaat

SEQ ID NO: 9098 - DNA, 363 bp, Zea mays
  unsure (1)..(363): unsure at all n locations
aacaagtgggtggagcacatcacagcaagaatgtgatgaccacgtcaagacctctggagctgctgcatatggacctcttcggacccgtcgcctatctgagcatatgaggaagtaagtatggtctagttattgttgatgacttttcccgcttcacgtgggtgttctttttgcaggataagtctgaaacccaagggaccctcaagcgcttcctaaagagagctcaaaatgagtttgagctcaaggtgaagaagataaggagcgacaatgggtccgaattcataaaccttcaagtggaggagttccttgatgaggaggggatcaagcacgagttcttcgctccctacacacctcancaaaatggtg

SEQ ID NO: 9099 - DNA, 441 bp, Zea mays
  unsure (1)..(441): unsure at all n locations
agcttagttggtggaaagattttcaccgacatttggaanaatggtggccgagggatggctcacgaaattataaagaaaagtgaaaaagatactcacgatgctagagaagcagcaaaggcagctgaaaaaactgcagaacttgaaaggcggataggtattacctgattgcttttgactntatgttttatttctaagacttcgaacttatntatgttttgtatcgcagctgaactatctcctcccctggagcctttcgagtcattggccgactccgaagcaaaaaaggaagatgaaattacaaagatggccgaagctattatggccgaagatgtgactcaactactaaacgagggctgcagaagcagtttaaaagaaaaatagctattggtgtagaaacattcagaatattgatgtaatatttgctgaacanagtgtgaatat

SEQ ID NO: 9100 - DNA, 241 bp, Zea mays
  unsure (1)..(241): unsure at all n locations
gcttacggaaagtggctgaccggtgagggtgagtgctgcgcgaacagaggtgcgcccggcgaggctatatatgcgctggctggcactgacganggcgtgggcgcgcggcggacttgacggactcctgtgtgagcgcgcgcgcgggttgggcgagctctggtgtgccgaccatggtcgaacacgtgtgcccgtgcgttctgcccaagttctggcgcgtgtggtcgctcatacgagcctgctc

SEQ ID NO: 9101 - DNA, 442 bp, Zea mays
  unsure (1)..(442): unsure at all n locations
agctntatcaaatggacgtgataagtgccttcctatgtggaccaatcaaagaagaggtctatgttgagcaacctcccggctatgaagatagtgagcaacctcccggcttctctaaggcgctttatgggcttaagcaagccccaagagcatggtatgaatgccttagggatttccttatcattaatggattcaaagtcggaaaggccgatcctactctattcactaaaactcttgaaaatgacttgtttgtatgccaaatttatgttgatgatattatatttgggtctactaacgagtctacatgtgaagaatttagtaggatcatgacacaaaaattcgagatgtctatgatgggggagttgaagtatttcttatgatttcaagtgaagcaactccaagagggcaccttcctaagccaaacgaagtatactcaagatattct

SEQ ID NO: 9102 - DNA, 287 bp, Zea mays
tgataactaagaacctctatacaaagatattgcggcctgcctcttgacttgaccatcaagcttctcttgaacaagcgctgcacttaccgctgagtgcgaagctgccacatataataacaaaggagcccctagcactggtggggacaatgctgttagatctatcatatactgtttcagctcttcaaaagccttctgctggattggtccccattgaaagacttccgctgacttcagcacttctaagaatggtaagtctctctctgctgacctggatatgaatctattga

SEQ ID NO: 9103 - DNA, 451 bp, Zea mays
agctggcggatgaatcgacttatgaagtaggatctgtacagggttatatgcgggtcaccatgttgaagcatcacagaagtagctcagagagcatttggttcatctgtggaccaaagaagagtgatacccatgcatagttgctccatgagaattagtaaaaagtatcaactcaacaagacatcgacaaaacatctagaagtcttctaactctttgttatacatatttatttttgattagttcaagtatttacatcctaaggattgccatgctagtatagggttgaaaattagagtggcaaatctttatcacacattatgcacttgagtgaacatgtgttcgtgtttacaattgaatttacacaagaaattttaggaaagttcaatacatccctcttttaagcatcgtgggcctttcaccttctactaaaaaacttccatagcacccaaaata

SEQ ID NO: 9104 - DNA, 368 bp, Zea mays
  unsure (1)..(368): unsure at all n locations
agttctggatcagtgaagtcctattattgtgtctcatcataaaccaanagggannggcngncctccaaagaaggtagcagctattttggattggaaagcaccaaaagacgcccgaggaatgaagagtttcattggaatgactgattattatcggcgtttcattgaaggtttctccaagattgccaggccaatgacagccttgttggcaaagaaggttgagttcaagtggactctatcatgccaaaagttctttgagacattgaaggagaaattgacaatagcgacaatattaattctgccagatgtccacaagtcattctcagtatattgtggtgcttcgtacatcggcctgtgatgtgtgttaatgc

SEQ ID NO: 9105 - DNA, 411 bp, Zea mays
agcttaatcatcgtgctcaaactgaacgccgcttttgattctgcttcgtcacaagaggaatagcttcgggaaaatcaaaaaagtcaacaacaaaaatttcaagaaagtcataatcaaatggctagagttcgttcctctgccagggttgatcgtgagggagatgagaccgaagctactgagactgtttcgatttccgaagcaatgaagcggtctgggctggtaacatcggaggatatccctgccgctgaagcagagcaagctgatgttgaggagaccgagtctgaagaagattatagcagcgcgatgccgagcaaacctagccatctggatttcggaaaatccaccatctccgaaggtgacttacctaagatgttgaaattgggctatttaagtgaagaaaagaaaaagctg

SEQ ID NO: 9106 - DNA, 359 bp, Zea mays
agccctagatgtaatacaagaaatttaaacattcaatgcaagctttacaacaccatttgacatcttaaataaaatttctgagatcaagtatatttaattcattcctcaacaagcaaaagcgggtcttatcaagtggcttagtgaaaatatccgctaattgatcttccgacctcactccttctaaaatgatatctcctttagcaacatgatctctaaggaagtgatgacagatatcaatgtgcttggtgcgagagtgttgtgcatgattattagcaattttaacatcactctcattatcacacaacaaaggtaccttttctagaactacgccatagtctagaagaagttggttcatatat

SEQ ID NO: 9107 - DNA, 373 bp, Zea mays
  unsure (1)..(373): unsure at all n locations
agcttgacattgtctccctgttggaagccaatgccatccttaatgtcagggcgtctcccactatagagtatacttctagcaaatttaaattnttcattttctaagttatgctcattaattttagcactaagttgagctatatgatcattttgttgtttaattaaagctaggtgatcatggatagcatcaacattaatgtctctacatctagtacaaatggaaacatggctaacagtagatgtagagggtttgcaagcatttaattcatcaatcttagtatgtaacatggcattctcatttctaagattggaaatggaaacattgcaaacatttaaatccttaaccttagcaattaatttatcattctcaatct

SEQ ID NO: 9108 - DNA, 306 bp, Zea mays
accgaaatccaaaccttcgacttgggagtatcccttggccacaagtcgagctttattccttgtcaccacaccatgctcatcttgcttgttgcggaacacccatttggttcctacaacattttgattaggacgtggaaccaaatgccatacctcgttcctagtgaagttgatgagttcctcttgcatcgccaccacccaatccgaatcttgaagcgcttcctctaccatgtgtggctcaatagaggaaacgaaagagtaatgctcacaaaaatgagcaacacgagatctagtggtacccccttatga

SEQ ID NO: 9109 - DNA, 430 bp, Zea mays
  unsure (1)..(430): unsure at all n locations
agcttaacttgagaaacacgtgccaccacaagggtcgaatggaacgcccttggctgacaaattangaaagctaatggaagactaccttacccgaaaggggcaagggcagtaggggagtangcatgcatggaggttctcgggttgattttgctacgatggcggtgaaagcatttaggcccctggttggttttagtgattaatgacaacgtaatgttatatgtgactaacgtgtgttttgcagggacaaatggtaagttaggtcgcattacaggtagaagtactacaacggtgaaaacaatcccggagataagaactcgaagcgacggctaaaacgacgaaacaaaaggtgaaggactacggagtccgagtgtcaaggagatgtggacactcgtgatttagtaggtcttttattctcttttagtcgtactat

SEQ ID NO: 9110 - DNA, 407 bp, Zea mays
  unsure (1)..(407): unsure at all n locations
aagtcataggtatattgaaagggaattggagtcttcggcgaagacaaaggcttccactccgtaactcatgcttcgccatcactccgagcaactctctatttcttggggagaaatgagcatcaaagaaaaggatttcatccttgggggagagagtaaaagctcaaaagcaaaaggaccggacttcatctttggtataatcttaactcgttacttatgaccaaaggggaagaaattacttcgagggctctaatgattccgtttttgacgattcatgccaaatagggggagaaatgagcccaaagcataaggaccgcaccaccaccaccaaattcaaaaacttagtgctttccaaaagtctttatcattngatatcctattgtgtcaaaagggggagaaagtagtatttc

SEQ ID NO: 9111 - DNA, 467 bp, Zea mays
  unsure (1)..(467): unsure at all n locations
agcttgtgaaggttcttcatccncacatgtgctaagcggcgatgccacaaccagcccatgctagtcttagcaattaagcatgcatctagactggcctcttcttttgcaaaatcaactaagtaaagctttgccgtctaatacacccttaaaggctagtgaaccatcacatcttctaaagacagacacatctacatttgtaaacaaacagttatatcccatattgcataattgactaacagatagtaaattatatccaagagactctactaaaaacacgttagagatagagtgctcatttgagaatgcaattntacctaacccttttaccttgccttgattcccatcaccgaatattattgaatcttgggaatctttgttnttgacgtaggaggtgaacatcttcttctcccccgtcatatggtttgtgcatccgctgtcgataatccagcttgaacccncggatgcat

SEQ ID NO: 9112 - DNA, 400 bp, Zea mays
  unsure (1)..(400): unsure at all n locations
gttcagctgtatcaaaatccactaagtatagctgaccctctaacacacccttaaatgctattgaatcatcacttcttctaaagacagtgacacctgtatcagtaaaaagacagttgtagcccatttgacatatatgggaaacagaaagcaagttgtagtctaaggaatcaacaagaaaaacattggaaatggaatggtcaggagatatagcaattttaccaagtcctttgaccaaaccttgatttccatccncgaatgtgatagctcgttggggatctttgttttctcatatgaggagaacattcttttcttcccagtcatatggttngtgcacccgctgtcgagtatccaacttgagcccncggatgcataaacctacnaaaacaatttagttcttgac

SEQ ID NO: 9113 - DNA, 387 bp, Zea mays
  unsure (1)..(387): unsure at all n locations
agctntaccaaatggacgtgaagagtgccttcctcaatggaccaatcaaggaagaggtctatgttgagcaacctcccggctttgaagatagtgagtatcctaaccatgtgtataaactctctaaggcgctntatgggctcaagcaagccccaaaagcatggtatgaatgcctaagagattttcttatcactaatggattcaaagtcggtaaagccgatcctactctattcactanaaccattgaaaatgatttgtttttatgccaaatttatgttgatgatttcatatttgggtctactaacaaatctatttgtgaagagtttagtatgatcatgatacaaaaacttgagatgtctatgatggngggagttgaagtatttttatgat

SEQ ID NO: 9114 - DNA, 394 bp, Zea mays
  unsure (1)..(394): unsure at all n locations
tatgtattgaccactanactnctccgatgataatttgtgatagaaatatgaagatcttgtagagacgtgttgtatcctctctactcctgatgatttcttcgtacgagagcagtactatctggtgttgaagatggatcctatgcggataccagtattgttttgttcttgccaagcagntatcatcatttgcttcatcaaaagctagttatatggtgattntcccagataaaatgaattcttggccttgtctgttctattccaaagcttatctttttgtcgaacaacgaagagatcgaaataatgctttatatgaacaaatggtatataatacgaggagaaatgtttgccctgctggcaacaccataaataattaactattggtgataagtctctc

SEQ ID NO: 9115 - DNA, 413 bp, Zea mays
agcttccttgatctcgtagggtccaatatagcgaggagctaacttgcccttgatcccgaatctctgaacacccttggtgggtgataccttaaggtagacatgatctcccacctcaaactgtagaggcttccgcctcttatcatgatagctcctttgcctggcctgagcagcttctaagttcttggtaataaccctgacctttgcctctgcctcgagtaccaagtctggcccaaaaatttccctttctcctgcttgagaccaattcagtggggtcctacaccttctcccatacaatgcctcaaaaggtgccatcttcaaactggactaatagctgttattgtaagaaaactccgccaaagacagacacttgtcccaatcctttccataatgtagtgcacatgctcgcaacatgt

SEQ ID NO: 9116 - DNA, 416 bp, Zea mays
  unsure (1)..(416): unsure at all n locations
gtgatatgtttgactaacgtgcaattctatataatagaccttgtgcagcttgtnttgnnccaaacaagtgggaggagcacatcacagcaagaatgtgatgaccacttcaagacccctggagctgctacatatggacctcttcggacccgtcgcctatctaagcataggaggaagtaagtatggtctagttattgttgatgacttttcccgcttcacttgggtgttctttttgcaggataagtctgaaacccaagggaccctcaagcgcttcctcaggagagctcanaatgagtttgagctcaaggtgaagaagataaggagcgacaacgggtccgagttcaagaaccttcaagtggaggagttcattgaggaggaagggatcaagcatgagttcttcgctccctacacaccacagc

SEQ ID NO: 9117 - DNA, 457 bp, Zea mays
  unsure (1)..(457): unsure at all n locations
agcttcanacctccactctatctggatcaatctcttcagcgcttactccttctacagnttgatctatattagctttagtaagaatacgctcgccaacttcgttttttacttcctcatccaccggtgctgaggtaggagacaatatgttttcaggtgcccactccaaatacagaggagtatccctgcaccacaagagactaagatacagacatgcatctgtgaaaataaaaaatcaagctagcaagcgaccaaataacatgatataaccataagaaagaaccaaataatcacagcaacttatcttaagctcaattaagtagttgataaaattatataaataactgtagatacaccaactgccaaaagaatcggagctggtatatcttcatagagggaaaaaggataaatcacttgcaaatgcaaaagtttgtgagctgtgatagtcacttgaataaat

SEQ ID NO: 9118 - DNA, 333 bp, Zea mays
  unsure (1)..(333): unsure at all n locations
agactcaggtntccacacattaatccttaattctttntcccgtctcatgggcaaagcatcctccctggatcccanncttagactaacatagatcccattatcaagatgaatacaatcaattcctgacctcgcgcgagtgctagaaaaatcactcgacttctaccgagatcctgattagcgaagcagctactcaacctagcatactagtattcatctcanaaaggaatcctaagttcatgcatctagaggtttcaagcaactcctacacttaagtgcacattacaaacctacaacattaagtgtagtaaaatagcatatataaacgattatgca

SEQ ID NO: 9119 - DNA, 444 bp, Zea mays
  unsure (1)..(444): unsure at all n locations
agcttaaccttgtaacgaggataagctacctttttttcanaggtggagggtccttaagtctctttgaaatccttaagggtaaatgcttaaaatgattccaacatgctttcataagtgcatagnctgtcatgagcatcacacttttattatgacacaatgcacttcacagtttctatgataaagatatgttctcattaacctaattatgtgcacttggcatttaagccaaaatctgtaggcacatatttagggggagcaatctatattatatagaactatttaagcttaattgacatatccttccttgccggtattctgccagctctccaatttggtataatcttcactcatatattgtttgccaaaggcggagagcacgtaaaaagggcttatatttacctcataagtatccgtttttggcgaatcatgccaaagggggggagt

SEQ ID NO: 9120 - DNA, 376 bp, Zea mays
agcttcggcctcgggaaccaaattttagtgttttcgaagatgtctgaagacaagaagatccctgctgagacgaagctgagtctcgaggaggagaagaatctggggttcctgatagcgatggcagagactaatacagagaaaatcacgaaggagattctcgaaggtttgtccgaagatactgatgacagcgacagctatgatgtggaaagtgatggggaagaggccgaagatcgaccgtggcgaccaagtcactcagtttttgggaaaacaaccatcaagcagagtcacattgataatatgagggggcgatacttccgagacatatctattgtgagagctgatgccggggaaaagacttctcccacccctgaagaag

SEQ ID NO: 9121 - DNA, 299 bp, Zea mays
  unsure (1)..(299): unsure at all n locations
tcacattgtccagcatggacctcgtctataagtcgctttccagtagacgattgaatgcatttcatgaagatgtctgatgcgccccttctgtatagtgtctccccaatgagtgtgtagtgagctgactgtctagcgatgcgctcggcctgcattttatcgtctggntcctcttcattcttgatatatctgatgatcggccttctctagtcatcagagcctgactctggttgattcacgatattacactcttctgcctgatccattgagatgcttgggtgtggtatttcttgtacaaagac

SEQ ID NO: 9122 - DNA, 420 bp, Zea mays
  unsure (1)..(420): unsure at all n locations
agcttcgatgctataacgtatccgaagataaatgatcgaaccgacttaaagatgaaatgaccttttagtccataagggtctgagtcattgttgtaaactnttataaggggtatgattgtaatttcttacatgctgtgtcctgtgcctataaatagtgaacaatattcctctactgctcacgcaatcctgtaatcgctaacgcattgcttttggagttattgttttctgtcaaggcgaaggtataaatgtaataaaacatcatgtcttaatatttcaattcatattgtaaaatgaatgaatgatgttatttactcttgatattctttagcgttctatataatatatttcatatttcatttcacattattttacttctaattacgaaggtgagaccttcgtgattatcatccatagccttcg

SEQ ID NO: 9123 - DNA, 329 bp, Zea mays
  unsure (1)..(329): unsure at all n locations
tgtcgagttcagctctatcaaaatctaccaagtacagctgaccctccaacactcccttaaatgctattgaatcatcacttcttctaaagacagtgacacctacatcagtgaatagacagttgtagcccatttgacataattgagattcggaaagcaaattgtaatctaaagaatctacaaaaaaacattggaaatggagtggtcaggagatatagctattntacccaatcctttgaccaaaccttgatttccatccccgaatgtgatagctcgttggggatcttggctcttctcgtaagaagagaacatcttcttcttccctgtcatgt

SEQ ID NO: 9124 - DNA, 419 bp, Zea mays
  unsure (1)..(419): unsure at all n locations
agctntatttgtgcanattgatggcacacttatcaagctatcacatgtanattcacttgccttcttacatcgctgccaatattgttttgtttaggaggtactattggtaacagaaaatgttttcttgaagggtgatatcactttaaccagaattactaaactgtgatggaagtatttgatttgtgttgagatgatgctgttacatacaaataagatatataacagatgctcccacaagtaaaacaaactaaagactgttgtttcacttttgtgagaagatattgcacatttaaaaccaacaagagttgagcactctgtcattaattattggtgntacttatntaactgtttctttaataaacaacaacttgtttcggtgtggtttaataatgacatccatttatcntaacaagctgatc

SEQ ID NO: 9125 - DNA, 262 bp, Zea mays
ggcatgagcacttcacaccaagagtgtgataaaaatttcctaaaggaaaaggactggatacatgacagtacaatcatacgtacaaattatagacatcctattctacaatgaaaaagtattcgcttggcaacaaattgcagtaccgctgcctcaatgaggttaggttctcagataccaaagcctatgatagctatgctctgaccaccgaacaaacggtaaaaaagatataccgtaaggcgagccaatcaagtaccttccacac

SEQ ID NO: 9126 - DNA, 416 bp, Zea mays
  unsure (1)..(416): unsure at all n locations
agcttccncaccatgtcgctgctagccaagttgttgtagctaccttcatcaatgatcaaacgacatgaacgctccttaatgacacactttgtttgaaacaacgtatgtcgctgattctgctctgccttctccatttgtgcactaagcacacgctgtacaatgaggctctcataatgctctgcatcatctgcaccaatctgttcttcggatggttccttagtgcctgcatcatcagccgcaagcaaagcaagtgtagtttcatccaaatcactagcagaggaatactgaagaggcacgtgtccatagcccttgcatcgataacatagaacatctcttattctacccgtggaggctactgaagaggcactacctgctgtgttctgggcagaatttggtgctgaatttgtggaagatgc

SEQ ID NO: 9127 - DNA, 338 bp, Zea mays
  unsure (1)..(338): unsure at all n locations
atggcgagagtannatgttnttccgtggcaagaggctgaacgatggtgtatttgtgctctcggttggcgtgaacctggtctggtcttgataaaccccgttgcgagttgtgcaagggttaagtgctacatatctcgtgtggttggagatccctagctgggtattaatcgattcggatcgccgttacttctcgaacatgaagacttggtcactgccctacacgtagtaatccagtaaagtgaagtgttgataaaagacggctagcatatgccaagtgcttgaactatgatagaaagaactctagatgcaggtaatgacttaacctgataataaaactgga

SEQ ID NO: 9128 - DNA, 438 bp, Zea mays
  unsure (1)..(438): unsure at all n locations
tgtaagatctgtaaaatcgatgcacattcgccacttgccattggccttttttaccataacagtgttagccagccattctgggtacttcacttctctgataactcctgcactgaggagtcttttgacttcgttgcgagcaccttcggccttatcatctgacatcttccgaagcctttgctttctgggtctgaaggatggatcgacattgagtgagtgctcgataacatctctattaactccgcagagatcattggctgaccatgcaaaaacatccttgttattgaacaaaaaccttatcaaggttttctcctgctcttcggataactgagagcctaacagcaccttctgctctgctatgtcctcacataaaagcatangcttcggctggtctgctgaagctgctttctcccttctgaatttgtactgttcacaagcttc

SEQ ID NO: 9129 - DNA, 260 bp, Zea mays
cgaactgaattgaggatctatgcacatatgtcaatggtgaattcattaagttctgcagcccatttcccaatccttccagtagcttctctgtttctcataatgtccttcagaggttgtgacgaaagaacaattatgtggtattcttgaaaataataccaaagcttcctggaggccattaacacatcatacaacaccttctccaattctatataatttttctttgatagacttaaaacttcagagacgaagtacactggagc

SEQ ID NO: 9130 - DNA, 365 bp, Zea mays
  unsure (1)..(365): unsure at all n locations
agcttgtcgctcgccttggtggtgtgcttncatttncagccaccagcgctagctatctctgcgttgcacgtcggaaatggattcctctagcaaaggcattcgcttcctcgttcaccgccgcgcgctgctgctgctgctgctcgtcgcgtcgtcgtccctcgtcggcacatcgcgtggcagggaggcgcaaccgctgcccgcggcggcggccacggtcctcggcagcatgcggtcgccggagcggcacggcctggcgctggacttctacgccaggacgtgccccgctgtcgaccagatcgtcgccacgtaaccggcgtcagtacaagacttcctcgcgccggacccgccgtgcttctgcttttcac

SEQ ID NO: 9131 - DNA, 285 bp, Zea mays
cacttcacaatttgagggtagatcatagaatgatcataggccatttattgtgctcagtaactgaactggtaattcaatacttacaacacagttaggtagtggtttggtaatcatcataggcaatggaaatcatctcagatcaaggtatcaataattgccaatcaacatatgcaatggaaaccatctcagatcaagcatgaaaatcacatacatcataggcaatagaaaccatctcagatcaagcatgaaaatcacatacattacaggcaacaatctgactgatcg

SEQ ID NO: 9132 - DNA, 466 bp, Zea mays
  unsure (1)..(466): unsure at all n locations
agcttgtgaaggttcttcatccncacatgtgctatgcggcgatgccacagccagcccatgctagtcttagctattaagcatgcatctagaccggcttcttcttttgcaaaatcaactaagtaaaggttgccatctaatacacccttaaaagctagtgaaccatcacttcttctaaagacagacacatctacatttgtaaatagacagttataccccatgttgcataattgactaacagatagcaaattatatccaagagactctactaaaaacacattagagatagagtgctcattagaaattgcaattttacctaaccctnttaccttgccttgattcccatcaccgaatatgattgaatcttgggaatccttattcttgacgtaggaggtgaacattttcttctcccccgtcatatggttggtgcatccgctgtcgataatccagcttgaacccncggatgcat

SEQ ID NO: 9133 - DNA, 423 bp, Zea mays
  unsure (1)..(423): unsure at all n locations
aatggtttctgagttncatatctttccagcattgatcggatcgacaaagccctcgggctgtatcatatacacgtcctcatctaggtttccattaaggaaagctgttntgacatccatatgccaaatctcatgatcgaaatatgcggcaatagctagaatgatccgaatagatttaagcatcgctactagtgagaatgtctcgtcatagtcaactccgtgaacttgtcgaaaaccctttgcaacaagtcgagccgtatagatgtgaatcattccatccatgtctctcgtcttcttatagatccatttgcattctatgggtctaacaccatcaagcgggtcaaccaagttccaaacttgattgtttccatggatctatctcgatctcatggcgacttgccattctcggatctgggtcatcatcct

SEQ ID NO: 9134 - DNA, 482 bp, Zea mays
  unsure (1)..(482): unsure at all n locations
acctgcggcatgcaagctntcagttggctgatttcttcacaaaggcgcataccagagctctgtataggtttatctctccaaactcgatgtgtttgatccaccttgaatttgagggggtgttagatgccttatgcatgtgtccttgtattcggtctcatatataaaggttttgttgtacacagtctctatcttgtatcaatatatatattcaggcctagtgccctcatattgaatatataagtgcaattcataacagttatcatcatagtataatagcacgaaagggagttgaggtggntattcaatttggagtggtgataacagccaaaacaccgaaatgacaactaattgaaagtgagaggaaaaggtggtctcaacgtttaaacaaaatatccatggttgtagctagggagtagtgcanaatgctcactccatcgcanaatgtaagggcatttggcttttctaaacacgtacctattact

SEQ ID NO: 9135 - DNA, 373 bp, Zea mays
  unsure (1)..(373): unsure at all n locations
atgtggtaagcccggtcattttattgctaaatgtcctatgtctagtgacagtgaccgaggcgacgacaagaaggggagaagaaaggagaagaagatgtactacatgaagaagggcggcgatgcccatgtttgtcgcgagtgggactccgacgaaagctcaagcgactcctccgacgacgaggacgccgccaacatcgccgtcaccaagggacttctcttcctcaacgtcggccacaagtgcctcatggcanaggacggcaaanagaagaagttaaatccaactcctccactaaatatgaatcgtctagtgatgataatgctagtgatgaggaggataattngcgtattctctttgccaatcttaacatggagc

SEQ ID NO: 9136 - DNA, 466 bp, Zea mays
  unsure (1)..(466): unsure at all n locations
gcttgtgaaggttcttcatccccacatgtgctaagcggcgatgccacagccagcccatgctagtcttagcaattaagcatgcatctagaccggcctcctcttttgcaaaatcaactaaatagagtttgccgtctaatacacccttaaaagctaatgaaccatcacttcttctaaagacagacacatctatgnttgtgaataaacaattatatcccatattgcataattgactaacagataacanattatatccaagcgactctactaagaatacattagaaatagagtgctcatttgagattgcaatcttgcctaagcctttaaccttgccttggttcccatcaccgaatatgattgaatcttgnggatccttggtcttgacgtaggaagaagaacatcctctttcccccgtcatgtggtttgtgcatncgctgtcgataatccagctagatcccccggatgcata

SEQ ID NO: 9137 - DNA, 457 bp, Zea mays
  unsure (1)..(457): unsure at all n locations
ccttctttacgtacactatgatactcagctggccatagtctcgatgatgtatgcctctatatagtccaagtcttctaaagctattacgttttgtgaaaccgnnnncctaagtaacacaagcgtgtgatgacaactttgacatgctctgtttcaagggctcttaccgcaattgggaggaacaccgtcatcatcacatggcactcatgagagttgtagccaaatagagacaagtccttcatcctgactagtttgctgatattggatgagaaacctgtgggcactttgaccccacgcaaacatttgcaaatctttgttctctcctcaactgacaagttgtagctagctggggggaggtaaggcttccctttgccactatccactggatgaagttccggtctgatttgaagatctaatagatcattgcgtgatttaagtccgtcctttgtttactcggatg

SEQ ID NO: 9138 - DNA, 336 bp, Zea mays
  unsure (1)..(336): unsure at all n locations
tcgcggtggtgagagttgcgccattctcgatgcattctttcattagggctctcccccatctctgaagcttcgtcccgagagacgggctgagctgggtcccgttctccggcttcatggtgtcgtcgcatgtttcgacgcctgcatctctcttgtcgtgtgtcgcactggggaggctcttcccccagcacggtgggttcgtcgtcagagatgggtgatgactctagtctcccctgaatgaagaggatgtctangaagaaaggagtaggtgcagaggtgtgcttcttctcgtcctcctttgagggcggaggaatcgaggtggtcgtccgctgcgttttt

SEQ ID NO: 9139 - DNA, 407 bp, Zea mays
  unsure (1)..(407): unsure at all n locations
gttctcaaatgcttcgagttaagaacaaggcaacacaaaatgttaaatgttaatgtcctttgtccttcgaagcattatttcccttatgatataatgatcttcagacgaaggttatgaaggacataccttcatcaatgtgatatatgttaataaaagaagaagcatatgaaatataagaggcaagataagtaatcgtgtaacattattaattcattatattattctggaaagacaaaaacaatattgaattacaaatgtaccttcgacttgataggatgcaaaaagtacgagcgtgacgcanaagcaagtacaagtcagcgtgaacagtatggnggtactgttcatctatttatatgcacatgacgcagcctatgagagattacattcatgccctttacatttattat

SEQ ID NO: 9140 - DNA, 341 bp, Zea mays
agcttctccaccatgtcgctgctagccaagttgttgcagctacctctattaatgatcaaacgacatgaacgctccttaatgacacactttgtttgaaacaacgtatgtcgctgattctgctctgccttctccatttgtgcactaagcacacgctgtacaatgaggctctcataatgctctgcatcatctgcaccaatctgttcttcgggtggttccttagtgcctgcatcataagccgcaagcaaagcaagtgtagcttcatccaaatcactagcagaggaatacccaccatcgtcttttaccaccaaaacacgctgattaggacaatcacgctgcacgtg

SEQ ID NO: 9141 - DNA, 391 bp, Zea mays
  unsure (1)..(391): unsure at all n locations
gcataattgtaattcctcacaggctgtgtgccgtgcctataaatagtgaacagtattcctttactgttcacgctttccggtaattgcaatcgcgtcaatcgggaattaatctttgtcaaggcagaggtataaatgtatttaatatttggacacattgaatggagataatataaaagcgatgttgttcatttataatatatttgtctttaatgtttcgcatttcgtattattntatataatctattagaattcaattacgaaggtttaaccttcgtaatcgtatcgtcttataccttcgtccanagttcattaatccttataggaataatgcctcattggacgaagggcgattaacattaacattttatgttgccttggttctaattcatag

SEQ ID NO: 9142 - DNA, 376 bp, Zea mays
  unsure (1)..(376): unsure at all n locations
tgcttggccaacatagnttgttttaaactccttattagccattcaagtggaggttcaatgggaaacactgaaattcagaattctgaattttcagccttagaaccaaaaccgagcgcgntcaccttgatctctatctctaaactctaagctcccattgacaaaaatgagtgtaactaacccctctacctcataccataagatggcatcgggacgcgtgctctagcacgtccaacccgggaatctctctttgtgctcggcagtgagacaaacccaactttaacccctccatatctcttgatccagtcagcaaaacctgcaagcctccacacacaaacgacaaatgaatgttaagggaagagatctcttaatggatcat

SEQ ID NO: 9143 - DNA, 202 bp, Zea mays
  unsure (1)..(202): unsure at all n locations
attcagagctaaagggatacagctgatgaaagaaaacatgcagggctgtgcggatctcacatcggatctaagccctcgctggggaaagcttttcgtcaaggattttattggacgaaggcagctnacgatgcagcacaactagtgcaaaaatgtgaaggctgcaaaaatatgcaagagagcagagacaacctctcgctctaac

SEQ ID NO: 9144 - DNA, 443 bp, Zea mays
  unsure (1)..(443): unsure at all n locations
agcttatctcaacctgagaggaaagcttatcctattgggtgatgctttagtttaagctntgctagtgtgttattcatatgcttcctgcagtattatatgtgttgcatcatatggactagtgtttccgctgcgatgaattatttggcttctatagtgtaatagatagtcatgtggttaatggtgctttaagattaaaagtgctctaagattgtgctttaagattgctctagattggtatcttagtttaaattggtatcttaaaagtgaatagtggtaggttgatattcctgtgatatatccactaatttgaatggtgtttaactctaattatgtgcatttgtgtgttatagcatcatggtttgattcttgacacaatgcatcctanaaagtgctaaagtgtagaaatgcttcaaattgcctaagtatgtgcaaattggcgtctg

SEQ ID NO: 9145 - DNA, 318 bp, Zea mays
  unsure (1)..(318): unsure at all n locations
ggaaccgacttaaagatgaaaagccaaattatatcttgaagaatcactatatagttattgttaagtgtaatgggtattaatgtaattttgcatgggctgcgacccgtgcctataaatatgtgaacagtattcccgtactgttcacgctgacttggcactttgcttttgcatcacacctgtattcacatcccttcaagccgaaggtatanttgtaatttactattatttacatgagtaatataagtagaaaataaattaataataatgtgtacagagattaaggtatttcttatattctgtgttaaatactctctatct

SEQ ID NO: 9146 - DNA, 391 bp, Zea mays
agcttgccccatggcaactcgcgtcgcctgtgctcccgctggatggcgccttgcgtggaggctaaccaaccggcatggcgcgccacaacaccggccgccgaagccagcttcgtcttaagggcctttgtgggggccagaccagccaagccctgcctccgcttgctgaaagaaagagagagcaagttcaaggcacacaatgaaagaaccaaaacagaggtatccttagatacttacccgctccagggcaaggccaatcgtgcctgtggagaggcccctcgggcccctatcccagcaggcgctgccgagggttgccccgccgccggcttcggcaccgtttccgcctcggacgcccgaggcgccgagggagcggcctgcccaggcgtcatcacga

SEQ ID NO: 9147 - DNA, 282 bp, Zea mays
gcccgttgccgaatgaccttattgttcctgtccaccttgaagttggtcaggaacttctcatttgcttctttgattagctgctccttatgctcctcgaactggagctgttcgtcagccggcaaggtttcccatgtcggcttgatgatattgctggcagaaacttcagagctatcctttgaaccgaccattgaggatcgatcttgataggtctatataaaatgtccccagcggagtcgtcaaaaagtgtgttggcaccgatcggtgcaccaatcactgcattga

SEQ ID NO: 9148 - DNA, 446 bp, Zea mays
agcttgcttacttggtaagatgaccaaggcgctcttcacgggtttaccggagaggacgttagatttattggaactcatacatactgatgtgtgtggaccaatgagtacgacagctaggggaggattccaatacttcataaccttcactgatgattttagtagatatgggtatgtctacttaatgaaacacaagtctgaatccttataaaagttcaaagagtttcagaatgaagtagaaaatcagcgtggcaagaaaattaaagcactgcgatcagatcgtggtggtgaatatttgagtcatgagtttagcaatcatctaaagagttgtggaattgttccacagcttacgccgccttgaacgcctcaaaggaatggcgtgtctgagcgacgtaatcagactttattggatattgttcgatcaatgatgaagccagcagacctacctt

SEQ ID NO: 9149 - DNA, 299 bp, Zea mays
  unsure (1)..(299): unsure at all n locations
aagaaaatgctcctcgacgacaaaaaaggcaagtgggccgacctgttacctgaagcggtctgggcactgaacacgactgagtgcagggcgactgagttcacccctttccgccttctatatggatcggaggccatgaccccgcaagaaataaaacatgggtcgccacggacagtcacgtcagccgtccccgacgtggacgagcctacttcgaaggacccatcgacggagaccgcgtcttcgccctacaggctctaaacaaataccaagctcaaancaaagcatggcgcgaccacacagtc

SEQ ID NO: 9150 - DNA, 448 bp, Zea mays
  unsure (1)..(448): unsure at all n locations
agcttagcanaagtactacacaacctttataattaccaagaagtgattcctgggttaactaaatcaaatattacagttttcgaaatctgttctgacggtggatagaacacaacaaccagtctgtaaaattcataactcttaaaccgtcaggcctgtagttatgaaattttaacacaagcaagataagaaaagcctctacaactttcttataattgacaaggactgattctaacattaacttaagcaaacaaagcagtttctgaaatttgtatagaatttggacagattcagttactgaatntgtaaaaagcacaactcctaaactgttagacctgtgactgtcaaattntaacaccagcaagataataaagttatctaccacttttctatagcacatatctacagaanacagcccanaacagaaattaatanatttcagcttctaaac

SEQ ID NO: 9151 - DNA, 320 bp, Zea mays
  unsure (1)..(320): unsure at all n locations
acgcttggtagggtaatgtgctctcgggtggcgcggacctgttcatgtagtggaggactccgtgggaacggttgacatatgcanagggcaagtgctacatatgtcgtgtggttagagatccccacctgtgtataatcgagtccaatcggcgttgctcctcgggtatggagactcataccggtgaccatcatcgtagttagcacgtgaaatatgagaatgaataagatggagctagtatacgccaagtgcttgaactacatcaggcaaatatagattcaggtgataacctagctagtgaaatacaactcggcttaaagatc

SEQ ID NO: 9152 - DNA, 405 bp, Zea mays
  unsure (1)..(405): unsure at all n locations
agcttgtcattaccacaacatatcgtaatcggcttatcctgagtattgaaaacatcaaaaggtgccatgtagggatggcgatttcccaaacgttgtggtgacttcccagttgcgatatatgccatcagaccatgctccagaaaactcagcgtggcatcaaacatcgctatatcgacatgcgcccctctctggctcttttcgcggccataaagtgcactcactattccgctgaataaatagacaccgccgcatagatccgcaagagatgtaccaacgcgcactggcggagcatcaggatatcctgtttccatcattatcccgctcattgcctgaatgatggtatcgtangcaggagcatcttttagcggaccggtatgtccgaaacctgacgatgaagcatatatg

SEQ ID NO: 9153 - DNA, 241 bp, Zea mays
  unsure (1)..(241): unsure at all n locations
tgaccaatatattgtcattaatgcatctgtcggaatttctgagagttatgtagcaactcccgaaaaagaagccgcgataaaaattgccaatgaaaaaatggcgaaaggggataaaaagggcgcaatggaagagcttcgcctggccggtgttggcgtaatgganaaccaatatctgatgccacttaaacagactcgtaatgcacttgctgatgcgcagaaactgcttgataaaaagcaatac

SEQ ID NO: 9154 - DNA, 445 bp, Zea mays
agcttatatctaggatcaccatgaattaattgtacttgcgtaggattacgaaaaacgagtgatcttagaataaccttgaccatttcatggtcatccaatttggtgctcccgaggttgcgcacttggttgaccaaggtcttgagctggttgtacattgcttgtggctcctctccttggttgaggatgaatcgaccaagctccccctcgatcatctcccgcttggtgatcttagtaacctcatccccttcatgcgcggtcttgaggatgtcccaaatatctttggcggtctctaacccgtgcactttgttatactcctctcgacttaaagatgcgagagtatagtagttccttgggagtaaagtgccgtatttgggcgacatcgtccgagtcatagtccttatcccccacctgtggtacctgcgctccatactcaacaacatcccat

SEQ ID NO: 9155 - DNA, 214 bp, Zea mays
gttggtgttcatcatccacacaagaacatcatgacgaccgacaggccgcttgagctactccatatggatctattcgccccgatcgcttacataagcatcggcgagagtaagtattgtctcgtaattgtggatgattattctcgtttcacttgggtgttctttttgcaggataaatctcaaacccaagagaccttataaggattcttgagacgag

SEQ ID NO: 9156 - DNA, 438 bp, Zea mays
  unsure (1)..(438): unsure at all n locations
agctntcttgaatggcctgaccatgtccaacccccagcatgcgatggtccaggtgactggaatagtctataattgttgtgctagcaaatgctggtgcttggccaagaattgataggattcacatctctgaactaggctggctgcgtctttcttggcagttggccagtaaaaccggccctgaatgccttcccgatgagtgttctcgatgatgcatggaccccaaattgcctggagtggatttcctccaataagcgtttttcagcacctaagtcaatgcacttcatgaaaacacccttgacccctcttttgtatagtgtgtcgcctatgactgagtagtgagccgactgtcttgcgatacacttggtcgtggctctatcatctgactcttcttcatttttgatgtatttgatgagtggtacccttcagtcatttggatct

SEQ ID NO: 9157 - DNA, 369 bp, Zea mays
  unsure (1)..(369): unsure at all n locations
accactgctccggtattggctcaaccggatattaataagccctttgatgtgtattgtgacgcatcatgcagtggcctcngctgtgtgctaatgcaagaaggccgagtaattgcatatgcttcaaggcagttgcgccgacatgaggaacattatcctactcatgatctggagttagctgcggtggttcatgctctaaagatctggcgtcattatttgctgggtaatgtctgtcatatttatacagaccataaaagcttgaaatatatcttcacccagtcagaattgaatatgagataaaggcgatggctcgagctgatcaaggattatgatatagataatcattatcacccacgaaaagcatatgtagtg

SEQ ID NO: 9158 - DNA, 467 bp, Zea mays
  unsure (1)..(467): unsure at all n locations
agcttgcatgacattaatataaagagctaacacaacgttntgatttacaagataagattagttaagggtgatttccgatttcgcctagcttcatcatactacaagagtgtacaagtgttgtagtccttaacagagaacttttgaactttatagatttcagagcatgatatccaaatcatctttctgatccaagagtatttctttgaggacaaattgagagaaagacttgagcgggacttttagggcaactagaatagagcatcacattgtttgcatatagaaaataacaccatactttattctctttataaagaggcaaaacacaatagatgcgaaagaattctccaaattattcatatatcacttagcacaattacaatttctanaggggcaacatcatgacatnttttcgtcgtgagacatactccttcttctagctaaacgatatattattcttccttgataga

SEQ ID NO: 9159 - DNA, 412 bp, Zea mays
  unsure (1)..(412): unsure at all n locations
agcttatcaaggttcttcatcccaacatgtgctatacggcgatgccaaagccagcccatattagtcttagccattaagcatgcatctagatcgacattctctttcgaaaaatcaactaaatagaggttgccgctaaacacccttaaagctaatgaaccatcactccttctaaagacagatacatctatatttgtgaataagcaattataacccatgttacataattgactcatagacaataagttgtacccgagcgattcaactaaaaacacattggatatagaatgctcggatgccanncnntctttcccaatcctttaaccttgccttggttcccatctccaaagataatcgcatcctgggaatccttgttcttgacgtaggaggtgaacatcttcttctccccgtcatg

SEQ ID NO: 9160 - DNA, 338 bp, Zea mays
  unsure (1)..(338): unsure at all n locations
ggttgctctcgggcggcactggcgggtcgcggagaggtcgccggagctaatggctggctcaggcaagtcaggcgaggtacggaggaggcacggtggaaggcagccaagcactgtggcgggttttatagccgtggcgcgggcgtggtcacnggcggccgcgggtgcgcggtgggttcacgcacgggcgtgctctgagcgcgcccccggatgccagctcgcgtcgaacacgtggaagcttgcttctgccatggttcaacggcagattagagcgccatagcgtgcgtatcttggcaaagtcactgtgtacggtcgcttctctgctccaattcctatctttt

SEQ ID NO: 9161 - DNA, 447 bp, Zea mays
  unsure (1)..(447): unsure at all n locations
agctntatcaaatggatgtaanaagtacattntttaatggcttcataaatgaacttgtatatgttgagcaaccacccgggtttgaagaccctagatatcctaatcatgcttacaggttgtccaaggcactatatgggctaaagcaagctccaagggcttggtatgagcgtcttcgcgacttcctcatcgagaagggcttcaagatcaggaccgtcgacacaactctattcacaaagaaacataacggtgatactttcatttgtcaagtttatgttgatgatataatctttggctcgacaaatgattatcattgcaaggaatttggtgagttgatgtcgaaggagtttgagatggtaatgactggtgagctaacatactttctcggctttcaagtcaagcaaatgaaagatgagaacttcctctcacaagagaagtacaccaaagact

SEQ ID NO: 9162 - DNA, 367 bp, Zea mays
  unsure (1)..(367): unsure at all n locations
cttcgttagtgccgttaaacagtaaggctcccttcagatattttaatttttgggcatagtgtctggcttccaggatttgttcttcggaataatttttccccgaagcatgtcgataaatgtaatcaacatctttgactggagctttaggggtaggagattntgctttttctgccataccttgccatgctgtcatgccggtatctgaagtttgttgatcagccttgacctcagccgcgacagccttcgtttcaatgggcaatgtaggctcgacttcggcttctgccaggcccttggcaactntggcaactttcttaatangagcaggggtcaaggcctttgtagtcttcataacagcgtctagcacgct

SEQ ID NO: 9163 - DNA, 462 bp, Zea mays
  unsure (1)..(462): unsure at all n locations
agcttataactatgctattgtctttagtaattgctggtaatagcttatcgatattcaggcattactgaaaattaccgagtgttctttggtaactactggatggatcgatgaagcttcacctacagcgacgaataacggtgccctacatacactagtttaatgtctgtgcattaccacggtttttatatacttgcatgtgtagaccttgtttaaatattatagccgctcagacacgttgcaaacctaataagcatccagaagtcctgagcggtttgtgtggacggtggcattgaagtcatgctcgagtcttagcgactntangcttcgcangtgcggtgggtgtcaccaccgacacaacgggtgtatgtgtacgggatcctttcctgctatatcaaataactacaatcttgaatcgaactgactaatcgtnccaatttacaaatcaataacccatgtatctta

SEQ ID NO: 9164 - DNA, 388 bp, Zea mays
tgttggatccacacccacatggtaggagaagaagtaggatttatatcccttcgtgcgtacgatcatggcgcccacgccgccgtcgattcacggtgaggatgaaaaggtaagggttggatgtgcagtttgaggcacccggctccgagggtgtgactgtaactgtgcacacgggagtacgggacgatggtggcacgtgcctgcgcgagggagccgctaatacggtaatccctcgccggcttggtgtcctggtcaaacctgccccgaccgatgggaggatccaacggcgggcgctcgcccacacaacaaccatgcatctgcaccgtgaatactcaaacttaatgtgccgtcctttgtttcatgtgcattcagtatacgtgtacctctgtct

SEQ ID NO: 9165 - DNA, 436 bp, Zea mays
  unsure (1)..(436): unsure at all n locations
agcttatattgaatagtctgggaattccatttctaactagtctaatgacctagcgtcaacatagctntgataccacttctgtcacaccctggtttagggaggaaaccgaatgcatagcatatgtgtgctaggatccattttccacacatatgttgatgtcacaaatgttatatatcanaagacaatgcaacaaaggcgtaaaagagagtataataactttattacatcatccagacttaagagtctcaaatagtatcatcatcaaagtacagcaaaatatcatgggctatctcccacaggaagatgaccggagcattgctagactcagtacacgtcaacatcttcatcatagtcttcctcatcaacttctgatcaaaaatatagcaaggggtgagctcacttacagtgggggcacaataaacgggaggaattatgc

SEQ ID NO: 9166 - DNA, 252 bp, Zea mays
  unsure (1)..(252): unsure at all n locations
aaaggctccgggctggaattgtgcaattgagggtcagattagagtcgcctgtggtaggatttggtgttagccaagttaaggcaccggccattgcgtgttctatccagtacaagttcgccggaggcatgctcngtcctgttcaccgtcgtggacttggcgcagtaaagaaacagaaatacaagggcctaagtgagaatgtcagcgagataatgaatagtggctagggattctctactaattcttcaaatcatc

SEQ ID NO: 9167 - DNA, 417 bp, Zea mays
agctggccctcatcaaggagtttatcagatgattccactagaaggttattaaattaaaccacaagtatggtaccagttgaaagaattactccccctaaacgagtgttctatttagaaagaagtttctccccctttttagagatgaagaaatactcccctgacagagatcctctacttatgaaaaagcatgtgaaaattagaggtgcaagacaagatttgaaaagactaacttcccttatgcataggtaacagaatatgagttaagtacttatgcatttttagcaacatggaagtatatgatatgaaaaatagtctaatcaaatgttggagaagacatgtaaatgatactaaatgtagtctcaaaagataccaattgagggtcaatggcgagcttgagagacatgagagttcttggag

SEQ ID NO: 9168 - DNA, 319 bp, Zea mays
  unsure (1)..(319): unsure at all n locations
tggtacaatattttgctggaaaccccctcagactctagaaaagcttctccaaaagatagatgagtatatcaggaccgataatgatttctgaaagaagagatgaagcttatagatactctgagaagacaaggggcttcgggggaagatttcatccaagacatgttagaacaatccacaacccaggctaaagtgaagacaagaacaaccataatcaagggtagcagagtaacccccaatcaatatggacacaccagaattcctttataccaccagccccaagaggcagaggaggacgaagcttcngaggaagatacaactc

SEQ ID NO: 9169 - DNA, 121 bp, Zea mays
ggatccttaagcacctgcggctgcaagctagtccagaaccattttctgctggttctcgtcggaggacgacgcgggaggataccgatcgaatggcgcgccctacgcccgtcagcgagccacc

SEQ ID NO: 9170 - DNA, 394 bp, Zea mays
  unsure (1)..(394): unsure at all n locations
agctntcctccanaagtgccagcatccctatttatcagcactgccacattaatcaatactgatctaagccgtaaccctcctttaaacgcgtcctcgactgtcgaacaccaagaactctctcgtcgcatccgccccaagtccccaaccgaacttcacattagaacaaccccgagagaggggccggcgccaccaacccagcaacgcgagatccgaccgacgaggcggtccagatccagcgcggttcgagagattaaccgggatgggtgcgagctgtgacttggatccgtggcanggagaggccgcgtgggagtcgtgggcacgcaccttgtggtcggactcggaagcggaggcgagcgcgagcatggcagcgagggcaagggcgatgccgaacatg

SEQ ID NO: 9171 - DNA, 265 bp, Zea mays
aacaagtgggaggagcacatcacagcaagaatgtgatgaccacttcaagacctctggagctgctgcatatggacctcttcggacccgtcgcctatctgagcatagaagggagtaagtatggtctagttattgttgatgacttttcccgcttcacttgagtgttctttttgcaggataagtctgaaacccaaaggaccctcaagcgcttcctcaggagagctcacaatgagtttgagctcaacgtgaagaagataatgagcgacaa

SEQ ID NO: 9172 - DNA, 350 bp, Zea mays
  unsure (1)..(350): unsure at all n locations
agcttctccagagcacccaggtatggacgtaaatgttattacattttccaccgattgtactattgtagccgacgatgaacttgtcgttgctcacttcgactntggtcctaaagagaccgccttcactaaaccaaaggaatcgataaatcatttaaagtcgctcttcgtgcgcggtcacattgatgggatatcgattgctaaaatgttggtagacggagggcggtcgtaaatctaataccttattcattataaagaaaattagggtaacatgatgacgaacttgtcaagaccaacatgaccctcagcagcgttggaactgatagttcgatcaaagccaagggagtcacgtc

SEQ ID NO: 9173 - DNA, 290 bp, Zea mays
  unsure (1)..(290): unsure at all n locations
aaagcaagttggtgttcatcatccacacaagaacatcatgacgaccgaccgaccgcttgagttactccacatggatcttttcagcccgatcgcttatataagcatcggcgggagtaagtactgtcttgtaattgtggatgattattctcgcttcactngggtattctttttgcatgaaaaatcccacacccaagagaccttaaagggattcttgacacgggctcaaaatgagttcggcttaaggataaaaaagattagaagcgacaatgggaccggagtcaagaactcac

SEQ ID NO: 9174 - DNA, 439 bp, Zea mays
  unsure (1)..(439): unsure at all n locations
agcttcgtcggtcggagcttggccgggccgtctactggcgggaccaacgccggagtcgggttgccgaggccatgagccgggctgatgtcctcgggggggacagctggctgaggctacngagcggccggtcgagccatctgctcgggtcgggttcctagaggagaccccgacgacgatggcccaggagtggtgctgacatcttcctttgaggtggaactgacgacgagggtgctgtcgctccccctactgatgtctgatcctgcaggaacaacttatctgtagtgtgcgtatgttttctgcggccgccgaggcccaaacaaaccatcgttgtgttggaaagctgcttttcttttccccttggttcgagtatgaggacatatttttcagtaacagaatcgtttgtccgagcgtgagttacttttcacggaaggtgatgagt

SEQ ID NO: 9175 - DNA, 245 bp, Zea mays
  unsure (1)..(245): unsure at all n locations
taacaagtgggaggagcacatcacagctagaatgtgatgaccacttcaagacctctggagctgctgcatatggacctcttcggacccgtcgcctatctgagcatangaggaagtaagtatggtctagttattgttgatgacttttcccgcttcacttgggtattctttttgcaggataagtctgaaacccaagggaccctcaagcgctctctcaagagagctcataatgagtttgagctcaaagt

SEQ ID NO: 9176 - DNA, 421 bp, Zea mays
  unsure (1)..(421): unsure at all n locations
agctntaattgtgttgccatcaatcaccaaaaatggggagattgaaagctctcttgtgagntttggtggttggatgacaactcaattaaaggactaacaagtgtactaagtgttgaacaggtgcttaaggtaaagcctacagggttcaacacaagtgaacaaatgtgatagtccaagaactggattatggatacatgatggacatcgcataaagtgagactcgggtgcgtagctcggagacaactgatcaagccaaggacggaggcaagaagagcttcgaggtaccaagtgcacgggagaaggtcaaggaggctgaggaacccaaagccaagggtgaagaaggaggcttgcaaagtcaagggtgatcgagttgagaacagctacngcacattcaggatcactacataaggacgtgacttac

SEQ ID NO: 9177 - DNA, 341 bp, Zea mays
  unsure (1)..(341): unsure at all n locations
tcctgatgtgtacccatagactgaaagaattctcttctcttctagatggttactgtgccccnccatggacaaaattgtaagccaatattctattattaattattagtttaagatcaatagaagttataggtcctctagaaaaaaatgcagcaattacattatatattaaataaagggttaaatgcaacatgaatggataaagtgcaagaataaggaaagaaaaaaaatactcacatgctatccttttcaagactgtttgtcacttggttcagaaaatccaaagtgaacatatgcaagcagacctatgacacanaagaaatacacanattgtaaatgcctat

SEQ ID NO: 9178 - DNA, 479 bp, Zea mays
  unsure (1)..(479): unsure at all n locations
tgcggcatgcaagcttctaaagggagaacacgtgataggtctaaccaatgttcatttcgaaaaagatataccttgtgcagcttgtcaagcaaggaaacaggtgggaggctctcatcacaccaaanatgtgatgacaacatcaagacccctggagctgctacatatggacctcttcggacccttcgcctatctaagcataggaggaagtaagtatggtttagttattgttgatgacttttcccgcttcacttgggtgttctttntgcaggataagtctgaaacccaaggaaccctcaagcgcttcctcaggagagctcaaaatgagtttgagctcaaggtgaagaagataaggagcggcaacgggtctgagttcaagaaccttcaagtggaggagttccttgaagaggaagggatcaagcacgagttctccgctccctacacaccacagcaaaatggtgtggtagagaggaagaacagga

SEQ ID NO: 9179 - DNA, 316 bp, Zea mays
cgaccacctcgaacgtgagggtttcctttcggaagttggagggagtcccgaagcagacgggcagttcgagttgcccaaggggttggacgcgtttcccgaggatgatcccgtgaaaaggcgtcgcgccggcccggatcgaggacagatcgatctgcaggagcccgagggtctcgacatagatgatgttgaggctgctgcctccgtccatgaggaccttgctaagccagatgttgccaatgacgggattgacaacgagcaggtactttcccgggctcggcacgcggtcggggtggtcgccctggtcgaatgtgatggg

SEQ ID NO: 9180 - DNA, 448 bp, Zea mays
  unsure (1)..(448): unsure at all n locations
acctgcngcatgcaagcttccatcgatatcgccgtagactgttgaataccagctgtaagtcttcgatgaagttntctaagatctccgttntgattaccacatcatctacataagtcttcacacgcttgccccagtgatcggcttagcatgttngaatggctctctgataagtcgctacagcgtttttgaggccaaacgacatggaggtatagcagaaagcaccgaacggagtgatgaacgctatnttttcctcgtcttcctttgccaagctaatctgatgatatccggaatagcagtccaggaaagacagcacagaacacccagcggtggagtctaccacctgatctatcctagggagcccgaagggatccttntggataatgtttgtgagatctgtatagtcgacgcacatgcaccaatccactntattctttttgagtacaagaac

SEQ ID NO: 9181 - DNA, 394 bp, Zea mays
  unsure (1)..(394): unsure at all n locations
tttcactaagacattaaaggttagtggaaaaattaaattggtccagccccagaccttggccacacccaaattctaaaaggctaagtataccactaaaacccccagtagtgagattaaactttttgacctaatcatttcaccatgcatcataattactaaattgcatatcatggcatacatgtatcttattcattgcattcatttcgattgcaacctcgctgacggagagtatgtactcatccccgagcaaggagttgctcaagaggaagtacaggagccagcttcatagcctgccaccgaggatctcctcgcagcctcatgctttgaaggcaagccccggntttggcataaccgttatatatgctatctactacactaatgttgtangatgaat

SEQ ID NO: 9182 - DNA, 450 bp, Zea mays
  unsure (1)..(450): unsure at all n locations
ctctagaggatgggctctcatgtttgtcataagatgaattggccgacagcttaccgtacaacagcttaaaggtgagaaaataaactttttgcgtggtaaaaaattgtgtgtttatttcttaataccacattccttttgcanggccttattcttagcaacgccctcaaagcgcacaagagcgctgaagacgagggatgtaccatagcattgaataaccttcgttccgaagtgattgagctaaggaacgaaggtcttgagaaagataaaatattgaattcattgcttaacaaaataaaagaagacgaagctacttccaaggcccaagctgaaacccagaagtgcaaaattgaaaatcttcagaaacagctggcagaagcgaaattaaagtgttcaactaccgaagctgaccgagacgccagcgattactggaagaatcattgggagaaaaca

SEQ ID NO: 9183 - DNA, 337 bp, Zea mays
  unsure (1)..(337): unsure at all n locations
gtcgagttcagctctatcaaaatttactaagtatagctgaccctctaacactcccttaaatgctattgaatcatcacttcttctaaagacagtgacacctacatcagtgaatagacagttgtagcccattttgcataattgagatacagaaagcaaattgtaatctaaagaatctacaagaaaaacattggaaatagaatggtcaggggatatagcaattntacccaatcctttgaccaaaccttgatttccatccctgaatgtgatagctcgttgggaatcttggnttttctcgtaagaagagaacatcttcttctcccctgtcatggtggttatg

SEQ ID NO: 9184 - DNA, 463 bp, Zea mays
  unsure (1)..(463): unsure at all n locations
gcttctaaagggagaacacgtgataggtctaactaacgtacatttctaaaaagatagaccttgtgcagcttgtcaagcagggaaacaggggggaaactctcatcacaccaaaaatgtgatgaccacatcaagacctttggagatgcttcatatggacctcttcggacccgtcgcctatctgagtataggaggaagtaagtatggtcttgttatagttgatgattttccccgcttcacttgggtattctttntgcaggacaaatctgaaacccaagggaccctcaagcgcttcctcaggagagctcaaaatgagtttgagctcaaggtgaagaagataaggagcgacaacgggtccgagttcaagaacctttaagtggaggagttccttgaggaggaggggatcaagcacgagttctccgctccctacacaccacaacaaaatggtgtggtagagaggaagaac

SEQ ID NO: 9185 - DNA, 439 bp, Zea mays
  unsure (1)..(439): unsure at all n locations
agagttatgttattacagaccagactaaatgtgagtgccgagtatttttattatacaaacctgggaggnaaaanncctccgagaagctaaaagcaaaagatcctaagtggaggaccgagtcctcccgcacttcagtcttgtttttcttctttcggaaccaccttggcacagaagcagcaaaagtctgctacttcctcacctaaaaacaacgaagggataaaccctgagtatggaattactcagcaagtcttacccgactaaagaaaagactctcaagggtatgctggttatatgggagtcaaggtaaggcttttcaatcatcaatgactctgtttttgcagaaatgcttactaaagtggatccttaanaatccaattntaattngtcaagttaagtaaaattacttgtactagagttctttctaccctagntcaatcac

SEQ ID NO: 9186 - DNA, 367 bp, Zea mays
  unsure (1)..(367): unsure at all n locations
ttgacttggacatccttaaatatgtgaaccataagacttaaggtaccctactgccttggtttttacacattagtccacaagtgcactagctttgcacttaatcccatatggtataattccatggctctctaggggactaatttaaggttttggagcttctagggttctgatgccactttagtccactcatagtngtattttgagacctttactaatgagttattacagatttctcttattaagctatcgttactcttttaagcccagtctatggttcagcactgtaccctagggctctacttataacatgtcacatcagtacgacttatgagaactttctgcctagtgaatgcattctaagtgggac

SEQ ID NO: 9187 - DNA, 165 bp, Zea mays
catccacacacgaacatcatgacaactaacaggccgctcgagctcctacacatggacctattcggcctgatagcttacataatcatcgacaggaggtagtactgcctaggtatcgtggatgattaatttcgcttcacttgggtgctctttgtgcaggaaaaatct

SEQ ID NO: 9188 - DNA, 418 bp, Zea mays
agcttgtgaaggttcttcatccccacatgtgcttagcggcgatgccacagccagcccatgcttgtcttagcgattaagcatgcatctagaccggcctcctcttttgcaaaatcaactaaataaagtttgctgtctagtacacccttaaatgctagtgaaccatcacttcttctaaagacagacacatctacattcgtaaatagacaattatatcccatattacataactgactgacagatagtaaattatatccaagagactcaactaaaaacacattagagatagagtgctcattggatatcgcaatcttgcctaaacctttcaccttgccttggttcccatcaccgaatatgattgaatcttgggaatccttattcttgacgtaggaggtgaacatcttcttctcccccgtcatat

SEQ ID NO: 9189 - DNA, 308 bp, Zea mays
agatctatcaaatactgcttcagttcttcgaaggccttctgctggattggtccccattgaaagacttcggctgacttcagcacttcgaagaatggtaagtttctctctgctgatctggatatgaatctattgagagatgccaaccttcctgtcaatctttgagcccccttttttgtagttggtggctccatccgaagtatagcttcaatcttacttggattagcttcaattccctttgtgaaaccaagcatcctagaaatttccccttctttactccgaagacgcattcttctggattcaactttaag

SEQ ID NO: 9190 - DNA, 397 bp, Zea mays
  unsure (1)..(397): unsure at all n locations
agctntatgccatccctacacaccaccttgacttccttattgaattgggtcacacacaaatgttcctaattccaacaatatatacacctaccttagccaaatcatacacgtagaaacaaagaggttttttaaaaattaagatatcacaaaatctaccaaatgtatggtaccagctggtatccctatctggtcggccagctgcatgccggacgtatgtatgctgctacatgcatgtcgcatgttgaattgaccatgaactcaactagctcatcactctagcctgtacactgctagctgactatttacgtaggagaataccagttcgatcgcgtaacacgccgcgccaaagtccacgtacaacacgcccatataaatctcgattcccatacgcgagttg

SEQ ID NO: 9191 - DNA, 282 bp, Zea mays
gaattagattttactctgcaaactttatccataccttgtgatatatttgtacctttccatcaacgtatgaagtgcttcgatgtgaacaacacttgtacttgcattgacttgctttgctgtggacgaaactagcattttttgagccgaatgtgaaaaacacctttccttcttttcgtacacaacgaagcataaaactgcttctttttctattctttgtcggagctttatttttagagccgaagcatccgcctatgtctgtatgttatgatgatgatgatccta

SEQ ID NO: 9192 - DNA, 452 bp, Zea mays
  unsure (1)..(452): unsure at all n locations
agcttacatagacgaacagctagaggagttgctttgtatcataggggatatacaaaatgatcataaaaggctagtgtgtgcacttgataagtctactatgacaaatctttcttcacacgaggctgaattgagggaatacacacgtaattcatcggctacaggttgtcacgaccagtcacaacctctttatgggatgccgatagacatgtaccttgggcaacgacagcctcccacgcacatcggcgataaatttgccgatctacgcatgtccgtaccgtccgcacgtgagcgcggaccgttcgggccagcggcggccgatcccanttttagaagcgaattactgagacctgcacccaagcccgcacatgccatgcaaaccctagataacccattcggatcgtctacgtatggcgccagacagtccgaatataatgtcggaccgtccgcgtatt

SEQ ID NO: 9193 - DNA, 274 bp, Zea mays
tggatagcaatgggtccctgatccgaaagtatcttcatgcaaagataagcaggatgaaggattgcttctaaggcattaagagtaccacgaccaataattgcattgtgaggatattccatgtcaacaatgtcaaacacaacttgctcaattctagtgttgttgatgaatccgaacgtcactgacatggtgatcttgcccagtgctacaatctgtcttcctccgaagccacagagaggatgtgtagcatcatgaatcttatcttctggctcttgca

SEQ ID NO: 9194 - DNA, 389 bp, Zea mays
agcttaccgcatttgaagcatgatcgcttcctcttggtcttagttttgctcggctgtccattgcgaccctttagcaccgtcttgaatctcttgataatgagggccatttctttttcattaagaccggccgcctcaatttgcgccaccttgctaggtagcgactccttgctccttgttgcctttagagcaatgggttgagactcgtggagtggaccattcaacgcgtcgtcgacgtatcttgcctccttgatcatcatccgcccgctcacgaattttccaagtacttcttcgggcgtcatcatcgtgtacctgggattctcacgaatattgttcacgagatgaggatcaagaacggtaaatgacctgagcattatgcggacgacgttgtg

SEQ ID NO: 9195 - DNA, 272 bp, Zea mays
ggatcttactcgtaagttccctgtgatgctcttttcatcctaaggaacagaaacaatcctaaggatggaagtactcagatcgagacttgtgttaggaacaggtgatgttctacccacgttgattaaggattggatgcgtatgtaagcctgctatcgcaaggactatcttagctagccgcataccctagaaatgggacagggtaagctctgcctcgggcagactaaggccagaataagataacactaaatgggcgtggagcagtggcgggagt

SEQ ID NO: 9196 - DNA, 385 bp, Zea mays
  unsure (1)..(385): unsure at all n locations
agctngcagaaggcacattattcatcgtcattattgtgtggagccagtacgcaacgggcagccgcgtcngcgaggagggggcaacggtggtggaggcgcgggttgtggcctatgggccgcgcccgccgacgctgaggccacgggccgcgtccgccgccgctgtggccaggggccgcgtccgccaccgctgtggttgtgggcggctggggaggtggagcataggcggatggagaggcggtgagggcgtctagcacagagacggaggaagggaggaggccaagcgcatatccgagcgcatagacagagggagggcacgactgtgaggagtgggagacttggtgcgctgtgtggagctccactaggcaagggtggccgttgatggcgg

SEQ ID NO: 9197 - DNA, 244 bp, Zea mays
  unsure (1)..(244): unsure at all n locations
ggatccatacatgctctntggcagaatgtgatccttcggaagcaggctaccaataactgtcaataagccatcgaatgcgtgtcgactcatgctgtactacgacttgaacacatttacacgcctaatggcatccagtggagaaacctttgtctggccgagaaggggcttctgtgccacgtcaaacatgttgtaaaacgcctttgctatcggctctggctcgtcctccgtacatcctccatgaact

SEQ ID NO: 9198 - DNA, 200 bp, Zea mays
acctaccggccagtactttgcaggaaaccttctcataccctcgagaaagcgctccagacgatggatgactacatccgagctgataatgaccttcgacacgagaccggacgaagcttacagattctgcgcaacgaccagcgagctttgaggaagagtccatgctaagcacatcagatcaattcattcctctcacaatgacg

SEQ ID NO: 9199 - DNA, 419 bp, Zea mays
  unsure (1)..(419): unsure at all n locations
agcttgtgaaggttcttcatccccacatgtgctaagcggcgatgccacagccagcccatgctagtcttagctattaagcatgcatctagaccggcctcttcttttgcaaaatcaactaaataaagtttgccgtctaatacacccttaaaagctagtgaaccatcacttcttctaaagacagacacatctacatttgtaaatagacagttataccccatatagcataattgactaaccgatagcaaattatatccaagagactctactaaaaacacattagatatagagtgctcattagaaattgcaattntacctaacccttttaccttgccttgattcccatcaccgaatataatngaatcttgggaaatcttattcttgacgtaggaagtgaacatcttcttctcccccgtcatatg

SEQ ID NO: 9200 - DNA, 272 bp, Zea mays
  unsure (1)..(272): unsure at all n locations
agccgggaagcaagttggcactcatcatccacacaagaacatcatgacaagtgacaggccactggagctcctacacatggatctattcggcccgattgcttacataagcatcgacgggagtaagtactgtctagttattgtggatgattattctcgcttcacttgngtgttctttttacaggaaaaatctcatacccaagagaccttaataggattcttgagacgggctcaaaatgagttcggcttaatgatcaagaaaaatagaagcgaca

SEQ ID NO: 9201 - DNA, 408 bp, Zea mays
  unsure (1)..(408): unsure at all n locations
ggaaaaagcagcttctgctgatcagccgaagcccatgctgctgtgtgaggatatagcagagcanaaggtgctattgggctcgcaattatctgaagatcaagagaaaacctttgataaggttttattccacaataaaaatgtttttgcatggtcagcccatgatctttgtggagtgaatccggatgttattgaacattcgctcaatgttgacccatccttcagaccccgcaagcagaggcttcggaaaatgtctgatgacaaggccgaaggggctcgcaacgaagtaaaaagactcctaagtgcaggagttatcagagaagtgaagtatccagaatggctagctaacactgttatggtgaagaaggcccaatggaagtggagaatgtgtattgatttcacagatctcaa

SEQ ID NO: 9202 - DNA, 361 bp, Zea mays
  unsure (1)..(361): unsure at all n locations
tgagtaccctaaccatgtttattaaactctctaaggcgctttatgggctcaagcaagccccaagagcatggtatgaatgcctaagagattttcttatcactaatggcttcaaagtcggagaagtcgatcctactctatttactaaaacacttgcaaatgatttgtttgtatgccaaatttatgttgatgatatcatatttgggtctactaacaaatctacatgtgaagagtttagtaggatcatgacacanaaattcgagatgtctatgatgggggagttgaagtatttcttatgatttcatgtgaagcaactccaagagggcaccttcattagccaaatgaagtacattcaagacatact

SEQ ID NO: 9203 - DNA, 417 bp, Zea mays
  unsure (1)..(417): unsure at all n locations
agcttagccatcttccattggaaacanagngtatatgacaacactattataagcaggnaactggctgaaaagaccagcctaatcatacaaaaaagattgaaccataaacttcaaaaaaggttggattgctttagcctttaacttgatacaacaatttgcacttgatggcatttcttatcatatgaatgttagcctgagaatacaaaatatacactctgttccttgatttcttcactcaacaaggacaagcaaatagtaaattaatgatttcaaatttatttcagagagaaccctgccgtcacagaagcaggaagttaaatatgcaacatattgatatcatagaaattctggcatagataagtatagttccttagtgcacattcactggctagattatctgacagtaaaacacatttt

SEQ ID NO: 9204 - DNA, 274 bp, Zea mays
aactatgtttggtttggatctttgtaatgatagtcaccagagtgttggtatcccctgcatcttggtttacatattatgtttatggagattgttatatagctgtgaaaccttctattccactttcctcttgatctgagaaactgtgttggctgtgttggatatcatcgaagatgctcacctgctcacagctgttgaagaattctatactcctttcttatgctgcaagatttgccacatcagttctgatgtgtggtgcattctgcacatgtcatat

SEQ ID NO: 9205 - DNA, 468 bp, Zea mays
  unsure (1)..(468): unsure at all n locations
gcatctgcngcatgcaagcttgtgaagaatattgtggctttactgctgactccctctatcgtcatttngagtaagaatatgaatggacctgacgtgcctcgggtgaaatcttcctccgaagcccctggtcatttcagaaaacctgaatgcttcctcccttctttgacgaaagtcattgttagctcgaatatactcggccatcttctggagcacttctcaaagtctgtggcggcttcctggcaaagtattgcgctgaaggtcctggccgaagtcccttaatcatggcctcaatgacaatttcattgggcactgttggcgcctgtgccctcagacgcagaaaccttctgacatacgcctgaagatattcttcatggtcctgggtacactggaatagagcctgagcggtgactggctctgtctgaaatccttgaaagctggttatcaacatatccttcagcttttgccatg

SEQ ID NO: 9206 - DNA, 394 bp, Zea mays
  unsure (1)..(394): unsure at all n locations
acatgtgctaatcggcgatgctctctttctcccttgctantcttagctatgaagcaccatctagaccggcctcttcttttgcaaaatcaactaaataaagattgccgtctaatacacccttaaaagctagtgaaccatcgcttcttctaacgacagacacatctacatttgtaaatagacagttatatcccatattgcataattgactcacagatagcagattatatccaagagactcaactaaaaacacattagatatggagtgctcattagaaattgcaattntacctaaaccttctaccttgccttgattcctatcaccgaatataattgaatcttgggaatctttattcttgacgtaggaggtgaacatcttcttctcccgcgtcatatg

SEQ ID NO: 9207 - DNA, 379 bp, Zea mays
  unsure (1)..(379): unsure at all n locations
agcttgctagannatgtttgaagaactcaagaataggttaaccactgcaccaatactggtaatgccagacatccacaacggatttgatgtgtattgcgatgcatcacaccttggacttggatgtgtgctaatgcaagaaagaaaggtgattgcttatgcttcacgacagttgaggaaacatgacaagaactattctacccatgatttggaactagctgccgtagcgcatgctttgaagatgtggacgcactatatgattggagacaagtgcaaaatcttcaccgatcacagaagctcttaatatatattcactcagaaggaactctatctcagacagagaagatggcttgagttgattaaagattatgatttggaaata

SEQ ID NO: 9208 - DNA, 369 bp, Zea mays
cattgaagaacttcgatattccaaggagaaatgctacaaagtatccatggaatgcgcaaagaaactaatataatgtttggtttgaggaatgagctagtccatcatcttctcactcctcacttttttgtttggtttatgtaatggaatgagttgattcatcatcacctcattccttatagttagttagttagtactaatatgaggaatggggtcatcccaccaaatctgatgaatggacccatgatgcaccaccacattttggatggagtgattcctaacagcccctataagatagctttggaagggtgggagcttattcttcagagcaagaaattattcatggtgatcccaagggggtatctactggat

SEQ ID NO: 9209 - DNA, 368 bp, Zea mays
  unsure (1)..(368): unsure at all n locations
agcttatctcaacctgagatgatagcttatcctatggggggatgngntagtttaagctntgctagtgtgttattcatatgcttcttcttgcagtattatatgtgttgcatcatatggactagtgcttgcgctgctatgaattaattggcatctattgtgttctttctgaaatagatagtcatanagacaatggtgcatatggttagatagtcatgtggataatggtgcatgttggtaatggtgctttaagagtgttctaaaatagtatcttagtttaaatgggtattaagttgaattggtatcttaatggtgaatagtgataggttgatattcctatgatatatccactacaatgaatgatggtaact

SEQ ID NO: 9210 - DNA, 284 bp, Zea mays
  unsure (1)..(284): unsure at all n locations
tcagcacgtaacaagtgggatgagcgcatcacagcatgaatgtgatgaccacgtcaagacctctggagctgctgcacatggacctcttctgacccgtcgcctatctgagcatatgaggaagttagtatgggctaagtattgttgatgacttttcccgcttcacttgggtgttctttttgcaggataagtctgaaacccaagggaccctcaagcgctttctcangagagctcaaaatgagtttgagctcaaggtgaagaagataaagagcgacaacgggtccgag

SEQ ID NO: 9211 - DNA, 398 bp, Zea mays
  unsure (1)..(398): unsure at all n locations
agcttgaccttntggcctctcttcgctgatatctccctgtaaganatgtcgcgtatatgcatatttctcttcatcagcgacaagttacctatctttgctcatgtatccaacaatatttcctgtnttgttttcacgtcaaaggtgatatatggagttcctgggcccttcatttcaaactggaaacaaaaagagagtttgaaataacattctctgagttaagctgctgggtgctttctaaacgaatagttaagcacaaacatgccttcctcttgctggtcaacgatggtagatggagcttgtgggcaattccatccaaaagaagaaaagcaagactttgggaccatgttcttttagtcattcaactgggtgctttctaaatcaagagctgatcacaaaca

SEQ ID NO: 9212 - DNA, 241 bp, Zea mays
taactatactacactttgcctaatgtgagtcagacatattatataacctactggatacacaacagttagactaagtgcgactagttattctacgaaccttacatacctttagtaacaatcaatatattctacagacgacactcattacggcggcatcaagacataccatcaaggcttctctcacagccggtaagtaaaatgatatgaaatgacccatgcgaataagactgtaataaaaatg

SEQ ID NO: 9213 - DNA, 431 bp, Zea mays
agcttctaaagggagaacacgtgataggtttgactaacgtgcaattcgaaaaagatagaccttgtgcagcttgtcaagcaggtaaacaagtgggaggagcacatcacagcaagaatgtgatgaccacttcaagacctctggagctgctgcatatggacctcttcggacccgtcgcctatctgagcataggaggaagtaagtatggtctagttattgttgatgacttttcccgcgtcacttgggtgttctttttgcaggataagtctgaaacccaagggaccctcaagcgcttcctaaggagagctcaaaatgagtttgagctcaaggtgaagaagataagaagcgacaatgggtccgagttcaagaaccttcaagtggaggagttccttgaggaggaggggatcaagcacgagttctccgctccctacaca

SEQ ID NO: 9214 - DNA, 304 bp, Zea mays
atccaaaccttcgacttgtgaataccccttggccacaagtcgggctttgttccttgtcaccacaccatgctcatcttgtttgttgcggaagacccacttggttcctacaacattttgtttatgacgtggaactaaatgccatacctcattcctcgtgaagttgttgagctcctcttgcattgccaccacccaatccgaatcccttaatgcatcttctaccctgtatggctcaatagaagacacaaaggagtaatgttcacaaaaatgagcaacacgagatcgagtagttacccccttatgaata

SEQ ID NO: 9215 - DNA, 448 bp, Zea mays
  unsure (1)..(448): unsure at all n locations
agcttctcatgggaggggtttagctcctcgaaatattattaaagagaattgggtaacctcttcaaggtcttaaattattcttccttcttgtatatatagncatcggcctcactaagcactttcacaagatcatcaccaccatcatcattggtcgtgttgtcgtcgtcgtcattaataaagtcatgtacctttgtaccattttatccataaggcaatgtggaatagagagggagcttccttaatgacgatgttggcaaacatcttggaaaacttgttattatcatcatcgttgtcgaagctagtattggagtcccactcaaatagataggttgtaccattcttctccttctcaagaaacttatntttcttctttttctcttccgcttccttatcccttctggttagtcaatatatggagatatgtcctgcnntcatcatattgtaacac

SEQ ID NO: 9216 - DNA, 295 bp, Zea mays
gttcctggccgcagagaggagtaccacgtttgtgcaacatttttgactgccatgacgaaagatttctccatgaccgctgcgttgccaccatacgaagatattgttgcttcgtaactcatcagaaactgctctggatctgagtggccgccatacatatggagcttgtgtggcttgtagacggaagccaatgtgtatcctgcaggtctgctgacaaaagagaagcgtcatcaaaagcataatttccatgatggaaatcctcataccagtcatcctcgttgtagaagccctcttgatg

SEQ ID NO: 9217 - DNA, 257 bp, Zea mays
  unsure (1)..(257): unsure at all n locations
agcttattgtcggcgtttatagactcgggggttcctcagccgactagtgagtgtgctgcgtgccccagcccatatgggtcgagcgcgtgggctanctctaaagggggagaggctacgtggtcggatactggcgtgagagaggtggagatcccgccgccttcgtgttcgtcccgcgcccatgtcgcgtgcgctagcagtagggggggtacaagcgtccacgcgggtgatggaagcgagcggtcccaatagagcgcatg

SEQ ID NO: 9218 - DNA, 353 bp, Zea mays
gcgtgcgcaaaatcagttatgatttcgagttaagaccgcggtggtggcgcggacggcgtggcgcaccttcctcacctcgttgaggagagagaagggctccgtacgtaagaggtggagccacaggtcccagtggggctcaatccccaggaaccccttgcaggcggcggagaagatggccgcctgcgcaatggagttggggttgaagttgtgcagctccaccccgtagtagtatggcaaggcctgcatgaagcggcttgccataaccccgaagccccgttcatggaacgaggtgaagctgacgatgtatcccacaggcggattcatcacctgctcgtcgtacgacgcgatccact

SEQ ID NO: 9219 - DNA, 392 bp, Zea mays
  unsure (1)..(392): unsure at all n locations
agcttatgagtctgctggattgttattcaggttatcatncaaattggatgaaggaggatgagccaaaaaccagcttcataacccctagtggaacatattgttaccttcggatgcctgaggggctcaagaatgctagaggaagcttcagcaaaatgacaacgaaggttcttcattctcagataggcagaaatgtgctaacttatgttgatgatatcaatgtaaaaagcacgaggcaagaaaatcacattgctgatctgcaggagaccttcgctaattntagacaggccggtttaaagttgaatccaaaaaagtttgtcttcggagtaaagaaagggaaatttcttggctgcctagtttcaacaaaagggattgaggctaatccaaataaaatc

SEQ ID NO: 9220 - DNA, 306 bp, Zea mays
  unsure (1)..(306): unsure at all n locations
actcagctcgacgaactgctgatgaactcacgagtcttttctttgctatgagaattcgtcctttttananncctgttgagatctgtgaaaacgatacacattcgccatttgccattggacttttttaccataacagagttagctagccattctgggtactctacttctctgataactcctgcactgaggagtcttttgacttcattacgagcaccttcgggcttgtcatcagacattntccgaagcctctgctttctgggtctgaaagatgggtcaacattgagcgagtgttcaataacatcccta

SEQ ID NO: 9221 - DNA, 387 bp, Zea mays
agcttaaagccatggtaagtagcataggctaattatattcgaattgactcaagcctagctacgggtgcataagtttcaccgaaatccaaaccttcgacttgggagtatcctttggccacaagtcgagctttgttccttgtcaccacaccatgctcatcttgcttgttgcggaagacccatttggttcctacaacattttggttaggacgtggaactagatgccatacctcattcctagtgaagttgttgagctcctcttgcatcgccaccacccaatccgaatcttggagtgcttcctctaccctgtgtggctcaatagaggaaacaaaagagtaatgctcacaaaaatgtgtaacacgagatctagtagttacccccttatgaatg

SEQ ID NO: 9222 - DNA, 173 bp, Zea mays
ttggactggtattgttagcatttttttacaattttctacaaattctttaatcctggccaaaaagaaaaggaaaagagtccacagtattgtgctgaatctggcccgagttagcccacaatggtcttgaaaatctagagaagaaccccgcgcactatttggttgggtcactgaca

SEQ ID NO: 9223 - DNA, 304 bp, Zea mays
  unsure (1)..(304): unsure at all n locations
agcttgtggcatggnttaatgatagacacacctacgcagttggattgcagaatgagggagagagatgggctccaaagcctaagacctttctagagaaggcaaaggaaagggcaaacacacacactgttgattgtttcgacttacagtcagagacatatgaggtattccttcaagctggtactacttctgacggcgagtcacaagagtcgaggaagcatgtggttgtccttaatgacttgtcatgtacttgtggcgcacccaggcaataccattttccatgttctcatctaatcgcagctgctct

SEQ ID NO: 9224 - DNA, 233 bp, Zea mays
cctacctgttataactctctaggtgctttatgggctcaagcaagccccaagagcatggtatgaatgcctaagagatttcttatcactaatggcttcacagtcggaaaggccgatcctactctattcactaaaactcttgacaatgatttgtttgtatgccaaatttatgttgatgatattatatttgggtccactaacgaatctacatgtgagagaattagtaggatcatgac

SEQ ID NO: 9225 - DNA, 273 bp, Zea mays
  unsure (1)..(273): unsure at all n locations
acaacttctgatattttggatctcctggctttgagttttgaaaaacagagaacacagatgatctttgggaagaggtctgaaattcagaaattcagaaatatgaatttctccaagggtccatagttcaagggctgatttggggattctattgagttattttggctaagctttctcaatctttcttgttgcttattaaatatactctaatttttataattggctcacgtcataattttaaacttttcatccnctttttcttattttcttgaattt

SEQ ID NO: 9226 - DNA, 328 bp, Zea mays
cgaaatgggctgccgaactcaatgaattttctattgaccatgtacacaggtcctcaattcagtcctaggggtagcggaattcatccctgattggatgcccgggcctatggaaaattacaaaagatgccgaagtctggacagtttttgtgatggtcttggggaaccttcaccgttgagcggccgctgtctattaccccctctaaagtaaaacatgctatgcaacaagggtggatttaattgtataatacattgctgaaccaaccctttgttgggctcctgaactgaagcgatgggataataaggcgatccttaaactgactccaatcat

SEQ ID NO: 9227 - DNA, 393 bp, Zea mays
cctacatcgagaatggtcctaatcgactcatacagagacatcgagactctcttctcgtgcaagtcacacgcccggactgagcttcatccttgtccacccaaaagttggtacctggcagaggtacatcttttctgatgttgaacccatcatggccatgatggatgcaccatcaagttttatttctgaacaaaatagcacccactttgaagaatcatctctgtcaaaacaaaacattttgtttttctagagcaaagctaagcaaaaaaaactcttttgtaaacagggatttaaggagaagtaatctaatcacaggaaggaaatgcagcaactggtttaacacacaactcctatcacctaatgcatgaagtaagtgagaaagatctaaaataacca

SEQ ID NO: 9228 - DNA, 219 bp, Zea mays
atcttccgaaacagcttgccagagcttatgaagaacgctacttgagagacctaacgagaacttaatgatcaatgggcaaatcatttggaaataaatgttgaagagcttcgtgccttcaaaaaaaagtgctatgataaattcatagagtgtgttaagaagatacaatccaacttcgccagcgttggcgcattctctatcgaaaaaaatttcacaaggggg

SEQ ID NO: 9229 - DNA, 390 bp, Zea mays
agcttgaaccggggacccgcgtcaccggtatatctcaatcgtgctcaccggagttcaagaacccgccggcgcacgtggaccgggtaagcctctgcaccgatttccaattcgttgcgtacatggcctctacatcaccccgtggagctcctcgtgcaccttaattgaactataccgccgtggtttggccggagcaggagccgccgacgacccccgccgcctgtgctcgcggccagggtagctccgaccacctccgacgccgacccgcacaccgacgtgaccgtcgcgacctcccggacgtcactgaccaccccgccggagctctactgccgccggtaagccccaccgcccgaatctatgccgcgggtactgtttaagtcagtcagggagcgc

SEQ ID NO: 9230 - DNA, 419 bp, Zea mays
  unsure (1)..(419): unsure at all n locations
gtgacaattattgtaagcatcagctctagctctttgcattttgctgttcttaaaacngatggcaactgtattgtatgaaatacattacatgcctttcaattgactttctgcttcttctaagttgaggaagaaaagctatacttttttacctcttcattgcttaacatgctagcagaatacaatattcgcacacctcaaataaatgcttccatcattacaactgttacaaaggtaattcttactgcatcatatttttaaacgtcctttccttactctggatcatttactatattgtggcctgagtcatttnttctctgttaatcataaataatgcagtttatgtttataagctcaaaataccattactatgtgttgctaaagtatcattgggtactactccctccattctttttatttgt

SEQ ID NO: 9231 - DNA, 422 bp, Zea mays
  unsure (1)..(422): unsure at all n locations
cctgaagatgcagcttggaaagctcacgggctacaatgaagctattcttaggcttcgatcgagcggacgtgggcgggagtggtttggccacagtgggcgcccttctgcggctctgatgggtcgcggggagatcaccagagctgcgggctggctcgggaaaactaagcgcggtgtggagggggtgacaaggaacgtggccctgtctgagggcgagctntatagccactcgccggcacgacatgggtgtgggcacgggggcagtcgagggcgcgcgtgcgcgcatgctctgggcgccgttccgagtgcctacccacgttgaacacgtggtggtttggctctgctggtgttcataggcctgactggtcgccttacgcgtgatctcagcacaaatccatgtgaagctcttctctgaccatatccta

SEQ ID NO: 9232 - DNA, 217 bp, Zea mays
  unsure (1)..(217): unsure at all n locations
acgcttaaaaacaatgantatttgctaaaattatttattttttatttttagcgcggtgctagatacaaaattaaggggtcgatgaacgaatattaagcaaaaataaatcttgtcttctaccttcgtcaaagcgttcagcaataggagtatataaacacggaactttcgcgaggtcgcaacacacaacaaaatccggccagtagatccgtgatgaact

SEQ ID NO: 9233 - DNA, 437 bp, Zea mays
agcttaaccatggcaagcctacattactttagagccaaccaaatatttttagcgacaagggtgaactaaacaatcaacagcgcactagcagaacttttagacagcaatacagcagtcacttcgtttaatcataacttttcaaatattaacccaaaaatagcaaattaggactttctggaaagatcacaaagggaactacaactttgatattctcacataaacaagattcagcacttatcaaggtcaaaacgtgctaatacaacagcgctgtccagatttggacagattcagacttatgactctaaaaattcatatctgaagattcaggcatccaaacaaagtgatcctagactctctggaaagggaataaaattgtctacatatcacttataaacactctaaggtgattcaatagtccactaaagataaaatacact

SEQ ID NO: 9234 - DNA, 434 bp, Zea mays
  unsure (1)..(434): unsure at all n locations
actaagtcttggcatgattgcaganaaagggaaccgacttaaagatgaatgggccatttcttcctcgatagatgaccatagaattgccaccaaatgcaaagggcatgaatgtaattttgtatgggtcgttctctgtgcctataaatatgtgaacaattctcccgtacggggagagggtgacttggcatgttgctttgcatcacgcctgtactttcgtctacttcaagtcgaatgtacacttgtactttattatcatttctgttcttccgcgataataatgatacacaaataatctaataataatatataattgttgatgtcactctttgtatttcttttatgatttcaccttcctcattgcatgttgaatttatgaaagtttaacccttataacccttctccgaaaatcattatatccctaaggaaattatgct

SEQ ID NO: 9235 - DNA, 372 bp, Zea mays
actaagcactaaaatactgatttcaaacttgggctattattcaaaatctgaaaatttagaattcagcaccactttgagccaccttttctccaagttccaagtagctttaggggtatgacctttaactaaacttgcacaccaacatatggccttcaaacttgctacaacaaccttagtccaaaaccacatggatcaggcaccacaaagctccaaagttgagccagacacactgaaattcagacttgggcaattacaccaagtctgaaatccaaacctgtcatcccctcttttgaccaagtttactcctaatttcatatgacgttagggttaagtaacttacacaagcttgtacacctaaggtagccccacaac

SEQ ID NO: 9236 - DNA, 263 bp, Zea mays
tgactgtattttatatgaagtgtggacatagtgttgcctctattaataggggcacaatgcccatgcgcaaggtggacttttattgttcacgtgaccatgtaacctcgaatcactctgtgtccaaagcttccacacttacatatctccatcattcttcgagtgttccgaacgtataattttaattatatatgcgcaaaagaaaaccgaataatggagctgctcacaacacactatatcgacattttatcgtgcattcctatatg

SEQ ID NO: 9237 - DNA, 430 bp, Zea mays
agcttcagctgaagtgggaaggaccctttctggtattatcttcgtcaagacccgattcttatagattaaaggacatggacgacaacgacattcctagatcttggaatgcggatgagcttcgacggtattatgtataaattgatgtaatctttttcatttttcctatggcacccttttcctttccaaagggggagaaaggtttttaatggggccatagtttgtaatttttccttttttattcagctctacagagcaaaatccccaaaatatgtaaaatataaaatctgagcatgcaccatcgagtgcagagaaaaaagagaacaaggagaagctcgaaagttgtccctaaggggatgcagagcatgacgaagctacaaaaagccgttcctaaaggagcgcagcgtaagttttctgctcaaaagtcgttcct

SEQ ID NO: 9238 - DNA, 432 bp, Zea mays
tatgaagattcttcatcccaacatgggctattcggctgttctctagccaacccatgttagtcttagcaattaagcatgtgtcgagctcagctctatcaaaatctactaagtatagctgaccctctaacacacccttaaatgctattgaatcatcacttcttctaaagacagtgacacctacatcagtaaaaagacagttgtagcccatttgacataattgggaaacagaaagcaagttgtaatctaaagaatcaacaagaaaaacattggaaatagaatggtcaggagatatagcaattttaccaagtcctttgaccaaaccttgatttccatccccgaatgtgatagctcgttggggatcttggtttttctcatatgaagagaacattcttttctccccagtcatatggtttgtgcacccgctgtcgagta

SEQ ID NO: 9239 - DNA, 306 bp, Zea mays
caataataaaagtgatcgatggggtggcgaagaaaggtaatgaatgcacacaacaagggataaagaatgtacgaatatccaacactgcacgcaataagatcctgtgacgttgaagcagcgatgatatgcaagagctagtctttgcgcggatccaacgagataataactaagttggaggttgtgaagcatgggcgtggcttgtccgggagtaaaggcgcctccgcttgtttaatctgcctcgcatcatttaacaaaagcaagcggagatcatggagcatgtgatgtgacgatcgatggagcacatga

SEQ ID NO: 9240 - DNA, 438 bp, Zea mays
taatcttgcacccatgtacattggtccattcctgtttattgtttttgttgaccaatggcgttccgacttcttctccccgaaacattgtctgctgtgcattatgtgttccacgtgtcataattgaagatgtgtcttcgggttcccgatctaatcgtcgaagtgactgatgttgtcctggaaccatgattaacatactcggaacattttattcgagtcttggatcataaggacaggatcacccgaagaaagactttcaagttctacaagatacagtggaaccaacattcggatgatgatgctacctgtgaaacccaagactgtttagataagaatttcccaggcttcctagtctcattgtaatcataaagcctgtattgcctgtggtataaagaagtaacccccacatcacccctgtcttggtccaaaaattaaagaaat

SEQ ID NO: 9241 - DNA, 321 bp, Zea mays
agcttgccaccgctcgtcggagcaactctgttcttctatgaacgtggccagccccctactccccactgtcgaccacacctctgtgaccttgtgaagctccccgaccgaccaactacagctctaccgccaccgacgagtcggattactcgtcgccgacggtactcgccgcctgtgctcctggttcgggcgattctggcaatctccgactgtgacccgaccatagatgtgtctgtcgtgacatccctgacaccaccgtgccctcacccgaagctctactgtcgccggcaagccactccgccgctttctcctctccgggtacta

SEQ ID NO: 9242 - DNA, 411 bp, Zea mays
  unsure (1)..(411): unsure at all n locations
tcggattagagtgaagactctaacatttcattattacctcggtatctagaaacatggcattgaaaacatttatgaatgcaaccaaacatattatgggctgaaatactatgatattattaaaaaccatgatatcggctaaaaaatgtaaaaatactctgatttcaagttgccctcatgaaatgcaattgtgttgagacatggatatgcttcgccatattagctcaattgatgcatggattgaaaactaatngaatctcacgtttgattctgctttgtagcatggattgaaaactagctgaatctcagggcttgattctgctctgaaatatggtacgctatgtgtattttaatcatggtgggagctatcttatgggggaatttgttaatcgaatgatatgatacgattcataa

SEQ ID NO: 9243 - DNA, 433 bp, Zea mays
agcttcaatccttcggttcgtgtctaattatttctcaagcttcgggtctcttgctctacaactcttgtcaatatggccagaaataacctgagaatcggttttaagaaccgcccttctaatccccattgcttttaacttccgaaagcccaaaagcaaagcttcgtactcagcaatattatttatgtagctaaaatcaagtcttgctgcgtagcaagttctaactttggagggtgcaactaacacagcatctgctcctgccccaaaggttccccaagaaccgtcacaataccgtccatacttcggtatctttagttgcttcttctccttgagcccctggcgtccaatcggcaatgaagtctgctaacgcgtgggactgtattgaggatctgtgcacataatcaatgctgaactcattgagctccgcagcccactt

SEQ ID NO: 9244 - DNA, 427 bp, Zea mays
  unsure (1)..(427): unsure at all n locations
tcgagtntagttctgatatttntgcttcttcttccgtcagttagccttcggctgcctggagctcaaagttctttttctcaaaagcatctgattgctcctttattttgttctctaaattttcaattatagcttcgtgcttcttatcttctagatcttgctgcatcctcaaagctttgcttagaagcatgctctacaaataaacaaccttcgttaaagaatattgccattattaaaaaacaatagaagttagggagaaggatgtttaccttgaaatttgaataaaataagctgccgacgatatgttgtcgtcggtagcggctgatgtctgtctctatcttcggaaaaccgatactctttgatagagtaccgatgaccttatctccagctgagtcccggatgcagcccagttgttcgtcatcaatgcccc

SEQ ID NO: 9245 - DNA, 432 bp, Zea mays
agcttcagatcgtccgtgtctggatggctggaccgccgcgatgcgcagaatgggttcttgcgcctgtctccctgtctgtgtttgcaccccggtgccagagactgtgatggtcacctactcaccttcagggtctcccctccatcaggagtcttctcggccaccactttcctgcaaaaaaaattatgattcccaccggccactcttgcattgccgatgactatctctttgcctttgccttcatcggctgtgtttggccgagtcaggactttcttgccctcaaagtcgatcatgttcatcggaaagggctccgtgtccacctacatttcctgaaatttcaatcgtctttcgttaatggccgattgaatctgttgacagaatacattacaatcattagtggcatgagaaaatgagttatgccacttgcagtatgca

SEQ ID NO: 9246 - DNA, 340 bp, Zea mays
gtttaccaaatccaaacttcgacttgtgaataccccttggccacgagtctagctttgttcctagtgacaacaccatgctcgtcttgcttgttgcagaagacccacttggttcctacaacattttggttacgacgtggaactaagtgccatacctcgttccttgtgaaactgttgagctcctcttgcatcgacatcacccaatccacatctgggagtgcttactctaccctgtgtggctgaatagacgaaacataagagtaatgctgacaaaaatgtgcaacacgagatcgagtggttaccccattatgaatgtcgccgatgatggcgcctacggggtgat

SEQ ID NO: 9247 - DNA, 427 bp, Zea mays
tcgtgcatattctccgaagctattttataagttttgtgttgcttctctaatgaagctgtacttcgtgtctatttatcttgtgccttatcacgattttctcttttccgaaatattctccgaagatcaacactgtatcttttttccaaaaggctttgtgttcctcatgcagtatgttgtatgatgctgatgttatgcgaaatgacgtgatgatgctatgctatgcaaaatgatatttgtgccacagatacatattcctgttataaagcacacacactttttatatcaacgctgacttttcgctgtttagcctcccttatgagcttcttcgcctttaacttttagcggaatcagcgtttatatctcgctgtaagcctcccttaggagcttcttcgccttttactttcagtggaatcagcgtcatttttcg

SEQ ID NO: 9248 - DNA, 448 bp, Zea mays
  unsure (1)..(448): unsure at all n locations
gctgcagcttacggttgatctctcaaaccttattgcttcatcaaagggcggnttatccaagataacttcatgctggtgcagcagacttccagattccttcatcgccagaagaaggctagtttacttctcaaattggacatcaccaaggcattcgattccgtctcgtggccttttcttattgaggtcctggcgtagcttggttttggacagctttggagggatattatctgtagactgttggcctcttcgtctactcaggtccttcttaatggtttttcgggaggaagagtattcacagaagaggacttcggcaaggcgccctctttccccgatgctatttatcttggtaatggacatcttggccctgctctttactatggccgaggaagcangtttattgcagcgcctgtcgggcagggttaatctccaccggatctctatgtatgct

SEQ ID NO: 9249 - DNA, 443 bp, Zea mays
  unsure (1)..(443): unsure at all n locations
tngattctcttaactctggtgtgctgatgtgacctgtttcatgatttatttggagtcgatccagctgctgctgggttacagactacttcatatggaaagcctaaaatccttgatgtacttgattggtactattgacccttccaaaatttggatgattatatgttctttcctggcaacttctttgaatgatgtgtccatcgattcaagtacatgtatgctcttaaatgcagcactggtagtggtgatgttgacacgtccaaagtggtgaaagctgatgctgatggtgctattgttggtgcttcaggttggtgagatggtgtttaacttccatcccatttcttgttcttctcaaatgaatggtagtttttaatgctcaacatttttgtgaaataataaaaatatatggagtgtataccttttttacttgcaatggatttatgaat

SEQ ID NO: 9250 - DNA, 409 bp, Zea mays
  unsure (1)..(409): unsure at all n locations
agcttctaaagggagaacacgtgaaggttcttctaatgtttcattcgaaaaagatagaccttgtgcagctcgtcaagcagggaaacaggtgggaggctctcatcacaccaaaaatgtgatgacaacatcaagacncttggagatgctgcatatggaccttcttggacccgtcgcctatctgagcataggaggaagtaagtatggtttacctattgctgatgacttttcccgctccacttgggtgttctttttgcaggaaaagtccgaaacccaagggactctcaaacgcttcctcaagagagctcacaatgagtttgagctcaaagtgaagaagataagaagcgaccacggatccgagttcaagaaccttcaagtggaggagttccttgaagaggaaaggatcaagcac

SEQ ID NO: 9251 - DNA, 417 bp, Zea mays
  unsure (1)..(417): unsure at all n locations
tctatagggagaacacattttgggacttacaaaaggtattttgttttttaagggnnnggagcgcatgtcaagcaggaaagcaagttggtgttcatcatccacacaagaacatcatgacgactgacatgccactcgagcttcttcacatggacctattcggcgcgatcgcttacatatgcatcaaccggagttaatattgtctacttattgtggatgattattctcgcttcacttgggtattctttntgcaagataaatctcaaacccaatagaccttaaagggattctcgagacgggctcaaaatgaattccgcttaaggatcaaaaagattagaagcgacaacgggaccgagttcaagaactcataaatagaaagctttcttgaggacgatggcatcaagcatgaattctcttctt

SEQ ID NO: 9252 - DNA, 106 bp, Zea mays
cctctagccttcaatccttgtaaacactacaaactcacattcttttatctctttttcttactccccgaagcctatggtcttatgtgacgacatctcataacataac

SEQ ID NO: 9253 - DNA, 342 bp, Zea mays
  unsure (1)..(342): unsure at all n locations
tactcagcttataacaacttcatctacaatagcttcggccatatttgttttttttattgtcttctctgcctctgggtcggccagtgggtcaaatggctctgggggaggagatagttcatctacagtagaagacataacttattacgaagtttcaaaaattaacaacaaagtctaaagtcatttagtaatacctatccgtcttttaaagttcgcatctttttcaaccgcttntgttgcctctcgagcgtcatgaatatatttctcgctctttttcattaattcatgggccattcattggccaccattttcccaaatatcactaaaaaaatacgcctattgaac

SEQ ID NO: 9254 - DNA, 304 bp, Zea mays
ctactgacattgtcaattgatctgcatccaggatcgcttgcttcctgaacatttgtagctcatcacttaaattggacacaactttcagcccaagttggttgtaatcatcttcagttcgcatattattaccgtcagtatcttttgcagcccttgtagcacggataccttcagaacgaataatttcttcaaccacaaaatgcagaagtgttgtcttcccatcagttcctttgacatcagataacttaaagagcgtgtcaagtttaaaagcctgagctcctccacggaatgtgccaacattcattct

SEQ ID NO: 9255 - DNA, 235 bp, Zea mays
  unsure (1)..(235): unsure at all n locations
agcttgctggcgccgttcgcggncagccttcggtacttctccgcggtgttcgactcgctgcacgagccgcctcccgccgacagcgccgagaggctcgcgatcgagagggaccacctcggcgcggagatcagcgacgccgtggcctctttagcagactacagcagcagcagctacggcggcgatgatgagccgagcagcagtgccactgccggctgcagctggaggcagatgatgg

SEQ ID NO: 9256 - DNA, 306 bp, Zea mays
aatccggggggggggggttggatttttttttattttaatttttttttttctgttttatttgtccttttttaatttcttttttttataataatttgtattttaattttttttttttttttttaattttacaatttaatttaatttttttttttatattaattgtattctttgtttttttttaatttttttataattttttattttacttttgtttttctatataattattattttatattttttttatttatatactttttttttttaatttctttatgtatacgtatatttatttatttttctttt

SEQ ID NO: 9257 - DNA, 366 bp, Zea mays
atcgctttgagaggtctaatgagacaattattagacattttgaggaagcgttacatagcgtttataatatgtctgctgatatcattaaaccaaaagatccaagatttttcactatgcacccgatttcaaagctcccaattttcactgcattttgataaatgtattggagctataaatgggacacatgtgcttgttgttttcccgtcatcaaatgcgctgcaacattcagtgcatcatgggtatacaactaaaagggaaatgggcccttaggcccattctatattgtttcggtgattaacttgccacatattacattaagactaacatcatcttacatgaaaaatgagcataggcatgtaaagcaaa

SEQ ID NO: 9258 - DNA, 428 bp, Zea mays
agcttgagaaaatatttccttctttctttgatgtgatgctgcacttggctattcatttacctgacgaggcaatcctaagaggaccagtgcaatatgggtggatgtatccaattgaaagaaggttgtatacattgaaacgttttgtaagaaatatggctagacctgaaggatccattgcagaagcatatgttgctaatgagtgcttgacagcttgctcgaggtacttcgatgatgttgacacacgacacaatcgagagggtaggaacaaagagcgtgttgatttgagcagaggcaaattttatgtttttcagcatggagttgaacttcttggagtgccaagaattacatacctctaagattattatgataagatggtttggtatgtcctaaacaattgttcggaggtcgagccatatataaagtatgca

SEQ ID NO: 9259 - DNA, 441 bp, Zea mays
  unsure (1)..(441): unsure at all n locations
tctaaaaggagagcacattntaggattaacaaatgtttattttgaaaaagacagtatttgtagcgcatgtcaagccggaaagcaagttggtgctcaccatccacataagaacatcatgacgactgacaggccactggagctcctacacatggacctattcggcccgatagcttacataagcatcggcgggagtaagtactgtctagttattgtcgatgattattctcgcttcacttgggtgttctttttgcaggaaaaatctcatacccaagaaactttaaagggattcttgagacgggctcaaaacgagttcggcttaaggatcaagaaaattagaagcgacaacggaatggagttgaaaaactcacaaatcgaaggcttccttgaggaggaaggcatcaagcatgacttctattctccctacacgccacaacataatgg

SEQ ID NO: 9260 - DNA, 419 bp, Zea mays
  unsure (1)..(419): unsure at all n locations
agcttggctgtgtacatccaagactcatcccagtctggcacaccggactgtccggtggtgcaccggacagtgtccggtgcgccaggctgactcggcgtgaagaagccgctctcgggaattcgccgacggcgtacggctataattcaccggactgtccggtgagccaacggtcggccgcgcgatctgcgcggtgcacgtggccgagccaacggtcggaagggggcaccggactgtccggtgtgcaccggacatgtccggtgcgccagcggctcccagatctgcaacggtcggctgcgctgtttaaggaaagaaatcgggcaccggacagtgtccggtggtgcaccgactgtacggtgcacccgacgacagaaggcaagaatggccttncagatttgctctcaacggctcctagctgcctt

SEQ ID NO: 9261 - DNA, 436 bp, Zea mays
tcttcatgccaactgtatctgcaaagtttatctccccttgtggattgtcaaccctattgttgtcccaaaggccataggcaagatgcaaatgtgcataaactacattgacttcgatgaggcatgtcccaaagatccataccccatccccgaatagacaaaatagtagaatttacttctagttgtgaacttgtaactttcttatatgtgtatttaggtttgcactagattagaatagcaaaggaatatgaggagaaaacattttttataactcttttatggttgtactactatgtgaatatggcatacggatttaaatatgccttatcaagtttttttagaaccacacatgcaaccttagaggaacacacaggtaaaattattgaggtttatgtagatgatattgttgtttaaacctggaaaaatggctcactcttgg

SEQ ID NO: 9262 - DNA, 331 bp, Zea mays
acaaacccaaatcgacatccacgccgaggtacccattgcttggcgcgcgcagtgacgggaagagttacgattcatggcgtcgaactccgtgattgtcccaatgggcatgggagccgagcctttctttacgcacggcaatagaggcgccactagaggaagagatccaccgccgaccggctacggtgagcctctgcctcgatagaacatgcacggaggtggatgaggcgggtctacgatgcaagatgtcgctgccatcgctctcggccggcctacgaataggtaatcaagggtttataatcgatcatagcctcacaaatctacgatagtacag

SEQ ID NO: 9263 - DNA, 365 bp, Zea mays
ttagcgtgaaatgagagagacaagttgagttcttttgttctcttgcgcctggatcgcttcgttctgccagtctttattgcgatcgtttcatttgcaagcaaagtgtgataaacccattgtgacgcgggccttgtcggaatattgactcccaattgacttgagaacaaataatcactcggtgcaagggaccgtgttgaataaggaaagggttgaaagacacccggtctttgtgaccacctctacggggaataggtttgtcacaacggaacctcggtcaatcaactctcgagagtctcaatcttttttcgcctgcgaagtgatattcactctttctctctccggactccatttatttatctctctat

SEQ ID NO: 9264 - DNA, 374 bp, Zea mays
agcttcagtcttagcgttagtctcggtcttatgttagtttagatagacagggtagtttgctatatcctgtgcatctatgtttgtcatgatgaactatgtttggtttggatctttgtaatgattgtcaccagagtgtgggtatcccctgcattttggtttacatactatgtcaataaagttagttatatagttgggaaacccattattctcctttcctctttatctgagaagctgtgtggtctgtgttggagatcagtgaagatgctcatctgttcagtgctgttggagaattctatactcttttcttatgctgcaagctctgccagatcagttctgatgtgtggttgcgttctgcagatgtcagagaacaggcg

SEQ ID NO: 9265 - DNA, 427 bp, Zea mays
tgaggaaggcctttcggccatgtcgaatgatgatctttctgttagccttgcgtacaacaatataaaggtactttaaagttggaaatgaagtatttcattgttatgcttaattctttctttttcttttagggcttaattcttagcaatgccttgagggcacaaaagagcgccgaagacgaatgctgcacaatagctctcatcaaccttcgctcagaggtaattgagctgagaaacgaaggtttggagaaagacaaaattttaatttcattggtgagtaaaatgaaagaggatgaagctaaatacaatgctcaggccgaagcccaaaaagcgaggttgaagacctttggaaacaactgaccgaagccaaagaaaatagtgaagttgcaaaggccagccaagaaataagtgaatggtggaaggccagact

SEQ ID NO: 9266 - DNA, 435 bp, Zea mays
  unsure (1)..(435): unsure at all n locations
agcttgtgataccaatcacatgtttattgttgaatgatactaaatttatttggtcttcaaagcgtaatgaagcctttgaaaaattgaaggtattattaaccactcctccggtattggctcaaccggatattgaaaagccctttgatgtgtattgtgacgcatcaagcagtggtctcgtctgtgttttaatgcaagaaggccgagtaatagcttatgcttcaaggcagttgcgctggcatgaggaacactatcccactcatgatctggagttagctgcggtggttcatgccctaaaaatctggcgtcattatctactanggaatgtctgtcacatctatacagatcataaaagcttgaagtatatcttcacccagtcagaattgaacatgagacagaggcgatggctcgagcttattaaggactatgaattggaaa

SEQ ID NO: 9267 - DNA, 435 bp, Zea mays
  unsure (1)..(435): unsure at all n locations
ntgtaatcgatgcacatcctcttcgtgccattcttcttctccacanataacactgggactacccaaggtgaggtacttggtctgatgtaacactttctctaacaactcatcaatctgcttcttgagttctaccaactctggtccggacactcgataagctctcttggaaataggggcggtgcctgggataatctctatggaaaattcaactttcctttcaggtggcatgcctggtaacccttcanggaatacatcanggaattctgacacaatcctaattgcctcaatcagattggactccttgtcatctactgataaatggtgacaagctccttcttctagttcaggtaagtacaacttggttactacttccttttcggatggngacaccaacttaactgttctcttatcacaactcacagtggcttgatttct

SEQ ID NO: 9268 - DNA, 411 bp, Zea mays
  unsure (1)..(411): unsure at all n locations
ttaaagttaatcttcacctaaaaggtattatnttgtattgttcaatgcaaagtctggaacaaattgtttcattcggtatgtgaccaattatatttcctttcaagtggcattctttcaattggtaataatctattttatggaaagaaatgccattatgaaggttaaattccttttggcttaaatgtgtagattggtgcatattattaattcactcatccatgtgcattaatttaaaaggaatttaatttatgcctctatgcctcataaatgatgatttgtttgccattcatatatagatatcatcattccttatatacttccttgtactactaatgcctcttttcaaagtgttttattcgactagttttaaatggataagagatatcatagaacgaagtctccacacatgat

SEQ ID NO: 9269 - DNA, 435 bp, Zea mays
  unsure (1)..(435): unsure at all n locations
ctccatctatattatggattgccttggaatcagtccagcttccttcggcccttctggcagcttcctgactcccatgaataacaataggccctcggtccgaaggtatcttcatgcagagataagctgggtgaagaattgcttcaaaagcatttanggtaccacgaccaatgatggcgttgtangggtattccatgtcaacaatatcaaacacaatttgctcagtccttgtgttattaacaaatccgaaggttaccggcatggtaatcttcccgagtgccacaatctgccgccctccgaagccacaaagagggtgcgtagcatcatgaatcttgtcttcaggctcttgcatctgtctgaaggctntggcaaatataatgtcagctgcacttgctgtgtcaactatgacattgtgaaccagaaaccctttgatcacac

SEQ ID NO: 9270 - DNA, 442 bp, Zea mays
  unsure (1)..(442): unsure at all n locations
ctgtgatttatccaatttaagcacaatctctttaacatttattttctatggattagctcaacacaagagatgtcattagtagcacaagcactagtttcttatttatcaaccctttatatgtagaagacaaatgagttgctaaaatagagaaacctcataatatggactaaatttccttgaaccctcatgcacaatatattntgaatgacattgataatatgcatggttattcaatgaagtctaaagggatggcttaatccatattatggtaagtgtccaataaagaagaatcaaatccaaattaactagatagagaatacatcacataattttggattgttgaccatatgataatattcattcatcttccaatttgacctttatttcataatcaacaactgatgtatatcctcaagtgctgcttttcccttagtggctacac

SEQ ID NO: 9271 - DNA, 416 bp, Zea mays
  unsure (1)..(416): unsure at all n locations
catgcaagcttatgaagattcttcatcccaacattgtctagtcgatgatgccagagccaacccatgttaatgttagcaattaagcatgtgtcgagttcagctctatcaaaatccactaagtatagctgaccctctaacacacccttaaatgctattgaatcatcacttcttctaaagacagtgacacctatatcagtaaaaagacagttgtagcccatttgacataattgggaaacagaaagcaagttgtaatctaatgaatcaacaagaaaaacattggaaatggaatggtcaggtgaaatagcaattttacccaaacctttgaccaacccttgatttccatccccgaatgtgatagctcgttggggatctttgttnttctcatatgaagagaacatcttcttctcccctgtcat

SEQ ID NO: 9272 - DNA, 328 bp, Zea mays
  unsure (1)..(328): unsure at all n locations
taatgcccccaagaaattgtccaactttgttaagggctttgttcctttggttcaagataacgagggttacattttataccctgctggttatcccgagcacaaaattaagagaattcactctatgaaatctcactctggctctcatcatgcttttatgtataaaagtgaagcatctagttataagcaatccactcatgctatattgcctaagaagaaaactcctattgcatcaaatgaacctaatatttcatttaagacttttgatgcatcttatgttttaacttacaaatcangcaaaatagttgccaaatatgttgggggcaaacac

SEQ ID NO: 9273 - DNA, 276 bp, Zea mays
cctgcggcatgcaagcttcgtaaaaacatgcttcaaagctattctctataaatctatgttgttgctccctgcgagttggcatgatttgcccctttttcaaagcgttttcccgaagattgatatcatatttctttcttatgccacatgcagcatgatgtatgatgcttatgttatgccaagatgatgtgatgacgttatgctatgtaaggtgatattccgaacgtacacgcatatctgggcgataaaatacatacttttcttgcgaaccagcgttac

SEQ ID NO: 9274 - DNA, 433 bp, Zea mays
cttggatgtgcatcgactacaccagccttaataaggcttgttccattgtcctcgtcccacttccacgcatagatcagatcgtggattctacctccgggtgcgacctctagtcctccttagatgcttactctagtttccatcagatccagatgtctatggaagataggaagcataccgcttttgtaatagtggatgggctttactgctatgttgtaatgccctacggtctgaataacgtcttaccaacatttgtttgggcgatgagtaagacctttggggacctgattagggacatgatagagatatacgtcgatgacatcatggtcaagactaagagagggtcgactctagtggaagacttgaccctggtctttgacaagctgcgggcaacacgcacgaagctgaacccggagaaatgcgtctttggtgtctc

SEQ ID NO: 9275 - DNA, 440 bp, Zea mays
tgcagcttctaagggagaacacgtgatatgtttaactaacgttgctattcaaaaagatagaccttgtgcagcttgtcaagcaggtaaacaagtgggaggagcacatcacagcaagaatgtgatgaccacttcaagacctctggagctgctgcatatggacctcttcggacccgtcgcctatctaagcatatgaggaagtaagtatggtctagtaatcgttgatgacttttcccgcttcacttgggtgttctttttgcaggataagtctgaaacccaaggaaccctcaagcgcttcctcaggagagctcaaaatgagtttgatctctaggtgaggaagataacgagcgacaacgggtccgaattcaagaatcttcaagtggaggagtttcttgaagaggagggaatcaagcacgagttctccgctccctacacacctcagc

SEQ ID NO: 9276 - DNA, 382 bp, Zea mays
aactaagcttctaagggagagcatattgtatgactaaccaatgttcattttgtgttttacagggtttgtagcgcatgccaagcatgaaagcaagttggtgcccatcatccacacaaaaacatcatgacgaccgacaggccgcttgagctactccacatggatctattcggcccgattgcttacataagcatcggcgggagtaagtattgtcttgtaatagtggatgattattctcgcttcacttgggtattctttttgcaggaaaaatctcaaacccaagaaaccttaaagggattcttgagacgggctcaaaatgagttccgcttaacgatcaagaaaattagaagcgacaacgggacggagttcaagaactcacaaattg

SEQ ID NO: 9277 - DNA, 460 bp, Zea mays
atctctcagtcacccgaagcatcaagcttctaagggaaaccgtgaaggtctaccatgttcatttcaaaagaagaccttgtgcactggcaagcatggaaacaggtgggaggagcgcatcacagccagaatgtgatgaccacttcaagacccctggagctgctgcatatggacctcttcggacccgtcgcctatctaagcatatggggaagtaagtatggtttagttattgttgatgacttttcccgcttcacttgggtgttctttttgcaggataagtctgaaacccaagggaccctcaagcgctttctcaagagggcgtaaaatgagtttgagctcaaagtgaagaagataaggagcgacaacgggtccgaattcaagaaccttcaagtggaggagtttcttgaagaagaatggatcaagctcgagttctccgctccctacacaccacagcaaaatggtg

SEQ ID NO: 9278 - DNA, 436 bp, Zea mays
actaagctataccaagatagtaggaagtgcgaataaagactattagacgtattgtttgatacaatacagaacagagcacacagacgcaaggatttatcccgaggttcggccaagcctgaaatgcttgcctagtcctcgttggagttatccacacctgggcttggagtctatttcaactacttcctccgattgctcagatctgtcagtatgacagatagagcctttcactattgagtggggttacaacagaaccgctgctgcttacaaacttcttggcagcaccccggcagagtaacgatacgctcaagatcttgctctagctcttagcaacacttctcctctctctaaaggcttatagtaatgccttctacacaaactatagagttacacacaagaaggagagtgagaattgatttgagtgaagtctacacttgtt

SEQ ID NO: 9279 - DNA, 458 bp, Zea mays
  unsure (1)..(458): unsure at all n locations
ggatctctaagtcacctgcagctgcagctttanaagcatttttctatgtctcctatgggagcaacccggctcaatcgcaacgctgacgacatcggaaagttgtaaaacacggtactacaacgaggaaagagaggagatcgagcggatacttgggagtcagagatcgagcatggagatggaggtggcattgcccgcgacgtctccaagcacgacaatgtcgacctccatcatgcgacgtagccacatccggtgaagaatgttgagctcgatggaggcgacgttggccacgggctcagagctaggacagggtgatgacggacacacgatgctcgtctgggatggggcaagaatagagcatacactaatcatggaggggtgccgctagccatgggcgcagatcaaggaatggtcgacgtcggccttgtgcggatgaggacatgcgtgaacactggggctgc

SEQ ID NO: 9280 - DNA, 435 bp, Zea mays
ttgatgtgtatatatgtatgctaagattttctttttttttctgtaccagcgactatatggcagaataaaatatatattgctctgtcatgcatcaagatatacttgcttgtaatttacatctacgtatgttgttatagttgatcaagattagataaggtctagtattaacataacatgattttttgatattttgaaaagtagcatatacatgcggcgggttcacaaaaccactaatgtaaattaatttacaccttcggttctcttaacaaaacggtcggttttatccaatttatatgggtgatttagttaatacaaccgctattgtaaatttcgttatattagaagttccaaagaagatgctcgtgaagatagccattttctatggcctttctactagcataaacacaaacaccagtggaaacatgtttatgacat

SEQ ID NO: 9281 - DNA, 415 bp, Zea mays
  unsure (1)..(415): unsure at all n locations
atccttgagtcacctgcagcatgcaagcttnccgtgcggcatcccagacagtcattcgatcagagggttggcggatagggaaacaaatgccactaaagaaattgacctanagaatagggcggggagttccaggaagttgtcttcctccacgattagaaagtcgcttgccacctcacctgaaaaggccaagacggaatccgctgtcgacatagcaagggacgtattcggaatggcccaaaattcagagcctacactcgcttcatcatccttgtcctcatctatcgagtcagacttggcaccacgatccctacgcatatgacgctcggtcctcctccgtttcttcgacaccctatctttcttgtccttctgatgctgctctgcccgcgcgcgagcagcctctttcttcactatgctc

SEQ ID NO: 9282 - DNA, 426 bp, Zea mays
tgacactttaatactaagcttgggacccgtgcctataactgaaatgtcccctttttgtagctgttcacgatgtgttccatgtatctcagctgcggaaatgtgttcagacacccactgaagtgctaccgaaactggacattgagataaaaccagacttgtcttaccaagagtaccccgtcaaggtattggaccagaaggagagatcaacttgggcaagatcagttaaaatgtataaggttcagtggagtcaccattcagtagaagaagctacatgggagactgagggatttctacgctctcgcttccccgactttctacccaaaggagtcggtatgtaaccccgaaaccccacccccacctgccctttgaattcaattataagaaaaaactaaataacaaggatagtctaagttgtggatttaactt

SEQ ID NO: 9283 - DNA, 314 bp, Zea mays
atagtgagtaccctaatcatatttattaactcctaaacgcgctgtatgggctcaagcaagccccaagagcatggtatgaatgcctaagagattctcttatcactaatggcttcaaagtcggcaaagccgatcctactctctttactacaaccattgcacatgatttgtttgtgtgccaaatttatgttgatgatatcatatttgggtctactaacaaatctacttgtgaagagtctagtaagataatgattcacaaattcgagatgtctatgatgggggagtggagtatttctacgatttcaagtaagcaactc

SEQ ID NO: 9284 - DNA, 434 bp, Zea mays
  unsure (1)..(434): unsure at all n locations
ntagaccaccatgacacaaccatgtaacctcttattattgttatggnataatncaaacattccaagagacatgcatggtttgtttacttctaatttctcattaactcagtgatattttagcatcatatgaaactatctaatctggggctcaaattttgatgaggcataggtaatgacaaattatgaataatgtataaatttcacatgctcagattttatatggtatctactacaaaaataacaatttgttaatgcaataaagcatgtgagagcaagttaattctaaaactaattattttctgtgaatacatgaccatattaagttttattagaccactaaaacatcatgcatagacagtggaacaccatttttcatttttacatctatatattatttataaaccatttaaaactacttaatatgcattaaacaa

SEQ ID NO: 9285 - DNA, 402 bp, Zea mays
  unsure (1)..(402): unsure at all n locations
agcttcgtatttctgcatctatgttatcttaatctatacactttgattattcatgattccgtctgatgaatgaactattcgactaaactctgtcgattactgatgaaggtggtgggataagatacattttgtgtttgcacttccaaccaagaaagaaatcaccgtatgcatcagtctaaatcttgttcccatcgcttntattggcagtgatgcacctttaatttccaacgcttattgctgctattatgctcataaaaatgtttctgtgctggtgctattttgcaaataacaagggtggcaatattccattaagtgtcatggggattcgctagacaaattctaatagcatatttgaactcgttctataatatatatgtgctgggtgtgttctatcgataaaat

SEQ ID NO: 9286 - DNA, 430 bp, Zea mays
  unsure (1)..(430): unsure at all n locations
tccgaagctagtggcacacatgcatgcatgcatgcccttctttacatgccttaacttccgatccatntgcacatccatgctccgatcgatccgtcccctccccggcaacgaatgaacgaatcgaacaagcatgcatggacgatcatcgcgcctccttcttttgttttggtttggaaacaacagctagctagctagtagctgtttcgtatcgcgagacatacatgcatgtattccatatttggcaaattccactcgatacttgtattgtactgcacacacgtacacgtacgcgagaccctcttgttctttggggcgacgtaagggtgctacttttttccttctggtttattttcaatatatatatagacacacacgtattaagtttcattttttaagtacacgacggcactatttgtcatctatggtccat

SEQ ID NO: 9287 - DNA, 401 bp, Zea mays
  unsure (1)..(401): unsure at all n locations
cctacagcaatattactgctcctagcggcccattcaatcagctaatgaccacaattgacctattaaatatttgtagctgtttattataacccttcgatgctgcaatcttcaacaaagctgctctcaatgaatatgtgatgccttgttttatatagtctctaactatcggtaactntttaagtatctgtttctgctgcatttgaaggacaactctaggactgcaatggcgcttcaatataaccaaagatttagataaaacaggtgaggttatatggtttctttattacttttttctaaaaaaagtttgccacctacatcagtggttttattgaacgagttgaaactaatgttntccttacctctntatacataaacattntattanctccgcgatcattcta

SEQ ID NO: 9288 - DNA, 431 bp, Zea mays
tatgtggggatcgcctgcaatcggggtcgtctcgggtgtgctgaattcctcatcggagttcaatcatagccaccgtccgcactctaccgtggccagggtgcccttctcggcgagcgccggtgataaccgtaccctcaaactcgctatgatccaagcatcgtttagcactttttcacttatagtttggagctcggtgacgtagtatcgacctgcgccggccatggcgccgccgggacgcggtggccgccgctgtggctatgcgtcgtataatgtgatgacggcgcgccgttgacctggcgatgtccggttcagatttgaagttgggttctatttcggtctaagtcacggttaccgtccgattggaatcgatcgggtgtgggcgatcctacgataattaaatctggagcgtcgggtgaagatcggacgatgcc

SEQ ID NO: 9289 - DNA, 406 bp, Zea mays
agcttcggtaaccccatacttctatatcttctccgacagacggataattctttattgtctgggaggcagtataagaaatcctcttcgtcagtcccattgaacactagtgcccccttcggatatttcaattctttggcatagtgattagcttcaaaaacttcttcttccgataactttttccccgaagcatgactcacaatataatcgtatattttggaagttgcttcggggacagcagtatcaatttcttcgaccaaagtaggctctgacattttcatttcttcagttgcccttgcaatttttgcttcttctgcttccaaaggtattaccttggttggttctgaaggcccagttccaacttcagtctgttgcttccgagcctcagcaacggatacttcagcaagcg

SEQ ID NO: 9290 - DNA, 385 bp, Zea mays
gcacccaagttttgttgatgaagcaccagaagactaatcaaaaaagaaatccatgtggaagttcgcaagaagaaggtttgcgggttggcatcgatgcttcttcaataagctagctgccaagcgaaagctaaagcctgaagatgatctttgagtagccagaatcagtgtttgcaatcggcaaccagatgctccgcaaaggctagattttgttgaagttccatctcctcgaagagtctgcaaagtgaagatatgtagctgaagtaaagctatacccataacccttctaaaccgaatctcgaggacgagattcctttaagtggggtagatttgtagcatcccaaaaattcaaatcttggaatcttctcagactcgctctatattcaaa

SEQ ID NO: 9291 - DNA, 394 bp, Zea mays
agcttgccgaaagtggtcaattgagttctctggaagtgggcgccaatgttggtcacttgttctcaaaagctatgaatcaagaacaagacaacacaaatcttaatggttaaagaccttcacccttcgaagcattatctcccttacgatataatgatcttttgacgaaagtcatgaaagacataccttcatcatttcgatatgtaagtataaatagaaacatatgaagcacagaaagagtaaaagtcaacatattgaatcatcaaattattcatattaacattatataataatgaacaaacattgataatatcaagttacatctgtaccttcggcttggcagaaggtaaaaattcgagaatgacatgcgagtgattacaagtcaacgtgaacagta

SEQ ID NO: 9292 - DNA, 367 bp, Zea mays
aatcgatctgtgatagccggcatcatgaccgatagcatctgttcagggcatgaatgtaatttctcacacgctgcgtctcgtgcctataaatagatgaacagtacccctatactgttcacgctgactggtatgtacttgtaggtcacacttgaattcccaccttctatcatgccgaaggtttaaatgaaatcaatattatccatgtttagtcatgattatataataaaaatgtctgaatgatatcatatgattattcatgtctttttatgtgccatatgatcctgccttctattgtgtattgagatcatgaaggtacagtcttcatgaccttcgtctgaatatcattgtatcctaatggaaactatgc

SEQ ID NO: 9293 - DNA, 453 bp, Zea mays
  unsure (1)..(453): unsure at all n locations
catgcaagcttnctctgctcccnccgtcgcgtctttatctacgcattttcagtgttgctcgactcgatcccgaccctcggatccccctccggtcgtgtagctagggttcgtcctaccctgtttattcagtacacggccgcctgatctgcacttcattcagtaaatgaaaaagggtatggatggaagtagtacctaattgtatctccaatgttgcctgcagatttccttatcaactcggggtcttcgtcttcggttccaatttccagtgcaaccaaggtactctcatatacaatttgttgcgcagtgtactgtcaacatgggctcaacccattacagtttaaggtttactaaggatggcattgctctgttgcatcagtattatttgttcagggattagtactttgttttttgtcacaacctgtctgatcagagttcagttcatactctgttcat

SEQ ID NO: 9294 - DNA, 131 bp, Zea mays
actaagcttctaagggagaacacgtgatagggttgactaacgttctatttgttttatatagaccttgtgcagcttgtcaagcaggttaacaggtgggaggagctcatcacagcaagaatgtgatgaccact

SEQ ID NO: 9295 - DNA, 420 bp, Zea mays
  unsure (1)..(420): unsure at all n locations
atgaagcttaggaaaccaaactcttgatttattccgatattcttctcttcgnggatctccgggcagcctaacctttcatcgtcaacaccgccgaagagtagtgctcctcggtgatacccgcaggatatggcgtattctctcaactcttctttctcagccttcgtcaattcttgcccaattaagttttgaaagataaaaatttcttcttctaaagcagattcggctatttctttctccttctcagacactgtagccgtggtttcttcggcggctgcagcaacttcttctgcggccatgtccagaagtatcttatcaatgttagaaagcgtgcttcctagatttgcatcttcggtcggttcagcttcggcagttgcagcttcagtaggtgcagcttctgtagctgtagtgttctcaacagct

SEQ ID NO: 9296 - DNA, 431 bp, Zea mays
tgacattgtctccctgttggaagccaatgccatcctttatgcagtttcgtcttccattatagagcatgcttctagcaaatttaaatttttcattctctatctcatgctcattaattttagcagttagttgagctatgtgatcattttggtctttaattaaagctaagtgatcatgaatagcatcaacattaatatctctacatctagtacaaatagaaacatgatcaatactagatgtagaaggtttgcaagattttaattcatcaatcttagcatgcaaaatgcgttttcatttctaagattggaaatagagatattgcaaacatttaaatctttagccttagaaattaatttggtattttcaattgtaaggctagaaagtgattcattcaatttgtcaatcttagcaatttaactagcattatcatttt

SEQ ID NO: 9297 - DNA, 322 bp, Zea mays
cacctgatgcatgctatcttaatgtcatggtgagtaacatacgcttataatattctaatacgctcaagcctaactacaggtgcatatgtttcacccaaattcaatctttgactagcgagtataccttgcccacaagtcgaactttgtttcttgtgaccacaccatgctcattttgcttgctggagaagaccccatatggttcctacaacatcttggttaggaacgggaactaaatgccatacctcatttctagcgaaattgttgagctcctcctgcatcgccacacccaatacgaatcttgcagcgtttctccaacctgtgt

SEQ ID NO: 9298 - DNA, 428 bp, Zea mays
tactaagcttcggctgtggtcaatattttggcagcaaaacagcgcatttttctttttatgatgtgttaacttcacacctactcgtctatttatatagtgtcgcacgtgggaaggcgaatcatcaaggtctttcgcaccggacaaacaaccactcgcgctcactaaacagtgggccacaatgtccgagaaggtgaatcgccaaggcgcgcgtaactgctgatggggccacttcgcgcacggattattttaatcgtttctcgccaacaagctcacggaaggtgtttttcggatcttctgcatcccgaagcctataagattttttcacggatcaagctcgttacgaaaaacgatctagcaccacgaaggggctactgttgggggtatgcttcgtagccgaagatcctaaagaaagagaacaccttctgtag

SEQ ID NO: 9299 - DNA, 169 bp, Zea mays
  unsure (1)..(169): unsure at all n locations
gttggtattggtcttttggtgtctatctattttgngcaattcattataagaaaagtgtgatttctctgtgctgtaccatgatgatgtcgagaattcagtanggttaaagacatggctatctctatctatcaaaaanatgtgctgagttcatgtcacatactgacatgtg

SEQ ID NO: 9300 - DNA, 312 bp, Zea mays
tgccttcgcctgagtgttccacccacaatacaacggtgtctttgagcgctccaacagcaagattttcacggcgatcaataaaatgactctcgacaacaagaatggcaaatgggcccacctgctataccgaagcattctgtgcactgtacacgaccgactgtcgggcgaccggattcacatcatttcgactgctatacagatcggaggccattaccccgccggatatcaaacatgggtccccggggacaagcgtgtcaactattcccgacgtagacgagccatcttccaaagacctgattaacggagaccgtg

SEQ ID NO: 9301 - DNA, 335 bp, Zea mays
  unsure (1)..(335): unsure at all n locations
taagctggtgcaaagtccacttgaactaatcttcggagaaacctttcctctttgtttcatgacaccaataagtccaacccaacaagcgttggatgaattcaaaattattgcagaacatatcagtacaagagacctggttcatgagtttttggctctcaaagtttttcctagtttaaaagaatgggaaatggngaagcctgatggggagaagaaagaatgggaacttgtgcggttaccttactattacaagtttgagaaatactttaaaacaccttgccaagagtggttggaaacaattgaaataatgtgcaatgaaatacttggcaattactcca

SEQ ID NO: 9302 - DNA, 371 bp, Zea mays
  unsure (1)..(371): unsure at all n locations
agctnggatatnattttatcataacaccatgattattgcngngacaaatgaaaatgattcttcacgaagcatgaaaagaacggacaggtgcttttcgttaaagacgcaaaaacggtacgtatgtaaaatttcatgcatcgtaaaagaattaaacaataaaagcaggtatattacattcatgactacaagatgtcacacattttacatttcagaagattttttttacaatagtatttaatcttctctcagaacaacttctgcagcctcatttatgagccgattgacaacttcgtccataatagcttcagccatccttttaatttcgtcgtctcctttcggctgagagcccggagacgctctatcaggatctg

SEQ ID NO: 9303 - DNA, 440 bp, Zea mays
  unsure (1)..(440): unsure at all n locations
ttaccaaatggacgtgaaaagtgccttccttaatggtcttatcaagaaagagggctatgttgagaaacctcccggctgtgaagatagtgagtaccctaatcatgtttacaaactctctaaagcgctntatgggctcaagcaagccccaagagcatggtatgaatgcctaagaaattttcttatcactaatggcttcaaagtcggaaaagtcgatcctactctcttcactaaaactattgcaaatgatttgtttgtatgccaaatttatgttgatgatatcatatttggttctactaacaaatctacatgtgaagaatttaataggattattattcaaaaattcgagatgtctatgatgggggagttgaagtatttcttaggatttcaagtgaagcaactccaagaaggcactgtcattagccaaacaaagtacactcaat

SEQ ID NO: 9304 - DNA, 437 bp, Zea mays
agcttacacatgcaatgttaataaagattaaatttcaaaacagcagtaatcatgcaaagttgaataatttgtaacactgcctatgaacaccaagattatatgtggttccttttaggtagagtttcttcacatatgtgtcttccctgtcagatggtttattagtcttttctgcatccttctctacgatcacacatgccatttggacagattcaccaccacgatcaaccactccaactgtgtctacataaatctttcccaaatttcccaacagataattgatagtaacctataaagagagaagactaatacatgttacttgtttctggagtgaagtctgaatataaaaggaaacacacaggtgatttctaaacacttccatacaaactgtgaataaatcttccttgggcatgggcgcgggtttctcggcgacaggctgg

SEQ ID NO: 9305 - DNA, 425 bp, Zea mays
tggacagtattttgcgatggctcctgtggaaccttcttgtctgtgcagctgccgttttaattgcaccttcaaaaatcagaacatgctacgcagtgaaacttgattttagttgtacaaataatagtgctgaatatgaagctttgctcttgggtcttcggaagctgaaggcaatggggataagaaaggtgattctcaaaactgattctcaagtcatttctggccatgttgacaaaagttgcaaagcaagagatccgaagcttgagaaatatttggatacagttcgaagacttgaagcttccttcgaagggttctctgtcaagaatattccacgaggagaaaatgagcacgctgatctactagccaagtcagcggcacatgggctgcccttaccttcggaagtattctttgaaacaataaaagcacct

SEQ ID NO: 9306 - DNA, 434 bp, Zea mays
agcttgtagtggtccttgtggggtctgattgacccgcttgattaaagagaaagctcactcggtctaagtgaccgtttgagagagggaaagggttgaaagagacccggtctttgtgaccacctcaacggggagtaggtttacaagaaccaaacctcggcaaaacaaatcatcatgtctcactctttatttgctcacgatttgtttctcgtcctctctctcggactcgttcatactttctaacgctaacccggcttgtagttgtgcttaagtttataaatttcagattcgccctattcacccccctataggcgactttaagaaggcccctatggctaatagtgctcaaaagaatcatgcatttatttatcgataggaaatttctagaaatgttcatcatgataggaagtgtaatgcttatgattcaaatgccatga

SEQ ID NO: 9307 - DNA, 430 bp, Zea mays
  unsure (1)..(430): unsure at all n locations
nttcgtgagcgcgctggcgtcgtccgctttctctatgttggcgcgtcgcggggagacggtgctcgtcttcgtctcaagcgcgaagtcgatacccggtgcgcccctcgttggggtgccggcgctgtcgactcgctcgacagccgacgaggtgctgcctcctacttggccttggtcgccctgccttcccctccgtcggcgggggaaagggcaggatgagctcgaagggtgttcttccaccacgcggggaagacgtcgtcgattccgccgccggcgggctgtcggccgccattgtcgttgtcgcgtggcggtggaaggagtatcatgtcgtagctgccgtcgagggacatgaactcaagactcccgaaacggagcaccatcccgggttggagaggttgctggagactgcccatctggagcttgacgggaagct

SEQ ID NO: 9308 - DNA, 359 bp, Zea mays
  unsure (1)..(359): unsure at all n locations
agcttacgtcccatccatggacagcaatggaaccctctcccacggcatgaagacggcgcgcccgtgttccgttcctcgaacggctcgcgcacgcgcaacggctgccccatgaaccactcgtcccgtcgcattaactctgcgataggacaagcggcacctttggcaggagaagcgggcgacgcttcgccttctccataatgaccgcatcaaaaaaggtgcgccacgtcatttcaatntcgtatccttttccttttcctcttcctctttctctctcttacaacagggaccgggaaaggggataccccgaaagggatccttcttcgcgaaagaaacgggccccgagcccccctactgatcag

SEQ ID NO: 9309 - DNA, 372 bp, Zea mays
tctaaagggagagcacattttaagactatctcttgtttattttgagaaagacagggtttgtagcgcatgccaagcaggaaagcaagttggtacccatcatccacacaagaacatcatgacgaccgacaggccgcttgagctactccacatggatctattcggcccgattgcttacataagcatcggcgggagtaagtattgtcttgtaatagtggatgattattctcgcttcacttgggtattccttttgcaggaaaaatctcaaacccaagagaccttaaagggattcttgagacgggctcaaaatgagttcggcttaacgatcaagaaaattagaagcgacaacgggacggagttcaagaactctcaaat

SEQ ID NO: 9310 - DNA, 384 bp, Zea mays
agcttgaaagccaagtcaaaaagcaagccccaatatattttgtatccgaagttcttagtttatcaaagaaaaattatacagaattggagaaagtactatatgctgttttgatggcctccaggaagcttcgacattattttcaagcttacaacataattcttccttcttcacaacctttgaaggatattatgagaaatcgagaagctactggaaggattggaaaatgggctgcagagctcaatgaatttgtattgattatgtccacagatcttcgattcagtcccaagcgttggcagatttcattgctgactggacgccacgggctcaggaggaagaaatgaataaagatgccgaagcatggacagtgttttgtgatgggtcttg

SEQ ID NO: 9311 - DNA, 376 bp, Zea mays
ctgtgaagattcttcattccaacatgtgcttgtcggcggtgtcttatccagcccatgttagtcttatcaattaaacaagtgtcgagttcagctctatcaaaatttactaagtatagctgaccctctaacactcccttatatgctattgaatcatcacttcttctaaatacagggatacctacataagtgaataaacagttgtagtccattttgcataattgagaaacggaaaacaaattgtgatctaatgaatctacaagaaaaacattggaaatagaatggtcaggtgatatagcaattttacccaatactttgaccaaaccttgatttccatccctgaatgtgatagctcgttggggatcttggtttttctcgt

SEQ ID NO: 9312 - DNA, 406 bp, Zea mays
agcttgccttcgcttcagtctatcatcttcagtccaacggagtcgtggagcgcgccaatgggaaaatattcacagctgtcaaaaagatgctcctcgatgaaagaaaaggcagatggaccgatttattaccggaggcagtctcggcgctgaacacaacagagtgcagggcgaccgggttcactccgttccgccttctatacggatcggaggcaatgaccccgcaagaaataaagcatgggtccccgcgtacagttccgtcagccgtccccgacgtggatgagccaacttcaaaagatctcattgacggagaccgggtcttcgccctacaggccctaaacaaatatcaagcccagaccatagcatggcgcgaccacgcggtcattctgaaggagttcatcgaggggga

SEQ ID NO: 9313 - DNA, 436 bp, Zea mays
tatgaagattcttcatcccaacgtgggctaatttgctatgctagagccaacccatgttagtcttagctattaagcaagtgtcgagttcagctctattaaaatcaactaagtatagctgaccctctaacactcccttaaatgctactgaatcatcacttcttctaaagacagtaacacctatattcgtaaaaagacaattgtagcccattttacataattgacaaactgaaagcaagttatagtctaaagaatctacaagaaaaacattggaaatggaatggtcaggtgatatagcaattttaccaggtcctttgaccaaaccttgatttccatccccgaatgtgataactctttggggatcatggtttttctcataggaggagaacatccttttctccccaatcatgtggtttgtgcacccgctatcaattatcct

SEQ ID NO: 9314 - DNA, 343 bp, Zea mays
agcttatattaatctggtatgaatctgctgatatacccagctagtccaagaaaactccggacttggtgaacagttgtcgcggggtttccactcagaatatctttgaccttgctaagatctaccgcaattcctttagccgataacacgtgccccaaaaattgatattctttcagccagaacgcgcacttgctgaacttggcatacagctgatgttcccttatgcgcgtcaatacaatccatagatgctgagcatggtcctcttcattcttagagtatatcaagatatcatcaatgaagactaccacgaacttgtccaactcgggcatgaacaccgagttcatca

SEQ ID NO: 9315 - DNA, 363 bp, Zea mays
actcagctttgcaagcagacgggacgtgttgctctgtttcggacacagggcagagggtgggcagacgtgactcactggcacgggcaacgacgaaagctatctccggcgatgatggaggggtgcggatggtgtagcaatacctgggggattataactcagcgcagcccagttcggtttggcttgcgcggccgggcatgcgattcgcgcgcgactgcttgtccggcagacggcgtcaaacgtggcagtgagttcttcatgttaaacgcttcagaatcgctactgcgaattcgctgaatcggccagacctctctggcactaggcttctcacttgtgagtccaaggatatcccctaataggaataac

SEQ ID NO: 9316 - DNA, 411 bp, Zea mays
agcttgaataaggtgatgagggagcgtgttatcacaagatagctcgatctgctgtttgacgatgacgaggaaggccacgagatccatacgattcgactcctaaagaggtggcactgcccttggtggagatcaatctctcctcaagggcgtgcaatgcataaattatcgacggctaaggttatgatctatatcgaacctagactcctggacgattgataccatataagaaaatagaattggtacacttggttgaatgtattgcattgatgctcatgggttgattacatagggcacataggactaatacccacattggtagacaatgtgagattattcctatctactctaacagcgtggagtgcgctcggaggaaaccttgtcttcattagcgacgcgaagatacttgatcgt

SEQ ID NO: 9317 - DNA, 415 bp, Zea mays
tgccgtgcacgccaaagatacacagatctcggacgactttctcattgggattgccccggtagcaaatatctatagtcccatgtgttatattctctatgtccctgagcccacatgtcatggctcaatgcctttgtgcatgccccccttcaactataaaatgggaggcatgcgacgttacaagacagatccaggctcagactcacaatacattacacagcggagtagggtattacgccccatcggcccgaaccactctaaaccctcgtgtgctctcgtgtgttcatccaccaacctcgtgacaagcaagacgcttatgcccctcctcattttatgaattatggcgggtgcaatccgtcacccggccggagagatttaccctacgacatttggcgcgccatgtacggggctatgcttg

SEQ ID NO: 9318 - DNA, 435 bp, Zea mays
  unsure (1)..(435): unsure at all n locations
cacctgangcatgcaagcttcggctgctgctgcaattcagattatatactgtatttttagtagcgaacaaactgcgatctgccagtaccaccctaagcaaacggattgacggtgacagctggagggggaaacgatcaatgcctttcagatcagactgactgcagcggtcgacgctaccgccccctctccttgcatgtcggctgtaggaggcaccctatagccacagcggtgctccctacagcgccctctacgtgtcggctcccttctctctctttccagatttagcgtgtcactgtttatcaccctaaacattgtgttgtgggttcacgagtaattgttagtagataaaaaatcaatagttagtatacaaaatgatactttatagtggtagtggggtatagggggagtacttaaggaaaccgctgcgggagatga

SEQ ID NO: 9319 - DNA, 424 bp, Zea mays
  unsure (1)..(424): unsure at all n locations
tagaatggttgatgtccagcctctaatcgacaaaatttttgtcgtcttctaagttggaaaggaaagttcctgtcctcagcatgtcatgagactttggtgaaatcagttctttggtcacaaccaatatatcgtctcattgtattcccagctcagaaatggccaatcaagaaacttgaccgatgtatgtggagtttcctatgaaaaggcgatgaaccagaaaaagtaaatggaggttactgcttggtaaattgggcaacggtgtgcacaccaaatgtcttggggggactatgtgtcctggacctcgagcgttttgctanggtactgaggctaaaatgatgttggtttaaatggaagagcagtgataggcccttgacaaatattgagatcccttgcgataaatagacaaagatctatttcattgcct

SEQ ID NO: 9320 - DNA, 436 bp, Zea mays
  unsure (1)..(436): unsure at all n locations
tgggaaaagtttggcatgttntggatattgatggattcctatcctttaaactagccttttagagttcaaacacctaaccctaatacagtactaaactatgaaaccgtattatctagtgggcaccgtgaagaaaggttttattcaagaaacaacttggagtgttttgttatatttgcatatttcgtagcattacatgagcattcatgtacaagtattgctatgtatagaaaacgaagaagtgattgtcgaagaagaaactgcaccaaaagctgaaactccacctgccgggaacactttctactttgatatttgtggaatagatcccgagtctcctacaacacaatgcaagccccggtgcatttaaccttatcacttgaaatgatgcattaggtgataggagttgagtgataaactattgctgcatttccttccttgg

SEQ ID NO: 9321 - DNA, 433 bp, Zea mays
  unsure (1)..(433): unsure at all n locations
tttcttctgttctactccaaatttaccagttaaaagtgcgttagcttcataataatattaactacacagtaatattattatttgtaccatattacttacttgtataattagatattgtttaaacctatgtttaatagattaatctccctaatcaaagatagtttgtctatgactgtgatctaactaanatatggtctccactaaaatataatatagattagagttatttatttaatatctttatcacatgatttataaaatcaacatacagatttataactaattgtttaatcgagtaggtcttccgaacaaccacatttttttaaccatagctccgatcttagtatttctcaattccgcgatctcgtagcgacgcgtgaatcattattattcagcttgtacttatgtatgggtgaatcgtaattctatctat

SEQ ID NO: 9322 - DNA, 438 bp, Zea mays
tactcatgcttgttacccctactacgagcaccccggtgtaagataactttatcctcatctcccctcttgtgtctcatcttgcatcaatccatctgggcagggacacgcagcgtcaaattcactattcggttgagggtcctcgcgggtccaaaacgccaaaagatagagatgagggtataccctttatcgatgcaaatgatgggggcaccagaaacgttgttctattgatcagtttactcatgatctttcatagttgttcgatttagttgaccaaagttgatgtaatgaatacgttgatgctgtgtaaaataagaacaatgctgggatgatacgatgtcgagatgatgaataaattgcaatgagtgctctctataaaattgatcaaccgcctatctcgagcaagatcacaaattgttgatggtttcaaagcatgccttc

SEQ ID NO: 9323 - DNA, 419 bp, Zea mays
  unsure (1)..(419): unsure at all n locations
agctttgctgcatctcttgttctgacttttttangcgcaactangacagcaaccgcttctgcaccgaatgttccccatgaaccatcgcacaacactgttcaagcttcagtgtctttatttgtttcttctttctgagcccctactcgccaatcagcgaccaagtctgctaacgcctgggactgaattaatgatctatgcacatatgtcatagtgaattcattaagctccgcatcccattttccaatccttccagtagcttctctgttcctcattatgtccttcacaggctgtgacgaagggacaattatgtgatatgcttgaaaataatgctgaagctttctggaggccattaacacagcatacaacacccttctcaattctgtataactgttctttgatacactaacacttctgagatg

SEQ ID NO: 9324 - DNA, 439 bp, Zea mays
ctaagcttaccaatggacgtgaaagtgcctttctttttgttctataaggaagagtctatgttgagcaacctcccggctttgaagatagtgagtaccctaaccatgtttataaactctctaaggcgctttatgggctcaagcaagccccaagagcatggtatgaatgccttatagatattcttatcgctaatggcttcaaagtcggaaaagtcgatcctactttatttactaaaactcttgacaatgatttgttcgtatgccaaatttatgttgacgatattatatttgggtctactaacgaatcgacttgtgaggaatttagtaggatcatgacaaagaaattcgagatgtctatgatgggggagttgaaatacttcttatgatttcaagtgaagcaactccaagatggctccttcattatccatacaaagtacactca

SEQ ID NO: 9325 - DNA, 437 bp, Zea mays
agcttggaaaaatctataatgaatcggtttgttttaccagccagtccaaggaaacttcggacttgatgtacagtggttgggggtttccactccaaaatatccttgattttgctgggatccaccgcaacccccttggcagataatacatgtcccagaaattggatctcctccagccagaacgcgcacttactgaacttagcatataattggtgctccctcaagcgcgttaatacgattcgtaaatgccaagcatgctcctcttcattcttagaatatatcaagatatcatcaatgaataccaccacaaatttatccaactcgggcatgaatactgagttaatctgaaggacataaccagatattcaaataatccataccgcgtagtaaatgtggtcttgggtacatcttcgggtcggatatggatctgatgataaccc

SEQ ID NO: 9326 - DNA, 419 bp, Zea mays
  unsure (1)..(419): unsure at all n locations
tcaagcagttcataagccttcatacaaccactccatcttctttgttcctccngntntaaggcgcatgctttctttgtccataacaccctagaaaaaagtacatcaaatcattatattgttgctacatttgcaaataaaaatacagtttgttgaactggaagtacaacgccactagactgaatgcgatttatctagagcaagactgttttttcgccattggttcctcccgtcgcgataaagcctctagtactggcagcctacaaatgcatcagtaacaacaagtggtccataggctactaccaaaacacccgcaacacgcgtgatcatgggaaaccctaaagacgtggcagtggcacacaccctacaaagcaactattgtgtgttcatcctggaaatcatttcattttgttgactcatgg

SEQ ID NO: 9327 - DNA, 359 bp, Zea mays
  unsure (1)..(359): unsure at all n locations
agcttcaacttcatctatattatgaatttccttgtaatcagnnccagcttcttcggcccttctggcagctttctgactcccatgaatagcaatagggccttggtccgaaggtatcttcatgcagaaataagctgggtgaagaattgcttcaaaagcatttaaagtaccccgaccaatgatggcgttgtaggggtattccatgtcaacaatatcaaacacaatctgctcagtccttgtgttatgaacaaatccgaaggttaccggcatggtaatcttcccgagtgccacaatctgccgccctccgaagccacanagagggtgcgtagcatcatgaatcttgtcttcacgctcttgcatct

SEQ ID NO: 9328 - DNA, 427 bp, Zea mays
tatttcacagcagcgacaatttgagctagtttggactttttttccattttcaaggtcttagtgctacacgtgtgaaaaccatgacagcccattagttatatgggcctctatggactctaaacctagcctgctttacctctactttctcctgctctactttttttaacaaaatccaatgcagacacaaaggtactaatgtagcttggacgttttacactagatcgttctaaaaacttttttattatagcagagtagaatttgaaataggagatagaataggtaagctgctgggagacaagcttatgctaaaaaataagacagagctagcagtacacgcatgacgcatgggaacatgtttggttaaggagcttctatttaaaaaaacggaagatgaaccaatttggattttgcttttctatcgttactt

SEQ ID NO: 9329 - DNA, 416 bp, Zea mays
  unsure (1)..(416): unsure at all n locations
atcctcaaagccacctgcngcatgcaagcttcataaacaggtttgttatctttctcttgttgagggatctaatcgactgttggaccaacataaaattatcatgaatcgatctacctctgataaaagcactttgattatattctaccaacttatgcagacgaaggcccacacgattagcgagtaattttgtgaccaatttagcaacactatgaattaagctaattggcctgaaatcaccagccgacgaagcatccatctttttatgaatcaaaataatgtacgaggaattcagctgtcccaatctctgaacattgcgctggtgtatgatagacagagtcgtcagcagatccaccttaatgatactccaacaagatttatagaacctccctgttaacacatcatgcgcatgagcctta

SEQ ID NO: 9330 - DNA, 412 bp, Zea mays
tcgtcgtcttttgttctttcttcgtcctgatcccctgtctgttctatcagcaataaagtctgctaatgcctgagattggattgaagacctatgaacataatctatggtgaattcatttagccctgcagcccatttcccaactcttctcgtggcttctctgttccttattatatccttgagaggctgagaagaaggcattatgatatggtatgactggaaataatgtcgaagctttctggaggccatcaatacagcatatagtaccttctccaactctgtgtaatttttctttgatggactaagtacttcaaagacgaagtacactggcacttgcttcttcgcttggccatcttgcttttcttgcacctacgttgcactgactgcatcgtgagaagcagctacatacaacagc

SEQ ID NO: 9331 - DNA, 384 bp, Zea mays
  unsure (1)..(384): unsure at all n locations
agcttaaggaaagtggtttttggaccttctgcattctgaagccttcgtattatntgtggatcgagttcgttatgaaaaatgatctagcaccatgaaggggctactgttggggggtcttcttctccgccaaaggtcctcaagacaaagacatcatcggaaaagtgattttgaggactctctccctcttggccgaaggtccttgagacgaagatcttgtggaagcaacaacgatgattaccgaagctgtcaccgaaggacgacaacttcgacttagctcaagccaaggaggaaaagactagttagttcttaatgatttatgttacacttatgaacaaatgttagggttatgaatgcacttttatccaggctgcatcccgtgcctat

SEQ ID NO: 9332 - DNA, 432 bp, Zea mays
tcacacctctggactaactcggctgcatcgttcttcttcgtttttcaatagaatcctgatctgaaaacctttccgactagtgttctggatgctgcatgaattccacattgccctgcatggacctcctccataagtttgcttccggtggacgggagaacacacttcatgatgatgcctgacgcgccccttctgtacaatacttccccaatgagtgtatattgagctgactgcctggcaatgcgatctgccgagttcttgtcatctggctcttcttcattctttatatacttaataatcggccgcctccagtcatcaaggtctgactcgggttgatctatgatgttgcactcttctgtttgatccattgagatactcggctgaagaatttcttgcacgaagaccccgggtgggacctaaattcgactggatccg

SEQ ID NO: 9333 - DNA, 428 bp, Zea mays
agcttacccatgacgaggcttttggtcttttataagggccccgatcatcaagcctacattcactataatccttaatcaacctgggtagaacatcacctgttcctaacccaagtctcgatttaagtacttccatccttaagattgttttgtgttccttacgatgaaaagagcattatatggaactttgcaataagataccaccacgctcccaatgaaaatattcttgcaggtagaagtcatccttcctcaggataaacctgagctaagcattagtgcaaaggacaaactctatctgcaagatttacctctaggcaggactaagcaattctgtaaatcatatttgataccttactagaagtatctataaaaggaatggatttcaaggtagccaatgcatcaaagggttttcaagcaactcctataaacct

SEQ ID NO: 9334 - DNA, 411 bp, Zea mays
tcagcccgtcattcttcagcttcatcatcctgttcttttttttaacagaatgagaaaggggcagaattcaaggataaggtaaaagtaacaagtataagtttctcaccggcttaaggcggctccgagcttcgtcaccagccatttttcgcccgccgtttatccaaatctaggtcataaatctgtttcctatgcttcgggctaagcttgggatgtcaaccaaatctgccggtgacaatctgaagtttggcctatttacaatttttccgtgcgtgcatccagccttcatgaaagcagtatctgtgcctcgagaagctagcatggcggagaaatcatcatgcccaacaataactttgtcaagtgcatcaacttcgccctcaatgtattccaaggtgcttggcagattttcagctg

SEQ ID NO: 9335 - DNA, 399 bp, Zea mays
  unsure (1)..(399): unsure at all n locations
agctntcttctctgggaatctnnttcatttactatagncattccattttataattactcgacaattctgtataaatcagttagagctaaatagttgttcatttaagccctcgtaatgcagcacataatatgttccagcagtcctcttttatgtagtgctctgtgctattccatgcagttaaagccgcgacttttgtagccgttcaaggacaatattttgaatcatagagtagttagtacttcattgatgattgtactgcttggtggttctaatttgtatgatggtatataataactctgcccttatactatggcttattggactganttgttattcctacacataaatcttatgaaaccaaatgactgaaagacttcaacatatatggtggcttgactc

SEQ ID NO: 9336 - DNA, 417 bp, Zea mays
  unsure (1)..(417): unsure at all n locations
tatgtgttctaccgcatagaaactctcgatcttcatttttcttaaggcggaaacgacctanaaccggcgcaacataccttcacacttacataacttatggtgatgactataccctactaacggagcaatcagtttaagtcgaaaatgccttaagtcggtgcgacatgctcacatttacatgacttatggtgattactataccctactaatggagcaatcggtttaagtcagaaacgcgttaagtcggcgcgacatgctcacacttacataacttatggtgattactataccctactaacggagcaatcagtttaagttggaaatgccttaagtcggtgcgacatgctcacgcttacatgacttatggtgattactataccctactaacaaagcaatcggtgtagtcagaaacacctt

SEQ ID NO: 9337 - DNA, 446 bp, Zea mays
  unsure (1)..(446): unsure at all n locations
agcttcacatcaaagatagngaagaacttgagagtctcttgtatgcatccaccaccctcaatatacttggacatgtcaagtcaaagtttgcttgttactcttggtgatcagtatcacctagatggcttattaacgattgggtgatcagtgatcacttggagaacttatgggtgacccacctaaagcgttgtaggttgtgtgtggttcaccatgctaaagaagcgctcgtggagagcttatatttgagcaattctattcaaatatttatttaccacaactgtcacgctagtatatgattggaatttatggtgcaaaactctttaccacactaagtcacaagagataaagttgggcttgattatgagttttaacttgtgcaagaaaaaaatcagagaagcacaattcaccattctctatttggtatcaatacccgaattcggatcttt

SEQ ID NO: 9338 - DNA, 420 bp, Zea mays
  unsure (1)..(420): unsure at all n locations
tcctatccagggtcctatntgcaaaacattaaaacaattcaacttgtttgtaattnntgcctagtgaatgcactctaagtgtgtcaaacatatgcaatgccaatgcttatgatgccatgctcatgttttagttatagtaacaccaggggtgttacatccttccccccataaaagaatctcgtcccgagattaaaagtcctacggtaagtaatggaaaaggaaacatgtcatatttttatttccttattcttggtataaggcacgggatggtgtgggggtcacttcttttattacacaattatacaggctttacagtttacaagaggctaaaaagcctgcgaaattcttatctaataagtcttgagtttcccatgtagcctcatcttaaaatgctggttccactgtatactataaaaattg

SEQ ID NO: 9339 - DNA, 347 bp, Zea mays
ctttagaagagtctgtgcacgaacaacagcgacctgaaaatgcggacttcattctacgaacaccagtggcaagcggcaatccgaaatgcacggtacaaccaggcgctcagacgctaccaacaacggttcgtgcataataagaagcttgaggtccgggacctggtcctaaggcgaatactgaaccgagaggggctccataagccttcccccagctgggaaggatccttcaaagtgacagaaatatgccgtcctggatgtgtacgcctcggcacagctaacagagtacctcttcctactcttggaacatagagcatctccgtaagttttttccatacaaacagaattgg

SEQ ID NO: 9340 - DNA, 447 bp, Zea mays
  unsure (1)..(447): unsure at all n locations
tactaagcttatgccggaattgccatcatgaagctccctcactcttctcatcttcctattgnctcatggcaaagggagatgctaaggttaaaatcatcaccgatttaaatgatataaaagatgatgatgatatcgatgatgttgatgatgatggctattcatatgatgatcttgttagaatgttaagtgaggccgatgactacatgcataaagaaaaagaaaaatctaataccttgaacgaattgtataaaaacctgcaagtgtcttttgaggagctcaagacctctcacaatgacctcaaagaaaattgtgagaagcttgcggatgctcaaaaattatctattgtgcatgaagttgacgtggtcactaacgatgttggaatcacttgtgacttacttgatagtcttacaagtgaaccactacctactaaacttatttgtgataaat

SEQ ID NO: 9341 - DNA, 426 bp, Zea mays
agcgagaggtggagtccgtgaagcccctttcctctgtggtccagctggaggcgccccctgcaccgccgcgggacgtcccggctgttggaggagctactggtggagatcctggaggagaccccgacgacgacgactcagaccacagcacggagtcctctgatccgcatgaggcggaaggatgggtcacccgacccatcacccgtgacgccgctcgcggttgtcatttccacgacgcactcgacaccttgctgcgccaggctttcgaccggcacacctggtcgatcgagtatcgttgtgtagtctaccagcacagtcgcgggaggtacccggaccgctgggaggctacctgcctacttcgccgtccggaggatgacctccggggtgcggtggccgtttcggagcactatttcatctccgagagggaca

SEQ ID NO: 9342 - DNA, 439 bp, Zea mays
  unsure (1)..(439): unsure at all n locations
tgtcaagcatattntggtacccatcgcttgatgggtctcttcatggtttttctacaaagatctacgagcccaagagtcctttgtgttaacacttggtaaattcattacctttctaacacaagttgcaattttgggttgcctagttacatgaaaaatatttgacaagctacgagtggggttgctaccaatgggacaatctttacattgatgtcccttttttcggcatatgtagcataagcgatcttcaagctttgaagatttcttccttccttgcttcttgcttgctacatggttagtgaatgttttcctttctaactttatgcctttttgttttaaatggggacaagatctaaataagtgtcccttcttggagcatttaaaacacaatttatcatccttgctaataatcaagtcattttgtatatagggacatgatcta

SEQ ID NO: 9343 - DNA, 409 bp, Zea mays
agcttcaagaatgagaggtgctgcccaattctttcttattatttattaaaaaatcattagtttaagcgtgagaaaatgttagtaagttcattctctcatatagtatggttgaaatacttacttgctttgtttagattttggattgtgtaattgattgtataatttacggaataaaattagtgagttcatcctctcatatcttatatgtgttgtgttgtaatatatatgaaagtaatataatttagaaaaaccactaatggtgaatgtgtgtagttggaggaagacaaagtgagggcgggtacgtccgtgaggcgtcatatatgaataattctcggtggctcatcgatgtcgctgaaaataaacacttaatcttcgaaacctggaccgccgtgaaaataagtgtttacat

SEQ ID NO: 9344 - DNA, 441 bp, Zea mays
tgccttcgcttcagtctatcatccgcagtccaacggggtcgtggatctttccaatgggaaaatcttcacagctgtcaagaagatgctcctcgacgaaaaaaaggcagatggaccgatttattaccggatgcaatctgggcgctaaacacaactgagtgcagggcgaccgggttcactcctttccgtcttctatacggatcggaggcaatgaccccgcaagaaataaagcatgggtccccgcgtacagttccgtcagccgtccccgacgtggacgagccaacttcaaaagatctcattgacggagaccgggtcttcgccctacatgccctaaacaaataccaagcccagaccaaaaaatggcgcgaccacgcagtcatcccgagggagttcaacgagggggacctcgtactcgtccgaacagctcggacggagtccaagggg

SEQ ID NO: 9345 - DNA, 403 bp, Zea mays
  unsure (1)..(403): unsure at all n locations
agcttatgnggacgatgttgttatcactttctattatccggaagatatcattggagagtcacagccgactttcaacactctacggcgggtttcgatggaagcttaatcccgacaagtgtgtttttcgtgcaccaccaggcaaattacttgcgtcccttgccagccaccggggaattgtagctcatccataaaaaatctacactatcatgacgatggaggccccgcgaccacagaagaaagttcaaagacttaccagatgtatagcagccctgagcagattcatatccaggctgggagatataagcttaccattctataagttactcacgaacgtggacaagtttcagtcgactttctcaacacacgaagccctaacgccatgaatacgntttgatacaccacc

SEQ ID NO: 9346 - DNA, 241 bp, Zea mays
cgattgaaaataacaaacgttgatgacacttactgcctgtttaggctttacgtatggaggaaaccgctataaatggagatgaaattgaccaatgaaaaagccttatcagactgtgctatatgatgaaaacgtggacttgccccgcaacttgcaatcttgtttttctaatgcagtgtactgcggaggagatgttcctttcctatcacggaaatccggcgttgaaacactaatatggtattag

SEQ ID NO: 9347 - DNA, 438 bp, Zea mays
  unsure (1)..(438): unsure at all n locations
agctntatcaaatggacgtgaaaagtgtctttctcaatggaccaatcaaggaagaggtctatgttgagcaacctcccggctttgaagacagtgagtaccctaaccatgtctataggctctctaaagcgctttatgggctcaagcaagccccaagagcatggtatgaatgcctaagagatttccttattgcaaatggcttcaaagtcggcaaggccgatcctacactctttactaaaactcttgaaaatgacttgtttgtatgccaaatttatgttgatgatattatatttgggtctactaacgagtctacatgtgaagagtttagtaggatcatgacacagaaattcgagatgtcaatgatgggggagttgaagtatcttctaggattccaagtcaagcaactccaagagggcaccttcattagccaaacgaagtaca

SEQ ID NO: 9348 - DNA, 413 bp, Zea mays
tgtaacccctactacgagcaccctagtgcatgataatttattcctcatcccccctctcgtgtttcatcttgcatcaacccatctgggcatggacacgcagcgtcaaattcactggtcggttgagggtcctcgcgggtccaaaacgccgacaccaggctagtttgaagatgtccccgtttgaatctttatatggcagaaagtgcagaactcctctgtattgggatcaaactggtgaaagacagttctttgggccagaaattatacatgaggcagaagaataaaaccagttgataagggagaacttgagaactgcgcagtcaatgcagaaaagctatgtagatacccggagaaggcagttagagtttaaggagggtgatcacgtgtatctaaaggtgtcaacgatcttgggtatg

SEQ ID NO: 9349 - DNA, 415 bp, Zea mays
actaagctgagtaatcatttgcaagaaaatttttctcttttgttaatctgggtatgaagcacatacgagaaaagataatggctggagtatccaagtgtttcaaggaagacgatcaatgtgtgatatggtttaaaaaccgcatattattgccaaagaacgaagagctccgccagcatattcttgatgaagcacatcttattcgttattctattcatcccggaagcactaagatgtaccaagatttaaagcaacattactggtggacaaagatgaagattgaaattgcacgctatgtggctagatgtgacacttgcaaacgtgtcaatgccatacacattaaactgctggtccattacaatctttgccaatcccaacatggaaatgggaagacattagtatggactttattgtggga

SEQ ID NO: 9350 - DNA, 413 bp, Zea mays
  unsure (1)..(413): unsure at all n locations
tcacctgcangcctgcaagcttctgtgccaaatatcacagaaagcttatggatggttatttanttgtgatcntccaaagtctaatgcctaaaaggcactttccactaccttgctatttgaaaaatgtcaaacaacagatcttatatttttcctatgttctttataacaaaagatctactatcccaaaggttggggtgtcttcactttgggggtatatgtgtaaggctcttctaagctttccttgctttcttaaaataaaaggcatcctatctattttatactaaaccacggtataatcaatttttctagtaacccacactgaataagtatactaacaaaaatatgggggctccctggttctttatttaaatcacttttcctattttcttaaccttaacataatgtacataaat

SEQ ID NO: 9351 - DNA, 433 bp, Zea mays
tgtacgtaagtttcctcgacgaggagggatggaactcttgttcttctcagatatagcattcttagatttcatgagaatacaaattttggaatatacttccatgtcattgaaactgacagaatgctctcactattatatatattctttacgtcaaaatatggttcaatgttttcttactattatatatattctttacaaactttgtgttttttgctgaaagaaaaacaaaaggaatatcctggttcgtggatatggtatatatgaaatagacagaatctcagaatcaactggtgatattgattgataaaaaagatattgctttcgtggatgagagcagctgagaaggtatatacaccatgaaaaacataaaagtaaagtcacaggataaggaaataaacatagagtgataaccaaaaagttctagaaaggaaat

SEQ ID NO: 9352 - DNA, 434 bp, Zea mays
agctagattatagactcagctagtgcttttggcataccaaacccatcagccaaacagcttcatggtctatagatagaggagtagactcctcacaccgggtaagtctagctgagtattagtatactcagccttgcttgttgcataatttttgcaggtacctccttgattcggttgatggtgtgacttggcctccatccctgccaccgggatagacggtcgagtgggttactgcttccgcaggagaggaccacgagaagtagcgtggccaggctttgccatgttacccggtcttctccgatagttatttcccgtgtattaaaacttatgagtattattgtttctaacactctgatgatgtaatcactactgatacttcttaaatttgcgggattatgttttatagtatttctttgtgcctcaccttccagtgagct

SEQ ID NO: 9353 - DNA, 408 bp, Zea mays
  unsure (1)..(408): unsure at all n locations
tgatccatagtatatgtttccaactaggcttgnttgttttttcggaacggatcttctggaattgttccacctggaatgttagctttatttatattaaaactgatcacttggaatagttctaggtcttaatcctaactaaccgaacgggcacttatcgtggctccaaatctgatgcaagagttgagaaaccaaaccaatcacgctgtatttctcacgggtcccgatcgcctccgttcactatcgtccgtgtccgatccgatggccttcggggcgacgaaggttttgcctcatgcagtacaaatatgcgcgcctcatccgcgccgcccccgcgctttttctcgctgctgacgccgccgccgccgggagccgtacnccgggagagccccccaacccttatcaaaccctaaa

SEQ ID NO: 9354 - DNA, 433 bp, Zea mays
  unsure (1)..(433): unsure at all n locations
ggatcttaagtcacctgcggcatgcaagcttgctcttagtcttttttattttatgcaatgggaatcagaagggccattcttaaaactgattcccaagttatttctggtcatattgacaagagctataaggcaagagattcgaagcttgaaaaatatttatatacagtccgaaggatcgaggcttcctttgaaggattctctgttaaaaacattcctcgtggagaaaatgaatatgctgatctattagccaagtcagcagcacaggggatgcctttaccttcggaagtatttttcgaaacaataaaagcaccttcggtcgagcttcttgaaagggcggtcctcaacatatcccctgtttatagtgaagattggagaactgaaattatctcttttcttcagggtaattntctttcagatgacgaagcttataaca

SEQ ID NO: 9355 - DNA, 431 bp, Zea mays
tgtgctaccaccatgcaaccggagtgtggaggttattcttatgaacatccatggaagtacaagaaggagaccccgctcggacaccctcgggggctgggccatagtttacgctacccacctgagccagatcatctccggtagtaccctcgggggctaggcagtggcttgcgcttcccacccgagccgagtcatccccggcaacaccctcgggggctgggtaggcgtcaacaccatcctcgaggaccaagttctctgcagtagccacctccaaggctgagggtccttcagttacttccataggagcaagacgatccaagtcagcttcctgaccctcaagaccgcgctctaaggtcgatgaggcgtgggacgctgcccgggacgaccccaacctgtcgtcgagcacatcatcacaaaccttcgtcgcaccatca

SEQ ID NO: 9356 - DNA, 343 bp, Zea mays
  unsure (1)..(343): unsure at all n locations
agctttgtgagagctacatgatggntctctctatttcttgcattaaaactatggagtactatttcttgcactacaacttcattgtatagacaatactgctgaagggacctacaacttcacttctactcaaccaaatggtctagatctcacacaaaatgggactagagatgttcctatcaacgtagaagaccatgaagaagtgagataccccttggcagcccatagacaaaatgaagcagaagatagagtgtatgcagttgaaagagtggatgtaaatggtgacatgcaaagtgaaagaccaaaaaaggactgctgatgttccaggaatggagaaaaaaattat

SEQ ID NO: 9357 - DNA, 429 bp, Zea mays
tcggctccatctatattatggattgcttttgaatctgtcctgtttccttcagcctttctggcagcttcctgacttccgtgaatagcaataggcccttgatccgatggtatcttcatgcatagatatgctggatgaagaattgcttcaaaagcattgagtgtcccatgaccaatgattgcattgtagggatactccatgtcgacaatatcaaacacaacttgctcagtccttatattgttgacaaattcgaaggtcactggcatcgtgatcttgccaagtgctacgatctgccttcctccgaagccacaaagagggtgtgtagcatcatgaatcgtatcctctggctcttacatttgtctgaaggccttggcaaatataatgtccactgcactgcctgtatcaaccagaacattgtggaccagaaatcct

SEQ ID NO: 9358 - DNA, 431 bp, Zea mays
  unsure (1)..(431): unsure at all n locations
agcttgacaacaccatntgacattntacataaagtntctgagatcaaggatatttagttcattcctcaacatgcaaaagcgggtcttatcaagaggcttagtgaaaatatccgctaattgatcttccgacctcactccttctaaaatgatatctcctttagcaacatgatctctaaggaagtgatgacggatatcaatgtgcttggtgcgagagtgttgtacagggttattagcaattttaacagcactctcattatcacacaacaaaggtaccttttctagaactacgccatagtctagaagagtttgtttcatatataaaatttgtgtgcaacaagcacctgcgacaatgtattccgcttcggcagttgacaaggcaacactgttttgctttttggatgtccatganactagtgatctaccaagcagat

SEQ ID NO: 9359 - DNA, 428 bp, Zea mays
  unsure (1)..(428): unsure at all n locations
tcttgatagctggactgcgatttcccctaagcagctttgttgtagttgtgttgaagatatcngaaatctaccttcaccaacttacccccgaagcaatcataaggatgaatatcttcgtgtgggccgcgagaagccaatgcctggaaccatatgcgaaaagtttctgcaacatacacgaattgtttatacgagacaaaaccctgtggtaaggaacagtatcacaacaattttggctgctacagcttcggctcccggtctgggtcaagctgcccggtgccgacctttcgaaagaggtggcctggcgactggatgacggaatggttttacgtgaagaatgatctgaaatcacgagaagatataaagaagatcattatgcgtcccatctggcaacgcttctgcctgctgaggccaaatgtggaaatgaatga

SEQ ID NO: 9360 - DNA, 399 bp, Zea mays
ggccaataaccacaatgttgaaatgtgacttctctttacccatgactagaggtgaagcttatactgttaatcaaacgaatcaattattatgaacgcaagtaaaaatcacacaatactaatgccactaacaaaacaatttattagatgggactagaaactaaatttggagttgcaactacagtaatcggcttagaaaaagcatggtacatgttagcaagggataaagcagacctagaaacattcaacagagcaaacaatataatataagaagcactacataataaacaaagcagactaataagtgttcgcacagaacttagagccaacaaaacatattcaaaatttgctactttataaaccagatcagagccggcaccgccctatagtggcacaacatta

SEQ ID NO: 9361 - DNA, 425 bp, Zea mays
  unsure (1)..(425): unsure at all n locations
ccttggaattcttccacactttgagctntgccggctttttttgtctgttggcaacancancttgnttgatgcgctatgttggaacttcgccgacgccatgaagactgaatatcttgacattcctttgaaagatagcattaagggatggcgcttcgaatggtttactatggagaatcataacaaatcgcttgccactcgatcggggagacaacccgatgtccgaacgcctatctggacagatgtcccaacagattcatagtttgttgagtccatggtgttgcttaccgagatatgtgcattgaataacaatggcttgaccgctgaaattgttgttgttgagtttgttttcaagaatattcagcctttgaaggatagagtctaacctgcttacctgtacactggtgtttatgacccttcttgaatta

SEQ ID NO: 9362 - DNA, 387 bp, Zea mays
  unsure (1)..(387): unsure at all n locations
tagcttcancagaatgacagccaaagtccttcattctcatttaagcaggaatgtgctgacttatgttgatgatatcatagtaaagagcacgaagcaagagaatcacattgctgatttgcaagaaacatctgccaatttcaggcaagctggtttgaaattaaatccagaaaagtgtgtttttggagtaaagaagggcaagtttcttggctggttggtatcaatgaagggaatcgaagctaacctcaataagatcgaagctatccttcggatggagccgccaaatacaaaaagggggcccaacggctgacaggaagactagtatccttaaatagattcatatccagatcagcagaaagaaatctgccattctttgaaatattgaagtca

SEQ ID NO: 9363 - DNA, 432 bp, Zea mays
tctaacttgacagagaaaaaattcaaacaaaccaattctgagttgtttaagtacaaacccgcataaatcactcaaagatctttaagaaagatgtttatgcttcggcacccgatgcattcaatggctgaagcatgtcttcaactcatttggagccagttccaaaaagtttaaaccttctgttgaagacttgccgggcacatttgatcatattgaaggtgaagtagatgctctcgacgaagttatatatggacatggtgacttttgtgctctgctagcttctcaaggcacagctgttgctttcatgaaagctggctgtacacatggaaacattgtaaacaaaccatacttcagcctgtcaccagcagacttggatgacatccccggcctggcccgaaacatctgaaacagattcgttactcaaatttgggaaaa

SEQ ID NO: 9364 - DNA, 319 bp, Zea mays
actagctttaaagctggctcatccataacaattttgtcttttctaaaaaacagttaccttatcactccctgaacatataaaatgggaattcgctggctgtgaaagtaggactcaaccacgcaaaagtttgcttttcacattgtatcgaacaaccctgggaatgacaattcttacacttggtgctcaacttgtgtgcttgatcaactgtccggccacttctagaatggccgaaagatgaaaaggttatgtaaaagattgagtcagagattagagtatatggcattgtacgtccactcctaacaagttaatgtgttttcca

SEQ ID NO: 9365 - DNA, 405 bp, Zea mays
  unsure (1)..(405): unsure at all n locations
agcttatattcaccattatcgttcgttctacttanaccaaggcttgccgataacaagttctaactttggaaagcgaaaccaacacagcagctgcttctgctccgaaagttccccaagaccctatcgaaaacaccgcccatgcttcagcatctttattcgtttctctctcctgagcccctggcgtccagtccgcaatgaaatttgccaacgcttgggactggatcgaagatctatgcacataatcaatacaaaattcattgagctctgcagcccaatttccaatccttccagtagcttctcggtttctcataatatcctctcacgggtgcgaacaaggaacaattatattataagcttgaaaattatgccgaagcttcctggaggccatcaaaacagcatacagta

SEQ ID NO: 9366 - DNA, 436 bp, Zea mays
  unsure (1)..(436): unsure at all n locations
ntagctaactgaccacaagaataagcgctgtactcttttgttttanacaatcancaattcagcatcatttggctgcatattgcatgaaacaccgcccaacttgcttgcgactaaaaggctttgtatttgttattgatggcatgataaacagcatggatatttatatggctgatataaaataaaagagtttatgtgtacaagcgtacacatgtatatgacacaatcaatgccactacaagaattacatatctataacttgctcctggtgattagagtcctcataaagacgagagcacacagtggttgagctggtacctaaattgagaatgaagaagacatcatgccaatcatgtagttgcattatttcacctaatgcggctatgctgacccagtccaactgaaatccagacaaccaagctcttccaaaccacctata

SEQ ID NO: 9367 - DNA, 437 bp, Zea mays
  unsure (1)..(437): unsure at all n locations
agcttgcaaatccgaagactggttaatgtatttttcaatagaaattntggatggagaccggtagacagacgcatctgtagttaaaaatgttaatgtctcagatggtgtttgcgttttgttgttcttctggtagacttccaccttcggaacttttaactgttgatgttttttctgatgcatattatcctacctggatggcagatgatgtaaaactctcccctaaaaagtttgcgactctaggtgtggcgtggttagctgcaacccgccggggtttgtgattcccccctgtaataaactcagacttagctagaaatggtcatgcatggttttgtgtattttccttttcatgaaggctttatgtctacgattaattctgctagcttccttctggtgacagccttctaagtcgttgtttttggttggtttgctggtcgtgt

SEQ ID NO: 9368 - DNA, 437 bp, Zea mays
acttgatcagcaaaagtaggcagtaagtattatagaagtatctgtatggaattccatagtcattagattaaagggagtttacaatatataggctatagggtgacgtaccaggaaagggtgcggcagcctatccaacagcctgagcaatcggatctaacttgccatacgggagaacctgtttcctatactggaacagttgattctagctaccatatggagcagcttctagttactatatgtgacagcattactaaactaacctatgcagacagacctcacgcaggaggaagcctaggaggattaccataatagtcttaacagtaaggagtagaggagtggttggtagatctacttacagtaggaagtgatttacaccatacctgtgaaggtatatagccgcccctttgtatgtatgtgtatatatgtatgcaaggatg

SEQ ID NO: 9369 - DNA, 382 bp, Zea mays
  unsure (1)..(382): unsure at all n locations
agcttancgactgtctcttcgacctctatatacagtcctacgtggtcgcatgcacgcgctgcgtacgacaagctcccgcgaagccgccgcttggacgcggtccatagcaactgcaccgcgctgtccatcgttaagcaaggggcctcatggttgtcgccaacgtcgatgactcttgggttgttctggacaccgcatccgacgatgacgtcatcgcgtcgtccagctcatcgtccacctaaagcccaacctgccacgtaagtcgctactgaccggacatgaattccgtgtgtgagtgtcctcgaacatgatctatgtagtggagtatcgcatccggtggtgcaacggccacgggtactacctcgttgatgagcatggggcgcac

SEQ ID NO: 9370 - DNA, 392 bp, Zea mays
acactatgaaactcagctgagcaagctacggtctaccaggaagcatctgtttcttgaatcgaacggagggggactggagaggggttggccacggcggtggctcttggtcggcactggcgggctgcggggaggtcgccggatgcaactgctggctcgggcgagtccggcgaggtacggtagaagcaatggggaaggcaaccgagcgctggggcgggttttataggcgcggacgcggccggggcgccggctcaaccgtttggcgcgacgcgggcacgcggtgcgcgcgcgcaggcgtgctctggcgagctcagagcgcgtcgaacacgtggcgcgttgcttctgcccgtgttcttcgctctgctgagcggccaagcgtaacaatcttgccctac

SEQ ID NO: 9371 - DNA, 381 bp, Zea mays
agcttcattccagtgtacccaggaccattatttaatatctccaggcatatgtccgaaggtttctgcatctgagggcacaagcgccaacagtgcccaatgaaattgtcattgaagccatgattaaagggcttcggtcgggaccttcaccgcaatgttttgccaggaagccaccacaaactttggagaagctgctccagaagatggatgagtacatccaggccgacaatgacttccgccaaagaagggaggaggcatttatgttctctgaaatgaccacgggcttcggaggaagatttcgtacgaggcatgtgatgtcaattcataactccactcaaagtgatgatagagggagccaacagcacaggccacaatactcttcgc

SEQ ID NO: 9372 - DNA, 430 bp, Zea mays
tctatgtatatatatttcgtattaattacatagatccttttctttcgatctatggttctagagttatcttggtcttgcagtcgggattgccataagactggtgtccacgctgaggtgagcggtacgggtgctgagtcccgactggagcgggggaaccaccatccaagtgacgacgtttcgcacgctcatcccgcagcatggcgatctcatcacgggccctactcagctcatctaatgcatggtccagctccgtgtttagcacggcggctaggttgactgtgctgctcaacctatgattgccctcaccgacaggtgagacaatcacgcctcctgtgctgccagatggacggcgggggtaatacttcatgtcaagaccgtcagctgccccaccgaaaaccgatcagtattgcgaaagcgcacgccgtgcatc

SEQ ID NO: 9373 - DNA, 412 bp, Zea mays
  unsure (1)..(412): unsure at all n locations
agctcttgtggcaaagctgatcanaactatcagtatcatttgcaagcactgacgagtctgatgaagtacagaatcaacggaaaaaatctcttgtgtcttcagcaatgctacaggcaatattagatgcaattctataggaaagagaaaatataagaccagaggatacaaagttttcggagtgcattttcctacaagaatagtaatctggcaaaccagaggatgcacaattaaaagaaccaatccaaacagttccattgtgagccctgataaaatgtgccaaacgataggaccaacaaatcaaattcaaatgcaagtaagggtcaaagagacgtgcaccaacgatcaaaggctcaaagtgtcgcagtctcagttagggaggtgcaccgctgactgctgcagtcccgatcaggga

SEQ ID NO: 9374 - DNA, 426 bp, Zea mays
  unsure (1)..(426): unsure at all n locations
tctaaagggagaacacgtgataggtttgactaacgtgtttttctaaaaagatagaccttgtgcagcttgtcaagcaggtaaacaagtgggaggagcgcatcacagcaagaatgtgatgaccacttcaagacccctggagctgctgcatatggacctcttcggacctgtcgcctatctgagcataggagggagtaagtatgggttagttattgatgatgacttttcccgcttcacttgggtgttctttttgcaggataagtctgaaacccaatggaccctcaagcgcttcctcaagagagctcaaaatgagtttgagctcaaagtgaagaagataaggagcgacaacgggtccgaattcaagaaccttcaagtggaggaatttcttgaggaggaacggatcaagcacgagttctncgctccctacac

SEQ ID NO: 9375 - DNA, 431 bp, Zea mays
  unsure (1)..(431): unsure at all n locations
tcatgactccgcaacaatgatcagaagtctaatgtctgtctctattcaatgtgtggatgatgatttggatttggttcagggccttctcccatgggatatcttggtctttccctgccgatatctgggactgcctttgtccctgaagaatcttacaaaggatcagttacagtcttttgtggatagaattgcagatcaactaccaggatggaaagcggatttgatgaaaagggctggtagaagagtgcaagtacagtatgtgcttaccgggatgcttgtttatctggctatggctattaagctattgacaaaattaggaaaggtttccttggagaggacgcaaggatgttagaggaggacattgtttggttgcatggggcanggtttgtatgcctctccagatgggcggacttggcatatccagtctcaaagag

SEQ ID NO: 9376 - DNA, 415 bp, Zea mays
  unsure (1)..(415): unsure at all n locations
gatcctcaaagtcacctgaagcatcaagctcatttgtgcactttttactttcttgatgacagatattcgatgaaaatcccgcttaaggcaaacactcatcccattttggtgagaagtccaggacacatgccccgagcatatcttcaagcatttggttactctctcacctccgtcgctggctcgaggatgatacgcccaactgcggagtaacttagtacccaaggagttgtgaagcgctctccaaaacttggctacaaatcganggtcacgatccgacacgatggccttcgnaacaccatgcagactaagaatacgatcaatgtacaattgggcgtacacagcaaccggagaattcgttcgactggcagaagtgatcctcttttaatccgatcgacatacccaataaagtataccc

SEQ ID NO: 9377 - DNA, 442 bp, Zea mays
  unsure (1)..(442): unsure at all n locations
ataatactcatagcttgagcacaaagaatcagtcgttgtccatctatttagtgtatttnttagctctgatcttagcagtggagaagtggaggcaatatctgcaacgtgcagaatctgtgatcagaacagatcatcgagctttgagttttttggaggatcaagtattgcattcagatttgcagaagaaagctatggcaaagcttatggggctgcaattcagaattgtatatagaaaaggtaaagagaatttagctgctgatgctttgtccatagtgggtcatgtgatggctctgcagtctgtttcataagtgacaccagtttggattcaagaagttatcaattcctatgtcacagatcaggcagcccacgatctgttgactcaattaaatggtcatagtccaaatgaacaatgtttttctttgagccaacgtttgattaaaaa

SEQ ID NO: 9378 - DNA, 418 bp, Zea mays
  unsure (1)..(418): unsure at all n locations
gctatagcatatattatcaaacttgttctatagttcttattcactagagggtggatgtctcctctacacaatttaacacacatataaggaattcctagatctttaatacgacaagaacctctaggacaatgaaagatatgagaaatcttaagtctcccattctattctaatttcataagtatgcatttactcttaaggcttgcttgtgagccatacgattggagaggattgggggctattttgcgagaactgaatcggaggggattgaaggggctaaaatccatttttatttaattctgaataaaacgaggaatttagcctcctcaattctcttggattctctngtcaccaaacccactctataggagctaatatcaccaactattataaatcgaatatcacggcgaattttcttatt

SEQ ID NO: 9379 - DNA, 418 bp, Zea mays
  unsure (1)..(418): unsure at all n locations
actcaagcttataccangggtgtattgaacgttgaggagcctcatacttatctttttgggtacgactccaagtgaaaggagccaaacgattttcctccgtagaatataagtcatgctcgacatgtcaagggtgcaaaatgaccaaaattgtatttcttcaatcacataagggtaccacagaataagaatgggtaacttataattttatacaaagatgtgtatgtgattagccctattaatatatgaatattatcactgctatagtgatcaaccatttgttatcctacgtatgtagcatcgtctccctgagatagaaccctaaaaggtataatgatattaaagtaaataaaaatgtttcctgtcaatttactctttgatatctaaagcgattattctattgagtcgcacatattttaca

SEQ ID NO: 9380 - DNA, 370 bp, Zea mays
  unsure (1)..(370): unsure at all n locations
tcttcctgcaggaccttcngcgacgaagcatggtccccacagccacaaaccccaatcgacattcacgccgaggtacccatcgcttggcgcgcgcagtgacgggaacaagtacgattcatggcgtcgaactccgtgattgtcccaatgggcatgggagccgagccttcttctacgcaaggcaatagaggcgccactataggaagagatccaccgccgaccggctacggtgagcctctgcctcgaagaacatgcacggaggtggatgaggcgggtttacgatgcaagatgtcgctgccatcgcttccggcgggcctaccaattggtaattccagggtttagtaatcgatcataaccttacaaaatctaacga

SEQ ID NO: 9381 - DNA, 410 bp, Zea mays
gtgagagagatctggtgtgctcgcttgatctctcgtttctggatagcctctttctttcattctttcttgcgatcatctcatttgtaagcaaggcaagaaacaccaatcgtgtgggggttcttgcgggaagtttgtttccaattgatttgagataagatactcactcggtccgaaggaccgtttgaagatggaaatggttgaaagagacccggtctttgtaccacctcaacggggagtaagtttgcaagaaccgaacctccgttaaacaaatgcgcgtgtcacactctttattcgcttgcgatttgttttgcactccttctctctcggactccattatatctctaacgctaacccggcttgtaattgcgattaagttcgtaaatttcaaattcgccctattacccccccct

SEQ ID NO: 9382 - DNA, 396 bp, Zea mays
  unsure (1)..(396): unsure at all n locations
gcttcngtagataacaacttcgttctcctcataagcatgtacgtttgttgctctgccagccctcacgatagacatgtccggaaagtacctctctctcatgttctcaagatgactctgcttaatggtcgattttccgaagacagcatggcttggtcgccagggccgatcttcagaatcttcatccncactttccacatcatagctatcgctgtcaccaagatcttcagataaaccttccagtatctctttagtaatcctctgtgtttgcttttgccatggactcaataaatccagcanaataaggatccgctaccttcttctcctcaaacagcttcgtctcttcagtcagcttcaccttctcagtcatttcttccccagacatggtgaaaatgcgtc

SEQ ID NO: 9383 - DNA, 351 bp, Zea mays
aggccattattttgtgcaaagcaatcattctgaagtttggcctctttctgcttaaaggaaggcgtggtctgcattatttgaattaaaaggccttgctcattaattactatcaaaaggtatgggtttacttcttttcaatgggttggcatttctctctggttatttatctcatcatggacttagcatatttttggttgcccattatcacattaataggggtcgttcatgatttatttggataaagcactatactcactttgcatgtattttccttacttaacaaattgggctctgggtgctctatttttttgtaatggggctcttgtagttgtaagatcaccgattctttat

SEQ ID NO: 9384 - DNA, 422 bp, Zea mays
gcacctgaggcatgcaagcttctcatgtggagactcaataagatattctgaatcttataattctgaatttcagaccttgagccaaagatcaagcgtgttcaccttgatccctaactcaaatcctaatggccccattaacaaaaacgtgcctaactaacccctctgtcatgtgccagaagatggcattgggacgcgagccctatacacgacaaaaccctggatttgcctcggatttgagcagggagacaaaccggatttccgggctccatatctctgcaacctgtaggcaaaatcctatgacccccacacaagatcggtagcttgtatggaggagaagaggttttgtgcactgaccaaagcgagagcacgctcggatgagtgaccacacgcgccagaacttgggcagaacgcacggacacacg

SEQ ID NO: 9385 - DNA, 439 bp, Zea mays
  unsure (1)..(439): unsure at all n locations
acttgcacttatattatgcaaactagttcaattatgcacttctatatttgctttggtnngngnaggcatcaatcaccaaaaatggggagattgaaagggaattacgcttacacctagtttctatataattttggtggttgaattgcccaacacaaatctttggactaacatagttattctagtgtataagttatacaggtgcaaaaggttcacacttatccaattaaaagaccatgtattgagttcaacaaaagagcaaatgagcaaccgaaggctcctttggtctggcgcaccggactgttcggtgtgccaccggacagtgtccggtgcaccaccggacagtgtccggtgcaccaaatgactccaactccaactcgttcattctcgggaaaatacagaaacggtgcgctataatttcaccggattgttccgtgtacac

SEQ ID NO: 9386 - DNA, 323 bp, Zea mays
  unsure (1)..(323): unsure at all n locations
catgaacaagnggaatgactgaggacccaatctgacaaggaactttgtaacactgcgaacaatcataaaaaagacgttgaacagtctgctaaatatatccattggaaattcttggaaacgcaacttggctcttagaggaagcattgagccgctttatagtgatagtaatggaaatttcttagcccgtgttgagatgattgcacagtttgatttggtaatgcaagaccatcttaagcgtattcataacaaagaaattcattaccattatctcagtcctaagattcagaatgagttgatagtgcttttgtcttctactattacaa

SEQ ID NO: 9387 - DNA, 376 bp, Zea mays
cagctcttcaatctcactcacagatttctctccaaagatttgaaatgggagacgcaagacgtgtgtgaaataaagcgggatgtgtctctcatgatttaaatggaggtccagtcgtgcccatgttgttaggagagaggtgagagcgaatttatataggtggggctccaaaactagccgtttttgacttttctgcacaaaaaccaattgaaccggttttcaaatagctgccgctgacacatcagactgacagaaaaaagtgaacagcgcaaaaacccggtgaaccggttttcaccatactaatacccagtgagtgcccgactgaaccactctttgaataccatctgaaccatccttaataccaagctgaactattttt

SEQ ID NO: 9388 - DNA, 428 bp, Zea mays
  unsure (1)..(428): unsure at all n locations
agcttcgaaattaattctgttattnttttcttatcatccactaataagccttcgactgtttgtagctcgaggtctttcttctcgatggcagcagattgctcctttattttgttttctaaattttcaattataacttcttgccttttatcctctaagtcttgctgcatttttaatgcctggctcaaaagtatactctatggacaaataaccttcgttagaaaatattttcgttaccacaaataataagagttagacacaagatgtttaccttaaaattaaaatagaacaaactgccgacaatatgttgtcgtcggtagcggctaatatccgcttcaagcttcgagaagccgatactctttgataaagtaccaacaaccttcgcaccgatttggtctcgtatgcagcctaacccctcatcatcaatacca

SEQ ID NO: 9389 - DNA, 429 bp, Zea mays
tatataaaaagtttggaccattttggaattaccatatgtttttaaaaatctagaactaatactgtaagcttctttaaatgccttaaaattccttatttaacctaaaaatcatgaaactattgttattaaattctagggaaaataagaaacctatgaaaattggtttcacaattttaggatgtttctacaattttctacaagttatttggttctgaagtaaaaagaaaaggaaaaaggcattaacagtaatgggctgactgtggcccacatggcccatacctattcataatcacgcccgcgcccgcgctggtggctttacaaaaaggccctcatggttttagctaactgggaacaggttcttttactatttcacagagtcgctgacattttgcagataaacccctgaagttctaattcttcgcagcactg

SEQ ID NO: 9390 - DNA, 428 bp, Zea mays
  unsure (1)..(428): unsure at all n locations
agctntaaccctcgcgagacctttccctctctctttctaaccatggtaaattcattatcgtatgtgatattctatgcatatttactttatttgttctcttgtatggagtactgtttgtttcctaatttcaatggatggatgtatgtatgcttgcaatcgcatagagaacgattcggtcgaggagcccgaagaactcgcaggagaagcccctgagcagcagtcggttggtggaggcaagtgtcccttgacctatctctgtcctattcattctttaattcacctcccgcattacacatttatacttaaggattgactagcttttgttatccattaccttgcttacctatttgggttggattattattgtttagctttatgctatggctcaaactctaatcaatgaacatgatgagattatctatgataca

SEQ ID NO: 9391 - DNA, 437 bp, Zea mays
tagaaaaatctggtatgaatctgtgataatacccagcttttccaagaaaactccggacttggtgaacagtggttgggggtttccactccagaatatctttgaccttgctaggatctaccgcaattcctttagccgataacacgtgccccaaaaattgaatttcctccagccataacgcgcacttgctgaacttatcatatagctgatgttccctcaggcgcgtcaatacaatccgtagatgctgagcatggtcctcttcattcttagaatatatcaagatatcgtcgatgaagactaccacgaacttgtccaactcgggcatgaacaccgagttcatcaaataggtgaagtgggcaggagcatttgtgagcccgaaagacattaccatgtattcgaacaatccgtaccgcgtagtaaacgcggtcttcggtatatct

SEQ ID NO: 9392 - DNA, 440 bp, Zea mays
catcaagctaatcgacctgtttaaatactttatatattagattatccgccttgagggaacaccattaaaaaaacaaataaggatgtgctgctgcttacgcctctgcattaaaatggtcgacaccaagatcttcatcccagataaatatgtaatcgtagcgggcaacaatgtcaagatgtataaatcgtttggcataccaccttgggtaaacgagaaataagtctgctacctttgatggacaaatgcataaagactgacggggccctttggaacgcacaaatttcataggaattgtttaagaatttcacaggatgacaggaaccggttcatttccatataaacacaagaatggagggggaggcatcctgcgttctaatggcggccctgattgtgcatacacacaaaagaacaactccacatctggtctgtttgtgacactc

SEQ ID NO: 9393 - DNA, 419 bp, Zea mays
tccatgcgtgcagaaacaggcagaaatcatagtacttttgtttgttgacggcagcggctcgggcttgaagatgaacagcgcgttcctcacccccgtgccaaaaatccagtcgtgcgcgtcccagttcacctgcaccttgagctggttgatggagatgcactcgttgcccctgaacttccactgcaggtgcctgacgaggacgttgacgtatccgtctatcttgatgaccatgtcgacgtcgactccgccgccgccgatgttgctgctgctgcactcgatgctgatgtcgtgcagtttgcccctgtcgtggaacctggccttggtgaggaaccgcttcttgctaaagacgtgctccttcttgcacaccagtgcggcgttccgcaacgactgtcgggacccggtgcgccggaacgccttct

SEQ ID NO: 9394 - DNA, 428 bp, Zea mays
agctcgaaacttctcatggcttgctgcttattgatagtcaagaaagatctaccatgtgttatattaagcaatgatttttctctcctgtgtattcgttttatttcaggtataaagaagttgttctcaatatgggtgagaacagtcgcattgatcgatgtgtttgaaagtattgccaggcatgtttgttgataccctttctctttggtcttcacggattaatttttatgcttattcatagactatggaatataatataacttgactgtgcactacttgatttgtcaaaaaatgtccttgattgtatctttcctactctaagacttattgtgctggagaagaaagttgtgtttctcttcataaatttgctgagttattatctaattctataggtgtgatatgttactttgctgtggtagatccacaaaaga

SEQ ID NO: 9395 - DNA, 427 bp, Zea mays
  unsure (1)..(427): unsure at all n locations
tgacaccttggccgcgagatcggctatcacctttttttggtgttaatcttttgntcgagggcggaattggtcggcacggccgtattatctgatgcgatctcgctggtggtgtcgtctgatcccggcatatctgataccagattggtaggacctctccctcgtcatatattataccagtgattaatggttggccggggacgtaatgtcctgcggctaagaggtgccatgctgtcgcatggtgaatctgaggaatagattagatggaacacagataactggctgcagtaatagatcaactctatgttgatccctgtctgctttattctttcatcctcttagtatttatactcataatacaaactaatttgctgatcataatgggtcgaggagtagagatagggtacccgggcctaccaagtttgtttct

SEQ ID NO: 9396 - DNA, 410 bp, Zea mays
  unsure (1)..(410): unsure at all n locations
agcttggtcggaaggatcagtgtccgtgttgcggtcggaataattatcttccaccgcgacgatcctacccacttcaagaatatcatcgcgaggagatgctcgccgaacgctcaacccgaccacgacacaaatcacggcgcagatcggcaccggcggcgaggtgtgcggtactagagatttttcttgctactgtaccattgggacttctgcttacagcgcctgacagagcataatcaaggcataatttctccataatctatgtgacaacctcataatgcatctgcatcaaagttatagatctataatccatcttcatctttgctatagcatccctagtcgaattcctactgaatccaacccanacttgaacttcacacgtgaccaatgtcactggtggtcatacttttctg

SEQ ID NO: 9397 - DNA, 433 bp, Zea mays
tgaactataatatactcagctgtcagaattggttgaggaactctataagagtgtttttcattgtaccaatactggtaatgccagacatccacaagggatctgatgtgtattgcgatgcatcacaccttggacttggatgtgtgcttatgcaataacgaatggtgattgcttatgcttcaagacagttgatgaaacatgagaagaattatcctacgcatgatttggaactatctgccgtattgcatgctctgaagattcgaggcactatatgattggatacaagtgcaaaatcttcactgatcacaaaagcttgaaatatatattcacttataaggaactcaccctcatacagagaatatggcttgagttgattaaagattattgatttcgaaatacaatatcaccccggtaaaaccaatgttatatccgatgc

SEQ ID NO: 9398 - DNA, 360 bp, Zea mays
  unsure (1)..(360): unsure at all n locations
ggatccttaagtcacctgaggcatgcaagcctactccctcattcatcttcgcctttattttgaagcccgagacatacaagctggccaacgatcaaggcgaggcctacagcaacgctaggaacatccaacaactacgtcgcttttacccttaaaatgtttcaagtcgttcatgtatctcactctctttacatacataaataaattctaacccgcaaggaaagatcagccttgcctcgacaaagcccgaccctcccttgggggctagaaggggggaaccccctctgcgtcaaaatcttcctcggaaaagtcttttaccagaacggctttcgcgcttttcgactgcgtcgatnacaggatcct

SEQ ID NO: 9399 - DNA, 425 bp, Zea mays
  unsure (1)..(425): unsure at all n locations
tgatatctcatggttgctgatgatgaagacgtgttgtttggttgttggatattgnactggggtggcacttggcacagcaagcatctggaaaacaaactccgacctcggtacccttccccatcgctcttcaaatttataaacaactcttgattggatgtatatacattggggggcttttggttcatatgtgcttgtgtacttcaatttctgctgccttttagaagcaaagcatttctcgcttgttagtcttttgatattatcaccaaactatactgatgctaaataaatgtctgcactaataacccaaaatctttgcttgcgttgtaacgcttttccagcggtcgtgaaactgtcacatgctctcatcagttcgcacacatatattatacatgcttctccagaagcgcttgtgggtccatatcttc

SEQ ID NO: 9400 - DNA, 467 bp, Zea mays
  unsure (1)..(467): unsure at all n locations
agctngtgaaggttcttcatccccacatgtgctaagcggcgatgccacagccagcccatgcaagtcttagccattaagcatgcatctagaccgcgcctcttcttttcaaaatcaactaaataaagtttgccgtctaatacacccttaaaagctagtgaaccatcacttcttctaaagacagacacatctatatttgtaaacagacagttatatcccatattgcacaattgactaacagatagtaaattatatcctagtgactctactaaaaacacattagagatagagtgctcattagaaattgcaattttacctaacccttttaccttgccttgattcccatcaccgaatatgattgaatcttgggaatccttattcttgacataggaggtgaacatcttcttctcccccgtcatatggtttgtgcatccgctatcaataatccagcttgaacctccggatgcata

SEQ ID NO: 9401 - DNA, 200 bp, Zea mays
  unsure (1)..(200): unsure at all n locations
tcatcacttcttctaaagacagtgacacctacatcagtaaatagacagttgtagcccattttgcataattgagacacgggaagcannatgtaatctaatgaaatcaacagaaaaacattggaaatggaatggtcaggtgatataacaattttacccattcctttgaccaaaccttggtttccatccccgaatgtgatagc

SEQ ID NO: 9402 - DNA, 479 bp, Zea mays
  unsure (1)..(479): unsure at all n locations
agtcacctgcgcgctgcaagcttctaagggtgccatcttgatactntcttgatagctattattatatgagaactccgccaagggtaaacattcatcccatttctgtgagaagtccagaacacatgctcgcaacatatcttcaagtatctgattaaccctctcagtctgaccactggtttgtggatgataggccgaactgtggagcagcttattacccagggatntatggagttcttcctagaatatggatacaaattgtggtccacgatccgacactatagtcttcggaacaccatgcaaactgagaatacgagcaatatataattccgcataggtaagtaccgggtaatatgtcttgaccggcagataatgagcaacctttgtaagtcgatcaacaatcacccagatagagtcataccctttcgcggtcctgtgcaatcccacaatgaagtccatacttatgtcttcccatttccatg

SEQ ID NO: 9403 - DNA, 366 bp, Zea mays
  unsure (1)..(366): unsure at all n locations
ngtccgaccattntcttaaaagttgatgcctttggattccccatctctattggaggcctaccaacttaatcttatgattggtttcccttccgatctaatcatatggtgatccttgaccttgtgaactctatgatgggcataaaaatatgcttggggctgaagtaacaatctcccatcatactccttttatcaagtttaaggtatggccatgtcttgttcatttccttgggccataatctattttgctctctacttgtaaccgttttgacaggtagagtctctttgtatattgtcacccttgcccaatccattggtatcgtgtgagatttcttattggttacgtctggtaatggtgttatgactaaa

SEQ ID NO: 9404 - DNA, 418 bp, Zea mays
gctgtggtagatatatttgaagatatgatctatgagacaagtgtatgctttttatgaaaccatggccacagtgccatataaaggaaaagaaattgttaaacttctttggatgaaggggattttgacctttggcacctgggcggtaaggagctggccgatgaagacaatgaagagctaaaagaatatgcaatatcttgtgggttccagacgagatctttgctctttggtggggttgatgaagaaattttaggatatatacgcgaccgcgctggggcgaagataatctgcactctatctaagagtgccggatttccggagctggaggccaacattagtggttaccgacggcaacacattgtcggtagcctattttatttcaattttaaagtgagaacttcatctagattcttgctacctt

SEQ ID NO: 9405 - DNA, 215 bp, Zea mays
tggagaagacgcaagatccactgcacagtgcatggcatgctgccttcaatgacgatttgcttgaattaaattatgttgcgtctaaccgctatgtgtttattagcatcgatgcactgttcttgcttgacaacataccatctactatgccttctactggtactaatctctttcaggaatatgctgatgtatttgcagaacatgtgcctcctgacctg

SEQ ID NO: 9406 - DNA, 404 bp, Zea mays
  unsure (1)..(404): unsure at all n locations
gcaagctataccaaatggacgtgacaagtgcctttcttaacggaccaattattgaatnaggttatgttgagcaaccttccggcatggaagatagtgagtaccctaaccatgtctataaactctctaaggcgctgtatgggctcaagccagccccaagagcatggtatgaatgccttaggcgatttctcatcactaatgaattcaaagtcggaaaggccgatcctactctattcactaaaactattgaaaattacttgtctgtatgccaaattcatgttgatgatattatatttgggtctactaacgagtctacatgtgaagaattagtaggattatgacacaaaagttcgagatgtctatgatggtggaagtgaaatacttcttgggatttcaagtgaaacaac

SEQ ID NO: 9407 - DNA, 474 bp, Zea mays
  unsure (1)..(474): unsure at all n locations
taagtctaccgcggcatgcaagcttcaagtgatatgaagttccgtgttgtatcattcccaggntctttcttttcatttcttggcataacataatgtcagaagtcttcatcgtcagacaatggcaggaagccttgcgacttaacgcatctgccactacattagccttgcctgcgtgatagcgaatctccagttcataatccttaataagctcaagccatctcctttgtctcatattaagctctgactgggtgaagatatacttcaaactnttatgatctgtataaatgtgacagacattccccagtagataatgacaccatattttcagggcatgaaccacaacagctaactccaggtcatgagttggataatgttcctcatgcctgcgcaactgccttgaagcataagctatcactcgaccttcttgcattataacacagccgagaccactgcctgatgtgcacaatacacatc

SEQ ID NO: 9408 - DNA, 256 bp, Zea mays
gatcatggcatgaccttatccggggagattcaatctgctgttaggagtgtgaccgacacttgctctggcggattgatgctctgagctctctggaagactttcccccgcgaccgaagtatccgccacccgctcctcaccgaggactgggcactaggctacttacatcttggtgagataccatgtgattgagtccttgcacttcattatgcgtgatgcaccccacccatagttcttaactgcgtactatgccgcgaat

SEQ ID NO: 9409 - DNA, 433 bp, Zea mays
  unsure (1)..(433): unsure at all n locations
agcttatcacctatcagctagcacattanaaaggtagttggaaggaacttaagcttactttactctgccatccttttccagcatcttcgctagggaaatcagcactgagcagcttatgagctgagtatccaagacgctttctcagaaagggaatgattgctttggagcatcccatgtgtatatttttcccatttggttccccagatctgtccaacaacacaacaacagaatttacaattgattgtatagtaattaacacatcaaaagacagaaggtatgaaaatgaggacactgtaaaaaaaatagtgcactaaaattaggtgaaaaaagattgcataatgtccaagcactgtgtgcacaaatagctagttacctgaatccataatatcctccaatattctacatgctccacaatacaggtaatcaacattgc

SEQ ID NO: 9410 - DNA, 376 bp, Zea mays
  unsure (1)..(376): unsure at all n locations
gatgccagggcgtctcccattatagagcatgctcctagcaaatttaaatttctcattttctatctcatgctcattaaatttcgcnagtaatgtagctatgtgatcattttgttgtttaattaaagcaaggtgatcatggacagcatctacattaacatctctacatctagtgcacatagaaacatgatcaatagtagatgtagatggtttgcaagcatttaattcatctatcttagcatgtaaaatagcattctcatctctaagattggaaatagaagcatcgcaaacatttaaatctttagcctttgaaattaaactagcattttcaattntaaggctagaaattgattcattcaatttatcaatcttagcaatc

SEQ ID NO: 9411 - DNA, 405 bp, Zea mays
agtcaacagagcctgagcttccatcatgcaccctccgttgcaagcaaccacctgccatcaaatgcctgttggcactgtggggaccccaatcacttcaagaacaactgcccccaattgaatgcaccattaccaacttacttcaactctgtgaatggccccaaggttccatcctcacccacccccaaggcgtttccttccatcatccagctgagcaaggctcagtaccagggcagggcccgggtcaaccacgtcgacgctcatgaagcccatcaagccccgtgagtagtgctctgtgagatcctcgttgaatgtactgccgcttctgttgcttttgattcaggagcatcccatttatttatagccgctacgtttgaggaagagcatggcatactctctacacatcta

SEQ ID NO: 9412 - DNA, 418 bp, Zea mays
tatgtcttgaccactagactactagtgatgataatttgtgatagaaatataatgatcttatggagaccctgtgtattctccctagtcctgatgactccttcgtatgagagtagtactatctgtttgtgaagatggatcctatgcggatactaatattgattcgttcttgccaagcaggtatcatcatttgcttcatcaaaagctagttatatggtgattttcccagataaaataaattcttggtcttgtctgttctattccaaagcttctctttttgctgaacaatgaagagatcgaaataatgctttatagaacaagtcggtatataatatgaggagaaatatttaccctgctggtaacaccataaataattgaccatcgttataagttctctctcacaattattatacctaaaaat

SEQ ID NO: 9413 - DNA, 355 bp, Zea mays
catgatgttttccacacgaaatagatcctccaccccaacatgcttagatgggataaccagcctactaacctaacagagttttttagaaataatgccatccaactgatggagctcaaattcacaaataaaagcaattcaagatcaccttcgaaattatgaacgtttatcagaggggagcaagcatatattcacataactctccttccgtgacctaatgaacccaagaatgagttatatatataatggatgtaacgtataaagaggggctcatcattgtcttattttcatcagagaaaccatgctatcccttgtcttcttgctggccaatttaatcaatctattttgagtgcaactg

SEQ ID NO: 9414 - DNA, 457 bp, Zea mays
ggccttgaaactcagctgagcctggaagtagctatgcttatatatgcgaatggtctcaagcctagctacgggtgcataggtttcaccaaaatccaaaccttcgacttgtgaataccccttggccacgagtcgagctttgttccttgtcaccacaccatgctcgtcttgcttgttgcggaagacccacttggttcctacaacattttggttaggacgtggaactaaatgccatacctcgttccttgtgaaattgttgagctcctcttgcatcgccatcacccaatccgaatcttgtagtgcttcctctaccctgtgtggctcaatagaggaaacaaaagagtaatgctcacaaaaatgtgcaacacgagatcgagtggttacccccttatgaatgtcgccgaggatggtgtcgacagggtgatctcgttgtattgctcggtggactcttgggtgtggc

SEQ ID NO: 9415 - DNA, 246 bp, Zea mays
gggctggacacgcttcccaagaatgatcccatggaagggcgcagcgcttgctcggacggaggacatatcaacacgcaggagcctcaaggtctcggcatagatgatattgaggctgctgcctccgtccataaggaccttggtgagcctgacgttgccgatgacggtgtcgacgacgagcgggtatttccccgggcttggcacgtggccggggtggtcggcttggtcgaaggtgatgggcttgtcgga

SEQ ID NO: 9416 - DNA, 377 bp, Zea mays
agacttggtgcttcttctacaacaagacacccgagggcgccacaagcttactcctccctgtgatgggtcattcatcattcccaaagtattgaagcccgggacatacaagctggcccacgatcaatgcgaggtctacagcaacgcttggaacatcgaacaactacgtcgctattacccttaaatggttcaaaccgttcatgtatctcgatccctttacatgtataaataaagtctaaccgtcaaggaaggatcgaccttgcctcggcaaagaccgaccctccctcgggggctagaaggggggaaccccctctgcgtcacaatttctctcacataaattgtctaccacaacgactttcgtgcctttcgactatatcgat

SEQ ID NO: 9417 - DNA, 362 bp, Zea mays
  unsure (1)..(362): unsure at all n locations
aaggtccattataaataatagaatgtcacttcacatccttactgctttcttgcatatggcagcatccagagaagaatatgcctcaataatgcgaagctggtgggtcttccacaaagtacactatataatcattaccaaaggattntgccaccctctggctcttgctctttccagtgactataacgtcatcccccttacagatgtgcacgtgagaatcctcatcatgatctatatgaatcaacaattcgcgctcatcgcgaactatactctaatgacttgcatcactaggagtattcttcatgggagactcattctcaaaaaaaggtgcgcctcttgattccatgatagtatcaacatacata

SEQ ID NO: 9418 - DNA, 328 bp, Zea mays
gctgcaactttaagctttatggctaggtttttggttgctttgtttaaaagtgtgggcggaccttgaaaaaccttaggctaccttaaaagcaaaccgtgggaaaccctaaagtcggtaaaattttagaatgttttttattcatccaaagcccttaagcgcgcccggggcgctttaattgcctcgaaaatctctttaaaacgctgctcttgtatccaccttggtggtttggcttaggggcaagccagccaagaaaccaaccctttatcacccattctggataaagtaggatctgttcaaacttaatggaagtgcctccttcataaaatgg

SEQ ID NO: 9419 - DNA, 245 bp, Zea mays
taaataggagtccctaataccttacaactttcatgcctttatggccagcaacccctaaacctgtttaatgcctaagaagtttcttattttaagattcaagtcgaaaaccgacctactcttttactaaactatttgcaaaatttgtttgttgccaactatgttgtgatttattttgggctactaccaatcccttgtgatgaatttagacgagcatgattcaaattcgagatgtcttgatggggagt

SEQ ID NO: 9420 - DNA, 383 bp, Zea mays
caatccatataaaacagttgttttggtgactatataatcgccattcaagagtgcataatgacgcgatctaccgttttctcttgtgacaatcgattttggcacggctacactgttaaagtgaacagtgaactgtataagcctattattacaacatatataaatggtgcctcaatatcaaaatgtgtgcactatgtttccataaaacgggcacaggagaatggcagcataggaaactcaagacaatagaacatgcatcacgcacttcccatattcatgagtcagcggtaactacaccacactgatatgcacaaagacggtttaatctcctacgtgcaccgatgttattgcacccaactcagtggtttatggctaatattaaaact

SEQ ID NO: 9421 - DNA, 398 bp, Zea mays
  unsure (1)..(398): unsure at all n locations
ctgaagcctggtagtagctaggcattaataatgcgaatttctcatcctagctacgggtgcataggnttcaccaaagtccaaaccttcgacttgtgaatatcccttggccacaagtccggcttttgtccttgtcaccacaccatgctcatcttgcttgttgcggaagacccacttggttcctacaacantttggttaggacgtggaactaaatgccatacctcattcctcgtgaagttgttgagctcctcttgcatcgccagcacccaatccaaatcttgaagtgcgttctctaccctgtgtggctcaatagaggaaacaaaagagtaatgttcacaaaaatgagcaacacgagatcgagtggttactcccttatgaatatcgccgaggatggtgttca

SEQ ID NO: 9422 - DNA, 428 bp, Zea mays
  unsure (1)..(428): unsure at all n locations
ctttcccgtctctttctaaccataatgaatgctatatcgaatgtcatacttgatgcatatttactttatttgttcccttgtatgatgtactgattgtttcccaatttgaatggatgaatgtatgtatgcttgcaatcgcatagagaacgatccggttggagagcccgaagaactcgcatgagaagcccctgagcagcagtcggttggtggaggcaagagtcctttgacctatctttgtcctattcattacttaattcacctcccgcattacacctttatacctaaggattgactagcttttgttatccatgtccttgtttacctatttgggttggattattatngtttagctttatgctattgctcaactctaatcaatgaacatgatgagattatctatgatacgctgtcttcccttctcttattat

SEQ ID NO: 9423 - DNA, 370 bp, Zea mays
  unsure (1)..(370): unsure at all n locations
gctaccacatttgaagcatgagcgcccctcntttgcttggncttgcttggctgcccactgcgaccctttagcgccgtcttgaatctcttgatgatgagggccatctcttcatcattaagtccggcccgcttaatttgtgccaccttgctagggagcgcctccttgcttcttggtgccttgagagcaaagagttgaggctcgttgattggaccattcaatgcgtcgtccacgtatcttgccttcttgatcatcattcgcccgctcacgaactttccaagtatcttctcgggcgtcatcttggtgtacctaggattctcacgaatattgttcacangatgaggatcaacgacagtgaaagaccttatcatta

SEQ ID NO: 9424 - DNA, 492 bp, Zea mays
actcagctatcaagctagtcggaccggttaagagccggaatataaatgcagcacaacttccaaaggtgctgagcccaccatctgtaatatggctacctaagccatcgagcactacatcagcgactccaaggaaaagaagaatggctagtgttttagatgctatattggaattcgtgaaagcgccagtttctacttctaccgaagcatttggtgagaaatctaaagatgcaagagaaaatattactgcaagcacgactactgctcatggcgaagccgaaacttcgaaagttgtgccaatagggctggtggaagagagtgttcctgaaaaatctaaatctcctactcctgaagcacctccacatggtgacttggaatacattgttcgacatgcttcacgaaagcaattatcattggaacaaattgccgaagtagaacactatgccaaggacttgaaatacccccgaaggtccctggtgtacgaaagggatgatg

SEQ ID NO: 9425 - DNA, 371 bp, Zea mays
  unsure (1)..(371): unsure at all n locations
acattgctttggctccctatgagtttattaatgccattcttaattccagagcgtctcccattatataacatgctgttgggggccttcggcttactaaggtcctcaaaaacaagatttaacagtatttctggagtttaatgtgtgaacaggtatcctttgactcaagtcggtatcacagcagaccagaataataccaaggttgatacaacgccgaaggtgtgagcaggaaagcttcggcatgacaacaacaaaatgaaaccgacttaaagataaaaaggctattcagacctcgatagattacaatagaattattatcatatgtaaagggcatgaatgtaattttgcatangctgtgtcctgtgcctataaat

SEQ ID NO: 9426 - DNA, 332 bp, Zea mays
  unsure (1)..(332): unsure at all n locations
aagataattaatcatagaaatcgtaatatcaaatttatccatatcaatatggattaagagaacataaatcatataaatataataagcatataaactgactgaacaattgagaataaacagatagcaacataaacagcatgactataaaattaaaacaaacagatatggtattctaatagtatgaacatacattagaaatatcatgatatgatatgacagaacacgttggataaatctatggctacatacgaaacagtagagatggacaacatatataatctgcagaatgttnaaacagtaggagctgtattgatcatacccctgcatgtgct

SEQ ID NO: 9427 - DNA, 454 bp, Zea mays
  unsure (1)..(454): unsure at all n locations
agctngcacacatagctctttngaataccttttatttatctcttttatatgctatgactaatgtgttttcaagtttatttcaaaccaagtcataggtatattgaaagggaattggagtcttcggcgaagacaaaggcttccactccgtaactcatacttcgccatcactccgagcaactctctcgtctttgggggagaaatgagcatcaaagaaaagaacttcatccctgtggaagagagtaaaagctcaaaagcttcgctttttggtataatcttaacttatttattntatgaccaaaggggaagatagcactaaaagggctctaatgattccgtttttggcgattcatgccaaaaagggggagaaatgagcccaaagcataaggaccgcaccaccaccaatttcaaaaacttagtgttttcaaagaagtatttatcatttggtatcctattg

SEQ ID NO: 9428 - DNA, 376 bp, Zea mays
  unsure (1)..(376): unsure at all n locations
ctcgtcagcccttcggttagctctcttgggtgccatcacgttggttttgtcgtagcacgaacggtgggcgccaaatgttggaacttgctctcaatcgcaaagaggccaacaagggtgaacagtggtgacaacaaggttacgtgctagaaggcaatagctctgttaatctggcctcccacgggcactgtgcaggggtatttataggtacctgagcgcccagcgccttgtgctaaggacgcatgtgccctcagctacctangttatccncggaatattcccataaagcggngttacagactgtaattacagggatgcctttacaaatangcccgaacagacggcggcacgcgggcccgtacaatggccngatccacgt

SEQ ID NO: 9429 - DNA, 405 bp, Zea mays
  unsure (1)..(405): unsure at all n locations
tcataacttctagtggcaccttttgttatcttccgatgtctttgggctcaagaatgctggaggaagcttcagcataatgactgccaaagttcttcactcccaaattggtagaaatgtgctaacatatgtcgatgacatcatagtaaaaagcacaaaacaagagaaccatgttgctgatttgcaagagacatttgccaatttcagacaagctggtcttaagttaaatccaaaaaatcgtgtcttcggagtgaagaaaggcaagtttctcggctgtttggtatcgacaaagggtattgaagctaacccaagcaaaatcgaagctatccttcggatggagccgccaaattcaaaataggtggctcaaatgttagcangaanggctggcatcactgaacagttcatttc

SEQ ID NO: 9430 - DNA, 436 bp, Zea mays
  unsure (1)..(436): unsure at all n locations
agcttctaaagggttatcacgtcanangttttatctatttttaccngncgaaaaagatagaccttgtgcagcttgtcaagcanggaaacaagtgggaacctcttatcaaaccaaagatgtgatgtctacattgagacccccaaagctacgtcataaggcccattccaaacttttcctctatctaagcataggaggaagtaaagatggccttgttatagtagatgaattttcccgcttcacttgggtattctttttgcaggataaatctgatacccaagggaccctcaagcgcttcctaaggagagctcaaaatgagttagagctcatagtgaaataaataacgaacgacaacgggtcctagatcaacaaccttctagtggaggagttccttgaggaggaagggatcaagcacgagttcttcgcttccacacaccac

SEQ ID NO: 9431 - DNA, 361 bp, Zea mays
atctgcctacctagatggaaatgttatcatcacatggtttatgtacaaaaggaggtattgactttcgtatgttaagtatttgtaccttggtttccctccgatactggtattgcatatgtttaatatgtaagggggagtattgctagtggtttgcattttcccttttacataccctgatgtcccttgacagtctggtggtcctcaagaggcaacgactaccttcaacggctacctatcggtaatggctagctgacacactggacggatccgtgtccgtcagcgcaaaatgaaggaggcaattatatcccacgacagcgggatccagtggagcaccggacagttcggtactggcaccggacag

SEQ ID NO: 9432 - DNA, 457 bp, Zea mays
agcttcgaggcaacttctaagctctgttcttccgccagcgccaaggggcagaggcgccaggggcttctggggaagatttggggatcagccaagaagaatttactgtctattctttggtgaagacaagggccatactaccaggatgtgccacgtcaccatccaaaagcaaaaggagatagcagaagctgcagcacaacagagtcagccgaagcaggtcatgcacactgcttcgtaccattcgtcttacatcccagaatatgtaggcaatcactctgcagcttctgttgcttcggcaagtcaaccccaagcatcttggcaacagcctccaccgccaccaccaatgcagcgaggacagcagccagaagggagtcagcacactcaccttcagagggatttcagagaggagtccgaagctcgcacagtcaatagcactgtgctagagtcgaacacatttact

SEQ ID NO: 9433 - DNA, 393 bp, Zea mays
  unsure (1)..(393): unsure at all n locations
ctaaagtttcacgcaccttattcatatataaacctgagtgtgttgagacacatgcgcaacgctcacagcgtgcgacatccaaatgctggttcagctattacacattcctatataacacataccattttcacgagtcagattatcatgtgaaaggctgtacattatacatcagaatacttcttaccagataagttgaacatgtgtagattattcttcggcccacactaaaatttaaacacaacagggatattacagntaaactacttctcctgcttcattttaaaggtgcatctgcatttgcatttgaacaagattttaagggtgtctctaacagctaccctatcacatccgctattttacctcctatgttaaacttcattctacaaacagtgt

SEQ ID NO: 9434 - DNA, 389 bp, Zea mays
  unsure (1)..(389): unsure at all n locations
agctntttgaaagctggactacgatttctcttgagcgagntngncgnagaggtgctgaaaatattcgaagtctatcttcaccaacttacccccgaggcaatcataaggctgaatatcttcgtgtgggccgagagaagccaaggtctgaagcctgatgcaaaaagcttctgcaatatacacgaattatcatacgaaacaaaaccttggggtaaagaacagtatcacagtaactttggctactacaattttgtttctcggtctaagtcaagctgtcccgtgcccacctttcggaagagatggtccggcgactggatgacagaatggttttatgtaaaaaatgacctgaaagcacgagagatatcaaatgtatagttatgcgccctatttgg

SEQ ID NO: 9435 - DNA, 231 bp, Zea mays
  unsure (1)..(231): unsure at all n locations
gcactgggacgagctttataaccttggcgcgggcgtggtcccggcggccgctggcgcccggggttcccgcacgggcgtgctctgagcgcgccnccgagtgtcagcccgcgtcgaacacgtgggagctcgcttctgccatggatcaatggcggatttgaaaaccttatcgtgcgtatcttggcaaaaccactgtgtacggtctcttccctggtccataatcctaccttttgc

SEQ ID NO: 9436 - DNA, 470 bp, Zea mays
ccgccgcatgcaagcttctacgtatatatttcgtattaattactagatccaactctatctatttatggttctagagttatcttggtcttgcagtcgggattgccataagactggtgtccacgctgaggtgagcggtacaggtgctgagtcccaacgggagcgggggaaccaccatccaagtgacgacgttccgcgcgctcagcccgcagcagggcgatctcagcacgagccctactcagctcatctaatgtatggtccagctccgtgtttagcacggcggctaggttgactatgctgctcaacctaggattgccctcaccgacaggtgagacaatcacgcctcctgtgctgccagatggacggcggtggtaatacttcaggtcaagaccgtcagctgccccaccgaaaaccgagcagtagtgcgaaagcgcacgccgtgcagcatcttgcatggctgcctcagctgagtc

SEQ ID NO: 9437 - DNA, 251 bp, Zea mays
  unsure (1)..(251): unsure at all n locations
gtgggtcatatcccacagacatatgacaccgaaggacctngactactcacatgacctattcggctgatggctacataagcatcggcgggagtaagtactgtctagttattgtggatgaatattctcgcttcacttgggtgttcttttgcaggataaatctcaaacccaaaagaccttaaagggattctggagacaggctcaaaacgagtccgtcttagggataaaaaagattagaaccaacaccgggacgg

SEQ ID NO: 9438 - DNA, 464 bp, Zea mays
  unsure (1)..(464): unsure at all n locations
agctngaagtacatcttcacccagtcagaattgaatatgaggcagttctatggcttgagcttattaaggactatgaactggaaattcattatcacccaggcaaagccaacgttgtggcagatgcactaagctgtaaggtttcctgtcattgtcttacaatgaagacctctgacaacactctatgttaagagatggagaagctaaacctgggaatggtccaacaaggaactctgaatcagttaaagcttgagtcagtcctcttgcaaaggataattgatgcccaaaaggataatgagggtatgagacacattcatgagaagttaagggctggaaaagccaaatgtttcaaagaagataatcaaggcattgtatggtttaataaccgcatagtggtgccaaagaatgaagagctccgctagcaaattcttgatgaagcacatcttagccgctattctattcatcct

SEQ ID NO: 9439 - DNA, 350 bp, Zea mays
  unsure (1)..(350): unsure at all n locations
agcttgaaaaatagcacaagcgaaagagtttgcgcatcaaatgctatcgctgcgggnncctatntatacccccagagcattgcaactcggatggccctacatgtcattgactttcgctattctcgcgaagggaaggtgtgttttggaccatcggctaaaggccttcgatcatgtcgcagtctgaattagttaaatgcaaaaacaaattaatactgcgaggggctactgttgggggcctaacattttcgaaggtactcaaaaacttaactaatatgtttctcaatataacaaactgtcacaggaagcttcagccttgacatgaacatgggcgtaatatgaaggtgttgatt

SEQ ID NO: 9440 - DNA, 403 bp, Zea mays
gagttaaggcaccggagtttttggccgtctttttttgagtcccaagtttttttctggtcatatagacaagagttgtgaaacatgagacccgaagcttgagaaatatttaaacacggtctgaatgactgaagcttccttgaaggtgtttctgtcaaaaatatccctcgaggagaaaatgaacatgctgattggctagcctagttagctagcacatgggctgtccttaccttccgaagtatttttccaaacaataaaagctccttcggttgtacttcttgaaagagcgagcctcaatatatctcctgtttatagtgaagactggagaactgagatcatctctttcctttaaggtcaccttctttcatatgatgaagcttattacaagagaatagaggcctgaact

SEQ ID NO: 9441 - DNA, 444 bp, Zea mays
agcttctaaagggagaacagcatttaggattaacaaatgttcattttgagaaagacaggatttgtagcgcatgtcaggcaggaaagcaagttggtgctcatcatccacacaagaacatcatgacgaccgacaggccgcttgagctactccacatggatctattcggcccgattgcctacataagcatcggcgggagtaagttttgtcttgtaatagtggatgattattctcgcttcacttgggtattctttttacaggaaaaatctcaaacccaagagaccttaaagggattcttgagacgggctcaaaatgagttcggcttaaggatcaagaaaattagaagcgacaacgggtcggagttcaaaaactctcaaatcgaaggcttccttgaggaggaaggcatcaagcatgagttctcctctccctacacacctcaacaaaatg

SEQ ID NO: 9442 - DNA, 483 bp, Zea mays
  unsure (1)..(483): unsure at all n locations
tcacgggctactggcggagctagccgaagcactggctcgacttgtaggtggctgtattgggctggccacgatggccgaagctctggcggcaatggcgggcggaattgagctcgccggagctaaggaaagggggctggccggtgagggtgagtgtggggcgaagtgaggtgtgcccggngagactttatatgagtgggcgggcacggccgagggcatgggcgcgcggtggacttgaccggacgccggggtgagcgcgcgcgctggttgggcgagctctggcgtgccgaccagggtcgaacacgtgtgcccgtgcgttctgcccatgttctggcgcgtgtggtcgctcatctgagcctgctctcgccttggtcagtgcacaaaacctcttctcgtccctacaagctaccaatcttgtgtggaggtcataggattttgcctactggttgcagagatatggagccaggaaatccggtctgtctccct

SEQ ID NO: 9443 - DNA, 448 bp, Zea mays
cttgagagagtcaagtcatttcttgttaactcaatctatcaatcttcaatgatctatatccatgattgacccaaggttatttttcaaattactatatcttaaactcatatcatctcgaggggagatattgatgttgtaggaaataaaaaattatcctgtgccaaaaagtctagacctacaacatggaggaaagccaaaggatggtaacatttatgcctttaagtataagtatcttaaaatatcatttattatgtgtcttgtgtagtcacatagaaaaatgaagcacttcaaatatctttaaattatgtcgccattctttgaagaaatttctctcatatggtagatagcatattcatcattactatactttggcaatctacatgctattaataagtaccccatggcatgatctacactaattatcttattattgccatgaatctagata

SEQ ID NO: 9444 - DNA, 415 bp, Zea mays
  unsure (1)..(415): unsure at all n locations
agaacttcaagtgcaacttgaatattgcaaaacatcaatgcctccactttagtattggaatctaagtctagctctaatgataattcttgcaagcattgtgccaaatatcatgcttcttgttgtctaactaaccatgcaaggaagcatagcccacaggtgaaggtcaaagaaattttgaaaagatgctctaacaatgatgggttaaagaaagttgaacccaagtacaagtcccttaagcccaacaatggtagaaaggggcttgggttcaactcattcaaggaaaaccctagcacagtgcataacgggtggagatcccccaaggtcatagagggaaccactctatatgatgccttggggaggatccactcctcanatgacaagtcatctcaggtaaagggtaacttgagttccacaa

SEQ ID NO: 9445 - DNA, 444 bp, Zea mays
gcttcaatcaatttatgtattcttcggtctactattcaacatgataaaacactaatgttgtgtgttggtcacgggacatctgaaacacacattctccgacgtcctctctcgtccatccaattctaacaaaaaactagagatgtcactgtgatggtcatatgctaaccctcgatcttcaatcaaaagccttacctaagggaccgtctcatcatgccccgtcattgcaaaacacacggcactacggcagtcacatacccaatacaataaaaacagaccaatgcctatcaatagttcaggttttgatgtttgatgatcaatataatcatttggactaacattatttgctagcggtcttgattataatacaactgatataatcgtggacttgaataaaggcaacagggtgatcaagatgatcaacattttaaaaaagatgcattataa

SEQ ID NO: 9446 - DNA, 128 bp, Zea mays
tcacgctgggccatcctccaacagacacattttgacgaccgactggacgcttgagctactctctcatggaccaatctctggccgatggcttacataacacacaagcggtatgtcccggccggttacca

SEQ ID NO: 9447 - DNA, 381 bp, Zea mays
gaaatctatcttgctcaaggctgctttcctcagtgagatgacctctgatcaacggttcccacgtgcaaccagactactttcgtcatcaaattctttaagcgcccttaaagctgtgctaagaactaagccctactaacaaaaatatctgtgtaagaacgataaaaccataagaaagtcaacacgcataacttattttatgagaaagagcgtatataccttcaaactattataagcgaggttgtctaccacttcacacttccacagcgcatataaaccaagctctagctcaccgaatcccatgttctttgacatttcttggcaaacagaaatctccttgttgtccggtaagcaacatagaacatcatcttcttcagcaccact

SEQ ID NO: 9448 - DNA, 373 bp, Zea mays
  unsure (1)..(373): unsure at all n locations
gcaattcattaacagacaaagaaatcatgcaccgttaatgaatgcattcgaacacttgantaaattttaatttactctctacttaggttaacaactaataatgtattattttaattgatggatttgaggtgttacatcatcgctccgtatccgacccgaatctgaagctgcagtatctgggtattacccatatccataccgaatataaaaataccggaatccgtatccgaaaaaacggggatttacactatccatatctggtacccgaccggtatacccgacccattttcaccctaccaccacttgctcaaatcaccactctatctctcacaagcagattctctatctctctctctctatatataagcgctcc

SEQ ID NO: 9449 - DNA, 422 bp, Zea mays
  unsure (1)..(422): unsure at all n locations
agctactataggttttgtatgagaagcggtcttctcaattccggtaatgaagcaccatgagactaatcaaggaaggaatccatgtggataatcttgaagaaaaatgtgtgtgtgttggcatcgatgctttctcaataagctagcttgccaagcgaaagccagaagcctgaagatgatctttgagtagccataatcatcgtttgcaatcagcaaccaaaggctccgccaggccagattttgttgaagttccatctcctccaagagttgcaaagtgaagatatgtagctgaagtaaagctatacccataacccttgtaagccgaatctcgaggacgagattctttntaagtggggtagatttgtatcataccaatacttcaaatcctgagattttctcatacttgctctacattcaaaatgaat

SEQ ID NO: 9450 - DNA, 379 bp, Zea mays
  unsure (1)..(379): unsure at all n locations
aagatagaccttgtgcagcttgtcaagcacgtaaacaagtgggaggagcacatcacaaccagaatgtgatgacaacatccagacccctggagctgctacatatggacctcttcggacccgtcgcctatctgagcataggaggaagtaagtatggtctagttattgttgatgacttttcccgcttcacttgggtattctttctgcaggataagtctgaaacccaagggaccctcaagcgcttcctaagaagagctcaaaatgagtttgagctcaaggtgaagaagataaggagcgacaacgggtccgaattcaagaatctttaagtggaggagttccttgaggacgaanggatcaagcacgagttcttcgttcctacaca

SEQ ID NO: 9451 - DNA, 432 bp, Zea mays
agcttgtcccatcactcatcatgctcctcctctgactatgtagggtcccactcgactatccaacccagtggcaagatggacgaccaagtcactctagcaaccatgtcctccaaagaacctgtaaaattatgccacaagcaaggctgagtatactaatactcagctagacttatccggtgtgaggagtctactcctctacctctagacatgcaactgtttggttgaggggtttggtttgccaaaagcactagctgagtataaaatcaagttttagctttttcaagttttagtgtgactctcttaagacaaaatatgtacctatccaatcatacatggtatcaaacatttagcaatcaacatcttttgccaagtcatcacatatccacttgttactcaatgtagcagcatggatcaagcagtctcattaactgc

SEQ ID NO: 9452 - DNA, 474 bp, Zea mays
tgacccggggacccgcgtcaccggaatagcccaatcgtgctcaccggagttcaagaacccgccggcgcacgtggaccgggtaagcccctgcaccgttttccaattccttgcgcgtacggcctctgtgtcaccccgtgaagctcctcgtgcaccctaatcgatctatgccgccgtggtttggccggagcacgagccgccgacgactcccgccgcctgtgctcgtggccagggtagctccgaccacctccgacaccgacccgcacatcggcgtgaccgttgcgacctcccggacgtcactgaccaccccgccggagctctactgccgccggtaagccccaccgccgtaaaatgtaccacgggcactgtttaagccggtcagggagcgcgggttagaatttatttaagtccagggggctttgcgcaatgtcagtgactcaagccaatagtggaccaagggctgttctgtgagaaaag

SEQ ID NO: 9453 - DNA, 153 bp, Zea mays
tgtgataccacttcaaacccctggagctgctgcatatggatctcttcggacccgtcgcctatctaagcatatggggaaagtagtatggcttacgtattgttgatgatttttcccgcttcacttgggtgttctttttgcaagataagtctgaaa

SEQ ID NO: 9454 - DNA, 432 bp, Zea mays
  unsure (1)..(432): unsure at all n locations
agcttcgtcatctgataggaagttgcccttttagtaacaaattattncagttctccaatcttcactgtacacaggagaaatagtaagaactgctctttcaagtaactccactgaaggtgcctttattgtttcgaagaatacatccgaaggtagcggcagcccctgtgctgcagacctggctaacaaatcagcatgttcattttgccctcgagggatattcttaacagaaaatccttcgaaggaagcttcgatccttcggactgtgtctaggtatttttcaagcttcgggtctttagccttgcaacttttgtcaatatgacccgaaacaatctgagaatcnagtttaaggatcgccctcctgatccccatcgcctttagtttccgaagacccaggagcaaggcttcgtactcagcaatattatttgtgcagct

SEQ ID NO: 9455 - DNA, 260 bp, Zea mays
gattatttcacaactatattaacgaaggaatgacctttgcgatttggctcatgaccttcgtccgaagatcgtgatgcccttggggagataatgcttcaatggatgaatggccttaacatttaacatttgatgttgccttgatctgattcaagcatttagaacatttcccaacagtcccatttcgctgctgatctctgatttcaatccgactcatatgagcccgtctaaaatccctcaattaggttttggggttggatttt

SEQ ID NO: 9456 - DNA, 95 bp, Zea mays
agctctgattgtgtcttggaatgtatttcttgctcttgtattgaatgtgaaagattggagtgcttgggtgacgtgaatggacgtggttctcgccc

SEQ ID NO: 9457 - DNA, 433 bp, Zea mays
  unsure (1)..(433): unsure at all n locations
agctntgcctcgggcagactaaggccagatttatataccacacaatgggagtggagagatggcgagagtagcgtgtaccctctgtggcaagaggctggacggtggtgtatctgtgctctcggttggcgtgaacctgatctggtcttaagaaccccggtggcgggttgacatatgcaagggttaagtgctacatatgtcgtgtgattggagatcctcagttgagtataatcgattcggatcgccgtaccttcgcggttatgaagacttggtcactgacctatacgtagaactccagtaaagatgaagggattgttaagaacttggctagtgcaggtcaagtgattgatctagggtagaaagaactcttttataggttattttacttaactggacaaataanactggatttttaaggatccacttttagtaagca

SEQ ID NO: 9458 - DNA, 389 bp, Zea mays
gtgtacccttcgtggcaagaggctggacggtggtgtatctgtgctctcgggtggcgtgaacctgatctggtcttaaaaaccccgatggcgagttgacgtatgctatggttaagtgctacatatgtcgtgtgattggagatccccagctaggtattaatcgattcggatcgccgttacttctcggacatgaagacttggtcattgccctacatgtagcattccagtgaacaagaaagtttgataaaaagatggctactatatgccaagtgcttgaactagtgtagagagaactctagattcaggtcatgacttaatttgctaatataactggagtcttaaagatccactattatttagcattttttgcaacagagtcttgaatcttgatt

SEQ ID NO: 9459 - DNA, 380 bp, Zea mays
  unsure (1)..(380): unsure at all n locations
acctgcctcctcttttgcaaaacaactaaataaagtatgtcggctaatacacccttagatgctagtgaaccatcactttttctaagacagacacatctacatttgttaatagacagttataccccatgttgcctaattgacttacagatagcaaattatatccaagagactctactataaacacattagagatagagtgctcattataaattgcaattntacctaacccttttaccttgccttgattcccatcaccgaatataattgaatcttgggaatctttattcctgacgtatgatgtgaacatcttcttcttcctcgtcatatgggttgtgcatacgcttcaataatccagcgtgacgcccggatgcttaacctgc

SEQ ID NO: 9460 - DNA, 467 bp, Zea mays
agcttcaccccgcgacccaatccgctccccttttgatcttttcaccctcccggcactatcctgcccgagtctagcacgaatcgccgcgatcagcgcgaatccttgcgcaaaggtcaccgacggcgaggggactgaacctgaatatcttttgcgcactgttccatcagaacaccattcagaatacctgacagagcttatttgggggtgatttgctccaaatttcgagtagaaagttgaccattcatttgtatcaaagttgtagctctataatccagctacaaatcgactatagagacctggctcatttacttactccttcgagcttgaattgagttcaaagtttagcagatctcactgtcagaccaacatcagactctgagttgactgacagtcagactttagggctagttatctccaaattttgtatgacaccaaggattaattacttatgcaaagttatgctccta

SEQ ID NO: 9461 - DNA, 426 bp, Zea mays
tgagatgaagctgagtctctctgaagagaagaacctgtggttccttatagcgatggcggagaccaatacggaaaaaattaccaaggagatactggaaggcttgtctgaagatactggtgacagcgacagttacgatgtagaaagtggtggggaagagtccgaagatcggccatggcggccaagtcacgcggttttcgggaaaacctccattaagcagagtcatattgataatatgaggggccgatattttcaagatatatctattgtgagagctgatgctggagaaaaaacttctcccacccccgaagaagatgaagtcgtaatcttccgaagctttcttaaggctgggcttcgattccccctgagcaactttgttgttgaagttctgaaaacatttcaaatctaccttcatcaaattactcccga

SEQ ID NO: 9462 - DNA, 424 bp, Zea mays
  unsure (1)..(424): unsure at all n locations
gcatattgtggtacccatcgcttgatgggtccgttaaggttagttaacaaagatctaggaacccaaatgtcctttgcgctagcgcttggtaaactcgttacctttctagcacaagttacaatcttgggttgcctagttatatatgaatcaaatgacaagttaggagtgggatttttaccaatgggacaatctntgcattgatgtcccttcttccggcatgtgtagcatatgcgttttccaagttttgaagatttcttctttccttgtttgttgcttgctacatggttagtaaaaactttctttttaacatcatgcctttttgtttaaatagggacaagatttaactaagtgtcccttctttgagcatttaaaacaaagtctattatcctttgtaataatcaagccatctttatgtagggacatg

SEQ ID NO: 9463 - DNA, 352 bp, Zea mays
  unsure (1)..(352): unsure at all n locations
tttctatgaaggacttatgggaagcagcatatattttgggcataacgatctatatagataggtcgaagaggcttatatgattaagtcaagatacgtacattgacaaggttttgaaacggttcaacatggaacagtccaagaaaggtttcatacctatgtcacatggtaaacaccttatccagatgcaatgttctgcgacggctaatgagcgggagcgcatgagtaaggtaccatacgcctcaacgattggatcaatcatgtatgccatgataagtacacgcccacatgtntcatacgctataaatgctacgagtagataccangctgatccaggtgaggatcactggacagc

SEQ ID NO: 9464 - DNA, 78 bp, Zea mays
gcgcgcagcagggattggaagaatttcttgaggcagaagaagcacctgatatgggaacggaaacgacccataaggggg

SEQ ID NO: 9465 - DNA, 430 bp, Zea mays
agcttctaaagggttaacacgtgataggtctaaccattgtacattgcgaacaagatagaccttgtgcagcttgtcaagcacgataacaggtgggaggagctcatcacatcaagaatgtgatgaccacttcaagacctctggagctgatgcatatggacctcttcggacccgtcgcctatctgagcataggaggaagtaagcccggtctagttattgatgatgacttttcccgcttcacttgggtgttctttttgcaggataagtctgaaacccaagggacctcttagcgctttctaaggagagctcaaaatgagtttgagctcaaggtaaagaagctaagatgcgactacgggtccgaattcaataatcttcaagtggaggagttccttgaggaggaggggattaagcacgagttcttcgctccctacac

SEQ ID NO: 9466 - DNA, 470 bp, Zea mays
  unsure (1)..(470): unsure at all n locations
cttatcggtcaatcaaaacagcttgaacaagaaaagctagttcttaattctaaacttgtatccgaagtccaagccaactcaaatttgaagaaatcattaacaagccttcaggataaatgtttgaattttagcaacaattgtatccaacaactaaagaagatcttttactcagttggagccagcagcgggaaatataccccttcggatgaagatttaccaaaagccttcgatcatatcgaagctgaaattgaagaacttgacgaagttatagctgggcacggtgacttctgtgcctgngtagcttctcggggtactgctgcagcattcctgaaggctggctgcgagcatggaaagatcgtcaacaggcccaacttcaccctgtctccatcaatcctggacgatatacctgacctcgcccgaagtatctcanatagatntataanaatgatatggacaaaaggcgggcggga

SEQ ID NO: 9467 - DNA, 409 bp, Zea mays
gctaaatgcctctccaaccttgcacttttatttgtttgtacaatcgcgggtgggtctatgaacatagggagccaccagatttccttgacaaataggctcgtatccgatacgaactgcacaaagggtcggttaacttatacaaagtcagcttaatggttaaagactttggcgcatactgttgggagccgagacatatagatgtcacccaacaacagaagccatatatatgatatgattagcgaggagtagcttaccgatctaccttgtcttttaacagcgatgctaaagcttactatttaacttgttaaatgtgggttctgaatcactaaatatcactcgagggatattgattttattgggagtgaactattaaatgactaatatgatatactctcgcatggatatatta

SEQ ID NO: 9468 - DNA, 395 bp, Zea mays
  unsure (1)..(395): unsure at all n locations
ctcttcttatgtgaagtanagtcttctctgatagtgtctgtctgcttgggcgtggcctgatcgatggggacagtcttggtcccgtcttggctctgcagctgtgccttgtcgtgctgtttatcggttgggctggtgggcgcaaggacctctcactgggtcgtgagacagtgcacgttcctctgaccgggcacgaagtcccgctctatgttgcgcgccgtctgctggttgccgtagaccataatagcgcctagcagacctggtatcttcatacataggtacagtccgtggatggcagcttcaaacttattgatggagccccggcccatgatggcgttgtatggatataccatgtcgacgatatcgaaggtttcttgctcacttctggcattgggtgc

SEQ ID NO: 9469 - DNA, 348 bp, Zea mays
  unsure (1)..(348): unsure at all n locations
agctntcatccttcttcttcacaaacagtgttggacatccccaaggcaaagtgcttgggcgaataaatcccttatccagcaactcttgccattgcttcttcaattctgccaactcagcgggtggcattcggtagggcctcttggaaattggggtcgttcccggttgcaacttgatggtgaattcaatatcccggtctggtggcattcctggccattcatcagggaagacatctgcatactcacagaccactgggatcttcttcagaggtaactccgtcatagagaaagcacatgactgagtagaaccttgactatgcagaattaaagtgaagttcccgcagaacggag

SEQ ID NO: 9470 - DNA, 371 bp, Zea mays
  unsure (1)..(371): unsure at all n locations
gcgatacggngagtcacatcggcacgcaccgttttacttcacccgtgcgcacacacgctcgactttcgcaccagacaccaccctcgcgctccagttctctctcaccagcggcgagcagaagattcatgggtggcggccctctcttgccctggcgatggcgacggactggttttctttttctcactgtgctaatggcggctcgacggattcctctctggatggctcaaaggggcacggctntaaacctcggaccgagtccaggcaagtgggcacgccgtgggatcacggtcgattccgggtcagcgcgatccgatccccacgggaaagaagaagaccacgccagccaggtgggtcccgcacgcaagcgacag

SEQ ID NO: 9471 - DNA, 211 bp, Zea mays
  unsure (1)..(211): unsure at all n locations
atactctaagtcacctgagggcatgcaagcttatgcaactgcntgaaataatgagtattaagctgggtgccactatctggtactatgcttataggaacgccatgcaagcacacaagctaagccgtgtattggaccgctaacaccacactgttgttggccggccttgtaaacggttcactactacccaaatagaatcgtaaccagtatgagt

SEQ ID NO: 9472 - DNA, 316 bp, Zea mays
gagcttatatcatatacatggggtgtgagagtttgttatatatttatgtgtcacacgaaggtgtttctacatagcaacatatatgacgttcttcgactcactactctatagtgaaaatatagcacataaatatctccgacatcttgctgataatagtatatagatatattttgcgtaaaaccacattagcttaattgagatgtgcctcaaatactattattagaagggagtttaatttctatgatgcaaacggagctaacacacttacatacactttactagccaaacagcacctgaagaaaccacccacgtactc

SEQ ID NO: 9473 - DNA, 223 bp, Zea mays
tgccattgtcaactgtgagctctgacgggactccgaatcgacaaacaatggtttgccagaaaaatttctgggcagtcttcgatgttatcgtggatactgctcttgcctctaccacttggtgaaatactcacgcgacgaagtgaattgagttccttgggccgggtacggccacatgtcagccccacctaaagccactgggcatacttggaacgaaggttccacg

SEQ ID NO: 9474 - DNA, 373 bp, Zea mays
  unsure (1)..(373): unsure at all n locations
gtcttcatcgcaagacagtgacatgaaaccttatggctaagtgcacctgccactacattggccttgcctgggtgataatggatctccaattcataatcttaatagctcaagccatcgcctttgtctcatgtttaactctgactgggtgaaaatatactttcagcttttatgatatgtataaatatgacagatattacccagctgataatgacgccagatcttcanggcatgaaccactgcagctagctccagatcatgagtgggagaatgctcctcatgccggcgcaactgccttgaagcatacgccattactcggccttcttgcattattacgcagccgagaccactgccggatgcttacaatacacatcaa

SEQ ID NO: 9475 - DNA, 430 bp, Zea mays
cacctgaggcatgcaagcttctccaccatgtcgctgctagccaagttgttgcagctacctccatcaatgatcaaacgacatgaacgctccttaatgacacactttgtttgaaacaacgtatgtcgctgattctgctctgccttctccatttgtgcactaagcacacgctgtacaatgaggctctcataatgctctgcatcatctgcaccaatctgttcttcgggtgggatcatagtgcctgcatcatcagccgcaagcaaagcaagtgtagcttcatccaaatcactagcagaagaatacccaccatcgtcttttaccaccaaaacacgctgattaggacaatcacgctgcacgtgtccatagcccttgcatcgataacacagaacatctcttgttctacctgtggaagctactgaagaggactacctgc

SEQ ID NO: 9476 - DNA, 447 bp, Zea mays
  unsure (1)..(447): unsure at all n locations
cttcgtcttcgaggtccttagtttatcaaagaanaattatacagaattggagaaggtgctgtatgctgtcttgatggccttcaggaagcttcgacactattttcaggcatacaatataattgtcccttcttcacaatcattgaaggatattatgagaaatagagaagctactggaagggttggaaaatgggctacggaactcaatgagttttgcattgattatgtgcataggtcttcgattcagtcccaggcgttagcagacttcattgctgactggacgccaggggctcangaagaagaagaagcgagtaaagtttctgaagcttggacagtattctgcgatggttcttggggaacccttcgggcaggagcagccgctgtgttagttgcaccctccanagttaaaacttgttacgcagcaagacttgatttagctgcacaataaca

SEQ ID NO: 9477 - DNA, 463 bp, Zea mays
  unsure (1)..(463): unsure at all n locations
atccatggcaagtcgacattaatttatatccaaccaaacattttttttttttataggtgaacncaaccatcaaatggacacttgcagtatttcggacagcacttcagcagctatttgttttaatcataactcatcaaatattaatccaaaaatatcacactaggacttcctggaaagcttaaaaggcgaactacaactttggtattttgacctcaacacgattcaacacttatcaatgtcgaaacgtgctcatacaacagctctgtccagatttggactagatcatacttgctacttcaaaaattcacaactaaagattccgacatccaaacaaagtgatcttagactttctggaaagctaattaaatgttctacaaattatttataaacatacctggctggttgaatatgtatcaatggtaaaatacactagaagactttgctgtccagaattggacagatt

SEQ ID NO: 9478 - DNA, 414 bp, Zea mays
cttaccaagagtggcttgacaccattgaagtgatgggtaatgaaattctcggcagatactccaaaaaagaagatcaactaatgactgtagccttcggcactcgtgcaaagcaaaggttgaaccgagtaatggatgctctggaacttgagtatacctactactaactgctggacaaggatgccgaatggcaaaatagaaacacagtggctggtgctctgaataaagacgatgaagaacaattgaataagaaaaagccgaagcctgtaccgaaaacatatgcttcgataaagagaaaagctactgctcctaagcagacagctattgacgaagaagaagaaactgctacaacaccctctaccaccgacgtggaggaaattctaaatgtaatgactgaatctttgcctgtcacactga

SEQ ID NO: 9479 - DNA, 407 bp, Zea mays
  unsure (1)..(407): unsure at all n locations
cgcatgacaatatctttgatagcttcgtgttaatgtttatcaatcancacatagaaccattctgtcatccagtctccaggccatctattccgaaaggttggcacggtgcagcttgaccctgaccgaaaaacaaaactgtagcagccaaaattgtcgagatattgctccttaccccaaaggttttgtttcatatgaaaatacatgtatattgcagaagctttttgcgttaggtttcaaaccttggcttctcacgggccacacgaagatatctagccttattattgcctcgggggtaagttgatggagaatgacttcgaattattttcatacctccacaacgaagctgttcaaaggaaatcgcagttcacctttcaaaaagttcggtcactacgacctcattttcttaa

SEQ ID NO: 9480 - DNA, 243 bp, Zea mays
ctaccaggatgtaatcgttcttggccgaagagaggagtaccatgtctgggccattcttcggactgccatgacgaaggactttgccatgacagcggtgttgcctccatatgaggatatcgctgcctcatagctcatcaagaattgtttgggtccgatgcccatcatacaggcaactgggggttgtagattgggcatggatacctcagtctgcgcaagaaacatctcaaataagtacatgagaag

SEQ ID NO: 9481 - DNA, 444 bp, Zea mays
agcttcaccggaatttccgggcacgtcttgcgccccggaatttctgtgacctccgaagctgccgataacagccgggagagtctcttcgggactacattcggcgattcttgaagcagcgcaccgagctgcccaacatcaccgactcggatgtcatcagcgcgttcctcgccggcaccacctgccgcgacctggtgagcaagctgggtcgcaagacccccaccagggcgagcgagctgatggacatcgccaccaagttcgcctccggccaggaggcggtcgaggctatcttctggaaggacaagcagccccagggccgcccatcggaagatgcccccgaggcgtcaactcagcgtggcgccaagaagaagggcaagaagaagtcgcaagcgatacgcgacgccgccgacgctgaccttgtcgccgccgtcgagtacaagaaccctc

SEQ ID NO: 9482 - DNA, 492 bp, Zea mays
gcttctaagggagaacacgtgataggtctaaccaatgttcattttaataagatagatcttgtgcagcttgtcaagcaggataacaggtgggaggctctcatcacaccaaaaatgtgatgacaacatcaagacctctggagctgctacatatggacctcttcggacccgtcgcctatctgagcataggagggagtaagtacggtctagttattgttgatgacttttcccgcttcacttgggtgttctttttgcaggataagtctgaaacccaagggaccctcaagcgcttcctcaggagagctcaaaatgagtttgagctcaaggtgaagaagataaggagcgacaacgggtccgagttcaagaaccttcaagtggaggagttccttgaggaggaagggatcaagcacgagttctccgctccctacacaccacagcaaaatggtgtggtatagaggaagaacacgacgctaatcgatatggcgaggactatgc

SEQ ID NO: 9483 - DNA, 409 bp, Zea mays
  unsure (1)..(409): unsure at all n locations
agcttgttgngaattggacaaaatgacaacactgggttatttattgncttgnatggcatgacttaattacattgaagtcgnttattgcattgagaagtacacatggccacagcttagtttttagagaagcatattaaacaaaggtataagcgaaacatgaagattgttttaccaacttaattttagagaaccaggtttgactaccatgtcaatgtgggtatcttttgtgagcaaatatgtctgaaaacatgtgatgcctcataatcagtggatctttgttcttttaaccgacagcgttgcttaacaatttaattacttgtaacagatctgcgtgatgataagcagttttttgntgatcaccctggggctgttccaatttccactgcccagagatgctatctgctttgac

SEQ ID NO: 9484 - DNA, 167 bp, Zea mays
actaactggacagcactcgtaacctttttttacactttgctgttgagtgcatcacttactagcgaactccggaaatcctgtgaatatacatttggggagtcttaatgctcaattgtctcgtactcctattggataaccataagtcatctctcattgcttattgtctt

SEQ ID NO: 9485 - DNA, 447 bp, Zea mays
catgaagcttctaaaggataacacatattgggatttacatttgttcattttgagaaagacgggatttgtagcgcatgtcaggcagggaaacaagttggtgttcatcattcacacaagaacatcatgacgactgacaggccactcgagctcctacatatggacctattcggcccgatagcttacataagcatcagcgggagtaagaactatctagttattgtggatgattattctcacttcacttgggtgttctttttgcaggaaaaatctcatacccaagagaccttaaagggattcttgatacgggctcaaaatgagtttggcttaaggataaaaaagattagaagcgacaacgggacgaagttcaagaactctcaaattgaaggctttcttgaggaggagggcatcaagcatgagttctcttcttcctacacgccacaacaaaat

SEQ ID NO: 9486 - DNA, 472 bp, Zea mays
  unsure (1)..(472): unsure at all n locations
tccatcgataccgcctcagactgttgaaaaccagctgtatgtcttcgatgaagntttccgagttctccgttttgattaccacatcatctacgtaggcctccacacgcttgccccagtgatcggctaagcatgtttgaatagctctctgataagttgctccagcgttttttagaccgaacagcatggaggtataacagaaagcaccaaacggagtgatgaacgctgttttttcctcgtcttcctttgccaaactaatctggtggtatccggaatagcaatccaggaaagacagcacagaacatccagcggtggagtccaccacctgatctatcctcgggagcccgaagggatccttctgacagtgtttgttgagatcagtatagtcgacgcacatgcgccaatccactttattcttttttagtacaagaacagggttggctaaccactcggggtgtaacacctctctaataaa

SEQ ID NO: 9487 - DNA, 378 bp, Zea mays
tggcttctacacaatatggatgagatcatcttattcttctttgacttccgacaaataagggaacaagtttacaaatactttgagatgactaggggcttcggaggaatactccacccgaggcatgttatgacattcataatcttacctcaagccaatacaggggaaattatacttaagggcatcaacacagcttccaatcatcaagaacacagcacagcttcttttggccactaatcccaagaggcagaggaggtataatcttctgaggaagattcagctcgcaaccaagaaggttgtattgcttattttgtggacaagatatgggcatacaactagaacatgccatgtcacaatatacaaactaaagggaatatctta

SEQ ID NO: 9488 - DNA, 407 bp, Zea mays
agctatactcaacagcatactctgcatatatataaccttgggtagagaacatcttctatgttaaaaacaataaaggttaaagaaaagttgtttaccttgaaattggaatagaataaactaccaacgatgtgctgtcgtcgatagcggctaatgtccgactcgagcttcaggaaaccaatactctttgatagagtaccaataaccttcgctccggtatgatcccagacacagcccaacttttcgtcatcaatgccaccgaagagaagtgcccccggctgatatccgcaagatatggcatattcttttagctcttcttttttagccttcatcaactcttgtccatctaagttttgaaagttgaaaatgtcatcttccgaagtgtctttggctatttctttctccttttc

SEQ ID NO: 9489 - DNA, 350 bp, Zea mays
  unsure (1)..(350): unsure at all n locations
agcttctatgggagaacacgtgatatgtctaactaatgttcaattcgaaaaagatagaccttgtgcagcttgtcaagcagggaaacaggtgggaggctctcatcacaccaaanatgtgatgacgacatcaagacccctggagatgctgcatatggacctttttggacccgtcgcctatctgagcataggaggaagtaagtatggtttagttattggtgatgactnttcccgcttcacttgggtgttctttttgcaggaaaagtccgaaacccaagggaccctcaaacgctttctcaggagagctcaaaatgagtttgagctcaaagtgaagaagataaggagcgacaacg

SEQ ID NO: 9490 - DNA, 474 bp, Zea mays
  unsure (1)..(474): unsure at all n locations
cacgcatgcaagcttatcctctgataccaactgtaacactctttggttccacaaacaatccggtatgctactgaactacacttccgacgtccatatataaaatttcagcagcatcccctatgctagattgcataaaagagggggcaacagagtataaacatatatcatgactaaaacatactaagtattattaatcggctagcaaggaaagataaacatacgacctgaactgaattaaccagtgcgcacgaccatataaaacataaacaaacttcctttgacaataaggtnctaattaaatcatggctgcgcctgggcagctgtattgtgagagtgaaagtggacgtgctgctactctcctcattcccaacatgtatcaagtacctgcattgagtaatgcaagagtgagaggacacatctcatcactgaaaataatatcaaacagtgtaaccacataagaacattgcttaccac

SEQ ID NO: 9491 - DNA, 387 bp, Zea mays
atgagtcgaggcttgaacacataaatagaaaagggtggcctagctacaatgtattatgtatagcggacatggatatgcgattcactttgtacgtggtgggttgcctggtttttgccatgacatggtagtgctcaagacttgtatgggagaagcgaactatccacacccaccagcaagtatggtggcatgcatgttatgttggcattgcatacattgtattcatgcattacgatctaataaatctttttctgagtttatattgttgtgtacagggaggtattatctagtggatgttggctactcaattcgtgaaagttactagccaccatattcggaaccagagacatcacttataaaaatttaatctaacaggagttgagactgtgc

SEQ ID NO: 9492 - DNA, 414 bp, Zea mays
  unsure (1)..(414): unsure at all n locations
agctntgaccacttgatgaacttgaaagaattctatagggagttgttatcagctccgntgttgaagacacgcaacgccgcttgctcattttgcatgataataatgaagtcttcaggcgctgaacggtgaactgaaaaacttgcaggatcaaaatcatactccgctgcaacttctgccgccaaaagctcagttgacaccggcggccgcgaaccattgaccatgacaaacagagcacaccgtcgaagattgttctccaccagagttaaatcccttgcacgctcaaggacgcaaaccggtcgtgccgccgaacctgcagacttcaccacggtcggctgatgggagggtagccgagcagagcaaatatcatccactggtggacgctagcagcgccccaaacgggccttctcccctgtg

SEQ ID NO: 9493 - DNA, 461 bp, Zea mays
  unsure (1)..(461): unsure at all n locations
agcttgtactttgcctcaacatgacctaattggtgattggcgcgctgttntagcgcgtctgctgacacacccgctatcaatctgccttcagtcacgtcaactgccatatctgtctccgcggctgactgacacacgaccccacgcctggtggtttcgtcgggccacacgtgggacgtctcgttgccgctgcataaccttttgtcttctgtatcacccccgaggaggtgcgctaccgcgcacggcggttcgctctttccgcacccgaaatccagcacacaacctgtatgacttgtggacccgggcccccgtgtcatagagtgggctgcctgtgtcctaggtgtgcatagggcgataatttctgcggagattcatgggcgcgtgtgaaggttacatgaacaaggactcatgtttccttgaaaaggatttaccccgcgtgcagcaattacctcttcgcattctct

SEQ ID NO: 9494 - DNA, 476 bp, Zea mays
  unsure (1)..(476): unsure at all n locations
tattctgggccacatctagcctatgcggcccaactatgttgaaagcgcgttcccacgcctgcgcttttgactttgcagaaaggaccttggtttattgaataactggaagcggggtcatggcactatttgactgagtcgctgacagatgcaaaaaagcccctgaagttctattcctttaccgcgccaagaccacgacggtgagcgacgcggcagagctccggcgagcccgtgtaccggctcgatcacgcaatgaccgacgcccttcttcgacctaaaccagattcgggacctagtgaatgttcccctcagtcaanttcatgaatggctaaccaaatgtctctggccacggtgaccacgcaccccgggaacaactcaagatgttcccgatgatctacttcggttcagcacaattggttgggtcgataaggtatcagaacacacagggatgctataacaagaccaangactacatgatc

SEQ ID NO: 9495 - DNA, 442 bp, Zea mays
catgcaagcttatatagataaacagcgagaccaaatgcttaatattataaggtgtatgcaatatgattatagaaggctagaacatgcatttgataaatccgctattgcaaactttccttggcacgaggttgaattgggggaaaacacgtgtgcttcatcggttgcaggttgtcacgaccagacacaacccctttatgggatgccgatagacacgtactctgggcaaccacagtctcctacgcacattggagataaattcatcgatctgcgcatgttcggaccgaccgcacgtgagcgtggatcgtccaggccaccagcggtgggtcccatatttaatgaattaccgatacatgcgcccgagccgccacataatatgcaaaccctaaactactcatttggaccatccgcatacaatgacggacggtctcgatacaacaacgga

SEQ ID NO: 9496 - DNA, 452 bp, Zea mays
  unsure (1)..(452): unsure at all n locations
atgttcattttgagaaagacagggtttgtagcgcatgccangcgggaaagcaagttggagcccatcatccacacaagaacatcatgacgaccgacaggccgcttgagctactccacatggatctattcggcccgattgcttacataagcgtcggcgggagtaagtattgtcttgtaatagtggatgattattctcgcttcacttgggtgttctttttgcaggaaaaatctcaaacccaagagaccttaaagggattcttgagacgggctcaaaatgagttcggcttaaggatcaagaaaattagaagcgacaacgggacggagttcaagaactctcatatcgaaggcttccttgaggaggagggaatcaagcatgagttctcttctccctacactccacaacanaatggagtagtggagaggaaaaatcgaactctattggacatggcaaga

SEQ ID NO: 9497 - DNA, 474 bp, Zea mays
  unsure (1)..(474): unsure at all n locations
agcttattcaaaagtttagatagaactaaaattgataagatcaatgttttaattgatgttttgaatgagaaaaatagattgttagagaagcaagaggatcttttatatgaagagcatgataaatttgttagtgcgcaaaattctcttgctttagaagttaaaagaaatgaaatactttcatgtgaattatctacatgccatgaatctatttatagcttaaagagtattaatgatgatttaaatactaagttagaaatagctaataaatcaagctcttgtgtagaacatgttgtgatttgcaataggtgtaaggattttaatgttgatgcnttgagtgaacacttaatttcgatttctgaattaaatgatgaagtggctagtcttaatgcccaacttaagactagaaagaatgaatttgacanactaaaatttgcaagggatgcctacactattggtagacacccctcaattaag

SEQ ID NO: 9498 - DNA, 437 bp, Zea mays
ttacagatcactctgcgcgcttgcaagcttatgaagattctttatcccaacatggtttattctgcggggctagagccaacccatgttagtcttatcatttaagcaagtgtctagttcagctctattaaaatcaactaagtatagctgaccctttaacactcccttaaatgctactgaatcatcacttcttctaaagacagcaacacctatatccgttaaaagacagttgtagcccattttacataattgagaaacggaaagcatattgttatctaaagaatctacaagaaaaaacattggaaatagaatggtcaggtcatatagcaatattaccaatgcctttgaccaaaccttgatatttgtccgcgaatgtgatagctctttggggatcttggttttctcgaaggaggagaacatactctcttctccagacatgt

SEQ ID NO: 9499 - DNA, 448 bp, Zea mays
  unsure (1)..(448): unsure at all n locations
agcttcaaagggatagcacattntgcgactttcaaatgttcantttgagaaagacaggatttgtagcgcatgtcaagcaggaaagcaagttggtgttcatcatccacacaagaacatcatgacgactgacaggccacttgagctactccacatggacctattcggcccgatagcttacataagcatcggcgagagtaagtactgtctagttattgtggatgattattctcgcttcacttgggtgttctctttgcaggaaacatcccaaacccaagagaccttaaagggattcttgagacgggctcaaaatgagttcggcttagggatcagaaagattagaagcgacaatgggacggagttcaagaactctcaaatagaaggctatcttgaggacgagggcatgaagcatgagttctcttctctctacacgccacaacagaatggttag

SEQ ID NO: 9500 - DNA, 466 bp, Zea mays
  unsure (1)..(466): unsure at all n locations
acctgcggcatgcaagcttctcatggttgttatggtgaccaactttaggaaacccgaagcgtacgaactatggtggatgagaggggctgtctgagggtgggttggacgcttaacagagaggtggagcaaggggaacactctatctaaaggagctgattgcttgcttcgcgaatttgggatgagagtgcctacgacagtgatgagatattctcactgggctcgttcaccgtggcgcgcatgtagctcaatgatatgggtacttgtttcaccgtctgccacgctcgctatgacagggtgaagcaaagctacgcgtggcacatcatgggcgaccaacggatcaggatggtggttattccaccacgacactcggcaagtgggcattgctggtcgaccgactccgtgcccaagttctcctctcgccgatcttttcacctccagtagtatctactccaatcncagcacacat

SEQ ID NO: 9501 - DNA, 473 bp, Zea mays
  unsure (1)..(473): unsure at all n locations
tgacatcaccattntctaattaagttaaagtatgaggtctttaatatttagctcattcctcaacatacaaaagcgagttttgtctaaaggctttgtgaaaatatccgctaattgatcttccgatctcactccttctaaaataatatctcctttagcaacatgatctctaaggaagtgatgacggatatcaatgtgcttggtgcaagagtgttgtacaggaattattagcaatttaacagcactctcattatcacacaacaaagataacttttctagaactacacatagtctagaagagtttgtttcgtataaagaatttgtgtgcaacaagcacccgcggcaatatattccgcttcgacggttgacaaggcaacactattttgcttnttagaggtccatgaaactagtgatctcccaagcatgtggcatcctctggatgtaacttttctatcaattntgcagccgacataatc

SEQ ID NO: 9502 - DNA, 456 bp, Zea mays
  unsure (1)..(456): unsure at all n locations
agcttggtgccgatggagaaacaaaaatctttattatcttggctgtccaactgcttgccattgtcaactgttagttcggacggtactccgaagcggcaaacaatgtnttgccagaagaatttttgggcagtctttgatgttattgtagaaacagccctcgcctcgatccatttggtgaagtattcgacggctacgaaggcgaacttaaggttcccctgagcggtgggcaggggcccgacaatgtccaggccccagcgctggagaggccatgtatgggcaatcagctttgtatactgcgaggggctgcctgaccgaggagaaaacttctggcaggcttcgcaggaccttgtgacccgatttgcggcgcagatcattgcgggccagtaaaatccttggcggatcaccttggcagctagggcccttggccctgcgtgcgagccgcacgtgccactgtgg

SEQ ID NO: 9503 - DNA, 351 bp, Zea mays
agcttgccaagccctcttacccggccggacttcaccggaggcccgagatcgacctcaccggacttcggtcttccgccgccgcgcgtggaccgagctatccagtgagtctcctaccaattccttgcacccatatcttctctggtaccccgtgaacctctctgacccatccaattgctctatctcgccgtgaccaggccggactcctcgccgccgacgagcatcccctcctgcgtgcgtggaccgaccgactccggccatctccgacggcaacccgcacaccgttgtgatccccaagacctcccctacgtcctcgaccacttcaccggagcaatctcgccgctggtaagcccc

SEQ ID NO: 9504 - DNA, 312 bp, Zea mays
tacccatgacgaggcatgtgaccagttaaagggtcctcggtcagcaggcctacatcgacaaggtccttaatcgactcagacggagacactacaccgagactctctttctcgtgcaagtcacccgcccggtctcagcttaatcttttcaacccaaaaacttggtacctggcagaggtacatcttttccgatgttgaatccatcacggccgtgatggattcaccatcaagttttattttgaaaacaaccctccacttgccaaacatttttgaaaacaaatcttttgtttctaacaaactaactataaaactttt

SEQ ID NO: 9505 - DNA, 465 bp, Zea mays
  unsure (1)..(465): unsure at all n locations
agctngccttcgcttcagtctatcatccgcagtccaacggggtcgtgtagcgtgccaatgggaaaatcttcacagctgtcaaaaagatgctcctcgatgaaaaaaaggcagatggaccgatttattaccggaggcagtctgggcgctaaacacaactgagtgcagggcgaccgggttcactcctttccgccttctatacggatcggaggcaatgaccccgcaagaaataaagcatgggtccccacgtacagttccgtcagccgtccccgacgtggacgagccaacttcaaaagatctcattgacggagatcgggtcttcgccctacaggccctaaacaaataccaagcccagaccaaagcatggcgcgaccacgcagtcatcccgagggagttcagcgagggggacctcgtactcgtccgaacagctcggacggagtccaagggcaagttggagcccaagtggga

SEQ ID NO: 9506 - DNA, 428 bp, Zea mays
  unsure (1)..(428): unsure at all n locations
cacattatagagcatgcttctagctaatctaaatttntcattttctatctcatgctcattgattgtactagttaggtgtgctatgtgatcattttgtcgttgaattaaagctaggggagtatgaatagcatcaacattaatatctctacatctcatgcaaaagaaacatgatcaacagtggatgtagaggctttgcaagatattaattcatctatcttagattttagcatggcattttcatctctaagacaggaaatagaaacatttgcaacatttaaatccttagccttagaaaataatttatcattctcaatcgtaaggctagaaattgaatcattcaatgttgaatcttagcaattaaactagcattatcattgttaagagtagcaatcgaatcatcacacacatttctcttttcaaccttagcg

SEQ ID NO: 9507 - DNA, 381 bp, Zea mays
caaagttcacaacttctgtaccttcttactgttgtatgcagttctatctgcgagatcgcccttcgtcatggcacataggccagctttgagcttcggacagcccatacttctagccatctactggcagacggataattctttgttgtccgggaggcagtacaagaaattatattcatccgtaaccgtaaacaccaaggccctctttgggtactacagttctcgggcactaggcttagcttcaaaagtttcttcttctgataatttcttttcccaagcatgtcgaatgacataatcacaatcttcggagagtgtttcaagagcaagggattcggcctctttggtcgcactctctctcaaacctatatatatatctggagttat

SEQ ID NO: 9508 - DNA, 423 bp, Zea mays
tctctcggagttcaagaactcgccggcgcacgtggaccgggtaaaccccttcaccatttcccgattcgttgtgcgcatggcctctgagttatcccgtgaagcttctcgggctgattaattgaactggacctatttggtctggacggaacatgcgcctccgtcgataccagccgactgtgttcgtggtcagaggagctccgaccacctctgacgccgacccgcacatcgacgtgaccgtcgcgacctcctgaacatcggtgaccacctcgccggacctccctcgccgccggtaagccgcgccaaccttttcttttccgcggctactgtttcatttaagggaaagactgcgggtgatagggagagaaatctaggggttaagtgaaaagtcatagactcaactgataatggcgttaggtatatctg

SEQ ID NO: 9509 - DNA, 338 bp, Zea mays
ggcacggcttcgagggtatacgtggatacataccctcgcctcgagccacgttggtaaaaatactcgacgggcgacgataagtgaactccgaggctccccttgggcccgcgggtagtggcctgacaatgtccaagccccaacgctgaaggggccacctgtgggcgaatagctatgtgaaatgcgaagggcttcccgagcgtggagaaaacttctggcaggctccgcatgaccttgtgacccggtttgcggcgcagatcatggcgggtcagacaaagccttgacggatcacctttgcagctagggccctaagccctgcgagagagccgcaagtcccgctg

SEQ ID NO: 9510 - DNA, 421 bp, Zea mays
  unsure (1)..(421): unsure at all n locations
gcaagcttcgcatctctgaactaactcggctgttctttttcgccgtttttttatagaatcctgacctgaaaaccttcccgactagtgttctggatgctgcatgtatcccacattgccctgcatgaacttcctccagaagttgtttcccagtggacgggagaacgcatttcatgaagatgcctgacgcgccccttctgtacaatttctccccaatgagtgtatagtgagccgactgcctggcaatacgctctgccgagttcttgtcttctggttcttcttcattctttatatacttaataatcgngcttctccagtcgtcagagtctganctcaagttgattatgatgttgcactcttctgtntgatccattgagatactcggctgcagaatttcttgcacgaagacttcgggtgggatctg

SEQ ID NO: 9511 - DNA, 463 bp, Zea mays
  unsure (1)..(463): unsure at all n locations
agctngagcttcttgttaaacacccacttatttctctcgagttgacagtcataggggcaatcagtgacctcatacgtaacatttgaaagaattgagtccatctcatcctaaactgcttctttccaatcatccgcatctggagatgcaaatgcttccgtaatggtagtaggagtgtcgtccacaaggtacacaatgaacatcaccaaaggatttttcaaccctttgtcccttgctcctttcaggagcatcattgtcatccttctatatggcactatcatgtggttgttcaaaactctcaacaggtgcattatgttaggagttatctcagaagaatatcttgaatcgttatgaatttctttcattggaaatatgtgttcaaagaaagtagcatcacgagattccataatagtatccacatacacatcaggaacttcagaattaactactaagactctataagcta

SEQ ID NO: 9512 - DNA, 346 bp, Zea mays
  unsure (1)..(346): unsure at all n locations
actaaataactcttgggttggaacaaaaatcttggcactatttctattaaatactatagaaatttacgagtctaacaaaattggtctcagatntttatcatttttctagaatattctatgatttatcaaatcttggtagaaaaagaagaagacaaatggtgaacagtgatgggctgaaactagcccaagccggcccacgcacatgcggaagcgctagcgcgcgcccgtggtgttcgctttgngcaaaagaccctgctctttaaataactcataagactctgccactattctagtgtactgacgttggaaaacacttcctcttattgttacacgtgaaccccacatg

SEQ ID NO: 9513 - DNA, 343 bp, Zea mays
  unsure (1)..(343): unsure at all n locations
agctngctaccatggatggatacctgacgttcggatctaccagagggcctgctctgccaggctttttattactgcacccaccgttactacctagtactactagcgtggagtagtacctccgctctctgctggcagccgacaaatgctccatctgcagtacgtaaaaaaataaaaagaaaagaaagtgactctccatccatgagaccatgacatggagggaccgagggaggggagatggcttggttggcaagctaatcatgccaacttgcaaagctcaaatctttctttattacgacggcctttcctagcgttttccctctcccaccctttataaccaccacca

SEQ ID NO: 9514 - DNA, 362 bp, Zea mays
  unsure (1)..(362): unsure at all n locations
agcttctanagggttatctacatttgggactaacaaatgtacatattgagaaagacggatntgtatcgcatgtcaagcacggaaacaagttggtgttcaccatccacacaataacatcatgacgactgatatgccgcttgagctactccacatggacctatttggcccgatagcttacataagcatcggcgggagtaaggattgtcttgttattgaggatgattattctcgcttcacttgggtgttctttttgcagganaaatctcataaccaagagaccttatagggattcttgagacgggctcaaaatgagttcggcttaaggatcaaaaagattataagcgacaatgggacggagttca

SEQ ID NO: 9515 - DNA, 406 bp, Zea mays
  unsure (1)..(406): unsure at all n locations
agcttatctttactgtgtggttntccttgcaatattgggtacaaataactctgtccgcaggatgcatcgtatttagggttttgcgaattttctcttcatcagatggttctttttcacaaaaacgtagtttagtgcatatgttatgaactgcatgattgtattcaacgatagatttaaaatcttgtaagcgcaggtgattccattcatgttcagctgttggaagtaccaattccttttggtgttcataacgttctttaagtgcattccataatgtttgaggattttcctctaatagatattctcttttgagatatggatgtatggattgccttaagagtaataatgtagtaagcttggtttatcatcaataggttcctcatttaggtgaggtgcggagattgcattt

SEQ ID NO: 9516 - DNA, 344 bp, Zea mays
tgagcatatgtgtctctgcatgtatgttgttgtacaccttgtcgtacgggtcaaaaacataagtggcagtagattcttcttgagtaccatcgatctcgatatcctcatcggtatcctcatctgatatgtttttgaaaacaatgagtaagacatgaatatttacataagccttgctatgataataaaaatcgaaaatagaacattgtgtagcgaataggtatgcctcgttctcatactcattgtcttcgaatatgacaccctcatcggcatcacctaaatggagccagatgatgtaagcacatgttagtcagacacatactatcatgtcttgcaggaccatataa

SEQ ID NO: 9517 - DNA, 214 bp, Zea mays
gaaaatttaggggggacccccgaacccataggaaaagagaattgatttttgctccctgagatcagaccttgcaaaggatctgaatcctttcaattttctgagaaaaaatattctgtaacagtctgattttgtgggtaaatttgagtgctattcagaggggaacattataaaaagaatagttggtccatactcacaaatgcaattgctcattaga

SEQ ID NO: 9518 - DNA, 435 bp, Zea mays
gttacctgcggcatgcaagcttgtgaaggttcttcatcctcacatgtgctaaacggcgatgccacagcctttccatgctagtcttagcaattaagcatgcatctagaccggcctcctcttttgcaaaatcaactaaataaagtttgtcatctagtacacccttaaaagctaatgaaccatcacttcttctaaagacagacacatctacatttgtgaataaacagttatatcccatattacaaagttgactcatagacaacaagttatatccaagcgactcaactaagaacacattagaaatagagtgctcagatgaaaatagcaattttcctaatcctttcaccttgccttggttcccatcaccgaatatgattgaatcttggggatccttgttcttgacgtaagaagagaacatcctctcttcccccgtcatgt

SEQ ID NO: 9519 - DNA, 200 bp, Zea mays
tttagcggattatctggatctcgcgcgggctagttccccagacctttacttggctatcagaccacaatacaggctgagcttcagcccagactccttatttttttaacttcatggaactgatctttgcttttatatatcatttgccaaagggggtctcttgctgacttttgagcttgcacaatgaattcaactctgtatct

SEQ ID NO: 9520 - DNA, 311 bp, Zea mays
  unsure (1)..(311): unsure at all n locations
agcttcgngttcagttctgatatatttgctttatcttccaccagtatttcttctgctgcctggagctcaaagttctttttctcaaaagcatctgattgctcttttattttgttttccaaatttccaattataacctcatgctttttatcttcaagatcttgctgcatttccaaggctttgcttcatagcatactttacacaaacaccaaacacaaccttcgtcagatatgcttttattagaaagcaatgatagtaagggacaatcatttaccttgagttggagtatataaactacaacgacatgttgtctc

SEQ ID NO: 9521 - DNA, 387 bp, Zea mays
  unsure (1)..(387): unsure at all n locations
ttcctgcaggaccttcggcgacgaagcatggtcccaacatcaaaggaaaagcatttgaaacagggggagaaatttcaatcttaaaatgcttcttgcaatcttattcgtatatctttgactatttgcaaaagactttgaaaagaatttttccaaaagaatttgcaaaaacaaaacaagtggtgcaaatgtggtccaaaatattaaatatcaaatcaaacttatatacttagaaatactttcatttcaaaataacttatgcacatatgtcaaaatgcaaactaaatacanttttacactntatatttgctttggtttgtgttggcatgaatcaccanaaaggggagattgatagggaaatagtctcaatatttccctataatcgatttg

SEQ ID NO: 9522 - DNA, 367 bp, Zea mays
aaacaaagatctatgaacccacatgttctttgcgctagcgcatggtaaactcgttacctctctagcacaaagtacaatctggggttgcctatttatatatgaatcaaatgacaagttatgagtgggatttttaccaatgggacaatctctgcattgatgtcccttcttccggcatgagtagcatatgcgttttccaagtttgaagatttctctatccttgtttgtgcttgtacatggtagaaaaacttctttttaacatcatgccttttgtttaaaaggacaagattaactagtgccttcttgagcattaaacaatctttatcttgtaaatcagccttttaagtaggactgactatcatgtcctctc

SEQ ID NO: 9523 - DNA, 376 bp, Zea mays
gcatttctttatctccgatgttcttgaatgtctgcaagacgggtgatacgttcctggtcaagtaaggaaagataccgaacttgtcaagtgacttagaacatctacagggtgtctgatgtcctgtggacaaggacaacttgacgtgggcctaattacttgggaggttctgtcacagctggtatcggagcgtagcccttctttgcacatattatgaggcatcttcaaaggggattttaaaagtcctacctaaaaattcttttctcttcttacctaagtattctgaagagtctatcttaaagaccagatatgaagagtgcaacgtatagaacgttgaatcgactataggtgattctgtcattatacatgcatcatgcta

SEQ ID NO: 9524 - DNA, 418 bp, Zea mays
  unsure (1)..(418): unsure at all n locations
ctgctggccatttgctgtggtagctgattacagggaactttgtggttttccgataagcaaaattatatccaccaaaattatcatgccatccatcttttctagccttcgtctgatagtgcagctcgtgaactcgacaaaagctattcgcaaacggcaccaccgcttggcttcagagggcccagatataaacactaagcctaacgatagcgtttggagtcaactgatgaaagtagataccaaacctcttcagtacctctgcaataatcccatgtatggggaatcttaatccagcctttagaaagctcttgaaaatgactatttcatccttctctggctntggggtaggttcttcccccgcgaagcgtagtagcttcttctgactttcactgagaaaacccgactataccatcttggagag

SEQ ID NO: 9525 - DNA, 213 bp, Zea mays
attggtcaataaaataacggtgttgggtattgaagattggagtgactcaaaggtcactaggctatttatgagagcctataaagaaaaggacaagaatttggcgagaatgattagagatcgtgatgattatgaggagatgacttctcatcaactatttgccaagattcaacaaaatgagggcgaagaatcttcatcaaaacaagaactcacatg

SEQ ID NO: 9526 - DNA, 411 bp, Zea mays
agcttatgaagattcttcatcccatcatgatctagtcggcggtgccagagccaacccatgttagttgtagcaattaagcaagtgtcgagttcagctctatcaaaatctaccaagtatagctgaccctctaatactcccttaaatgctattgaatcatcacttcttctaaagacagtgacacctacatcagagaatagacagctgtagcccatttgacataattgagatacagaaagcaaattgtaatctaaagaatctacaagagaaacattggaaatagaatggtcaggagatatagcaattttacccaatcctttgaccaaacctttgatttcatccccgaatgtgatcgctctcttgggagtcttgtgtttctcatatgaagagaacatctttttctccccaatcatg

SEQ ID NO: 9527 - DNA, 232 bp, Zea mays
acgatacgccttctcttaggatccatctcttctggcaattaatccctatgtgaagagaacggcttcgataccaattgagagcacctagagggggggtgaataggtgatcctcgaacacttaaaacttaggccacaaaaacttgggtaagtgttagcataataaccgccaagtggctagagaggaatcttcacaaaacacaataaccaacaagatcaatcacagagatggcac

SEQ ID NO: 9528 - DNA, 336 bp, Zea mays
tatgaccatgggtatgcgccctggattacctcccatgggtttattccacctgatagcttatataagtatccgcgggaggaaatactggctattattgggatgactattctcgctttccttgggtattctttttgcggggaaaaatcaccaacccaagagacctttaagggattcttgagacgggcttcaaatgagttcggatttatgatcaagaaaataagaagcgattatgagacggagtttaagaactctcaaatcgaaggcttcctcgaggatgaaggcatcaagcatgagttctcttctctctacacacctcaacaaaatggtgtattggag

SEQ ID NO: 9529 - DNA, 315 bp, Zea mays
  unsure (1)..(315): unsure at all n locations
atgccacagctagcccatgctatccttatcaattaaacatgcatctagaccggcctcctcttttgcaaaatcaactaaagtagaggttgtcgtctaatacacccttaaaagctagtgaaccatcacttcttctaaagacagacacatctacatttgtgaatagacaattatatcccatattgcataattgactaacagataacaaattatatcccagagactcaactaaaaacacattagatatagagtgctcattcgatattgcatttntgcctaatcctttcaccttgccttgattctcatcaccgaatatga

SEQ ID NO: 9530 - DNA, 426 bp, Zea mays
  unsure (1)..(426): unsure at all n locations
tgcttagtgtgtgcatgtgtgcccgttttcaactaacccaaaaagtgtcacttaatggccgttgagagaattatgagatatctagttcacacccaaaatctaggtctctggtatcctaaaggctcctttntcgatttatttggctactctgattcacactatggcggctgtaaagtatatcgaaaaaacacctcggagacttgccaattccttgggcggtccctggtgtcttagagctctaagaagcaaaactgtngtgcactttccactgccgaggccgaatacatagctgctggtgcttgttgtgctcaattgctatgaatgaagcanaccttgagagattttggctgtgatgttataagaataccactactatgtgacaatgagagcgccattaaactatcctacaatcctgtgcaacattct

SEQ ID NO: 9531 - DNA, 458 bp, Zea mays
agcttgcatcacatctcgccagccagaagtttgttgctctgtccggaggtcgtcagctttcttgtcttggcgggaggcagcaaatcccgccgtccacaagttgcaaatactagcgataatactaacagccgctggagaaaagaaatagataggaagagttttatatgggtcctacatgtactgtacctcctaaaatgggaatgcgaatccgatatatactggagtcggtctaaccagcagtcggcaggggcgccgcgacagcaacgaaaggggatgggatggcggcctgcgccgtctcccgcgcgagttactttctggatggctggcgctgtcccgtttgacatggccgccgtcgctcgcggtctgcatcggcgattcagatggcacacacggcgcatacgttggcagctggtgtgtggcaatggcattgcctttgaaatgcaaccagggacacgcca

SEQ ID NO: 9532 - DNA, 467 bp, Zea mays
  unsure (1)..(467): unsure at all n locations
gaaactaagcttcaaagggagaacacgtgatacgtctaactaatgtcaattttttttttataccttgtgcagcttgtcaagcacggaaacaggagggaggctctcatcacaccaaaaatgtgatgacgacatcaagacccttggagatgctgcatatggacctttttggacccgtcgcctatctgagcataggaggaagtaagtatgggttagttattgttgatgacttttcccgcttcacttgcgtgttctttttgcaggaaaagtccgaaacccaagggaccctcaaacgcttcctcaggagagctcanaatgagtttgagctcatagtgaagaagataaggagcgacaacgggtccgagttcaagaaccttcaagtggaggagttccttgaggaggaanggatcaagcacgagttctccgctccctacacaccacagcataatggtgtggtagagaggaagaac

SEQ ID NO: 9533 - DNA, 451 bp, Zea mays
agcttgtacaaagcccgctggaatgaatctttttatatttccgacctcgctgtaacatgacacccgaaggtccaacacaacaggctacgagtgaattcagaattattgcggagcatatcatcacaagggacctggttcaagagtttttaacattcaaagtttttcccagtttgagagaatgggaaatgcccaatctacagggggaaaagaaagaaggtgaacgtcgacgtttaccttactatttcaagattaaaaagtactttaaagcaccttgctaagagtggctagatacgattgaaccaatgtgtaatgaaatactcggcaattattccaaaaaagaagatcaattgatgaccacagccttcggcactcgtccaaaacaaaagctaaatctatagttcgacgcctggggtatagaatactcacactacgaaaatctgaacaaatgtgc

SEQ ID NO: 9534 - DNA, 378 bp, Zea mays
  unsure (1)..(378): unsure at all n locations
gtcacgatcatgaagcaaaaataaatagctggagccgaagcgcgacagaatcaaccaaagcagggtctacatactaacttcggctattctccatacattcccgagtatgtgggcaaccaatagcccacaacatcggttggcttgggcagccactctcaagcggcatgggctccactgccaccaccaccacccatggaaccaatcttgactcacaatcagcagccagaagggcaccaccaagcgcaacaacaacgtgacacatgtgaagagtccgaagcacgcacagtaaacaatattgtgcctgagtcaagacatnattactgaagcaatcanggcctcaatcagaaaattccatatttaatgtactgggtactattc

SEQ ID NO: 9535 - DNA, 356 bp, Zea mays
agctagcggaggaactccataagaacacgtgctattttgtgacaccacacccagcccatgcaaggcgtagccataaagcatgcatctagaccggcctcgtactttgcaaaacaactaagtaaagcttgccgcctacaatgccctgaaaagctagtgaaccataacactgtgtaaagacagacacatctacatttggaaacaaagcagcatatcctatattgcataatagactagcagataccaaattatatcctacagactcctactaaaaacacattagagatagagcgctcatctgagattgcttcttacccaacccctttacctcgccttgtatcccatcaccgaaaattatt

SEQ ID NO: 9536 - DNA, 442 bp, Zea mays
  unsure (1)..(442): unsure at all n locations
tagccaaaatagctcanataagatcccagatcaagcttctcatgtggtgactttatgggaattctgaatttcagaattctgaaattcagaccttgagccaaagatcagggatgttcaccttgatccctaactcgaatcctaatagccccattgacaaaattgtgtctaactaacccctctgtcgtgtgccacaagatggcattgggacgtgagccctatacacgacaaaaccttggatttgcctcgggtttgggcagggagacagaccggatttcctggctccatatctctgcaaccagtaggcaaaatcctatgacccccacacaagaatggtagcttgtagggaggagaagagattttgtgcactgaccaaggcgagagcatgctctgatgagcgaccacacgcgccagaacttgggcagaacgcactggcacacgtgtt

SEQ ID NO: 9537 - DNA, 313 bp, Zea mays
cagctcaccgtcaaaagtaggcagttagcctaatgtaatggaaagcaagggagtctgtctagaagtacgaagattacgtacggggattctactaaaccttttgcgctcatggcgtctataagttatggagggcccctctgacccggaagtataagtgcgatcaatctgtcctgtttcgcagtataccaccttcctcatctcctttattatgtcggcacttcgatgccacctaggagaagaagacttctatcccatcatcatttccttcttctactcctagaagcgggactctcctgatagagctctctcgctg

SEQ ID NO: 9538 - DNA, 356 bp, Zea mays
gttggtgctgcataccacatggctccattgatcttttgctcttttgtttccactgcactggaatgcccatcaaggcctccgctgataagctaactatggaaatccaacaatcattcagtgatgtttcttatggattctctaatagtcaaataattgctcctaattgactcatttcatttcttgcagtggtaaaaccgctactatttctctctaaaatgatcttgctactaagactggacaagagctcttggacatggttgacagcttgcccatttgtgcgataaagagccttaaagtatctgacttccaaggtacgtcatctaatctctgaatgtgaaatgaaatacaacagttac

SEQ ID NO: 9539 - DNA, 358 bp, Zea mays
cacaccacatatgcaaatgcaattatgcaaaaaagtatcataatctctatgatgttgatgccaactcaatattaagtattggatctgatacatcatatataacaaaaatatattcatgctattcgcttttagaactctgtggcatgtaaacttccctatgtgctccaatagaacatatcctgactatattattgcactagcatcagaaaagtccaaggttcactccctatttctattttctctaacacgcaagtgagttacatatcattttattatcaagaaagaagagagtacgcaagagggacaaagtccccgaaacacacccaaaactcacagccacactgcaactggaaacaaa

SEQ ID NO: 9540 - DNA, 406 bp, Zea mays
  unsure (1)..(406): unsure at all n locations
aacctcagcggtaagggagacacgngaacgatgactaatttccatttttaacaaagaccttgttgcacacccggctctagaaggcaaaccgaatgcgaaccatgtacgtgccaggatcagatattcacgtacacagccaggacataatatggacatcatcactcaaggctcgaaaaagtattaaaaagggataatagtcgattacatcatacggctgagacagccatatagttcttacaataaatcaaagagcggaaaagaaacgtagataaacgcggccttcacaggcagccgactggggggtgccgctaacccacacctagaacacgncgtagactcggaacttctggaagtctccatccacaactacatcttctcctgagcagtggcagcgaagctgacaacc

SEQ ID NO: 9541 - DNA, 457 bp, Zea mays
agctggcacatagtcttgatgatgtatgctcttttgtagtccaagtcttctaaagatatatagtacgtcatccatcatactaagattaggaacatatatcgtaatttctactcgtcgtcgtcgtccatcagtgtcgtacaatcgatctcatcttcatcgtcggagaggatgatgactggcgctaccggctccagatgcacgggcgcggagacaacctcacgtgcattcatcgaagccgaggagcccacaatggcgcgttgatggcggcgacgacacttcgagagaactcttgaggcgcacacgaaaatacggcgtacgacgtcttgatgattgagccttgactggcgacggagctcgaggtggtggctgatgaggacatcctccactattactcgttggcaaaagacgcaattggcccagttggcccaatagtagtcggacggtgaccgtgtgagcc

SEQ ID NO: 9542 - DNA, 436 bp, Zea mays
  unsure (1)..(436): unsure at all n locations
ntaaaactaaagactcanggaatcttagcgcgcattagctatttatctagcgagcgagagcaagtgacaagagagcgtaccaaatgagctcgcggtatgctcttatttatatgctcggtgcggtaaaaatggaaagaccccgcctgtcagtgaatgttgctattctagcaaagggaaggtgttttttcggaccttcggcttaaagccttcgtccatgtcgcaatctaaatttattattttaacaaattaatattgcgaggggctactgttgggggccttcggcttccgaaggtcctcaaaaacatgatttaacagtgtttctagagtataatgtgtgaacaggtatcttcggactcgtatcagagagggagaagctcanaagatacgaaggttgacacagtgccgaagctgtgaagcangaaagcttcggcatgtt

SEQ ID NO: 9543 - DNA, 440 bp, Zea mays
agcttcctggccccagctcccactaccactataattgccacctactcatacccgaagccagcatccagaacggcaccagcacgcccaacagcagtgcgacttcagggaggagtctgaagctcgtacagtcaatagcactgtactagaatcgaagcatatatactgaggaatatcctacttttgatgtacttttatcttttatgccattttattttttgtgtgagaaacatgtaatgaagaacttaatttcaattttttgtaataattgtgcttgcaccagagtgaaatatatcttcctcatggatttacgaagcttgaaagacatgtctaagaaagcggagtaaaatgcctaagctcaaaagtcgttcctaaaggaatgcataccaaaaattatgacccgaagctgcaaaaaagtcgttcctaaaggaacgcagcgtaag

SEQ ID NO: 9544 - DNA, 470 bp, Zea mays
  unsure (1)..(470): unsure at all n locations
tagccagaagtatcggaaatagattcatgacccatatctgggtatgtggcgggcggaaaatggcaggcgacgaagctcgaagccatcttaagccggcaagaaacttatttgttgcttttaccttctcctttgaaatttgtacctttcttactctgctatttgatatatacaggatgacgaagctgaagattgacaatgctgaagtttggcaaaactgaagacgaagccttagctgaagcttaaagttgcttataatatgctctcctgcaaaaattcttggagaaactcttgtaatatagatatggaatatcttatgtaaatttgtacataccttgtaatatatcctgtctcccttatccgtattcaatctgctttgctgtggacgaaacttctcntttgagccgaaggcgaaaaacaccttcccttcttttcgtacacaacgaagcagtagaaatttttccttcgaatct

SEQ ID NO: 9545 - DNA, 438 bp, Zea mays
agctcggatacacttgaagacaactgtgagtgctattttagattcagctccctctaataggaactattataatctgagctattggccaacattggtactaacaaagacaaattcacttatcttaaaccttcaatggtggtactggcattcacaacaagattattgagccaatgacataacaaatctgcaagagttggctatattatgatgtatacacgacactaagtcaagcaacttattattggtaccggcaacggaaaaacaagaaaagtcctatgggggcttccatccaattcttgattactgaagaaagcacaaaagtctaatgtgtaattgcacatgaagcacaaagcaaagctgctagtgttataaatgaataccacacctaggggatcaatctcagagaagacacagattaacctgggaaaccctctaaac

SEQ ID NO: 9546 - DNA, 459 bp, Zea mays
  unsure (1)..(459): unsure at all n locations
ggccaatacttagcanagcagcagcatttaccagcacagcttccgtataccatacccataacatggtcatttgcgtgctggggattggacatgattggacccttcaagaaagctcaaggaggatacactcacgtgctggttgccatcgacaaattcactaaatggatagagtacaagcccatcacttctctgactttagctaaggcagcggagttcatacaagatataatattcaggttaggaatatcgaatagcatcataactgacctgtgatccaatttcactagctccaaattcttcgatttctgcgaacaaagaagcatccagatcaaatatgcgtcagtagcacacccgagagctaacggtcaggtggaaagggccaatggaatgatattggaagcactcaagaataatatcttcaacaagaatgaaaagttcgcaggatagtggatcagagaa

SEQ ID NO: 9547 - DNA, 330 bp, Zea mays
gatccttaagcacctgcggctgcagcttaatataaataagaacttttttttaatattgtattgctagaatttcttgattatacaagtgttcaattaattatactaaaaacaatttttttatatttattcatttttactgaactctggatcatgcgcctatacagaaaagctcaggggctactccaagattccatagactcagccaaagctatggtggacgggggttattttctgaaaatgccgggctcttataaaaatatcattctgaaagggatgaagcatttggccgccgatcactccctgcggctatatacactgcacttatctgac

SEQ ID NO: 9548 - DNA, 355 bp, Zea mays
ctgggtcttaggtacccaactcttggtgggtcctataagtttatttcaatagactttggaacctagatgcaaggtttgtctctcttgcacttaagatccacacatttaacaactactttatcatttttacattacaaggattgatgaagcatcacatgcttgataaagagaatgaagtctgagtggatgtctttctaagcgcatgagaaacaacatgacagcgcccaaggctattttgccatgagatatgtaaagccagttgcgaacatggtatgagaattgaacgcccattctgaccagtcaaaaacctcttgattacctcacctattatgagaacagccctaaaatattttga

SEQ ID NO: 9549 - DNA, 455 bp, Zea mays
  unsure (1)..(455): unsure at all n locations
agcttcatgcaactgctgccagtattgtattgtgtaatgngttcctcgatctgatactatcttctgtcacacccaggtttagaaggcaaaccaaatgcggaccatttacttgccaggatcaacaattcagatacacagcagttacataaccgaacatcatcacaccgtgctcaaataataacataaagaaggtatagttgattacatcatgatgcccgagacatccacatagtcattaacatatatcaaagtgcgaaaacgaaacgtagctaaacacggccttcacaggcagccgactggggtttgccgctgttggggacttgttctcaaatgctatgaataagaacaaggcaacacaaaaagaggttaatggttaatgcccttcatcctttgaagcattattccccttaagatataacaatcttcggacgaaggtcatgaaagacacaccatca

SEQ ID NO: 9550 - DNA, 473 bp, Zea mays
gtagttgacgaagcaaggcatgcatttcttgtgatttcttctctaaaccttctatttcctcataatggtttacacttgaagcttctgattccatcttcaagttgtccaactcatgtcgaagttctgctttttcttgctgtaacacctcaaaatcctattttgggatttataaaggtgctctaaaagatctgagttaaaatgtatgttaaaagtataaagaaaataaataaaattgaattatgcatttcatgctgggtctttggatgtgtatgaaatgtatatttaaaagcatttgtttgaaaagataagtggaaataaataaataaaatatatcttacatttatgctgaggttctttgtttgctgtctaactggtgtttaaaattcataacagatgtaaacttggttttgaatttgtatttgggaacaaaaaaaacaaaacagaacaaagcctcgcttggccaaatctgccac

SEQ ID NO: 9551 - DNA, 416 bp, Zea mays
agcttgacccaggaacgtctccggtttcgatcgcatcatgtaagcaagggttgctgaggtattgcctgctaccaatccgcacaaaataagatagatcatatcggcaatttagcactcatagagccatatgcgtgtgcaagaaccagaaatgaacagagtcatatgccagaacgaaaccaaggagcatctgtttacacgataaaatagaagtaaactgcaaatcatgggctctggtcacttctcattccctgcaccagcgctagtaacctctaggccattgcctgcgacagaaccaaatcatagagctgtaggtgtgcttctgcgcgaaacaagaaaaggtaaacaaatgcctgcttcaccatttatatactctaaatttcaccaaatcagaagtggtacaaataggggcactacta

SEQ ID NO: 9552 - DNA, 462 bp, Zea mays
tgtggaggttcttcatccccacatgtgctaagcggcgatgctacagccagcccatgcaagtcttagccattaagcatgcatctagaccggcctcttcttttgcaaaatcaactaagtaaagtttgccgtctaatacacccttaaaagctagtgaaccatcacttcttctaaagacagacacatctacatctgtaaatagacagttatatcccatattgcataattgactaacagatagcaaattatatccaagagactctactaaaaacacattagatatagagtgctcatttgagattgcaattttacctaagcctattaccttgccttgattcccatcaccgaatataattgaatcttgtgaatccttattcttgacgtaggaggtgaacatcttcttctccctcgtcatatggtttgtgcatccgctgtcgataatccagcttgaacgcccggatgcat

SEQ ID NO: 9553 - DNA, 465 bp, Zea mays
  unsure (1)..(465): unsure at all n locations
agctngcatagcatatttacatttcttgtattgcatctagggcttgtctaacctagttgagataaccgccaacaaagcgagtgaaaaagcttaactcggatcaaacttgacaagtcttagtttttaagaatttagcacttaaactcttacttattatgcaattgttggttcttgaaatatgcatgaggtactgctcttagggggagtattcaaaactcaaaacactcatgaaaacccctagtgcaaggccaaaatgcaaatttcaccatttgcctattttctctaaaattatctatcctatggcaaaatattttgaaaattatgagaaaatatatgagggtgccaatacctgtcccaacaagtgttattttgtgtgattataagttgggatttggtttggttgaaaactagatagaanaattcanaaatttcaaaatttccatctggagtcaccggacagtctgg

SEQ ID NO: 9554 - DNA, 459 bp, Zea mays
  unsure (1)..(459): unsure at all n locations
cttcatccctacatgtgctaagcggcgatgccacagccagcccatgctagtcttagctattaagcatgcatctagaccggcctcttcttttgcaaaatcaactaaataaaagttgccgtctaatacacccttaaaagctagtgaaccatcacttcttctaaagacagacacatctacattngtaaatagacagttataccccatgttgcataattgactaacagatagcaaattataaccaagagactctactaaaaacacattagagatagagtgctcattagaaattgcaattttacctaacccttttaccttgccttgattcccatcaccgaatacaattgaatcttgggaatccttattcttgacgtaggaggtgaacatcttcttttcccccgtcatatggtttgtgcatccgctgtcgataatccagcttgaacccccggatgcataaacctg

SEQ ID NO: 9555 - DNA, 466 bp, Zea mays
agctaggccactgggccagggactgtcggctattatctacgtggtcaggccaacgtcgcacaggcggaggcggaagaagaggccctgctcctggcacatgcaagcatcgagccatctccagcggcaccggccgcagcggcaccggccgcagcagcactcctccaccttgatgagtcgaaagcacgcgctttcctcggcgacggctccaacaaggacatgatcgaaggatggtgcctcgacactggcgccactcatcacatgaccggctgacgggagttcttcaccgagcttgactctagcgtccgaggctccgtcaagtttgaggattcctccggcgtagagatcaagggcgccggctcagtcgtcttcaccgccgcgtccggtgagcacaggctgctcaccggagtctactacatccccatgttgaggaactctatcatcagctggggacagctagatgagaacg

SEQ ID NO: 9556 - DNA, 469 bp, Zea mays
  unsure (1)..(469): unsure at all n locations
aactaagcttcttgtccgaacaccctagannaaagtacatcaaattagtatattgttgtctgcattgcaaataaaaatacaggtttgatgccttatctacctccactagatggnggtgcagccttatgcaccaacttcagctggtgcaatcaaggttaatcatcattatattgctggctcatattaatctaaacataaacaagataagatataaacagaaatatacatatgaactaataactcactagaatgaacttgaatgacttctcagcttcaacataaatantaattttagatgatccaatgccacaactgactntatctgaaggtttgacttatcgatgaattttttgcatcagacaaatntgcagtctctctcatgttcaatctgaggtcagaataagcgctattagagctgaagtangccaataaacatccaagaaaattaataagaataaccttgagcata

SEQ ID NO: 9557 - DNA, 204 bp, Zea mays
agcgagaaggatggggaaagacctaccgctgactttttactgggcgaaagggacgagaagctgacgccaacgctccccatcatgtcacagttgggtccacgcactgatccacgagggggctacccacctcccactctacgatattcttaataccacacattaaacataaaatcgatatttaatacgacactccaagcactatat

SEQ ID NO: 9558 - DNA, 413 bp, Zea mays
  unsure (1)..(413): unsure at all n locations
actaagctagagctggaaggaagtnttatcccacgaaaagatattgttgttactcagttctgtctagcttaccaatgtatgtgatgcatttcttctctatttctaaaggagcaactaagaaactaaacaactaacgatgtatattcttttggcaatgtaatgatcacaacaaaaagtataaacttacacgcggcggaacatcttgtgcagacatagagatattggtgggctaggcattctataattggaggtacaaaactcttgttaactaagtggttatttaagctgcaaaatgaaggtctttggcaatgtttcactttataaaataacccgaataaacaagactatttttcaagtagttaaaagatcgggcaactcatagtcctgtgcggtgctcatggatggaaggacat

SEQ ID NO: 9559 - DNA, 456 bp, Zea mays
  unsure (1)..(456): unsure at all n locations
agctagaccgtcgattcctcgaagctcagaaacgaatcgcgatctaatcgcaacgcgaagcgaaaacgaacaggcacaagcaaacaaatatatacatatgcataagaacattacaccatacaagataaaatattataaaagcgagcaatataaaatagagagcgtctctatggttacgcgaggaaaagaaccacgatagacgaaactatggtcgaggggttagcacgtttacgttaaacaagtactaattagaacattcaattcaacataattatattaattgatattaatcaaatataaattaatactactacctagttttgactaacttattattttaatagttgatgattaaataaataattaattaactcacatgagtaattcaaagcgaacgatntaatctcgcgtgcggacaacgcgcgatacgcgcgaacggcgcgcgacatcgcgtgc

SEQ ID NO: 9560 - DNA, 452 bp, Zea mays
  unsure (1)..(452): unsure at all n locations
tanatcggtaacttagatcaactcggccatacccaacaacctgacctactttatangttacataacctatcccaatcattcagaagcaaaacaaccaaaccagattatgactaatatcatttaacttatagtcacctactaaactagctgctccacctactactttatcttaactacatgtccctaattcggataacaacttctagaacgaagaatcgaagatgatcaacttcatcaagaaaggatgagcaccaactcaagtcttcaaggatcaagtgagatcaccaagatgagtcaagatccacaatcttggatggagtcttttcttaccttactccttcttacccaaacctacatatgctttaaaaatatcttttaccctacataataaagtggatatacatatacccatggtttcgtaatcacatgctaatttgattataaacttgaac

SEQ ID NO: 9561 - DNA, 438 bp, Zea mays
  unsure (1)..(438): unsure at all n locations
agcgttgagcttaaatatctcaggatgtgtcttatcttctgagctcacactcttaagcaaagttgttctcctatgattgggctacaattttgatgtggtgacctanagcaaaaaccctataatttgaaagatacaaagccccaaagttgagccaaaactctgaaattcatacttaacatgaaatctcaattagggtcctttttgcaaataaggccaaaacttagggtttggcttgcaaattcacatatgagtgacccaattaacttaagatacttatttaacttggtttttgcactttaattcaaaagtggactaattttgcacataagcccctaagggttgatttagggtttccagagtccaaataagtttttggatcctcgggtataaattgattcatttattttggaactttatgatattcctaagccttggttt

SEQ ID NO: 9562 - DNA, 374 bp, Zea mays
  unsure (1)..(374): unsure at all n locations
ntatcaaatggacgtgaagagtgccttcctcaatagaccaatctatgtatatgtctatgttgagcaacctcccggctttgaagatagtgagtaccctaaccatgtttacaaactctctaaggcgctttatgggcttaagcaagccccaagagcatggtatgaatgccttaaagatttccttatcactaatggattcaaagtcggaaaagccgatcctactctatttactaaaactcttgacaatgatttgtttgtatgccaaatttatgttgatgatattatatttgggtctactaacgaatctacttgtgaggaatttagtaggatcatgacacaaaanatcgagatgtcgatgatgggggagttgaagtact

SEQ ID NO: 9563 - DNA, 456 bp, Zea mays
agcttcttgtataaagggtaacgggtgtttctcgccgcatggcacgggcgcactgttcgatgactgataagacgggtgcgctgactgacaccatctgccagtggagaggacaggtctcattaaatgtcgagggggcacatccgtctgctatcgtggtggcagacggcacgttctttccgtaacaaatgaagagaccgagcggttctaagagcctttcgtcgggctcttcccgctggcttttgtcattggccacaagccatgtggtagcagcggacctctgtgtcaggtcgagatctttgggcaaagtctggcaacgtgccagcaccggacccatccgctgtcccagctttccgcaaaggttcggacctctcccgaaagggcctgaggtccgtccgaaggacccggcatatcttcttgagatcccgggtagtaaccgagggtcccgtccgtgcgctc

SEQ ID NO: 9564 - DNA, 476 bp, Zea mays
  unsure (1)..(476): unsure at all n locations
tcggcatgatgacagatctcaagacaaaggggtgatccaacttatatatgaaatgacttacagacccatgatgttttgtatcattattgtagtcgattgtaaagggcataaatgtaatnttacacaggttgcgccctgtgcctataaatagatgaatagtacccctgtactgttcacacaatcttgtaatctttgataccttacgttggagttattacttcttgccaaggcaaaggtataaatgtacctaaatattatgagttgtataataaaatatgtgaataaccttatgtgttttaatatatatcatttccttatgtttcatatctcctataattcatactgcattgnnttataactctgattacgaaagtatgaccttcataatattttgctcatggccttcgtccgaagttcataaaatccttggagagatatgcttcagtggacgaatggatcaatatttaacatttatg

SEQ ID NO: 9565 - DNA, 443 bp, Zea mays
  unsure (1)..(443): unsure at all n locations
agcttcggatctcttgctttataacttttgttttatgaccagaaataacctgggaatcagttttaagaaccgcccttctaattcccattgcctttaacttccgaagacctaagagcaaagcttcgtactcagcaatgttatttgtgcaactgaaatcaagtcttgttgcataacaagttttaactttggaaggtgtgaccaacacaacagctgctcctgctccgaaggttccccaagatccatcacaaaatactgtccaaacttcggcatctttactagtttcttcttcctgagcccctggcgtccagtcagcaatgaagtctgccaacgcttgggactgaatcgaagatctatgcacataatcaatacaaaattcattgagttccgcagcccattttccaacccttctagtagcttctctatntctcataatatccttcaac

SEQ ID NO: 9566 - DNA, 477 bp, Zea mays
  unsure (1)..(477): unsure at all n locations
tctaaaggggagaacacatttagaactaacaaatgttcattttgagaaagacaggatntgtagcgcatgccaagcaaggaagcaaattagagttcatcatccacacaagaacatcatgatgaccgacaggccgcttgagctactccacatggaccttttcggcctgatcgcttacataagcatcggcagaagtaagtactgtcttataattgtggatgactattctcgcttcacttgggtattctttttgcaggaaaaatctcaaacccaagagaccctaaagagattcttgagacgagctcaaaatgagtttggattgagaattaaaaatattagaagtgacaatggaacaaagttcaagaattcacaaattgaaggatttcttgaggaagaggtcatcaagcatgagttctcttctccctacacacctcaataaaatggtgtagtggagaggaagaatagaactctattggacat

SEQ ID NO: 9567 - DNA, 441 bp, Zea mays
agcttatacataaaagcatcatgatcaaattatatgggtttttcaaaaagcaaaatttgcaaccccaacaaaaaccctaattgagccctatgaacaaaattcaagaaaatggggaaaagagtatgaaaaatttagaatcatggcttgggccaattataaacattgaagtatatttaataagcaacaataaagattgatgaagcttggacaaaataatttaaataaaaccccaagcaagcttctcatgtggggactcaatagggaattctgaatttcagaattctgaatttcaaaccttgagccaaagatcaagcgtgttcaccttgatccctaactcaaatcctaatggccccattaacaaaaatgtgcataactaacccctctgtcgcatgccaaaagatggcattgggacgcgagccctatacatgacaaaaccctgga

SEQ ID NO: 9568 - DNA, 476 bp, Zea mays
  unsure (1)..(476): unsure at all n locations
tggccactgggccanggattgtcggcagccacgacgtggtcttgtcaacgtcgcacangcggaggcggaggaggaggccctgctcctggcacatgcaagcatcgagccatctccagcggcaccggccgcagcggcactcctccaccttgatgagtcgaaagcacgcgctttcctcggcgacggctccaacaaggacatgatcgaaggatggtgcctcgacaccggcgccactcatcacatgaccggccgacgggagttcttcaccgagcttgactctagcgtctgaggctccgtcaagtttggggacgcctccggcgtagagatcaagggcgccggctcagtcgtcttcaccgccgcgtctggtgagcacaggctgctcaccggagtctactacatccccgcgttgaggaactctatcatcagcttgngacagctggatgagaacagttcgcgcgtggaggtcgagcacggagtca

SEQ ID NO: 9569 - DNA, 445 bp, Zea mays
agcttaatgcccacaagaaattatctaattttgttaaaggtaaggctcccatggctcaggataacgagggctatattttatatcctgttggttatcccgagcacaaaattaggagaattcattctaggaagtctcactctggctctcatcatgcttttatctataagagtgaggcatctagttctaggcaatccactcatgttaaattgcctaaaaagaaaactcctattgcatcaaatgaacctaatgtttcatttaagacttttgatgcttcttatgtgctcactaacaaatcaagcaaagtagttgccaaatatgttgggggcaaacacaagggatcaaagacttgtgtttgggtacccaaggtgcttgtttctaatgtcaaaggacccaagaccgcttgggtacctaagaacaaggcctaaacttattttgtaggtttatg

SEQ ID NO: 9570 - DNA, 452 bp, Zea mays
tctgattctccttaacgatctaaatgtagcaagatcacatgttatctatttgagtgaaataggccaaagcaaacaagcataataaagataataaaaagaataaaaatccatagcttgatgggtagggcagacccagtgccggattcccacacgagaccttattcggttatttccattatacatggattggatgggatcggaaaaaatctataagaactttgacttgtttgggagttaaacccaaccaatctcactcaatccacatgtattgagagctaaccgaacaagccctgaatgggtgtctgggagagagataaaccgaggcaagcctccccacacaaatgcggagaggctgattctaacccgcgacctgcaaactcaatgagacagctctcactgctgcaccaggcctgccgcctgcccttctttccatagcaagatggataagcaaa

SEQ ID NO: 9571 - DNA, 445 bp, Zea mays
  unsure (1)..(445): unsure at all n locations
agcttatgaagattcttcatcccaacgtggtctaatcggcgatgctagagccaacccatgttagtcttagctattaagcaagtgtcgagttcagctctattaaaatcaactaagtatagctgaccctctaacactcccttaaatgctactgaatcatcacttcttctaaagacagtaacacctatattcgtaaaaagacaattgtagcccattttacataattgacaaactgaaagcaagttatagtctaaagaatctacaagaaaaacattggaaatggaatggtcaggtgatatagcaattttaccaggtcctttgaccaaaccttgatttccatccccgaatgtgataactctttggggatcatggtttttctcatatgaggagaacatncttttctccccagtcatgtggtttgtgcacccgctatcaattatccaacttg

SEQ ID NO: 9572 - DNA, 292 bp, Zea mays
  unsure (1)..(292): unsure at all n locations
nngaagccatggaagtagcatatgcaagtaaaatgctaattgattctatcctagctacgggtgcataggtttcaccgaaatccaaaccttcgacttgtgaatatcccttggccacaagtcgggctttgttccttgtcaccacaccatgctcatcttgcttgttgcggaaaacccacttggttcctagaacattatggataggacgtggaactaaatgccatacctcattcctagtgaagttgttgagctcttcttgcatcgccaccacccaatctgaatcttgaagtgcttc

SEQ ID NO: 9573 - DNA, 465 bp, Zea mays
  unsure (1)..(465): unsure at all n locations
gcagcatgcaagcttaagcgaccatgaaggatgtgtttataatcttgctctcatagagaacgacattactaagatgctaactaagccaaatagaaaaggcattgaaatatactctaaatgaaataaaacctccattggcagaaaacaaaggcccatattcgagacatgtggctaaaattatggcgagcttgatcatcttactcatcaatgctcaaagcccaaaaataataagttcaaaggccagaatgatgatgtaaataaagatgaaaagaataagaacaagatcatctcgattatgttgttactttagttcgcaaaccaaattctaactcaacttggactaggagaattaattatnttataactctaattgaatatgttcaatacttttaaatttagctaaaattgtctattcaactctctctaatcgggacttgatcctaaaccaataaccgctcaactgga

SEQ ID NO: 9574 - DNA, 417 bp, Zea mays
  unsure (1)..(417): unsure at all n locations
ggtccttgtcgtcatcaaccttgacatagaaccactctgacttccagcctgctgcccattcgcttcggtagctgattacaggaaactntgtggttntccgataagcacaattatagcaaccaaaatcgtcatgcaatccatctttgctagccttcgtctgatagtgcaattcgtgaactcgacaaaagctgtccgcaaacagctccaccgcttggcttcgcagagcccatatataaacgctaagcctaacgatagcgttaggagtcaactgatgaaagtagataccaaatctcttcaatacctctgcaataatcccatgtagggggaatcttaatccagcctttacaaagctcttgaaaataactatttcatccttctccggctttgaggtaggttcttctcacccgaagcataata

SEQ ID NO: 9575 - DNA, 453 bp, Zea mays
  unsure (1)..(453): unsure at all n locations
agctngaagagtagtataagatattttattatgttgttgatgaagtgcttaatagtattgcttaaaaagttctaagagagtattataaactaaagattgctacatcagttaccaattgcaccataccaaaggcgtggaatctggtgtccattgatacaatgtgacatacctatccatgtgaaaggtacggtctaccaaagaagtatggtatccttgacacagtggcatgcctaaaagcatggcaatgcgtatgactcgacaaccatgatcaaagttgatagtagagcttgtaatctttttcatctttgtgtgtatcaatccagcactcacaaaaagacaatagggtattacacatattgtggctctaacctctcaaaactatccttatgctgtactcgactgcccccaagtgcaatgcatatccaacatatgccccgctctatacatttcgta

SEQ ID NO: 9576 - DNA, 447 bp, Zea mays
  unsure (1)..(447): unsure at all n locations
ntccctgacattntccacagntggcggagtggtcatttgctgtattcgcggnggagcaggtagccgaagccgagctcgggtgaggcggagatagcacccgagggcgagcccaaagtttggcaagacggagattgcgcccgagggagagcctagtgtcgggcgaggcggagttttgcgcccgagagccggtttggttttccatcgtattaggtgtcccatcgggggatggcaggcgacgtgtgtgcacagtggcgtgagcgtaatcatgttattgcgcctagatgtgactgttgtcttgttgccactatgctcttgtgcctttgtgtggggtaggtgtgcgcattaaatgcgagtgtcccctgctggcctttggttgtgccttgtcctagttgcctaagactggctcgggcgagatggatttggcgattgtagaacgaggtgacttct

SEQ ID NO: 9577 - DNA, 460 bp, Zea mays
  unsure (1)..(460): unsure at all n locations
agcttctaaagggagagcacattttaggattatcttatgttcattttgagaaagacaggatttgtagcgcatgccacgcagggaagcaagttggagtccatcatccacacaagaacatcatgacgaccgacaggccgcttgagctactccacatggatctattcggcccgattgcttacataagcatcggcgggagtaagtattgtcttgttattgtggatgattattctcgcttcacttgggtattctttttacaggaaaaatctcaaacccaagagaccttaaagggattcttgagacgggctcaaaatgagttcggcttaaggatcaagaagataagaagcgacaacgggacggagttcaagaactcacaaattgaaggcttccttgaggaggagggcatcaagcatgagttctcctctccctacatgccacaacanaatggtgtagtagagagaaa

SEQ ID NO: 9578 - DNA, 195 bp, Zea mays
cggctgcggatggcgacataagatggtgcctatttcctgcgaccacggcgaagccgcctgaattgacgcgagccacccaaaatggttctaaatgatgttgtgcacttacataacacagagtgaactcggatagaatgttcatagatgctatgaccaaatgatgcatcgtgatgcatgcctatgggtcactaccat

SEQ ID NO: 9579 - DNA, 463 bp, Zea mays
  unsure (1)..(463): unsure at all n locations
agcttgacagtgactgacaagggctacctcgtatttatggagctcggaccatggccgacgcattaggtcttggcgccacccttgaaagccaaccggtgtgcgtggtgggcccccatgccccccaaggctagcaagccacctccggggaggtcatgttgacgaaggcgtanccattgttggcctccctcctaaaatccattagcatgtagagaaagtcatagtgcgactttgccctaccattgaatggggaagaaaagaggaccaactcagaccaggaggcggaatgcatttgctccatgcccaccgaatatcatagaaggaacttcatcggtaggctgggtggatcatactccggattccccctacatggcacgccaaatttaagctctgatcctgagaacggngccgacgggctangaattggctaatgatgatggacgaacacaagaacacataagtgttt

SEQ ID NO: 9580 - DNA, 480 bp, Zea mays
  unsure (1)..(480): unsure at all n locations
tcattctgatgggctcttaacttcgcttgattttgaatcatacgagacattgtgaagctgcttnactggtaagatgaccaaagcgcccttcacgggtttaccggagaggacgctagatttattggaactcatacatactgatgtgtgcggaccaatgagtacgacagctaggggaggattcaaatacttcataaccttcactgatgattttagtagatatgggtatgtctacttaatgaaacacaagtctgaatccttagaaaagttcaaagagtttcacaatgaagtataaaatcagcgtggcaagaaaattaaagcactgcgatcagatcgtggtggtgaatatttgagtcatgagtntagcaatcatctaaagagttgtggaattgttccacagctgacgccgtctggaacgcctcaaaagaatggcgtgtctgagcgacgtaatcggactttattggatatggttcgatcaatgat

SEQ ID NO: 9581 - DNA, 403 bp, Zea mays
  unsure (1)..(403): unsure at all n locations
agctngagcggcaaccagcttcggtagaattctttgtatactgcgcgatgcccctggccgaagagaggagtaccaagtctgtgcaacattcttgactgccatgacgaaagatttcgccatgactgcagtatctgcccccatatgaggatatggttgctttgtaactcatcacaaaccgcttcggatctgaatgcccgccatacatagagagctggggtggcttgcaaaaagggggccatggagcggcctgctgctttgctgacagaggacaagcatcatcaaaagcaaaatatccatgatggaaatcatcataccatccatcttcgctgaacaagccctcttgaagaatctccctttgtaggggccttcgctgttaatccagaaccaaaaggcgcacttcttc

SEQ ID NO: 9582 - DNA, 445 bp, Zea mays
  unsure (1)..(445): unsure at all n locations
accttaaaactcagctttgtaaatttgagtgaccgcgggacgtcttgcattcttggtctatgtggttgcanccattttggagaagcatgttgtgaacatgttaaaaccatggcccagaccaatgctgccttctacgtcgacgatacgaatgaccccttggccgaagcaagtttaataggtggaaaatttttcactgatatctgggaaaatggcggccgacggatggctcatgaaataatgatgaagagcgaaaaagatattcatgacgctcgagaagctacaaaagaagctgaaaaagctgtggaactcacaagacggattggtatcacttaatggcttttagctctcgtggttatatctgtgacttcgaactaatttatgtcttctaccgcagctgaactatcttctcctctagagccatttgacccactggccgatccataga

SEQ ID NO: 9583 - DNA, 419 bp, Zea mays
agcttgtgaaggttcttcatccccacatgtgctaagcggcgatgccacagccagcccatgctagtcttagctattaagcatgcatctagaccggcctcttcttttgcaaaatcaactaaataaagtttgccgtctaatacacccttaaaagctagtgaaccatcacttcttctaaagacagacacatctacatttgtaaatagacagttataccccatatgacataattgactaacagatagcaaattatatccaagactctctactaaaaatacattagagatagaatgctcattagaaattgcaattttacctaacccttttaccttgccttgattcccatcaccgaatacaattgaatcttgggaatccttatttttgacgtaagaggtgaacatcttcttctcccccgtcatatg

SEQ ID NO: 9584 - DNA, 349 bp, Zea mays
  unsure (1)..(349): unsure at all n locations
ntctcgactaagtcggggacagggcctcatggacgggtgaaagtacgcgtaagcggcaaggccgaccgagccgagggattcccacgcctctgggatacggatacctcactcgtcccttccgcgaaaagcaactctcgctcacacaaacatccctgttaccaacagagtccagatgctcgaaacaagaggaaaaaagacgcagcttcgcaagcgcggcgagggtgtgtttttctggcctcggcggccgcagaaagcacacgctacgagatgatctgatcctgcaggctcgggtcttcacgctgaaaggagccgtagcaccctcggcatcgacgacgtcttcagcaaagtc

SEQ ID NO: 9585 - DNA, 445 bp, Zea mays
  unsure (1)..(445): unsure at all n locations
agctttgtggccatatgaagctttttggctatgtgttcttatgagatggttttaaacttatgagatggtttttaacttatgttcttaactaacagttcaggaacaatgagtttcgagtcatctcgacaaacatgaaaaggtaacaccatgcatgagtacaattgtaacattgtaagagcacatcataaaacttaataataattaagaatttggggttggaaggacattctgattcaattgattgaggacaggttgctaaatgatacatgttntattttaccatataagtttgcaacttcataatagagtatcatgctatgggtttatataattcatttctcatgaagtcgctgagaaagttcttgcatgttccgtgcggatttaatccatcggcttcttcttttctacaagattctatctctatggattacaactgtagtaggct

SEQ ID NO: 9586 - DNA, 271 bp, Zea mays
  unsure (1)..(271): unsure at all n locations
acgagggctatattttatatcctgctagttatcctaaacataagattangagaactcatgctaggaaatctcattctagttctcatcatgattttatgtataagaatgaggcttctagctctatgcaatcaacccatgttaaattgcctaaaaataaatctcctactgcatcaaatgagcctattatttcatttaagacttctgatgccaaatatgttgccaaattatgcaaggtagttgccaaatatgttggggccaaacacaanggctc

SEQ ID NO: 9587 - DNA, 460 bp, Zea mays
agcttagcgacacacacctctttcggtttattctctgagctattacagccatgatgctcatcgtgacaagtcgggtctttgttttggcttacacaagccaaagactgtcctatgccagacacacttgttgggggtctccttatgccgaaggtcctcaaaacaaactaattgttttaattcatttaacaagcgtactgcaggactaaatgcctaaggtaaaatatctaagcgagggatgcaagggacgtgacaaagcttcggcaatcattatgattgtagctttgactcaagctaatcctgaaggtctcactgcaagccaattcaagagtagaatgacaactttatcctcagtgtttgcattatagcgaatgtatagaaattaggggcataattttaatttcgcctgagctatgtcctaagcctataaatagatgaacaatatcccttactattcatggac

SEQ ID NO: 9588 - DNA, 451 bp, Zea mays
  unsure (1)..(451): unsure at all n locations
ctgatacacggattaaacatcgccatatcactgngcgtcattatatagaaggtatacggagattctctggtagtcatcagccagataaacaaggaatgagattgttcaagtgattgaatgggaaaatactgcgctgccgtccgaaagctagaagataaattcgacggtctggaatttcatcatatagaaagagatcggaacacagcagccgatgtactgtccaagctcggatccagtcgaactcacgttccgcccggagtcttcttgcaagatattctgcagccaagtatctcaatggatcatacagaagagtgcaacatcataaatcaacccgagtcatactctgatgactggagaaggctgattattaagtacataatgaatgaagaagaaccagacgacaagaactcgtcagagcgcattgccagtcagtcggctcactatacactca

SEQ ID NO: 9589 - DNA, 401 bp, Zea mays
  unsure (1)..(401): unsure at all n locations
agctnttccttgtcgtgatgaaccttgacatataaccactctgagttccagcctgctgacgacatgcttcggtaactaattacagggaactgtggacttcttcgatgggcaaagttataacaaccaaaatgatcgtgcaaacgatcttttctagcctttgtatgataatgaaactcgtgaacccggcatagactgtgcggacatggttccactgtttggctctggagggcccagatataaacaatatgcctaacgatagcgttaggggtcatctgatgaaaatagataccgatcctcttaagcacctctgcaatgatcccatgtctgggaaatcttatgccaagctttaaaagactcttagacataacagtttaatctttctccgggattggggtactctc

SEQ ID NO: 9590 - DNA, 321 bp, Zea mays
tctgcaaccacatgctgatagccatctcccggcagacgaactaatattcgatgactgggagacagcatacgaagacatctccgtgtggcccaatgagcactagcgcccccttcggatactgcagaacgaccgcatacggatcatcttggaaaatgtcttcttcacataactttttcccgagagcatggcgcacaatataatcacgtatttgggaagatgctgccggggcagcaaggccagaatcttcactcaacattcgtactgccatttctatcataacagctatcagagatctcaccttggcaggctgtgatcgcccaa

SEQ ID NO: 9591 - DNA, 455 bp, Zea mays
agcttcggtattacagcatgtccgattattatggatcaaaccgacttaaagatagaatgactttttagtccataaaggtctgagtcaatgttgtaaacttttatgaggggcatggttgtaattcttgacaggctgtgccctgtgcctataaatagtgaacagtatccctttactgttcacacattcctgtaattgctaacgcatcactcgagaattattgtttgtcaaggcaaaggtataaatgtacctaaatgttgtattcaaatatcttaaattcatataataagatatgtgaatgatgtcatttatttttcaatgtatttatgtttaatgttttatgttttactttattttgtattatctttataagtttaattacgaaggagaaaccttcgtaatattattctcgtgaccttcgtccgaagtccattaaatccttgcggagataatgcttc

SEQ ID NO: 9592 - DNA, 477 bp, Zea mays
  unsure (1)..(477): unsure at all n locations
tcttcatctgtagctntggaattgattcatccttttcctatatcacgccaatcatgtcgggcacgccttcatctcatagccgaaggttcctgtgacagtatattatacttggaaagcatgttagtcgtgtttttgaggaccttcggaagacgaaggcccccaacaaactccgaattcggtgaacatccatgaataatcctgataaatagagatagacacaatcgagaaatagaaattntcactgagcatccgagattaggataaatctcccaacataacacgaaatagacactatgggtgccttcccccataaaagaatctcgtcccgagattcgaacaaagactcttaagggtggagaagcatgtaactcccagactgatgataggtaccaattcataagatgtcatctgacaagatactgaagatagatttggaccgaatatcatgacatattgagacanaatgatctgatcaat

SEQ ID NO: 9593 - DNA, 457 bp, Zea mays
agcttgcaccatgggtcgctagtaaagtcttatttataatatattctgaatctggtgcccattctacagagcttatcttgtccacgcatgaaaataattgtaccacctgcacaattgagtttaagcatagaaatttaggaacacattaatatagtgtctcaatatgagcccacatattttacaacaatatgagttcatgccaaacttaaaatttatatatcttatgagttaatctttataaagctgtttaaaaaatatggtaaataagaaacttataaacatataaattatactcgatgtgaaatttgcatacacaggcgtgagacgtaaatgtccattactccattagctacgctctagctcttagatactgattgggtttagagtttgtataaaaaaattaaggtacgtttgaataagtactaccactgtagactagaaacaacatgacctacta

SEQ ID NO: 9594 - DNA, 417 bp, Zea mays
  unsure (1)..(417): unsure at all n locations
tctanagggagaacacgtgatatgttngactaacgtgcaattctataaagatagaccttgtgcagcttgtcaagcacgtaagcaagtgggaggagcacatcacagcaagaatgtgatgactacttccagacccctggagctgctgcatatggacctcttcggacccgtcgcctatctgagcatatgagggagtaagtatggtctagttattgttgatgacttttcccgcttcacttgggtgttctttttgcaggataagtctganacccaacggaccctcaagcgcttcctcatgagagctcaaaatgagtttgagctcaaagtgaagaagataaagagcgacaacgggtccgagttcaagaaccttcaagtggaagagttccttgaggatgaaaggataaagcacgagttcttcgc

SEQ ID NO: 9595 - DNA, 381 bp, Zea mays
agcttctaaagggagagcacattgtgagactatacaaatgtatattttgagaaagacagggtttgtatcgcatgtcaagcatggaaccaagttggtgttcatcatccacacaataacatcatgacgatcgacaggccgcttgagttactccacatggatctatttggcccgatcgcttacataatcatcgacgggagtaagtatagtcttgtaattgaggatgattattctcgcttcactcgggtattctgtttacgagagagactttctacctctagagactttagagggagtcctgatacaagctcaaaatgagttcggcttatagatcaataatatcagaagcgaccttgtgacggtattccagaactctcacattaa

SEQ ID NO: 9596 - DNA, 454 bp, Zea mays
  unsure (1)..(454): unsure at all n locations
agctntgggtatcttaacacctttattttatcttatggtgctgctcatgtnttatgtcgtcggcatctatatcttgaattacatagttcttatttggtgttcacggcacgtttttttttgttttgatttccagccaacttttaaaactaaatattaagtgtaaccatggaatgtcatggacgggacacactagctactacagtctacaactgttttgtagacttatataaacagcaaataatggcattctatgtgaagcgacaatgtattatatgtattgtatcatagagagccaatgccaaaatatctgaatgtgtgtgccctgcttcaccgggaatggataaatgttaggaaatttcgatccgatgttctttattaagttctcactagtatggttctcaactatgactnccaggcctagtaaaactttatttctttttactagtagtaataa

SEQ ID NO: 9597 - DNA, 451 bp, Zea mays
  unsure (1)..(451): unsure at all n locations
tctatagggagaacacgtgataggtttgactaacgtgcaattcgaaaaggatagaccttgtgcagcttgtcaagcaggtaaacaagtgggaggagcacatcacagcaagaatgtgatgactacttcaagacccctggagctgctgcatatggacctcttcggacccgtcgcctatctgagcataggagggagtaagtatggtctagttattggtgatgacttttcccgcttcacttgggtgttctttttgcaggataagtctgaaacccaagggaccctcaagcgcttcctcaggagagctcaaaatgagtttgagctcaaggtgaagaagataaggagcgacaacgggtccgagttcaagaaccttcaagtggaggagttccttgaggaggaagggatcaagcacgagttcttcactcnctatacaccacaagcaaatggtctggtagag

SEQ ID NO: 9598 - DNA, 451 bp, Zea mays
agcttattgcgtccaattaatgcaaggcctttgggaaggacaataaaaactagtgaacaaagagttctaaaactgggtgcgaaaggagaaaagaagaagactcgaaagtgccaaaaatgtggcattgctgatggacacaacagtcgaacctgcttgtctgtagaggaaaatagggttaaattggctagccttgtcgatagaaaaagaggacgaccgcctgggtctagaaacaaaaattcaacaatggccccacagtggaacgagacatccacataaaaaaacataaacatactgattctgaagaacatggttcgaatgacgataatttggcaggattgtaaaacatttatacataaataatggatgatattgaaatgttatgatcatgatactatttgatgattatgaatatttacgttaaaagctcactgtatggattatatctattaat

SEQ ID NO: 9599 - DNA, 367 bp, Zea mays
  unsure (1)..(367): unsure at all n locations
tctaagggagagcacattntaggattaacaaatgttcattttgagaaagacaggatttgtagcgcatgccaagcatgaaagcaagttggtgctcaccatccacacaagaacatcatgacgaccgacaggccactggagctcctacacatggatctattcggcccgatcgcttacataagcatcggcgggagtaagtactgtctagttattgtggatgactattctcgcttcacttgggtattctttntgcaggaaaaatctcatacccaagacaccttaaagggattcttgagacgggctcataatgagttcggcttaaggatcaagaaaattagaagcgacaacgggaccggagtcaagaactctc

SEQ ID NO: 9600 - DNA, 460 bp, Zea mays
  unsure (1)..(460): unsure at all n locations
agcttgtggaggaccagatcaccaaagcatatttgtttctggatgagaagtggtcacccaagttccgttgatgaagcaccagaagaccaatcaaagaaggaatccatgtgggagttcgcaagagaaaggtttgcgtgttggcatcgatgcttcctcaataagctagttgccaagcgaaagcttgaagcctgaagatgatcttgagtagccagaaccagcgtttgcaatcagcaaccagatgcccctcaaaggccagattttgttgaagctctatctcctcgaagagtttgcaaagtgaagatatgtagctgaagtaaagctatacccataacccttctaagccaaatctcgaggacgagattccttttaagtggggtagatttgtagcatcccaaaaattcaaattctgaaattttctcaaactccctctaaattcaaaatgaatttcaagtntcatttc

SEQ ID NO: 9601 - DNA, 478 bp, Zea mays
  unsure (1)..(478): unsure at all n locations
tgtgggtgagaanatattntacccatggctcatcaatatgtatgccaaagagtcaggacccacatgttatatttagtgccaggcatttttctaatcacaatatttggatcatcaacccaaaagaacataatgaaaaaagtacaagatataaaatagggtaatagcacactgtgtatagagattttgagcctacaatcctacattattgaaatgtataatagcaccatacttttagttcatttgccagtctcatattgtcctcaagatgggttttcttctggttcaattgttgcaaagcaccagatatagcttcttcctgcttctcgtcaacagcctagcaaataggaaatatttaaattaataaatagttgtacgaatggaacagaaagtaaaatgagatgtatgattatagagaccatcctcaagtctgtgagcctcctctccagaatatgtntntcacccagtaatctcagctcct

SEQ ID NO: 9602 - DNA, 462 bp, Zea mays
  unsure (1)..(462): unsure at all n locations
agcttgtcctcaaaatattactcgcgctaattgtttattctcctttagaaagagtttttctcctcctttagagatgaagaaaagctccccctgacagagatctttggaaaaagcatgtaaaaattagaggtgcaagacatgatttgaaaagactaacttcccttatgcatacgtaacagaatatgagttaaccacttatgcatttttagcaacatggaagtatatgatatgaaatatagtctaatcaaatactggagaagacatgtaaatgatactagatgtagtctcaaaagataccgattgaaattcaatggcgagcttgagagacatgagagttcttggagattttgcagtggaagattgttgtctttctccggggacctcattntccttataatgagactatcacatgaaatagactcgaaaaggtgttagtctcaaagtattagactatagagtaac

SEQ ID NO: 9603 - DNA, 457 bp, Zea mays
  unsure (1)..(457): unsure at all n locations
tggaaaaatctggaatgaataggcggtataaccagccagtccaatgatacttcngacttgatgtacagtggttgggggtttccactccaaaatatccttgactttgctaggatccaccgcaatccccgtggcagataatacatgtcctacaaattagatctcctcagccagaacgcgcatntactgaatntagcatatagttgatgctcccttaagcgcgttaatacgatccgcaaatgccgagcatgctcctcttcattcttagaatatatcaagatatcatcgatgaataccaccacgaatttatccaactcgagcatgaataccgagttcataagatatgtgaagtgggcaggagcatttgttagtccgaaagacataaccaaatattcaaataattcataccgcgtagtgaatgcggtctcgggtatatcttccggtcggataccgatatgat

SEQ ID NO: 9604 - DNA, 452 bp, Zea mays
agcttattgctcaatcgtgaataccatgctcgtttattttgtttcaatccatagagagccttatcaagtttgcacacatagttgagttttgtggaatcctcatatcctgtaagttgctgcatgtagacttcctcctccaatactccatgaaggaatgcattctgaacatcaagctgacgtagactccaccctcgtgacacagcaatataaagaattatacgaatggtagcatgtttaacaacaggactgaaagtatcatcataatctatcccatattgttgtttataccctttagctactagtcgagccttgtacctatccaagcttccatcggctttccttttaattttatacacccatttgcatcctataacgttcctacctatttttggaggaacaaagtgccaagttttatatttcataagagctgagtattctatatccatagcatc

SEQ ID NO: 9605 - DNA, 407 bp, Zea mays
  unsure (1)..(407): unsure at all n locations
ngccatnggtcttcaatnggtctgcaatagactttcaattggtatcttctagactacatttggcantaattacatgtcctcttcaatatttggttagactaaaattcatatcttatacttaccatgttgctacacatgcataagttattaactcaaatctgttacctatgcataagggaagttagtctaatcaaatcatgtcttgcaactctattttcacatgctctttcctaagtagaagatctctgtcatggggagtatttcttcatctctaaagggggagaagtttcttccaaaaggagaacactcatttatggggagtatataattttactgcttcaatcggtatcattgataaatcttttatgagggcaagtcttatttgctctctacatgcttttaatgtc

SEQ ID NO: 9606 - DNA, 465 bp, Zea mays
  unsure (1)..(465): unsure at all n locations
tgacattgtctccctgttggaagccaatgccatccttaatgcctgngcgtctcccactataaagcatactacgagcaaatttaaatnttttattttctaattcttgctcggcaattttagcatctaattttgctatatgatcattctgttgtttaattatagcaatgtgatcatgaatagcatcaatattaatgtctctacatctagtgcagatagtaacatactcaatggtagatgtagagggtttgcaatcttttagttcaataatcttagcatgtaaaatagcattctcatctctaagattggaaatagaatcatttcaaacatttaaatctttagccttcgcaattaattnttcattttcaatcttatcgctaagaagagatgcattcaatntgtcaatcttaacaattaaactagcattatcatttctaagattaacaattgaatcatcacacacatttg

SEQ ID NO: 9607 - DNA, 457 bp, Zea mays
  unsure (1)..(457): unsure at all n locations
agctagccaaacattttggaggagagttctttctctgatcaaaagcggagattcagctgttaaactattgagagaaaagttcttgcaccaagacgtgtggcatcaaatgataatgatcaaagcaatattgctggatcaaggattgtcttaccaatagccagtctacagacatgtcatggatgatgttgtgtgtagtgtaggggagagtgaggatagggaagggggaaagcacgggcacagaattctgctgttttaaaaaaacatgaatgaccttgagattcagtactattatattattattacatgcctgaaaagaagacgaagctctattacttgtagaaaaaagtgagaagacgatgctntgttctttgtcagtcaactggtttaaatgatgaaatatacttgaatctcaccttttcttgttgtctggttttcaagaatcatcatatcacgaaat

SEQ ID NO: 9608 - DNA, 358 bp, Zea mays
  unsure (1)..(358): unsure at all n locations
ctcagcttncaagactcagcgcacatgcgctcaattgataaaagccagtggcctcagcgaataattgcacgggcaccggcggtgagggagcacgtggtggccgaccattggccaaggctggccacacgacggctactggaagcggggcacaggggatcccatgggatcgataatggcccgtggcctgtgggtgatcccatgcacgcgcgtgtccgtgtgggcaaacatgtgtggcttccccggcgattgtcatgtggttaggccaggacgacgatgcaacttcggatgtggtagcgttgggctcccgagacggtgatagtggtgcagcgctccgattctgtggtgaagcgcaatgggc

SEQ ID NO: 9609 - DNA, 454 bp, Zea mays
  unsure (1)..(454): unsure at all n locations
agcttataacaagaaaatagaggcaagagctctatcatatgttataatagaaggggagctgtacaagcgtggagtctgttctccactactcaaatgtttatccagagccgaaggtatagaattgatgaaggaaatacacgcaggcctgtgtggatctcacattggatctaggcctttgttgggaaaagtttttcgtcaaggattttattggccaaaggcagcttcggatgcagcgaaattagtccaaaagtgcgaaggctgtcagaaatgcgcaagagatcaaaaacaacattcgtctctaacccagttaatacaacccacttggccattgcaaaggtggggccttgatttgttaggtccgctaccaccagcacaaggaaatttaaaatatgttgtggtagcagtagaatattnttctaagtggattgaggcgaagcctttagccacaataact

SEQ ID NO: 9610 - DNA, 465 bp, Zea mays
  unsure (1)..(465): unsure at all n locations
tcttcccagcatacaactnttagatgtatatgatgatctgtagacagatagatcttacataaatcatatggtgaagtaccacatgagtggatatatagaaaagaaatccaaatctgtcgaatcactcatcttatggtcttgtacatcctacgtctcagtgtttcgtcatttgtcttatgttcttcatgtagcattcatatcgaatgactataaaattgtgtcggtacttccacatattatgggcagcgtaggacacatccctattttcatccagggtcttaattatcacttcttagctttaaattcgcctctgaccatcaaattaaatgtgaataaactgtcctcctctctttgaaacaaggggcgcttccgattctgtgcgtgcttcanacaattntgtcttccccatattaccatatctctagagtcaataattntctatgaggaactactgaactcaatcgc

SEQ ID NO: 9611 - DNA, 456 bp, Zea mays
agcttcggcatctgctagaaagaccccttttgtttgacatgaccttagttctccaaactctactatatacaagggatatgtgcatgactcgctcgtccaataacctcaaccgagcgtgcttttattgtttcgaaaaaaactcccgaaagtgagggcacccaccgtgctcatgatgcggctcataaatcagcagatccattttctccgcgaggaatatttttaacatacaacccttcataagaagccgcaatccttccgaccgagctgaaatatttatcatacgccggatctctcgctgtataacttcttgcagactgaccacaaataccctgtgaatcgctttcaaaactcgccttctgatcacataggctttaacatatcgaacacccactagctatgctctctactgagcgatgacatctgtgcaactgaaaacacctcttgatgcgttacaag

SEQ ID NO: 9612 - DNA, 284 bp, Zea mays
  unsure (1)..(284): unsure at all n locations
taagcttctagggtgcaaccctagagctgtcttgatagctatcattatatganagatacaccnacggcagacagtcgtgccatttatgtgggaagacgagcacgcatgctcttgacttatattcaagcatttggatcactctatctagttgcccactggtctgaggatggctcgcctatctatggatcagctgaatacccaatgatttgagaattgcttttcactactcggctaccaattgagggtcacgatccgacgatatagtctttggaacacggagccta

SEQ ID NO: 9613 - DNA, 443 bp, Zea mays
agcttgtgggggaagttattagacttgtggtgttataagcttgtatccaagctttagacattgaatctactgaaggacagatatatgagattaattcagtgaaggtactcatttttttctagaataggtacacttagttattagtaattagctaattatcatcaggtctcaatcgagatataatgtgatttagtcccttaaaattttcaatctctttatttttctcgaacacacaacatagttgtgtatcatttagttaatagaggaaggttgttagcatataggccctaactgccttataattacaacatgtgccactaaccaactgaggaagacgaagtcccaacaacctaaaacctattctggcagcagaaatgactggagttcccttcattctttgcccctgctgtctgctgtacaccagtgatctttcattaagcaca

SEQ ID NO: 9614 - DNA, 312 bp, Zea mays
tatggtgtttgttatactgggtacaagcagctaacccgttcttttaaatgcgatgaaggcggtcaatccaggcatgcattatgagtacatccctaaaccaaatgcatggattgatgggagacagatattcttccgtgcgttctggtgctttccccagtgcgtggatgccttccggcattgacgtcctgtcttttcaattgacgacatgtttcttctcgacaagtaccagtgcactcttctaatagccatatctgttgatgcaaacaacaaagctaatcccctagcatttgctctggttgagaaagagaacaa

SEQ ID NO: 9615 - DNA, 440 bp, Zea mays
agcttgacgcattagcaggtcaacagtttattttaccaacaaactgtaggattcgaactgttcctataaaatacagatgacaaacccaggcaagttgaataatccatctcaaccaaatcccctctgcatttcccgacaacaccgtcgcgagcaggtggcgaagagaacagtgaaatcaatagagtcgccactcgaccagcacgccgcgccgaaaaccccccacaaccgcaccgaaaacctcctacgctgacgcaacataacctaggcatcccacacaacgaccgcaagggccgccaatcggacgctggaccaactccatccgcccggcggtgcacgggtgcgcggcagatcgaaaggtcccccggcgcaaatcaaaccgcgacgggactaaaccgagtgagagcgcgagcatggcacctaagagcgggggagagggggga

SEQ ID NO: 9616 - DNA, 394 bp, Zea mays
  unsure (1)..(394): unsure at all n locations
taggacctatgaaactaagcttaggataaagtctaaaatgaccccaagaataaacttgtatcacttttatacccctgggataccaganaccctaattggaaccctggaaaaccttgaaaccaaaccctatgggcttatgtgcaaaattagcccacttttgggttaaagtgcaaaaaccaagctaaataagtatttaaagtcatttggttcacaaatatgtggacttgaaagccaaaccctaagttttggacttaaatgcaaaatggacctcatttgagttctattctaagtctgaaaatcagagaattggctcaactttggagccctgtatctcttaaaatataggaattnttgcccaagtgaccacagcaagattgttaccaattaatggaaa

SEQ ID NO: 9617 - DNA, 472 bp, Zea mays
  unsure (1)..(472): unsure at all n locations
gacccggatctctaagcaccgcggctgcaacttatggcggaaattttctcttcttatgggaaaatggcgaccgagggatggcccatgatatattgaagaagagggaaaaagacattcttgacgtccgagaagcaacaaaaacagctgaaaaagctgcggaactcgaaagagggatatgtattatttaatggcttttaactctggtgtttatttttgtgacttcaaactaatttatttcttctaccgcagttgaactatctcctccccagagccattcaatccactagccgacccagaaacagagaagacaatagagattattaatatggccgaatctattgtggatgaagttgttaccgagctgctaaccgaagctcctgaanaagttctgaaagaagaagagtagctattgtaaaaacattttttaagatactaatgtaatatttgctgaactaagtctgtaatatttgat

SEQ ID NO: 9618 - DNA, 449 bp, Zea mays
  unsure (1)..(449): unsure at all n locations
tctcatggtgggactcaataggaaattctgtaatttagaattctgaatttcagaccttgagccaaagatcaagcgtgttcaccttgatccctaactcaaatactaatggccccattaacaaaaatgtgcataactaacccctctatcgcatgccagaagatggcattgggacgcgagccctatacacgacaaaaccctggatttgccttgggtttgagcagggagacagaccggatttccgagctccatatctctgcaactagtaggcaaaatcctatgatccccacacaagatcggtagcttgtagggaggagaagaggttttgtgcactgaccaaggcgagagtaggttcggatgagtgaccacacgcgccagaacttgtgcagaacgcatgggcacacgtgtntgaccctagtctgcacgccggcgctcgcccaacccgcgcgcgc

SEQ ID NO: 9619 - DNA, 442 bp, Zea mays
agcttcgttgaactgttgtgaattgtgattatctcgggcttattaagaaaaaactgctacgtatcaaaccagtacatcatttttaaattcactacacttaccattttgcactgagctaagaaggcctcatttggaaactgcaatctacataccaacttgcattggcaagcagccaagcaccgttgttgtgtcatgctcatgcccaagcaggcgctgggaacggaaacaagcgtgaaaatccaaatacctcaaggcgcgtgagtaattggcagaaaggcgaagtggaccgaagctgatggcccaacggcccaggaacgacaagcccatggtagagaatgagagagaggcgctgcgacgccctggaaaccggcttgtaacataaacttgtatttccttctcacggattctgacgtgggggatgacaacggatacctaaaaccca

SEQ ID NO: 9620 - DNA, 392 bp, Zea mays
  unsure (1)..(392): unsure at all n locations
tgacacagtacttatatatacatcaccttcagtttggcagctgctgagaagcacgagtgatacacctcctagttgttgtctttnttatactgttcttccgactctgagcaacggcggcgtcagagcggaatcgatccggccttgactgattaggcatttttcttctctttgaagagtactcagtcccataattgctttgaaaagtactcctatccaggatgcgtctcgtgattggagggatccaaactaccacttgatccagctttgtactactaaagctgtatgggtcacttgaactaaatattagtggttaanatagtcttagttcatctaagcacgcagagtaataagtgggtctagataatcaagtgaactacacttcagtcaacaaa

SEQ ID NO: 9621 - DNA, 457 bp, Zea mays
agctttaccaaatggacgtgaagagagctttctttaatggaccaatcaaagaagaggtctatgttgagcaacctcccggctttgaagatagtgagtaccctaaccatgtctataaactctctaaggcgctttatgggctcaagcaagccccaagagcatggtatgaatgccttaaagattttcttatcactaatggattcaaagtcggaaaggccgatcctacactctttaccaaaacacttgaaaatgatttgtttgtgtgccaaatttatgttgatgacattatatttgggtctactaacgaatctacatgtgaagagtctagtaggattataactcaaaaattcgagatgtctatgatgggggagttgaagtacttcttatgatttcaagtaagcaactccaagagggcaccttcctaagccaaacaaagtatactcaagatattctaagcgag

SEQ ID NO: 9622 - DNA, 457 bp, Zea mays
  unsure (1)..(457): unsure at all n locations
ntgtgaagatattntccgaagctacacttccgaagatcaatagtgtatcttcttgtgacttagcatgatttcccccttttcaaaacattcttctgaagatcgatattgtgtccccttcttatgccatatgcagcatgatgtatgatgcttatgccatgcgaaatgatgtgatgatgttatgctatgtaagatggtatttattccaaagatacacgcacatccctgtaataaaacacataatcttttaaaatcagcgttgacttttcgctgtaagcctccctcaggagcttcttcgccttttacttcaacggaatcagcgtttatttttcgctgtaagcctcccttaggagcttcttcgccttttactttcagcggtattcgcgtngacttttcgcgcttcgccttttacttaagcggtatcagcgtttatttttcgctgtaagctctgcattccctt

SEQ ID NO: 9623 - DNA, 456 bp, Zea mays
  unsure (1)..(456): unsure at all n locations
agctttctcaccatgcatagcatgcctaatgattcttatagaatgatgcagtttaatatgtaaacttggtcatcaagcagactgttgatcttctgaccagtcagcactaaagtaggtcggtcgccttactgggagatccaattaagtcggccttgaaagcattggaaactagacttcaatagctttccaaaatatacttatgggccttcatagcttttgggaatcaaaagatatgactgtttcttttagatggttctgttgtgctggactaactcgaacatagctcttctctctaatttacccttgatatgtttagtccttcctctttggtgaacctaagcaatatcaacatacacgaattaggtagcataaaggtatcattagtgtntaatntaaattcgtaaagtagcacacgcacctcttgttgtatctgtttcgctcagcttcgagagatag

SEQ ID NO: 9624 - DNA, 469 bp, Zea mays
  unsure (1)..(469): unsure at all n locations
acctctggaagctcncgagcaggaatcggagtttccttcttcggagaagccagtccacgctcgccggagctctctaccccgccggagtacgtggaccgggtaaaccactccaccacccttcaattccttgtgcacacagtcgctgcgtgaccccgtgatgctcaccgtgccctcggattgaaccagttcgccgtggtttggccggtatactcgccgccgacgaggacacccgcctgcacgcgtggaccgggcgattccggccacctccaacgccgagccgtacctcgacgtgaccgccagagtctccccgagccaaccccacccttcgccggaccatcctcgccgccggtaagccgcgccgcccttttcttttccgcggatactggttcantgaggggaaggactgcgggtgagaaagaagaaaagtcatggggttctgtgaaatgtcagagacacaagggactagtga

SEQ ID NO: 9625 - DNA, 346 bp, Zea mays
  unsure (1)..(346): unsure at all n locations
agctagggaaggtacttcatccccacatgtgtcttttntgtgatgccacacccagccaaagctagccttagcaattaagcatgtatctataccggcctcttcttttgcaaaatcaactaagtagagctagcgcgctaatacgcccctggaagctacagaaccatcagttctggtaaagacagacacatctacatttgggaatagacagctttaccccatatgacataattgactaacagataacaatatatattctagacgctccgctacaaacacattaaagatagaatgctcattggaaataagaactatacctacaacatgtaccttgccgtgttgcccatca

SEQ ID NO: 9626 - DNA, 378 bp, Zea mays
  unsure (1)..(378): unsure at all n locations
ctcaagcttggtgccgatggnaaacaaaaatccttganatcttggctgtctaactgtttgttgttgncaaccgctagctcggacggtactccgaatcggcaaacgatgttctgccagaagaattattgggcagtctttgatgtgattgtggagacagccctcgcttcaatccatttggtcaagtattcgacggctacgaaggcgaacttaaggttccccttaacggtgggcaggggcccgacgatgtccaggccccagcgctggagaggccatgtatgggcaatcaactttgtatattgcgaggtgttgcctgaccgacgagagaacttctggcaggcttcgcaggacctcgtgacccgatttgcggcgcagatcatt

SEQ ID NO: 9627 - DNA, 443 bp, Zea mays
agcttgaagctaaacatagatcttattggtacatggctgaatcgtttgctaacctaggaacattcaagcaattgaaaggactttcgagaaagaactctagtactcattgtgcataagcatcagcacaaagtatacaggtaacatgatagacttctaaatccacttgaaagctggatatataaaagaaaatttgaagatgcctgttgtcacctctgcctgcaggtgataggtactcgcagtctgaggtcaatgggcaacaaaagcatatgtcatcacatgactcatcctgcactgcattggctgtaagaggccgaacaacaaatgttccacatgaccacatgtgtatctacagtgtaagtctcctgtggcacgtaagaatttcataggaatgatataggaatttcacaggaattagttcatagacacatgaaaaacgcatgatt

SEQ ID NO: 9628 - DNA, 285 bp, Zea mays
ctaagctgctgacaaaacggacgccgaatctgatatccataatgtttttgtctccagacactaccactcatgcccgatagcggacaagcctcgaaactattctttccaagaaagaccatgtttggcacatccagttgctcactaagaacaacttgcatcatttgacaagcatagaccgctacaagaatcctcttgagatagggcatggtgacgctataaatggcacctgattgcgcaccgaacttacaatgacgctccacccaagaaatgacacgcgagcatttc

SEQ ID NO: 9629 - DNA, 422 bp, Zea mays
  unsure (1)..(422): unsure at all n locations
cttaatcacctgccgcatgcaagctagcaaagaatgtccatgcagtacacnnttagtctactttaaacttgtgaaactatatccattattttcaccaccttgtccttgatgtgcaactccacttacaatgataatgatatatttcaggaagcaagtaaagacgtcgggcaagtactttgtgtttacctatttctggggcttttttcagtggttctacactgcaggggatgagtgtggattcaaaaattttccaacattgggccttgaagcttataacaatatgtcagaactgtgaactatcctacatatgacactcgctgagtataatgtccaatatgtgaaatattttatactaaatccatctggtgagagcttgagaattcatctgnggcatctcttgctatactgcacaagtaaaacaa

SEQ ID NO: 9630 - DNA, 345 bp, Zea mays
tgtacatctcgatgccgtgcttcttgaggtctgcggcgtgagagttaactgccgccgtggcgccgccaaccggagctctcggctgcttgtaagataagtcctggatcctgttcaacagctgctcggaggtgtcctcgtcctgcggctccgggatcgccgagagcgtctcgaggatgatcatggagtggtgcgacgccatggcgcgcccgctctcggagcacacgaccgggtgcgcgacgccgttgtagtcgcacttgagccgcaccgcctgcacgacggcggaggcgtactcctgtatcccgtacgccaccgacatgtctgagtcgcctgaacgggtcccgtcgt

SEQ ID NO: 9631 - DNA, 296 bp, Zea mays
tccgcgacgccacagccaaccccgaatagtcacacccaccgaacacgcgtagagtccacgcgagcctccatcaaaaacaactagaaatagctgaccctgccacactccctcgaaagcgattggatcgtcactcctaaagacaggaacacccacaccgtgcaaaaaaaaacagctgcagcccatctcgcataaacgagacacagaaagcaaaaggcaatctcaagaagcgacaagacaaacatcggacaaagacgggtcaggcgagatatcaatattaccagagccttcgaccaaac

SEQ ID NO: 9632 - DNA, 477 bp, Zea mays
  unsure (1)..(477): unsure at all n locations
aagctctagatcgagaccnaacatatatgtgcatctgtgatcttttttctgagggaatcgaataaacatatgtactcggatcaattccattcgtcttgagggagtcatgtggagatagatagtcacatttagatagatagtcacatttctgatcacaacattgctgcacacatgaaagattatcctggcatttatttatctgggacaacaatagaagcagattttgggccatacgtgcgcatttgatacaaaacagttgctaaagaacaagttgaacatacatcattgtgctgactttattgtgtatattatccagcaatatatgtacttcagttatgcgtcacttgttgctcctaacagtttgtgtagatccactttccctttaattatagtcatgatcacaccaataataataactgttaggattcttcatacgccaataaacactatatgttgaaagagaacatgcatgaatac

SEQ ID NO: 9633 - DNA, 459 bp, Zea mays
  unsure (1)..(459): unsure at all n locations
agcttcgaagtttggtacccaatttgaattgtgttctttgagattagtaataagagccttgggtacccacacattccttattgtggccattctttttgtgtaggtatccacatatacatgacaaccatcttactatggttccaagttaatatttaatcacacagataaaaactaaagttaagaatatgagacttttctccttttcttgatacatcattgcgttgccttcttgatgatgaacctagcttaaccttgggagcacctatcttatcaaggttagtcacacaagcattcatatcataaagacaacttatgcatggaatttacaacttatcgatccaattcaatgtgaagcatatggatatcgattgaagtagatttctaagatatcaaaatatgggtttccaaaatttagagagtatggatcactatatgtactctttacagtttanaaatcat

SEQ ID NO: 9634 - DNA, 453 bp, Zea mays
tgtaaaggagaagaaatcgatgaatgagaacgtattcttccatcatatctgggcaccagagacctgtgtattagaggtcgggtttacaagggtggctcctaccggtccggaccacagatggtgccagagactgagtttacgtgagccgaatttaccagactagaacacagataaatgctatcatattacaaaggaagagtttgttctcacgctaccttacaaatggaagatgtgaggctgacctagaccgcttgagctccattgtgcatctaactctaagggtgggcatcgtcccttctgttaccttgaacaccatggagcttgtggtaggcgagtagggtctctatgccgatgtaaaatcccttcgaagcacaaagaatgcccctataagggtctcccatgaccgatgagatgtctttgtcgcggcaagggtgatgtcgatgtaatcgtcgt

SEQ ID NO: 9635 - DNA, 458 bp, Zea mays
agcttgtgaaaggtcttcatccccacatgttcttaacggcgatgccacagccagcccatgccagtcttagcaattaagcatgcatctagaccggcctcctcttttgcaaaatcaactaaataaagtttgtcgtctagtacacccttaaaagctaatgaaccatcacttcttctaaagacagacacatctacatttgtgaataaacagttatatcccatattacaaagttgactcacagacaacaagttatatccaagcgactcaaccaagaacacattataaatagagtgcttggatgaaatagcaatttttcctaaccctttcaccttgccttggttcccatcaccgaatatgattgaatcttggggatccttgttcttgacgtaagaagagaacatcctcttctcccccgtcatgtgggttgtgcatccgctgtcgatatctcactttagcccccg

SEQ ID NO: 9636 - DNA, 351 bp, Zea mays
  unsure (1)..(351): unsure at all n locations
ngaatcacttttgtacccctgagataccaganaccctaattgggaccctggataaccctaaaccaaaccctaggggcttatatgcaaaattagtccatttttgggctaaaatgcaaaaaccaagtcaaataggtttcttaagtcccttggttcacaaaaatgtgtacttgaaagcaaagcccaaggttttggacctaaatgcaaaatggacctcatttgagttttgctctaagtctgaaaatcagtgaatgggctcaactttgggactttgtagcttgcaaagcatanggtttttgccctatgtcaccacatcaaagttgaagaccaattataggagaacaactttgctta

SEQ ID NO: 9637 - DNA, 451 bp, Zea mays
  unsure (1)..(451): unsure at all n locations
agctncatactcggctgcgtagttagaggtttttaatagcagctggagagcatacttgaggtgttcgcctccaggtgcagagaagagaatccctgctccctgcagcttcagcgagccatcaaaatacattcgccatacttcggccgtttctggattgtctggaacttgctgttctgtccactctgatacgaaatcgaccagtgcttgagttttgatggcagtgcgaggtcggaactcgatatcatgggatcccaactcgcaagcccacttggctattcggccaatggcttccttgttgtgaagaatgtcccctattggaaaaccagtaactactatgaccttgtgatcgtcaaagtagtgacgcatttcgcgggcagttataagtactgcatataatagcttctgaacctgaggatactctttctttgatgggcctataacctcactgatg

SEQ ID NO: 9638 - DNA, 364 bp, Zea mays
tgacccggggacccgcgtcaccggaatagcccaatcgtgctcacttgagtacaagaacccgccggcgcacgtggaccaggtaagcccctgcaccgttttccaattccttgcgtgcatggcctctatgtcatcccgtgaagctccttgtgcaccctaattgaactataccgccgtggtttggccggagcaagagccgccgacgacccccgccgcctgtgctcgtggccagggtagcttcgaccacctccgacaccgacccgcacaccgacgtgaccgttgcgacctcccggacgtcactgaccaccccgccggagctctactgtcgccggtaagctccaccgccgtaaactatgccgcgggtact

SEQ ID NO: 9639 - DNA, 392 bp, Zea mays
cagcttagagatagagcataggagcttctactcttaagtcaatggctcattctccttaatttctagagcaagagattcctgaacattaatgaatttatcatgttcctcataaagaatatcttcttgcttttctaaaagactatctgttttattaagagcatcaatcaattcatgtatattatctaccttagatctatctaatcctttaaataggtcactataatctacttcatcgtcagaagattcctcatcactagaagaagtgtacttaagtgtatctcatgtatgtaccttcttctacttagccataaagcacgtgtggcgttcgttgaggaagaggaaggaattgttgaaggctgcggcaactagtccttcatcatcggagtcggatg

SEQ ID NO: 9640 - DNA, 349 bp, Zea mays
cgtcctgaccatactcttgtatactcataacccgattccgaagatacctgttcacatatttcacttggaaaacattgtcaaatcatgtttttgaggaccttcggaagccgaaggcccccaacaggttgtatctacatcgaatcctcaagaagacatcatacgaactcctaaccggtaaaaagcccaatatttcatattttagagtctttggtagcaaatgctttattcttgttaaaagaggtagaatatctaaattggctcctaagactgtagaaaggcttttactaggatatgattcaaacacaggggcttatagagtctttacaagtccactggacatgtggaagtt

SEQ ID NO: 9641 - DNA, 451 bp, Zea mays
agctagtgaaagttcttcatcctcttatgtgctaagcggcgatgccacagccagcccatgctagtcttagctattaagcatgcatctagaccggcctcttcttttgcaaaatcaactaaataaagtttgccgtctaatacacccttaaaagctagtgaaccatcacttcttctaaagacagacacatctacatttgtaaatagacagttataccccatgttgcataattgactaacagatagcaaattatatccaagagactctactaaaaacacattagagatagagtgctcattagaaattgcaattttacctaacccttttaccttgccttgattcccatcaccgaatataattgaatcttgggaatccttattcttgacgtaagaggtgaacatcttcttctcccccgtcatatggtttgtgcatccgctatcaataatccagcttg

SEQ ID NO: 9642 - DNA, 427 bp, Zea mays
tgtcaaagcccgctggaattaatcttcggagaaacccgacctcgctgcaacatgacacccgaaggtccaacacaacaagcaatgagtgaattcagaattattgcagagcatatcagcacaagggacctggttcaagagtttttagcattcaaagtttttcccagtttgaaagaatgggaaatgccgaagctacagggggaaaagaaagaaggtgaactcgtacgtttaccttactatttcaagtttaaaaagttctttaaagcaccttgccaagagtggctagatacgattgaagcaatgtgcaatgaaatacttggcaattactctaaaaaagaagatcaattgatgactgcggccttcggcacccgttcgaagcgaaggctaaaccgagtgttggacgctctggagtttgaatacccagactatg

SEQ ID NO: 9643 - DNA, 415 bp, Zea mays
agcttgccaagccctctgaccctaccgtactttaccggaggcccgatatcaacctcaccggacttcggtcttccgccgccgcgcgtggaccgagctatccagtgagtctccgcccaattccttacgctcatgtcttctctggcatcccgtggacctccctgacccatttgattgaactacctcgccgtgatcaggccggtctcctcgccgccgacgagcatccccgcctgcgcgcgtggaccgaccgactccggccatctccgacggcgttccgtacaccgttgtgatccccgcgacctccgcttcatcctcgaccacttcaccggagcagtctcgccgttggtaagcccctccgcccttttcttctccgcggctactgtttgaagtataagaaagaccttgtgttaagttctgt

SEQ ID NO: 9644 - DNA, 392 bp, Zea mays
tcacgggctactggcggagctagccgaagcactggttgttcttgatggtggctggagtgagctggcctcggcggccgaagctctggcggcaatggcgggcggaaatgagctcgccggagccaaagaacagtggctggccggtgagggtgagtgcggcgcgaagtggggcgcgcctggggaggctttatatgcacggtgcggtgcacaggcggtcgtggaccatcgagcgcgcgcgggcgtgcactgggaaggcgcggtgcgcgaacggtcgtgaaccaagggtgtcagccgcgtgcgaacacgtgttctcgttgcctgtcgccctgttcaagcgccgattgtgagcaaatcttcttcaatatgggcaagatcactgctatggatttgttacc

SEQ ID NO: 9645 - DNA, 427 bp, Zea mays
  unsure (1)..(427): unsure at all n locations
tgaaaacttgggctgaatctttttggtttatttttgaaaaaatcattgatagaccttcagaacaagtgtttgaaattcagcaatcaatgtgttcaacgactggagaaggtgttttattcagtcggggccagtagtgaaaaatttattccttcgtctgaagatctaccaggagccttcgaacacatcgaaggtgagattgatgacctcgatgatgttattgccggacacggcgacttttgtgccctggtagcttctcggggcaccgctgctgcgttcctgaaatctggctgtgagcacggaaaaattatcaacagacccaatttcagcctatcaccagcaattctagatgatattcctaacctcgcccgaagcattgcgaataaatttataaaggtgatatggacaaagggtgggcgagaganagctg

SEQ ID NO: 9646 - DNA, 479 bp, Zea mays
cttgtgaagccggagcgacctatacgtgtgcttgtcgacgactatgccattgggttgctggacctcaatactgcctggagctcccaattcaaaatgccgacttcacgtccatgtgatggacgctccacccgtattgggctgcgatggcgaggagcaagcgcacagactcctgtcgtgcaaccgacacgaagacctcttcgatatctacgctaggctgctgcacatagaccttggcgacaaggcgggccttggacttgacaatgttgtcgatctcatcacgctcgactttgtacacccacttgaggcctatggcgcggtgaccactcgggagctcgaccagtgaccatgtcttattgtcacggatcgacgccagcttcttcttcatcacgacaacccaatttgggtcagcatcggcctccttcaacgtcatgggttcctccacgcttacagcatgcagctcagcgtactcgtcgtcatgg

SEQ ID NO: 9647 - DNA, 461 bp, Zea mays
agcttggacggccacaattaactcctctgatgttattcttcggctacatgttaaaatggtccgcaccgccaaagcccttaaagcttggagctgacgcacggtcggtaacatcaaagtgcaattggctatcattaagattgtccttaccatgctggaaaaggcacaataaaaatagaatactttctagtgaggaacctgacttcaggaaaaggctaaaaatcaaaattcttggccttgcaggcatccaattatcaattgctagacaatattccagacagacctgtgtgcagttgggtgatgcgaacacattttttcatttgatggccaatcacagaaaaagaaaaaactttatcagatccctgaatcgtggagactgcctgttaactagtcaggaagataagctacaagaggctcatagacattttcttgagatcctcggcactagaggcaggaggaacagt

SEQ ID NO: 9648 - DNA, 407 bp, Zea mays
  unsure (1)..(407): unsure at all n locations
tanggtnggctctaggataacacagatagcgttggtattgctttgatattattttgtggacagcaaataaagttttttttatggacaacctttattcatatctttcatttctctatccttaaattccatttacggtttctatggtaggtttgaactacaacacggttttaataatttccaaaaattctgtataaattacagtgggttgccactagttattttagcttgttttaagaaattgaggcttatagtataaaaagtaggccttatacaaaaataacaaaagttatgcaaaaaggggcactctacactacacctcctagttaggggtaagctctgtcctaaaggttatatttgttgacatcctctggtaataataggatcttgtgctaaaaatcacaggaaac

SEQ ID NO: 9649 - DNA, 335 bp, Zea mays
  unsure (1)..(335): unsure at all n locations
gacactanagacactcaagctggctctgcgtcgctggagacacctgacctgatgaaagcaagtctatactacttgtgtgtggtcctgcacgccactgctaatggaaacgatgactatgacggatccataaatatatacagaaacagccagagctatcgcacttcaaacaaaacacaaggagagcttacggtgtgaaagaataatcaaggtatgacgggagtacggacgtgtacacattgttgaccaatagaatcctatcaacatcaatcgctttgcggtggaggcgtgttgtgccgctctaacccaagaacaagtgctcgacacgcacacacacc

SEQ ID NO: 9650 - DNA, 471 bp, Zea mays
cgcgatcttaagtcacctgcggcatgcaagcttcgaacaaaagcattgactacattattcgttatgcttcgggaaaaaagaactatcccaagaagacatgctagaagcacgacactacacccaaaaattgaaatatccgaaggggcgttagtgttcaatggtagtgacgaaaaagattttctgtactgtctcccggataacaaagaaatatccgtttgtcgggagataggtaaaagcatcggattcccgaagctggaaggcggcctttcgattttatcaaaggatgaacttgctgacagcctagcatacaatagcataaaggtataaaagttaattttgaatttgaaaatgaggtatttcatttgtcatactcaattctctcctcctcttgcagggctagattcttagtaatgcccttagggcacaaaaaaatattgaagacgaaggctatacgatggctctgaacaacct

SEQ ID NO: 9651 - DNA, 472 bp, Zea mays
  unsure (1)..(472): unsure at all n locations
ntngaacgtactaagcacatgccgggaaaaatggtaaccggtaaacctatgtacctgagtgaagccgggcgcggactntatccctcatgcgacctgagactgggtctcccatgctagctatggtgggtacaagtgcggtcactgcacggcggcagccggggtcagtggagcattgtatgccaaggcggtgaggcctggacgcgaacggngaatcgatggggacggttgtcatgtgtggggtcagagtaccctgacatgccgtgtgtttaggtttaccttgcaaggtttaaaactcgattcgaatcgtctgcttctcgcagctaatgagactgcttgattccttgtactgcatcgagtaagaagtgaaatgtggttacatgagataacttgttgattgaactaattgattggtaccatgtatgcttataaggagcacatctagctcagttaatgatggtagaaattgaaaaga

SEQ ID NO: 9652 - DNA, 370 bp, Zea mays
agcttcaccgcaaatgcagaccccacctgttcttcgtcctagtaacctccaagagttatgcaactcgtgacctccgaaacaaacgtgtgcacccctcgctcctctcacgccgtcgacctccacaattgtcgctcggcaacgccgcaacccacccgcctgtcgccccatccgtccggcgtcccctaccagcacgctaaccacctcctgcctgcaacgcccgcctcgctccagcccccatataacacgccaacgtgacctcttcttggccttcacctccaccccgctaatcaatcatcatccgcgacctcaccaactatgtcgacgcactcgaggtcgtgatcgccaccgtgcacaccccctcacaacttca

SEQ ID NO: 9653 - DNA, 418 bp, Zea mays
ctgtgtggaattggagaggatttgatcacttgcgtgtgtctataatttatattctatagctcttgtcaggtctagaagtgttaatactttcatcactcgaatgttgggtggccctcccccccccatcactccttcattccttctcaccaccccactctttccctccttcttttattaatcacactttctccatataccctcaatctccaactcactccccaatttccctcccttccccctcccacttctaatctctcctctttctcctcttctctcctttcctttaccttatctttctccttctttcttctccccctacctcccctcctcactcacctcttttacctctttcatattccatctcccactcctctcctcacctttcatttctttatatccctctctcccaaaatctctc

SEQ ID NO: 9654 - DNA, 458 bp, Zea mays
  unsure (1)..(458): unsure at all n locations
agcttgtggaggatcttcatccncacttgttgctttcggcgatgccacagccagcccatgcaagtcttagccattaagcatgcatctagaccggcctcttcttttgcaaaatcaactaggtaaagcttgccgtctagtacacccttaaaagctagtgaaccatcacatcttctaaagacagacacatctacatttgtaaacaaacagttatatcccatattgcataattgactaacagatagcaaattatatccaagagactctactaaaaacacattaaagatagagtgctcatttgagattgcaattttacctaacccttttacctttccttgattcccatcaccgaatattattgaatcttgggaatctctgtttttgacgtaggaggtgaacatcttcttctccccgtcatatggttggtgcatccgctgtcaataatccaacttgaacccccg

SEQ ID NO: 9655 - DNA, 450 bp, Zea mays
tctaagggagaacacgtgataggtttaactaacgtgcaattctaataagatagaccttgtgcagcatgtcaagcaggtaaacaggtgggaggagcacatcacagcaagaatgtgatgaccacatcaaggcccctggagctgctacatatggaccttttctgacccgtcgcctatctaagcataagaggaagtaagtatggtttagttattgttgatgacttttcccgcttcacttgggtgttctttttgcaggataagtctaaaacccaagggaccctcaagcgcttcctcatgagagctcataatgagtttgagctcaaggtgaagaagataaggagcgacaacgggtccgagttcaagaaccttcaagtggaggagtttcttgaggaggaagggatcaagcacgagttcttcgctccctacacaccacaacaaaatggtgtggtagag

SEQ ID NO: 9656 - DNA, 439 bp, Zea mays
  unsure (1)..(439): unsure at all n locations
agcttagcanaagaaatttctagaatcattattattgagctcatgcctaagtctggtaaaagattgttcatcaagtggcttggtaaagatatcggctaattgatctttagtattaatgtaagaaatctcgatatcccccttttgttggtgatccctaagaaaatgataccgaatggctatgtgcttagtgcggctatgctcgacgggattgtcggccattttgattgcactctcattatcacatagcaaagggactttggttaatttgtaaccgtagtcccgcagggtttgcctcatccaaagcaattgcgcgcaacaatgtcctgcggcaatgtactcggcttcggcggtggaaagagcgactcgaatttgcttctttgaagcccaagacaccaaggatcttcccaagaactggcaagtccccgatgtgctcttccta

SEQ ID NO: 9657 - DNA, 479 bp, Zea mays
  unsure (1)..(479): unsure at all n locations
ggccaatactngtcaaaacaacaacatctaccagcacagcatctgcttaccataccagtaactnggcctttcgcatgctggggactggatatgattggacctttcaagaaagctcaaggaggatacactcatgtattggtagcaatcgacaaattcactaaatggatagagttcaagcccattgcctctttgacctcagctaaggccgtggaattcatacaagacataatattcagattcgggataccaaacaacatcataactgacctaggatccaacttcacaagttcagagttcttcgacttctgcgagcaaaaaagcattcagatcaagtatgcttctgtagcacacccaagagccaacgggcaagttgagcgagccaacgggatgatactggaggcactcaggaaaaaggtcttctgatagaatgaanagttcgcaggaaaatagataagggaatcgctctatgtcgtctggag

SEQ ID NO: 9658 - DNA, 435 bp, Zea mays
  unsure (1)..(435): unsure at all n locations
agcttcttcaccatgtgatcacggttatcttgatagggttgagtaatgcatttcccttttagttgagtcaagctccttattagcctctcattttcttccttgagcttttgatatgtatcatcttttgttcctgcaaattctagctcaaaggaagatttgcttgtctacggacaacaagcattagcacatgataatgtagtttcaatttgaatacatgtgcaagagtgagagtgttgagattttaagttttctatcacaacctcatgagctacatttaatatgatatgatcatccataagattttcatgagagcttagaagcatatcatatntatcttgaaaagctatattttcaactcttacgctttctacttggtccttaagcaaggtatttctatttactaattgagcgatcaatgtaaagcgtatcttgctc

SEQ ID NO: 9659 - DNA, 478 bp, Zea mays
  unsure (1)..(478): unsure at all n locations
tctanagggagcgncacatttgtgactaaccaatgttcatttttataaagtcagggtttgtagcgcatgtcaagcagggaagcaagttggtgttcatcatccacacaagaacatcatgacgactgacaggccgcttgagctactccacatggacctattcggcccgatcgcttacataagcatcggcgggagtaagtaatgtctagttattgtggatgattattctcgcttcacttgggtgttctttttgcaggataaatcttaaacccaagagaccttataaggattcttgagacaagctcaaaatgagttcggcttaaggatcaaaaagattagaagcgacaacgggacggagttcaagaactcacaaatcaaaggctgtcttgaggaggagggcatcaagcatgagttctcttcttcctactcgccacaacacaatggtgtagtggagaggaagaatagaacttctattggacat

SEQ ID NO: 9660 - DNA, 268 bp, Zea mays
acacctgcacgcaaggctgccatcaacgatcgatagttgtctctgtagctgcaaagcacctacaaatctgcgagataatcaaataggcatcctgctatctgggcacggagatggcatcgatcatgcatcgcatgttcagatgtccggaggccactgccctcaaaaaaacgatcaaaggccacagcgaggccggtcgcaggatggaccagcacacataagccttattgcatacacgatatatcagcatcacatagatacgccagtatgc

SEQ ID NO: 9661 - DNA, 432 bp, Zea mays
  unsure (1)..(432): unsure at all n locations
ctgatcgtngngatcttntaagagggttgagagagaccctattcttatggatacctcaacgtggacgtagttnttttggaacctaacctcagtaagaaaaatcgagtgtctactcatgttctttactttctattgcgatttgttcttctctccccctctaagttctcttgtgataatctcccattctaaatcacttgtgttgctctctaactaattccgcatctataagagcaactagtgcaagagaactctcttccctctccccgcttatattttctctcgctctaacactaaatctcccttaggcgactatcaaaggtttttacacttatgcacgtttgtcgtagccacctgttgtttggttgagagactataaattatgtcctgccacatcatatgtttgtatgtctatcacaaccttaaatatatctt

SEQ ID NO: 9662 - DNA, 405 bp, Zea mays
  unsure (1)..(405): unsure at all n locations
agctntngagcaatgctgtgaaacttatgttatgtttaaagaagctcacgcccctcttcttgaaatagtaagtataggagttacaagtaatattcttgatgatactatttatacacaaacctgtactgctcctactaatactccttgtagaaatacaaatagttctcactaataatatcttactcgcggttataaggcatgctcgctaaagtgcttgcataaacaaaaggtttatctcaacaaagagggggttaggctacacccttaaggttgtcaagacgatcttcgtaactcacaaaactatgtttatgaaagggaatgatcactttgcttaaaatacacataaggtggatatttggagccaatattccagaacaagaacaaaaccacatctctctataaatt

SEQ ID NO: 9663 - DNA, 269 bp, Zea mays
tctaagggagaacacgtgataggtctaactaatgttactttctaataagatagaccttgtgcagcttgtcaagcagagaaacaggtgggaagctctcatcatgccaaaaatgtgatgacaacatcaagacccctggagttacttcatatggacctcttcggacccgtcgcctatctaagcataggaggaagtaagtatggtcttgttatagttgatgaattttcccgcttcacttgggtattctttttgcaggataaatctgaaaccca

SEQ ID NO: 9664 - DNA, 452 bp, Zea mays
  unsure (1)..(452): unsure at all n locations
agctntatcaaatggacgtgaagagcgccttctctcaatggaccaatcaaggaagaggtctatgttgagcaaccacccgactttgaagacagtgaataccctaaccatgtttatagactctctaaggcgctttatgggctcaagcaagctccaagagcatggtatgaatgcctaagagatgttcttatagctaatggcttcaaagtcggaaaggcagatcctacttaatttactaagactcttgcaaaagatttgttcgtatgccaaatttatgttgatgatattatatttgggtctactaacgaatctacatgtgaggaatttagtaggatcatgacacaaaaattcgagatgtcaatgatggcggagttgaagtacttcttacgaattcaagtgaagcaactccaagagggcacattcattagccaaacgaagtatactcaagacattct

SEQ ID NO: 9665 - DNA, 428 bp, Zea mays
  unsure (1)..(428): unsure at all n locations
tagaccttatgcncctttctntgatgggtgcataggatccttatatggtacacacattccagctcacgtatcatgagtcgaggcttgaacacataaatagaaaagggtggcctagctacaatgtattangtatagtggacatggatatgcggctcacttttgtaggtgctgggttgcctggttcttgccatgacatggcagtgctcaagagttgtatgggagaagcgaactatccacacccaccagcaggtatggtggcatgcatgttatgttggcgccattgcatacattgtattcatgcattacgatctagtaaatctttttctgaagttatttgnttgtgtacagggaggtattatctaatggatgttggttactgaattcgcgaagggtactcggcaccatatcggaatcagatacatcactta

SEQ ID NO: 9666 - DNA, 396 bp, Zea mays
agcttcgaaatattacgacttcatcttcctcatgagttgggcaagtcttctctccttcgtcggcccttacaacagacaaatcccggaaatatcttcccctcatgttggcaagaagactttctttaatacttgatttgccgaagaccgcatggcttggtcgccaagggcgatcttcggagtcttcaccaccactatctgcatcataactatcgctatcaccagtgtcttcagataaaccttccaaaatttctttagtgatcttttctgtattggtcttcgacatagatcgaagaaaacccagatgcatctcttcagaaagactcaacttcatttcggcagcaaccttcttctcctcagacatctcttcggaatttttgcttctcgcttccgaagctt

SEQ ID NO: 9667 - DNA, 459 bp, Zea mays
  unsure (1)..(459): unsure at all n locations
agctngcacatcacataagttaattacgaactatattctctttgatttccctagttctatcttctaatgtttgacacgggaaaaggaaataatcgttgtggatactatgtttggaatttattcacacttttatttataaataagttagtggcaaatgatatcaaggtatgtcaacaatgcctacaaaattaatcttgattttacgatagtagagtgtatcagcttcaaatttaatataattttttttattaatgcgtttagcaaatcacagttgatgaagacgaaggaaaaactattccctttgaaaaagagcaaagctatttaagaacaactaatagggcttatgtataacaagatcgtatcgaaaaatagagagttatattatgatagccattaaaagataaagaggttgaatattgaaaatataggaatagagaaatatttagtagttattaaact

SEQ ID NO: 9668 - DNA, 480 bp, Zea mays
  unsure (1)..(480): unsure at all n locations
tgaagccatggtaagtagcataggctaataatatgcgaatggactcaagcctagctatgggtgcataggtttcaccgaaatccanaccttcgacttgggagtatcccttggccacaagtcgagctttgttccttgtcaccacaccatgctcgtcttgcttgttgcggaagacccacttggttcctacaacattttgattaggacgtggaactaaatgccatacctcgttcctagtgaagttgttgagctcctcttgcatcgccatcacccaatccgaatcttgtagtgcttcctctaccctgtgtggctcaatagaggaaacaaaagagtaatgctcacaaaaatgtgcaacacaagatcgagtggttacccccttatgaatgtcgccgaggatggtgtcgacggggtgatctcgttggattgcttggtggactcttgggtgtggcggccttggttcttcatcctccttgtcttgatcat

SEQ ID NO: 9669 - DNA, 454 bp, Zea mays
caagctagttgctacactgaaggtatggaatagttgtttttgtctctctaatacgctaagctagatgccacatcagtaagtaatccaaagaaggcgacatgatacaatattttttccggtcaactctgtgtatttcaatgggttgcaataaacatggtctctgatatgctgcaattttactttggaataactatcttgatggcatgagaaaatgtgtgcctagaaacagcttgcttcagggagctttatattagattagatttcagggctaataaagtatttacctggagctaaaacaaacggtcaccttgtaactctcgttagtctattaacaggtacatgtattgggttcgaggcatgttgatgctcaacatctttgtgtgatgcttaacattttcttaggcaccagctcttttcgagcccttcttatgcttattagtaagttgacacctat

SEQ ID NO: 9670 - DNA, 475 bp, Zea mays
  unsure (1)..(475): unsure at all n locations
taccagagctngattgacggccgtaagaagccacggcgacacggtatataagttatgccacgcggcgcacagccgggaggcggcggtcaccggcgttcttatcggctcaagccgcacggtagagggaaatcaccggggttcaccggaatggagtccagctcaccggcggcgaatattccctctccccgggatgttatccggttaccagcgagtgcgaatctcaacggcggcgatgatcttggcgccaggtcgtcgacggtgaagacagccgcgctggcggtctgatctatttcagttgccatactgtaccatggcgattttcagcttatgacgcctgacagagcaactntagagcaacttttctctcaatcttcatggaacaggtccaaatctctgcgcaatattgagcgctcataaccactacatctttgctatatggtattgcacaaaaagcacgcgatcatgcatgaacttg

SEQ ID NO: 9671 - DNA, 248 bp, Zea mays
tttgtgcacgtggaccatgaaagtgggtcctaaaacaaatactcactaccatattccgtaatggtacgcccatagatacgaaatggcacacattatgatgctatcgtccacagaccatacgcaggtgattatagaggtagcatatacatttaaagaatagaaaaccaaaattaatacttaagttcttatcaccagactttcgagaacaagtcataaatatctagctataatgttgtgcaaagaataca

SEQ ID NO: 9672 - DNA, 356 bp, Zea mays
  unsure (1)..(356): unsure at all n locations
gcctctccggagacgagatcacttgctgctttgtgacttacatgaagncttcttctccgctgccgctgaaaatcaatgccccctttggatatttcaatatttgggcatataactgagcatcttgcttttctttttcagtcaactttttccccgaagcatgtcataaaatataattgaaagcttcggaaaatgcttccggggcggtagtgccagtttcttcatccaaaatattgtctgctgcttctgtttctatggtttccaaagatattaccttggcgggctctgaaagcacagcttcagtctcagcttggtgctctgtagcttcagcaccataagcttctatttgcactttggga

SEQ ID NO: 9673 - DNA, 399 bp, Zea mays
gacaggtcccacatcccctgttcgacgcgaaaaataggagatcacagtgaatatagcaacactaggcatatgcccgtgcgtcgcgacggacggcacctgtacatgcataaatcattatttagcgccactatcaagaatcaacttaacaatcataacaaacgtcacaagctgccatttcgaaccatcaaaatttatgtcaatgacactattaatcgaaataatcaaattctaagttaataatccaggatcaaagtcaagaagatcagattcctattaattgtctagagatgagattcctattgaagggacatcatcatttattggccagagttatacaacattcagagcatgtagagtatgcagatacggacatagcagaacatactctctgcataccaa

SEQ ID NO: 9674 - DNA, 437 bp, Zea mays
  unsure (1)..(437): unsure at all n locations
actcaagcttctaagggagaacacgtgataggtctaactaatgtaactttctaaatttatagaccttgtgcagcttgtcaagcaggtaaacaagggggaagctctcatcatgccaaaatgtgatgacaacatcaagacccctggagttacttcatatggacctcttcggacccgtcgcctatctaagtataggaggaagtaagtatggtcttgttatagttgatgatttttcccgcttcacttgggtattctttntgcaggataaatctgaaacccaagggaccctcaagcgcttcctaaggagagctcaaaatgagtttgagctcaaggtgaagaagataaggagcgacaacgggtccgagttcaagaaccttcaagtggagaaataccttgatgaggaatgaatcaagcacgagttctccgctccttacacacca

SEQ ID NO: 9675 - DNA, 407 bp, Zea mays
agctagcagcataagaaaagagtagtagattctttcttatcactgaagagatgaacatcttcgctgattttcaacataggcaaacacagcttctcagataaagaggaaagtggaataaaaaggcttcccaattagatagctaacttcattaacatttaacacgtaaaccaaggtgcatgggatgcccacactttggtgacagtcattacaaagatccacatccaacatatctcatcatgataaacataaaagcacatgataagcaaactacgttatctaactaagactaactaacagtaaaaccgagactaagactaagactaaaacttctattttaagcatttattatatgacgcaggacccaacactaacgatctatgggtgctaaattatcttaggcctgcagt

SEQ ID NO: 9676 - DNA, 454 bp, Zea mays
  unsure (1)..(454): unsure at all n locations
acactactagaaactcaagcttgccacacatctaacattgagggcgagggttattgccacattaatcactatgagagtgtctaccgtggccatggtcaccatagacactgccatgagaggggttgtcatgatccaagaagttggcaaacgtagtgtgttgcatctgtaatatggccatgtgttgaagttgtacacatctaagtgcacgaacatgtcatcgaggaagagtagctcagccttgatcgttatgtangcaatgaatgggtcgtagtcgatcgggagccctgctcacagatatgcaatgacctccgcaacgcgtaaaagagtgtcgacaacaacgagcttggtggtgagcccagtgatcttatggaagaagtccgcagctaacatatcatgttctttgatgtatgaaggtgcacatatatgcttcatgtgtaccttcatgaatgatgtg

SEQ ID NO: 9677 - DNA, 399 bp, Zea mays
  unsure (1)..(399): unsure at all n locations
agcttcgcgacagagggaacggatcctatgtctattgtttgtggaaaggaggttgatgtaaagcgagccgtctgagtcagccttcaaagggtgtcgagggaaggccctgnacatctccttttataggtacaaggaggtgacccacctgtacatatgggggtgtatctatgcgctaatgtggccggcggagaagtgcttgagccctgtagaagcgtggctggcggtgcagccccaggtcctgctgacgttactttgccttcgtagagagctgaagacagtcgacgtcatgggcgcatgccgggaatcatcattacctgctactggagtaatttgatgtgacaccggtcttgttccttcgtagcctgaggtggttagctagggaaagaaattgttgtattc

SEQ ID NO: 9678 - DNA, 454 bp, Zea mays
  unsure (1)..(454): unsure at all n locations
tctacaacttccttataatcgacaaggactgattctaacatttcattangcaaacaatgcagnttctgaaatctgtacagaatttagatagattcagtcactgaattcgtaaaaatcataactcctaaacaatcagacttatgcctgtcaaattataacaccagcaagataataaagttatctaccacttttctatagcatatatctacagaaaatacaatntagttcatcaaacatacagcacgacaaaaacagcgcgtgcagcccaaaacaacaattattaaaattcagcttctatttacttcaaaaattgccgcgttctagagactcgacttattctaacttatagcaaggcacacttaagcatactcacatgatagatgacttgacggctacgtagtcatgccatcacttcaccccacaatcccaagtaacagaataactctaaccgaac

SEQ ID NO: 9679 - DNA, 453 bp, Zea mays
  unsure (1)..(453): unsure at all n locations
agcttggtgggctcaagaaccatgataactttgttttgatacagtatttactcccacttgctgtgagaaggattttaccagaaatagttagtgctgcacttattcgtgtgagcaattttttcaagcaaatctattcgtcagttattcgtataagcgatatgcataagctagagtcagaaatagctgagactctaagcattcttgagactatatgtttgccatccttttttgatattacgatacacttaatggttcatctccctactcaagtcagaattgctggctctgttcaatttcgtaatatgtactcagtggagaggtaaattttaatatattttagcaataaattaaacttacttctactcaaaggaaggggtaacatatatgccatttctcctttataggttnttaatgagatgtgagggccatgttcgcactaagagtcacccagag

SEQ ID NO: 9680 - DNA, 467 bp, Zea mays
  unsure (1)..(467): unsure at all n locations
ntagctgattcagagtcccttgttggattatccccagatttattttttccatctcttgacacaaagtgttgtcagaggtcttcaccataacacagtgacaggaagtcttacggctcagtgcatctgccaccacattggctntgcctgcgtgataatggatctccagttcatagtccttaataagctcaagccatcgtctttgcctcatatttaattctgactgggtgaagatgtacttcaaacttttatgatctgtatatatgtgacagatatttcccagcagatagtgacgccaaatcttcatggcatgaaccacagcagctagctccagatcatgagttgggtaatgctcctcatgtctgcgcaactgccttgaagcatatgcaattactcggccctcttgcattaatacacagccgagtccactgcctgacgcatcacaatatacatcanaggacttggtgatg

SEQ ID NO: 9681 - DNA, 409 bp, Zea mays
  unsure (1)..(409): unsure at all n locations
agcttgtngagttacatagataccacattagtattattaacacattagcgtgagtttgtatctctatagtatttaaacttgagtgtgtgctcttaccttcctagcttaattatacactagtggacatgcttggaacctaagttgcataacttctttacggtagagataacatcacttagtcaaaactatagttgaacataagatagcttagtttaattgtataggttctggctaagagaaaaatagagaccatactttatacagaaattagattgcttattcaccattgttgcactgacactatngatatattgagagaaggaaagaaggatacctctagaccatcttattttaacggcgctaaagccctgtttgctttagctgtagatttctaaatatctgattttag

SEQ ID NO: 9682 - DNA, 465 bp, Zea mays
taccatataattgttccctcgtcatagcctctgattgatattatgatgaacagagaagctactggaagggttggaaagtgggccgcggagctcaatgaattcaccattgattacatcacagatcttcaattcaatctcaggcgctagcaaacttcatagctgactggacgccaggggctcacaaagaagggacaagcaaagataccgaagcttggacggtgttctgcgatggttcttggggaaccttcagtgcaagagcagtagcggtcctattggcacctacaaaagtcaaaacatgttttgcagtcaaactggatttcagttgcacacataatattgctgagtacgaagcacttctgttggctctctgaactaaagcaatgggaataagaaggccattttaaaactgatctcaagtatgctggtatgtggataaaacacaggcacgcatccaagcttgaaatt

SEQ ID NO: 9683 - DNA, 415 bp, Zea mays
  unsure (1)..(415): unsure at all n locations
agcttaaccccacatacagctagtccactttantcaaacgggacattcgctgagtacgtcgatgtgtactcacccttgcttaaaaacaccaaaccacaggttgtcaccattgcaaccacggctcatgaggagatgaaagcaacatggaagacttccatgagtttcaagactatgacgagttctagattatattagtggcacacccccggttagctgcctatgaaggccttattgcactacgttccattcaacactctgattatgacttaagttaatgactttgtatacatattggacatcgtgatgtaataaagtacttatttccgctattattatgagcaatgtgtgatgatgtccaaatatgtaatcgatgtgtatgtgaatttctgatcctgacacatacatgcgttgcatt

SEQ ID NO: 9684 - DNA, 308 bp, Zea mays
  unsure (1)..(308): unsure at all n locations
tcatcatggtggaaccggtagacaatgtaaggagatagtgttgttcatctccatgaatacaaacggtgatactgccattgtaacatttataatctttgtatgtaattattaagggcatgaatgtaataacgnacaaagcttcacggctgcctataaatagatgaacataactcatgtactgatcacactggattgtgaatgctctccgatcaatcaccttcgaacaagccaaacgtatcatngtcatataaatcctcgaaatgttatattttcatcatgaaagaatatatgaatctataacacatctt

SEQ ID NO: 9685 - DNA, 425 bp, Zea mays
agcttaaacatttatgagggatcgttctacttataacatcgcacgcaaggacatatatgcaatataaacaagtagaacaataagaatggcattcacacaacagttgtgattcggtatggcttgttgtcacatggtgatccccatctccaataatctgtccatcacgatgatctccatctccatgatataggtatgccatcctccaggtgatgagtccttcaagacctatctaacatatgctggtaaacaaattacatatacgctttggatcatcacatgttgacacgcacgtcattacattaaatttggacaatacatgtggctccagccgtattgccctggtcacgacacgcaggtcatgaataatttattaacatgcatcacatacacataatagccataccgatcacatgtcctgcaaaaac

SEQ ID NO: 9686 - DNA, 232 bp, Zea mays
  unsure (1)..(232): unsure at all n locations
gagtaagaagtgagaaagataagaatgctcttgccttgctttcaagagcaacatgaaacacaagtgatcctctcacaagtcctaatgcactagaattgaattanggactttgatcggatcggtggctttgatttgtgtcttggagtgttgcactctgctcttgtattgaatgacgagtagtgaatgcttggattgttggagtggaggtggtgggtggtccttctacccttac

SEQ ID NO: 9687 - DNA, 402 bp, Zea mays
  unsure (1)..(402): unsure at all n locations
agctntaccaaatggacgtgataagtgcctttctcaatggaccaatcaaggaagaggtctatgttgagcaacctcccggctctgaagatagtgagtatcctaaccatgtctataaactctctaaggcgctttatgggctcaagcaagccccaagagcatggtatgaatgccttatagatttccttatcgttaatggcttcaaagtcggaaaggccgatcctactttattcacgaaaactattgaaaatgacttgatcgtatgccaaatctatgttgatgatattatatctgggtctactaacgagtctacatgtgaagaatttatttgatcatgacacaaacgttcgagatgtctatgatgggcaaggagaaatatttcttacgatttcaagattagcaact

SEQ ID NO: 9688 - DNA, 468 bp, Zea mays
  unsure (1)..(468): unsure at all n locations
cttttggcctanattggagggtttccaggatgtggtggctacttggccttcaatntctgatggtccttgccctctagctaccctttctttaaaataagggctgttgcgcgtgggttgtagagttggagtgataaaaaggtggggcatgtgaaaaatcaacttgattttgctaaatagctcttgcatcaacttgaaatagcccaagattgtcaaactttgtcacctttagatgtttggctaaagaatttgttgaagaaacacagtcttgctttggcatccttcttgcacaatatggccagattgaaatcttgcattggatggctaaaagatggggatgccaacacccgtttgttccattattatgctaggtaccgaanaaggaagaatntatacccacttacctagtatcactacttgttggcgtttcgagaaccgggggtccctaagccgacgagtgaatgtgccgcg

SEQ ID NO: 9689 - DNA, 265 bp, Zea mays
atggattggtgcatgcaatactgctctctccgtgatctataattctggatagcatttcttgctgaatagaaacctggattcttgatgggggcaacaataaacaaatgcatccacctacactttattgaacgctagccctccaaaaggcaacaccctcaaccaattattttcataccaagactactcacagatcactcaccaagtggagacgcgctgacagcaaggtttcttccatggacatcacggacacggtacgagatgactt

SEQ ID NO: 9690 - DNA, 451 bp, Zea mays
  unsure (1)..(451): unsure at all n locations
agcttgccacaattatggcaagtgtcgactcgtggcggctttaggttggtggcgactccgccctatgcgcctntgcaggcaccgccctcggcacgtcatcgtgtcctgccctgggtgcctccgcgccccttctgcgacttgccacgtttgcggccactctttgagaaagaggactaccccttcttcctgtcaccctagcaggcctctcactgcttctgagtgagatgtagcttcccgccgatggtgataggccccaagagattgttgtttgtcatcgtcaataactttaaggtgacttatcgcctcttcagtcaacatcgtggagaggtctagcagagactcgatcgagcgagcgatgtgcttgtacttctcggggatgcagcataagagcttctcgacagctctctcctcattgtaggtgtctatgtcgagtagcaccaccttctgcagt

SEQ ID NO: 9691 - DNA, 480 bp, Zea mays
  unsure (1)..(480): unsure at all n locations
ggggagcctgtagacagcttagagtcacttagaccgtcttcattattttatttatatgatcatctaaaacactattnttataatatagactgcattgtttgcagagtgaagtttatatgtanggatggaaatagataaactggtagagatataaatagacaaaaaaaaatgagagagcaagtttccacattcacggtgatagttaagaaaagatggataaaataaggttgagaaattttagctctctaaaattggatatatgttttttaatcgaaacagacatgcttatagtgtgaatgagtcgagaatatcatagtgctatatttttaagattntattttttagaanagatctagaggttngaaatgaactattccaggtggactgctagaggtggatgatgagccaagcacttttttttttgttttctttganattgacgtaaccttatttatcaagatttcctgaattggttgatat

SEQ ID NO: 9692 - DNA, 444 bp, Zea mays
agcttctaaagggagaacacgttataggtttgactaacgttcaattcgaaaaagatagaccttgtgcagcttgtcaagcaggtaaacaagtgggaggagcgcatcacagcaagaatgtgatgaccacatcaagacccctggagctgctgcatatggacctcttcggacccgtcgcctatctgagtataggaggaagtaagtatggtctagttattgttgatgacttttcccgcttcacttgggtgttctttttgcaggataagtctgaaacccaagggaccctcaagcgcttcctcaggagagctcaaaatgagtttgagctcaaggtgaagaagataaggagcgataacgggtccgagttcaagaaccttcaagtggaggagttccttgaagaggaagggatcaagcacgagttctccgctccctacacaccacagcaaaatg

SEQ ID NO: 9693 - DNA, 478 bp, Zea mays
  unsure (1)..(478): unsure at all n locations
aaactaagctntttcattttttgaattatagggtgaattttacattgctgtaatttttgataaccttttcgtccagctggaatactttcatattccatatgtacttttttaaataagaagactgatctctattcctacaggcaaaaaggagaattgaaaattgctaatctggttcacaatgttttttgctctgtttcagctatcgagtttcaaatgaaggaaaattccaaacagttaaccttacacataaggaagttggaaatagatggaggcgaggccaatgcggcagcatcaagaggacgcctctctagctcaaagcaggttacagtcggcagtgtctgaggtgttttcgtgcctgaactaactgcttgccacaaagatcgatctangttctgctttgatctgtctgtagataatttagtcgatgacacagatgagtgcactttccgagctttccaactatatgtgttgaatcata

SEQ ID NO: 9694 - DNA, 446 bp, Zea mays
agctgccttcgccttagtataccacccgcagtctaacggagttgtggaacgcgcaaatggcaaaattttcacagctggcaagatgctcctcaacgagaaaaagggcaagtgggccgatttattacctgaagcggtctgggcactaaacacgactgagtgcagggcgactgggttcacccctttccaccttctatatggatcggaggccatgaccccgcaagaaataaaacatgggtccccgcggacagtctcgtcagctgtccccgacgtggacgaacccactttgaaggacctcatcgatggagaccgcgtcttcgccctacaggctctaaataaataccaagcccacacaaaagcatggcgtgaccatgcagtcatcccgagggaattcagcgaaggagaccttgtactcgtccggacagctcggacagagtctagggcaagct

SEQ ID NO: 9695 - DNA, 393 bp, Zea mays
tgatacagggacggataatattgaggcacccattcactgacatagttatacaaatttagataatacaagaaatttgtgtattggttatgaaatgaacaggctaagagtactaaaaagattgatgaacacaatccatttcttaacaacaggaaaaatattttaacaagtttatggtggcaatacaatatattggccaaagtcaaattactaaggaaaactttgtttcaccataattgacagttgtcatggcacaaaatggagaacgaggttccagtgcactcaaacattcctgattctttgcattagtttaggcagtcatttccagtgttctgcattatggtaccttcaaacattcctgattctctgcttatgaataccttcaaactgaacccc

SEQ ID NO: 9696 - DNA, 405 bp, Zea mays
agcctgcaacataagaaaagagtagagaatctctttacaatactgaacaaatgaacatcttcgctgatttccaacacagaccaacacaacttcttagataaagaggaaagtggaataaagaggcttcacaactagatagctaacttcattaacatttaacaggtaaaccaaggtgcaggggatgcccacactctggtgacagtcattacaaagatccaaatctgacatagttcatcatgacaaacataaaagcacaggataagcaaactaccctgtctatctaagactaaccaaaagtaagactgagactaagactaagactaaggctaaaactcctatattaagcatttattacaggacccaacactgacgatctatgggtctaaatttatcttggtcctgcag

SEQ ID NO: 9697 - DNA, 488 bp, Zea mays
  unsure (1)..(488): unsure at all n locations
acatcggaccaagaaactcaagcttaggacagtngactaatgctgaagaaacattaattggaatgagtttttattagttcggggggccgtacacatagacatgtaaaaagatggattctagtttccagcaatgggtctaatgtccttcgtgtatatgtaatattttcttttaaatcgcctaacggcctatgcaaacgcaattgacattgttgaaaagtatcttaacaagggccgttacattctgatgagacggaccctacccaacatgggcttttctaataacatgggctctggggatcttatcatcgcctgagatatatagcctaagcgcacgtgcgacccctgtttttatcattcattttcagagacatttttttatttttatgcgctgtatatgggctgcttggagacatattttgctttaactttctgtaaactgagtttcgcgattttgactgaaatgacttctaccattactaaaaaatcta

SEQ ID NO: 9698 - DNA, 392 bp, Zea mays
  unsure (1)..(392): unsure at all n locations
agcttattttgagtgcatcctcttttatctttatntgatganaacctaagtagcaatccagtaggctcatgagctccgcaagggctgccacatctatgagagagtctattcttggcaaggggaattcatcctttgggcactccttgttgatatctgtgaaatcaatacaaattctccattttccattggccttatttaccatcacagtgttggctaggtgttggtccttgttctcgaatgctaaataccaagaacaaagcaacacaattgttaacgattagagaccttcgtccttcgaagcatcatctcctttaggatataatgatcttaatacgaaggtcatgaaggacataccttcattatttaagtcagcacgaatgtcaaccgagacc

SEQ ID NO: 9699 - DNA, 424 bp, Zea mays
  unsure (1)..(424): unsure at all n locations
tntcaatcgagcggggcattggcttgcaaagttaaagcatctctccttaagagctctcaacgcttcactgagcttcgtgttcttctcagcatcaaccttaagtgtcattttcaaagcttcagattcttggttgaatcggccggaggtttcttctaaaagtgtctgagcatctgccagctctttgcccaatttcttattttgaacttgcgcttcggcaagggatccttcggctgagcacagcagctcatttttttcttttaaagaatcctcaagttctttgattgtatcctctaaaccctntacaatagcttcgntcttcctatcttcatcatcttggtgcatcttcagaagcttgcttgtaacaaactctggnaaaaacaaacttaaaattagaatacttaagctaatacgaacatatcactga

SEQ ID NO: 9700 - DNA, 466 bp, Zea mays
  unsure (1)..(466): unsure at all n locations
ntnttgaactatcaggtttaggtaacattttccaaaaatgttattaaaatttcagtgggtaaatattgacattggtgggttctcctaaaaatttgaggtggagattaattcagatactacttgtgcaaaattaacaaaaacaagtgtaaaagggcattttacactatagctatgatttaagtgaggtctctgtaccaaattttatttttgtccagattaattggtgatattaggtctctgtgttaaaaatcacagaaaagacctactggatatttagttgtgatttttttaaagtttaatgccaaaaaggtacttatagctaacttgttatttgaaaaatatcaaacaacagaactcatatttttcctatattcataataacaaaatattagttatcccaaggtttgnggtgttntctcctcacgatttattttctaagattntcctaagttttcattgttgcata

SEQ ID NO: 9701 - DNA, 400 bp, Zea mays
agcttcacaattgtatggtgtaactatccttgtcctcaatttagaagctcccagagcgcgggctcttaatttgaccgcacatcgctcgcggccggaagtgaataataacctgtgtgcggtgaattcgtggcaaatggcgcggcgagctccccgtcgacgatgggatggcttacaggagtcacgacggcacggtgtaaagacagagccacgcggtggacgcctgcaaaggctgaaccgcggtgaaatccttattcgaagggtcggagagcaacggaaatggattacggcgggcctaagtggcatccagctcaccggcggcaaagaattttaccgagcagagcttatgcgatggccacgacgcacgaaatacggcgagcggtaatctacagccgcggtcacc

SEQ ID NO: 9702 - DNA, 365 bp, Zea mays
tactcctccctgggaagggccattcatatcgcaagattttaagcccggaacatataagctggccaacgatcaaggcgaggtctacagcaacgcttggaacatacaacagctacgtcgcttctacccttaagatgtttcaagtctttcatataccatgttctctgtacatacacaaatagagtctaaccgctaaggaaggatcagccttgcctcggcaaagcccgatcctccctcgagggctagaaaggggaaccccctctacgtcaaaaattttcctcgaaaaaagtctttctgccagaacgtctttcgcgcttttcgactgcttcgatagcgggatcctgaaaatgaccagagtacgcgtaagc

SEQ ID NO: 9703 - DNA, 432 bp, Zea mays
catgcaagctccttctctagatgtgtcacttatgatttgtgcacttctactagagcagattatgcgtattctaaatcggttatgcatctttcttcaactatttttccttatcaagctcaaaatctttttgatctgcttcagagaatttagccaaattagcctcatttgtctttagcctctcgactaaagaaagaagaatgttttctttctcaagggcctcattctgaagcgttataacttatgagtgcagattcctcaaggctatttgagtgctgtcatcttcttattctttctgcgccttcatagctgtgctcaaaataagttcctaatggccacaaaaagaaaaacaagttaatactttacctacaataattattaggggtgcaaagagaaaagtacacacaaacctttatactattgtatgctaagcaa

SEQ ID NO: 9704 - DNA, 470 bp, Zea mays
  unsure (1)..(470): unsure at all n locations
gacctatgaaactcagcttataaccccaagtgggacatactgcntaccttggatgcctatgtgctcaagaatgttggaggaagataagcagaatgactgctaaagttctccactcccaaattggcaggaatatactgacatatgttgatgatatcatagtcaaaagcatgaagcaagaaaatcacattgctgatttgcaagaaacatttgctaatttcagaagcgcttgtctcaagttgaatctagaaaaatgtgtcttctgagtgaacaaaggaaaanttcttggttgtctattatcaacaaaagacatcgaagctaacccaagcaagatagaagccatacttctgatggagccaccaaagtcactataaggtgcctatagaatgacaagaatgcttgcatccttgataaattaattcaagtctaaccttatacgattaacagtgtaatactgaagtttctgaagtcca

SEQ ID NO: 9705 - DNA, 435 bp, Zea mays
agcttggcttgaccacacgtccactgtcactttcataacacattcagtggatcaatgatccaggcaaggttaaggtaacacacatggtacgagtgcatttctccattggtatgtattctgattatgcggattgcgatgtagtacctatggaagcttgttctcttttgttgggtagaccttgggaatatgatactgatgcatgtcaccatggtaggagtaatacatacacttttaggcataaagataaaaacattactttgctacctttgactcttactgaaattgtacaagctgataaagatagagctgcaagtacccataaagaaccaactaatgagactgaaattcagcaacaaattaaattgaaagctcctgtcatgcttgctactaaatctgatcttcttgaaactcatgctactgatgcttagtgctatg

SEQ ID NO: 9706 - DNA, 476 bp, Zea mays
  unsure (1)..(476): unsure at all n locations
actcagcttacatgtctcgtatgattcanaatcaaacgaagttaatagcccatcagaatgaagcttcttcatgcgattctcacttatatgacccaaacgacagtgccacatgtaggtaggacttaaatcattaggccgaggccttttagcactaatattacagataggtgcatcatcaagattaaaaatgaataacccattcataatggatgcaaaagccacaaacatgtcattcttagagatcacacaaccattgttttcactcgcaaatgaataaccatccttcatcaaacatgaaggagacataatgtttcgactcatactaggaactagataacaattatttaactccaaaataaatcctgatgggaggtggagttgcattgtcccgacggtcaacgcagcaactcttgcattattgcctacccggaaatcaacttctcctctnttcacgcttcgacttcttatcattccct

SEQ ID NO: 9707 - DNA, 360 bp, Zea mays
  unsure (1)..(360): unsure at all n locations
agcttaataaatgacgaagaggaattcatatgcaagatatgaaaaataacataaacactttaaacattactatcaacttatttttatttgtattactgtatcaaccataacaaattatgaatgtaccttcggctccaaggaaagtaagggtacaagcgtgatgcaaaagcgaatgcccagtcagtcggaacaatacggtaatactgtccaccaatttataggcacgggtcgcaatccatgcaaaattacatccacgccctttgcctttgacaatanccttatactaatctatctgggcctagatagtctttctctcattaagccagttctctctatactgtccttatgccgaaactccct

SEQ ID NO: 9708 - DNA, 375 bp, Zea mays
  unsure (1)..(375): unsure at all n locations
taaacttgggattggcttcacaagcttngaanaatctggtatgaatcggcggtaatatccagccagtccaatgaaacttcggacctgatgaaccgtggtcgggggtttccactccaaaatgtccttgactttgctaggatctaccgcaatccccctggcagacagtacatgttccagaaactgaattttctccagccaaaacgtgcattngctaaacatggcatataactgatgttctctcaagcgcgttaacacgatccgtaaatgttgggcgtgctcctcttcattcttggaatatatcaaaatatcatcaatgaagaccactacanacttgtccaactcgcgcatgaataccgagttcaacaaatacgtgaa

SEQ ID NO: 9709 - DNA, 488 bp, Zea mays
  unsure (1)..(488): unsure at all n locations
taagcacctgcggctgcagctttagagaatgtaacatccacgtcacactttattattcataatctccaacagattagtactcatcagataacacacatacggcatgctgatgttgcatcttacaactcatcagacaggaagacactccacatggttcttgtgctcaataaaacacaacagcactgagataggaaatataatactaaaataggagtgttcatgtagcatcttaccacttgtacaaggaggcatttcatgtatggtttgtgtgctccacctaaccgctcaattgtaatcctgagatagtgctcaacccagtgatccacgttgcctgtacaatttnganaaacaacttcaatgagcttgcgagcacgttcaatatcagaatcttccatgttttctgccatcataatctacaagcatcggtgcttctcagcataagtgagaccactagtatcacccacaacatcataagctaatggaagtat

SEQ ID NO: 9710 - DNA, 256 bp, Zea mays
  unsure (1)..(256): unsure at all n locations
caaaccaagtcataggtatattaaacaggaattggagtctttggcgaagacaaaagcttccactccgtaactcatgcttcgccatcactccgagcaactctctcttctatggtggagaaatgagcatcacggaaaaggatttcatccttgtgggagagagtataaagcttatactcacaaggacctcgtcttntggataatctcaactcatctacttatgaccaaaggggaggaacttacttcgagggctctaatg

SEQ ID NO: 9711 - DNA, 374 bp, Zea mays
  unsure (1)..(374): unsure at all n locations
atctctgagtcacctgcggcatgcaagcttncactatgggtattcccattgcccctcgctcgtctgacgtgcctctccatcctcctcccccggagatcaatgagtggcaccggcaggcctactgggtgccatttatgtcagcagacgacgaagaagaagaagaagaagcctacgttgatgatcgcaagcagtttgtcctgcctccctaccatggngatccgggtcaatcattctctcaccctccgcctccctacttcggtcagggacccactctcggtaaccctaggccatcaggctctggtaccatcaccaccctccacctccttctcatcatcngtgaaagggaattaggcttacacctatctcctaattga

SEQ ID NO: 9712 - DNA, 502 bp, Zea mays
  unsure (1)..(502): unsure at all n locations
cattctgaatactgttctaaataattagtttcccgaaacgaacgatacttagcttacagagacctaaatccagaacaaatatntgcaatggattgtacaacagacagatatattatgttgtgtatacatgttcatgcagtgtttacatggcatcagcttggtcaccaacgggcatgtcatcaacatagtttgcttgatgctggttaccagcatacaagttccttcgcccacgaatgagctcatctgttcccaccaaaagagagggacgtcaaaagcttcgcaggaatcgacaagattctcatatgtaaaatgttgaactcacggcagtaacaggacctgtactatatgggcataaaataagagaatgagggcacatgtggcaactatcatgcgcatctcattaaggttgactaannatacgaaggcaaatgtcatatcatgtgcataaacctatgaataagggatcaaatagaatagtatntaccactttcaccatctgatg

SEQ ID NO: 9713 - DNA, 255 bp, Zea mays
  unsure (1)..(255): unsure at all n locations
cagctgcaccctgttcgtgtgtacagaatttgtagttccgatatgcaaattgtacaaccaaaattntcatgtagcccatcctttctggccttagtttggtagtgtagctcgtgtactcggcagaagccttcngcaaatggcttcaccccctggcttctgagagcccaaatataaacactaagcctaacaataggcgtaggagctagttgatgaaaatagatccccaaactttttagcacatcagcaatcattcta

SEQ ID NO: 9714 - DNA, 506 bp, Zea mays
  unsure (1)..(506): unsure at all n locations
tctaagtcacctgcggcatgcaagcttctagagggagaacacgtgatacggttatctatcttgcaattcgaaaaagatagaccttgtgcagcgtgtcaagcacgtaaacaggtgggaggagcacatcacagcaagaatgtgatgaccacatcaagacccctggaactgcttcatatggacctcttcggacccgtcgcctatctaagtatatgaggaagtaagtatggtctcgctatagctgatgattattcccgctacacttggngtattcttttgaggataaatctganacccagggaccctcaagcgcttcatcangagagctcanaatgagtttgagctcaaggtgaagaagataaggagtgacaacgggtccgagttcaagaaccttcatgtggaagagttccttgaggaggaagggattcagtctgctccctacacaccacaacaaaatggtgtggtagagaggaagaacatgacgctcatcgatattgcgaggactatgc

SEQ ID NO: 9715 - DNA, 489 bp, Zea mays
  unsure (1)..(489): unsure at all n locations
caatctcaagacactgttngaatggagctggacagaaacaacaaagcatctctggagaagtagccattttcttcttgcaaacaaggaaactcttggtatctccctacaaacatcgntacaggctgacatatgcgctccaaaagaaaaccataacgttgagtcgacatgtgtattaaaacctacctggtagccttgccagcgaatcttctctaatcaggaaaataagggggtatgccagagactctaaatcatcccttctactaccagtgcgccccacatgagcatggacactcgcatatctaattgtacccctgcacaaagaaacaagaggatagggtacagaacgccatttattaaaagaaactgctgctatgagaatatgaccaacctaacgatatcaggccgttgatcataatcaacatgatgaccattattctctttccacttggatgctgtacagttngngtgccacatattaacatcaaccac

SEQ ID NO: 9716 - DNA, 415 bp, Zea mays
  unsure (1)..(415): unsure at all n locations
tgcagctaagcaaattatttggttagtcacatattgatctgctcatgaggatgacttatgaagaagataccaatgcatatgaatatcanaaccttcaagtggcatcaatatctacagagaaatgtccaggccaatattattccttcaattggtattcactaagtggtttctagatcaatcatacaattgatatcctttgagtggtacaagacttcaagtgatccacaaccttaagtgatcatcaactcaagagatcaactctcttctaanataagttcatgcaagtgatgtcaaggatttttatcatccatatggtgtccatcanaaacttattgagtactttcaagttgatataatattcacaagtacattttcccagagccttagaacaaccctttntatggtaattaatgac

SEQ ID NO: 9717 - DNA, 294 bp, Zea mays
cccgagatcgacctcaccggacttctgtcttccgccgccgcgcgtggaccgagctatccagtgagtctccgcccaattccttgcgctcatatcttctctggcatcccgtggacctctctgacccatccaattgaactatctcgccgcgaccaggccggactcctcgccgccgacgagcatccccgcctgcgcgcgtggaccgaccgactccggccatctccgacgtcgacccgcacaccattgtgatccccgaaacctccccttcatcctcgaccacttcagcggagcaatctc

SEQ ID NO: 9718 - DNA, 315 bp, Zea mays
  unsure (1)..(315): unsure at all n locations
ttctaatcttattagtatngttgctggggcagatatatatatctatacccgcatataatattaataagccaagttgtcatttcactttnttggtccatcttctccaaattactcacacagtggaggggttctcccaatctcgtttttttacttgatcgagactaatgacctgtatacatactaagttagaacaactcgtgtctaacgatgatgaatacagtgtcagtttccaatatatattaggatatgctcgtcttatgccgtatgtgactagaactcatgacccgtactaacaactcgctagcgattatatga

SEQ ID NO: 9719 - DNA, 443 bp, Zea mays
  unsure (1)..(443): unsure at all n locations
agagtgcattcatatgaattatgaaactccagttatggttggtntactgcggctgttcctggtttcctgacaaaaataagcgggtctattcactggtgggtttcatcgtgtaaatggccgaattggctcttccaactatggagacttttgtagagggataaaagttcttactgccagcagaagttcataatttttggttgggtagtttgggagatatcanatnnttaagtaactatgctgctgtgtgaaacagattcagtcagttatattgtcagatgttntagaacttatagatggcagactntaattatccattaaataccgaagttgtatagtactttgtgtagatcctcctagagtatntgttttatgtnggggacgttgtctcaagtgctaagagttaagaacaaggcaacataaaaangtgtaagtgttaaaatcct

SEQ ID NO: 9720 - DNA, 417 bp, Zea mays
  unsure (1)..(417): unsure at all n locations
catgttagtcttagcaattaagcaagtgtcgagttcagctctatcaaaatataccaagtatagctgaccctctaacactcccttaaatgctattgaatcatcacttcttctaaagacagtgacacctatatcagtgaatagacagttgtagcccatttgacataatngagatacagaaagcaaattgtaatctaaagaatctacaagaaaaacattggnaatggaatggtcaggagatatagtcaatttacccaaacctttgaccaaaccttgatttccatccccgaatgtgatagactcgtggggatctnttgttttctcgtaggaggagaacatnnctttctcccctgcatatgggttgtgccccgctgcgagtatcaacttgacccccgatgctaacctacaaacaagttagtt

SEQ ID NO: 9721 - DNA, 450 bp, Zea mays
  unsure (1)..(450): unsure at all n locations
catgcaagctctggaactatgctcgtatccgatccacctaagttatatatatattctcatgacagatgccctantccgatcgaccagagaccagtacccaacataagactctcctagttatttcgccaagggcgtaccatactancctcatggaagcactgtgatcctgtgtggacactccatgttccaatataaatcaatatgaatcttngtattaattaacgaaancattccacactaacagttgataacaataatcattaatctgtgtaacaataatttcataaacatgagtgtctgcataacagtaaagttatatcaatagcataactactaaagaagagtataatacccatggttgatcaacgaataatgttggaaagggtacgtgtatntgaatacgtaacccatcacattatacatattatgactgtaacttagtatcatgtg

SEQ ID NO: 9722 - DNA, 445 bp, Zea mays
  unsure (1)..(445): unsure at all n locations
tatgaaaacttcctctccttcagttgttctagtattctatccttagtgggatgtaccatagtataggttaaattccttgcaatgtaaaatgttcaatagtgcatataactntgacatcaactatatgtgtgtactaatttaaaggaatttagtctatccttttgggtttcaataatgatgaattatttgccatccacatataaggatcatcatatgtgaaaccctcccttgtgtttntaatgctctctntttctaagtgtttcaacaaggtccttctcaagtgcttcaagatggattcaaaatctcaaatataagagtcttggttctttcaatcattgagtttcaattgacctcatatcaagtatgatcgaatcaagaaaatatgaatgaagttcaagatcgcttggttggatgaaatcatagagagaaaagaaatcacagtgaa

SEQ ID NO: 9723 - DNA, 312 bp, Zea mays
  unsure (1)..(312): unsure at all n locations
gaatattgttctcatgcctttgtctggtaaaagaatgtcatcaagtggcttggtaaagatatcggctaattgatctttagtattaatgtaagagatctcgatatccccttcttgttggtgatccctaagaaaatgataccgaatggctatgtgcttagtgcggctatgctcgacgggattggcggccatcttaattgcactctcattatcacataacanaagggacgttggttaatttgtaaccgtagtcccgcaggggttgcctcatccaagcaattgcgcgcaacaatgtcctgcggcaatgtactctgc

SEQ ID NO: 9724 - DNA, 410 bp, Zea mays
  unsure (1)..(410): unsure at all n locations
catcatcatcatctcttttatcatctgaatcccattcaactaggtaggctgtgtcatctctcttcttgttgtagaataacttcttcttatcatctccatctatgccatttttcttcttgttatggaaattcatggcgatgtgaccgggttccccacactcaaaacactttctatcatngaaggcatttcttcttgatgtttggcctcttctacgttgagccctcttccttttcatgaatatgttgaatttctttacaaatagagccatatctccatcactctcactttcatattcttcatcatcactatcttcttgacggaacctcccaagtaattaggcccacctacagttgtccttgtctaacagacatcagacaccctgtagatgttcctaagccacttgacaagtt

SEQ ID NO: 9725 - DNA, 410 bp, Zea mays
  unsure (1)..(410): unsure at all n locations
tagagagcaaaataaaagatcaagcaactgctcttgacaagaaagatatcgaactccagacaatggagggtttactggcagaagctgaagccaaaattgcaaatttgaataaggagcttgtctcaaagtcagatagcttcaaacaagaaaagcagaaatttgatatgaagtttgatgctgangtcgaacaaagttcaatatcaaaaatcatgtaagacttcaaaatatatctgagttcacaaccgatgctgcacggtaaagcagcttaacttgttggaccactctgaaattaattcttgattgaaactgcaggacctcaacacttggggcaagtgatctctgatgaatataccgcacggatctatcctgtactctcggccactgtgctcataactgtgcccatgaaatgt

SEQ ID NO: 9726 - DNA, 422 bp, Zea mays
  unsure (1)..(422): unsure at all n locations
agctntagctccatctatgttatggatggcttttgtgtcagtccagtgtccttcgacccttctggcagcttcctgacttccatgaatagcaatgggtccttggtccgaaggtatcttcatgcaaagatatgctggatgaagaattgcttcgaaggcattgagagtaccacgaccaatgattgcattgtaagggtattccatgtcaacaatatcgaatacaacttgtttagttcttgtgttgttgataaatccgaagggtactggcattgtgatttttcgagtgctacaatctgccttcctccgaagccacacaggggatgtgtggcatcatggatcttgtcttcnggctcttgcatctgtctgaaggacttagcaaatatgatatcagctgcacttgctgtatcaaccaaacattatggacc

SEQ ID NO: 9727 - DNA, 428 bp, Zea mays
  unsure (1)..(428): unsure at all n locations
cttcatcctcacatgtgctattcttctatgccacaaccagcccatgctagtcttagcaattaagcatgcanttagaccggcctcttcttttgaaaatcaactaagtaaagcttgtcgtctaatacacccttaaaagctagtgaaccatcacttcttctaaagacagacacatctatgtttgtgaataaacagttatatcccatattgcataatngactaacagatagtaaatattaccccagagactcatctaanaacatattagaaatagagtgctcatttgagattgcaattttcctaacccatttaccttgccttggttcacatcaccgaatataattgaatcttgngaatccttattcttgacgtaggaggtgaacatcttcttctccctcgtcatatggtttgtgcatacgctgtcgataatc

SEQ ID NO: 9728 - DNA, 466 bp, Zea mays
  unsure (1)..(466): unsure at all n locations
atgtgtgagnatttggatgtattctctgaagaattacccagattacctcctacaagggacgtagagtttgtgattgacttggaaccttgtacggctcctatttctagaagatagtaccgtatgcctcccaatgaattggcagaactatagacacaattacaagacttgttggagaagggagttatcatatcgagttcatcgccatggcgatgtccacccatctttgtcaagaagaaagatcanaccctacgaatgtgcgtggactattgaccncctaantgaagtaccattataaacaagtatcccttcccaggatcgatctttttattgatcagcttactggagccccgagtatttctaagatngacctcagatcgggctatcattagattataattcgacccgaggatatacctaagacgactttcacaactcaatatggatattcgagtatctggtatgtcct

SEQ ID NO: 9729 - DNA, 373 bp, Zea mays
  unsure (1)..(373): unsure at all n locations
agcttgcctggtgacgtacgtgtcatgatgagtgcagtacatgcngcagcatgggcgtactgcctaccaacgaaacggacaggcacgccgtctgctggatggcctggccgctgcccgtcagtagagtggacagggcacattaaatgctgaggcggcacatcgcctgtcagcggngtaacaggcggcgcgtcttctctgcaataaatgcagagaccgcacggcctagaagccttacgtcanggctcaccagctggcttacgtcacgggcagtaggccgcgtggcagcatcgggtctctgcctgagcggtgagcaggagcttacacggcatggtccggacacttgtcggtttcggaccctcgcctaaccttgatc

SEQ ID NO: 9730 - DNA, 497 bp, Zea mays
  unsure (1)..(497): unsure at all n locations
agcttaagagacttttttcacggatcaagctcgttacttaaaacgatctagcaccgcgaaaggggctactggtgggtctatgcttcgtcgccgaaggtcttgtatgaagaagcggctntctgctgaagctgtttgtatgagatggccgaaggttcctcttcatgaagcttcggtattacaaaccgacttaaagatagaatgaccttttagtccataaaggtctgagtcaatggtgtaaaccttttatgaaggggcataatgtaattcctcacaggctgtgtcctgtgcctataaatagtgaacagtattcctttactgttcacgcattcttgtaattgcaattgcatcattcgggaaccaatctttgccaaggcagaggtataactgtactcaatgattcaatatattaagtaaatataatatgaattcgttatgaatcatntacctttgataccctctattntatgttatcttatacaatctattanaattcaatt

SEQ ID NO: 9731 - DNA, 385 bp, Zea mays
  unsure (1)..(385): unsure at all n locations
gcttgcacgagctngaaccgaggagccgcgccaccgtaatatcgaaatcgtgctcgctggagttggaaccccgtcggagcacgtggaccgggtaagcctctgcaccatttcccaattcgttgcgcgcatggcctctacatcaccccgtgaagctcctcgtgcaccttaattgaactataccgtcgtggtttggccggaacaggagccgccaacgacccccgccgcctgtgctcgtggccagggtagctncgaccaccttcgaagccgacccgcacaccgacgtgaccgtcgtgacctccccgacttcactgaccaccccaccggagctctactgtcgccggtaagcctcgccgccgtaatcaatgccgcgggtactgtttaagtc

SEQ ID NO: 9732 - DNA, 328 bp, Zea mays
  unsure (1)..(328): unsure at all n locations
accatacatcctctggatcagatagaggtattagggccctatatttcatcatatgtgtcagttggagcgataccagtgagtattaatatgttatgtgtgaaatcgcgctcacccacaggggtcaatcatggagggatacactacataagaagtgatagagagttgtttacattacatctgtgaccgaacaatgataggtgtgcctgtgtcctaacatgagagtaaactatattggagagggagaatgggcacgacaacctttcgctttgaggattacaagctagtacattgtgctcatggnagtgtactacaacatctcgtgatagcc

SEQ ID NO: 9733 - DNA, 415 bp, Zea mays
  unsure (1)..(415): unsure at all n locations
aagaggtctatgttgagcaacctctcggctttgaagatagtgagtatcctaaccatgtttataaactctctaaggcgctttatgggctcaagcaagccccaagagcatggtatgaatgccttagagatttccttatcactaatggattcaaagtcggaaaggccgatcctacgctctttaccanaacacttgaaaatgatttgtttgtattgccaaattacgttgatgatattatatttgggtctactaatgaatctacatgtgaagagtttagtaggatcatgacacacaaattcgagatgtcaatgatggnggagttgaagtacttcttangatttcaagtgaagcaactccaagagggcaccttcattagccaaatgaagtatactcaagacattctaaacaagtttgggat

SEQ ID NO: 9734 - DNA, 436 bp, Zea mays
  unsure (1)..(436): unsure at all n locations
ctaagcgtanggacgacatgttcatatttgaaacagtgtgacaatgcctttcaatggatagtagcaaggaatggtgaaccanaagaatgtataggaattccacaatatttgtgaacattagtctgatagaatactgaaacaaatattgtagtatacttttttcatgaaaatcgatgcacaaattcagttgaccctaattagcangtgaatcaaaaatatgtctagtgtactcttattcatacaaaataagagaacatataacttacattgtcaccatgaaaatcatgcatatncatcacatcanatctatcatggacccaggcttgctcgtctttatgactccacaaccttctagtgttcaccattcttctacatgagcaatactganacatttagactgatgttttggtctagttaatataaagaacatcagatc

SEQ ID NO: 9735 - DNA, 454 bp, Zea mays
  unsure (1)..(454): unsure at all n locations
ctctctcaattaaggactttgccacccagattngtctacgtctactcttgtttggtggacctaagaatgtaactctaacctttccattcgcaacctttcttagaacataatgagcattgaaagcacatggtcttgagtgcttaagcaagggagttggtggtttggctttacagttgtgggcacaatgaccttcattttcacactcaaagcaattgataggcttgtgagtctgctatggcttgtattgagtggtagctctctattgcacaacagcattgtatccaataccactcattgtgttttcataactgtgttcataagcagctcattttggaggtattgacccttgttgaacttttgccacttgttgaagatgtcattctacttttagtccttgactcattttaagccttgatatccctgccactcatgtgaatcatgnctcatacacctt

SEQ ID NO: 9736 - DNA, 426 bp, Zea mays
  unsure (1)..(426): unsure at all n locations
aaatctggtatgaatctgcgataatacctatctagtccaagaaaactccggacttggtgaacagttgttgggggtttccactccagaatatcnttgaccttgctaggatctaccgcaattcctttagccgataacacgtgccccanaaatttaatttcttccagccagaatgcgcacttgctgaacttggcatatagttggtgttccctgaggcgcgtcaatacaatccgtaaatgctgagcatggtcttcttcattcttggaatatatcaagatatcgtcgatgaagactaccacgaacttatccaactcgggcatgaacaccgagttcatcaaataagtgaaatgggtaggagcatttgtgagcccganagacattaccaggtattcaaccaatccatatcgcgtagtaaacgcggtcttcggt

SEQ ID NO: 9737 - DNA, 502 bp, Zea mays
  unsure (1)..(502): unsure at all n locations
agcttctagagggagagcacattntaggactatccaatgttcantttgagaaagacaggatntgtagcacatgtcaagcagggaagcaagttggagtccatcatccacacaagaacataatgacaactgactggccgctcgagttactccacatggatctattcagcccgatcgcttacataagcatcggcgggagtaagtactgtctatctattgtggatgattattctcgcttcacttgggtggttcttttgcaagaaaaatcacaaacccaagagaaccttaaaggattcttaagactggctcanaatgagttcggattgagaatcanaaagattagaagcgataatgggatggagtttaagaactctcanatagaatgatntcttgaggagggcatcaagcatgagttttcttctctctacacacctcaacanaatggtgtagtggagagggaaaatagaactctactagacatggcangaaccatgcttgatgagta

SEQ ID NO: 9738 - DNA, 347 bp, Zea mays
  unsure (1)..(347): unsure at all n locations
gcttgcacgggcggagggcagtctcgcccgttctcttgtctatgagctggaggcgagggtcgatgccctgtgcagccgcgtggacaaaaccgacgcctctgtgcgtgcggaggttgagcggacacatgtgcagttcgtggacgtgtaccatgagctgggtgcgcgaaccgctgtcttctaggcgcccggtcaagaagcgggccttcgcttccttgaatggatgcaagaggagctgtgggtgctctcacgattccacgggactcatgtnctttgcctccctcgtcacctgcgagggggccgtgaatgctttgtcccgtgaggggtgtagaaatatcgaggtctttgac

SEQ ID NO: 9739 - DNA, 429 bp, Zea mays
  unsure (1)..(429): unsure at all n locations
tatgatgaaccatcatacgtagagcacaaacaatactggaaacagtaaatgggagctaccattgggctgctcattgccatcattctgggcaggcagagcagcacggttctcggcccgagcaggagcctgtggtggatgagcagctgcaccttccgcccgctgaagccatctaacanaagggtatatagcttcgggttgatatctgcaggatacagaagcatgaggttatctagcagcaccatatataggctatacaagtaatgaagaataaactgtgaaatagcattaagtattttggagacgatntgagcaaagtacttacaagtaaatcaatgatgcanacagtatgagaagaaatagcctttgttttgagccttccttggctaagagagacaccactgctagctagttgatgatcanggtcaagtc

SEQ ID NO: 9740 - DNA, 428 bp, Zea mays
  unsure (1)..(428): unsure at all n locations
agcttctcatgtggggactcaatggggaattctgaatttcataattctgaatntcagaccttgaccaaagatcaagcgtgttcaccttgatccctaactcanatcctaatggtcccattaacaanaatgtgcctaactaacccctctgtcgtgtgccagaagatggcattgggacgcgagccctagacacgacaaaaccctagatttgcctcgggtttgagcanggagacagaccggattatccgggctccatatctctgcaaccagtaggcanaatcctatgacccccacacaagatcggtagcttgtatggaggagaagaggttntgtgcactgaccaaggcgagagcaggctcggatgagtgaccatacgtgccagaacttgggcagaatgcacgggcacacgtgttcgaccctggtcgggacgc

SEQ ID NO: 9741 - DNA, 364 bp, Zea mays
  unsure (1)..(364): unsure at all n locations
tatttctactacatgtcattctcatactgatggtcaaactgaagntgngaatagaactttgtctactatgttaagggcagttctaaagaagaatattaagatgtgggaggactggttgcctcatattgaatatgcttataatcgatcattgcattctactacaaagatgtgcccatttcagattgtatatggttgggtacctcgtgctcctattgatttaatggcctttgccatctttctgacaaaactaaattttgatgctactacgcgtgctgaattgatgtaaaactgctcgaaactactaaagannacatagagcgtatgaatgctacatataacgttgctagtgataaaggtagaaagg

SEQ ID NO: 9742 - DNA, 558 bp, Zea mays
  unsure (1)..(558): unsure at all n locations
tcttaagcacctgngctgcagctatctccagagtcactaatccttgactaatattcatattcaactatgtaaatagtacaatntatataaaacagtgttttaggtgactatataagtgtcattcagagtgcaaatgacggatcacgttntctcttgtgacatcgatttggcacggctacactgtaaaggtgaacagtgaactgcagaagccaataataacaacaataataaatggtgcctcaatagcaaaatgtgtgcacanggggtccagaaaacgggcacaggaaaatggcagcagaggaaactcaagacgagagaacatgcagcacgcattcgcgaaattcaggtgtcagtggtaacaacaccacactgatatgcacaagtacggtttaatctcctacgtgcactcgatttattgcacccaactcagtggtttagggctaatnntgaaacttanatcccttacgagacgtntggatctcttcattttagagaagttagagttcactcaatanaataacttatttagttggaattgacatccaccacttccaagtt

SEQ ID NO: 9743 - DNA, 361 bp, Zea mays
  unsure (1)..(361): unsure at all n locations
gcttctgccttcgaagcttcaaaagagagcactgattatattattctcatgcttcgaggaagagactttctcaagaagaaaagctagaagcactacactatgcccaanaattaanatatccaaaggggcattagtgtttaatggcaggggagaagaagatttatgtactgtctcccggataataaagagatatccgtttgccaggagataggtagaagcatctgattcctgaagctagaagatggccttntcatcttatcgaaggatgagctcgctgacagcttagcgtataatagcataaaggtataaaagctaattatgtatttgaaaactaaatattttatttgctatacttaattct

SEQ ID NO: 9744 - DNA, 514 bp, Zea mays
  unsure (1)..(514): unsure at all n locations
gctggagttctggtatgtntagtacgtgagtgttatgtgggctgtacanagaatgcacctacgtaattgcattgactatctgaatctaagttatattagtagtactagggggggatactgtgatgaatactgcccttntacaacaatntaattaactattggttctaactattggcgttcacattnttttgctcaattcaaagctaagtctgaataactaactatattgtgaggagatagaagcctatngtcaattattaaattgttaaatctttcaggtctgcatactgtgatgtgagcatgcctcctgaacgtttacaggagttcttgccgcacttaatcccggtatatatctttcttgtacttcaatttagtgcaactgtaccttggtgctttatataaatacttgcgttccaacttttgtcctagacattgttgtcgaacatggtatatgctgacggcgatgagttccttgatgatgctgangtgtgataaacacttaatatctttcatg

SEQ ID NO: 9745 - DNA, 347 bp, Zea mays
  unsure (1)..(347): unsure at all n locations
gcttggatagtgttctgcgatggttcctggggaacctttngttcatgtgcagccgctgttttagttgcaccttccaaagttagaacatgctatgcagtgaaacttgatttcagctgcacaaataatattgctgaatacgaagctntgcttttggggcttcgtaagttaaaggcaatggggataagaagggcggttctcannaatgatttccaagttatttctggtcatgttgacaagagttgtaaagcacgagattctaagctcgagaagtatttgaatacatttcgaaggcttgaagcttctttcgaagggttgtctgacaagaatattccacgaggagaaaatga

SEQ ID NO: 9746 - DNA, 543 bp, Zea mays
  unsure (1)..(543): unsure at all n locations
gcagcttgatatcatgtgaacatgaatttttattttaccttggcccctttccttcaggaggggagagaagtgtttaacggtgtcataggttgtaattttcatatatttcttgtgcaaccctgtgcaatacaagggccaaattattccaaatgtacaatgtgaaatctaggactacaccatcgagtgtgaaaaactatgaagaagctcaaaagtctttcctaacgggatgtagagcatanatgccacctaagtcatatgtgaagaagcttcaaagccgctcctaaggggatgcagagcttatatgccacctaagtcaaaggtgaagaagactctaaatcgtctctaaggggatgtagagcttagctccaaagctgttctaatggaatgtagagctaaaatatcacctaagataaaggtgaagagactctatagtcattcctaatggaatgcagagtccggatgtttaatcctgagtgttatagcttcggatacatatcatacatcatcacatatctttngcattctactaacatacattataca

SEQ ID NO: 9747 - DNA, 494 bp, Zea mays
  unsure (1)..(494): unsure at all n locations
acctcagagtcacctgcggcatgcaagcttctanagggagatcatgtgttacgactattcgtttgtatgtttgagaaagataaaccttgtgcagcgtgcctagcagggaaacaggtgggaagcactcatcatagcaaatatgtgatgatgacgtcaagactactggaacttcttcatatggatctcttcggtcccgttgcctatctcagcatacggggaagtaagtatggtcttgtaatagttgatgattatcccgcttcactttgggaattctctttgcaggacaaatcagaaacccaagggacctctaaacgcttcttaaggagagctcacaatgagtttgagctaaaagttaagaagataacgagcaccaatgggtccgagttcaagaatttgcaagttgaagagtatcttgaggaggaaggcatctagcacgagttctacgctctctacacaccacaacacaatggtgtggtagagatgaagaacatgac

SEQ ID NO: 9748 - DNA, 321 bp, Zea mays
agaaagacagggattgtagcgcatgccaagcatgatagcaagttggtgctcaccatccacacacgaacatcatgacgaccgacaggccactggagctcctacacatggatctattcggcccgatagcttatataagcatcggcgggagtaagcattgcctcgttattgctgatgattattctcgcttcactcgggaattcttctggctgagaaatctcatacccaagagaccttaaagggagttttgagactggctcaaaatgagttctgcttgaggatcaagagaaatagatgcgacaacgggacgaagttcaagaactc

SEQ ID NO: 9749 - DNA, 373 bp, Zea mays
  unsure (1)..(373): unsure at all n locations
attctcccagcaaggcacccgacctatattagtgcttattggccagaaggttaacagtctgcttgatgaccaagttttcgtattaaaagtgtcattctacgaagtttcattatgcttgatttacatggtgagaaatcttagcaagccagctttccaacacacatccaaccccacactatatggagattcttaggtgactgtattatcanaatattgaaggttgcgtagaagtcaaacaaccacgtgtaatcagctctagaggcattcccgaataggccccttcacattagctcgttaatatagcttatatttgtgntatacatgtctaaagcacgttgttactagtataaatgctcccnctatgtctaagatg

SEQ ID NO: 9750 - DNA, 439 bp, Zea mays
  unsure (1)..(439): unsure at all n locations
gcttctagatatgtcgaggtgacaaatgatgatggttaattgttagttacgaaggtcgcagctaagcaacttcgtcggttgcccatcattcctcggctttcaagggtgttcctcaacaaggaaatagctctgcatatgacatggccaaagaatggtgtacgtctcgtcactgatccagacataatggtccatccgtcggacggtgatgcgtggaaggcaatngactagtttgatcccgaattgcaaacgaccctaggagtgtacggcttggtctatcgacggacggattcacacctttcaataccagtgcaagcccctactcgtgttggcctgtcttcattgtgccatataatcttcctcctgagttggcaataaagaagagatatgttccttgcacttagtcatccaggccccgagcatccagggccaaagctgaata

SEQ ID NO: 9751 - DNA, 432 bp, Zea mays
  unsure (1)..(432): unsure at all n locations
acctgcggcatgcaagctngacacacaatntgcatttacataatatttctgagattatgaatatntagttcattcctcaacatgcagaagcgggtcttatcaagtggcttagagaacatatccgctaattgatcttccgatctcactccttctaaaatgatatctcctttagcaacatgatctctaaggaagtgatgacgaatatcaatgtgcttggtgcgagagtgttgtacacgattattagcaattttaacagcactctcattatcacacaacanaggtactttttctagaactacgccatagtctagaagagtttgtntcatatataaaatctgtgtgcaacaagcacctgcggcaatgtattccgcttcggcagttgacaaggcaacactattttgctttntggatgtccatgaaactagtgatcta

SEQ ID NO: 9752 - DNA, 476 bp, Zea mays
  unsure (1)..(476): unsure at all n locations
agctngtgaagattcttcatcccaacatgggcaagtttatgatgccagagtcagtccatattagtcttagcaattaagcaagtgtctagttcagctntgttatcattaanatcaactaaatatagctgatcatctaacactcccttaaatgctatttaatcatcacttcttctaaagggagtaacacctatatcagtgaataaatagttgtagcctattttgcataattgaggagactaaaacaaattgtagtctaaagaatctacaagaaaaacatttgaaatagaatggtcaggagatatagcaattntacccaaacctttgaccaaaccttgatttccatcccgaatgtaatagctctttagggatcttcanttttctcatatgaggagaacatcctnttctcccctgtcatgtggtttggcacccgctatcaatatccaacttgatccaccggatngcaaaacctactaaac

SEQ ID NO: 9753 - DNA, 360 bp, Zea mays
  unsure (1)..(360): unsure at all n locations
agcttatgatgtatgatgacattatcacatttagcatttatngtagcactagaattaggagtactgtagtctgcaatgtcatcacttttaatntgatgagcacgttgctggtggcaggttctcacgccactcaacactcaaacgagatgcttcttccagcagtgtcactaccagactccgggtctttgccgagtgccaggagctatgccgagtgcttttgtcgggcactcggcanagacttctttgccgagagccgcactnggcagagtcctacactcggtaacgaggtcgtttatcgagtgcaggacactcggtacagaaatacactcgacanagacgtctttgccgagtgccgaaccc

SEQ ID NO: 9754 - DNA, 474 bp, Zea mays
  unsure (1)..(474): unsure at all n locations
gcttctgccatgacgtgatgtccctggccggagagtatagtaccatgtctgggccacacttcggactgccatgacgaaggactntgccatgacagcggtgttgcctccatatgaggatattgntgcctcatagctcatcaagaattgctttgggtccgagtgcccatcatatacgggtaactggggtggcttgtaggattatggccatggaatagtctgcaattctgctgccaagggagaagcatcatcaaaagtaaagctaccatgatgaaaatcatcgtaccattcatcttcgttgaatgagccctcttggcgaagctccctgtgttgggcctttggtcatgatcatcttgngtaagatgacgcatttcttcagcagcttcgtctatcttcttctgaaggtcggccaaccgggccatcttctcctttntcctttgcacctgctgatgaatgagttctaggtttctgatcttc

SEQ ID NO: 9755 - DNA, 108 bp, Zea mays
cgcttgcgataaattgccatgggaaacggggcgaaaattgtcatatggcacgttaaataaactgggaactcaccaggatggtgaacgaaactatctcataaccttagg

SEQ ID NO: 9756 - DNA, 295 bp, Zea mays
  unsure (1)..(295): unsure at all n locations
accttggtgagcctgacattgccgacaacagggtcgacgacgagcgggtatttccccgggctcggcacatggtcggngtggtcggcccggtcgaaagtgatgggcttgtcggaccagtctaggtagactggcgccgccaccttcaccgagcagacctnccggcgctcttgcttgcngtgccgagccgaggtattcgccgcatgcccnccatagatcatgaagcagtcacggacctcggnngaaccccctgctgggtgatcttcgttcttgtcgtcgtcgtgggccctgccaccct

SEQ ID NO: 9757 - DNA, 437 bp, Zea mays
  unsure (1)..(437): unsure at all n locations
tcatcttctttgttcatccaaatctgattgtagcctgagtaacagtccaacaggctcataagctccanagtggttgtcgcatctatgatagaatctattcttggcaaaagagaattcatccttcgggcatgccttgttgagatatgtgaaatcgatacacattctccactttctgttggcattttcaccatcatagtattggctagccattctggatatgtcacctctctaattactctagcactcaggagtcttttgactttgtttcttgcaccttcagctntgtctttngacttcttccgaagcttctgcttccttggtctgatggttgggtccacattaagagagtgctcgatgacatctctgttgacgccacacagatcattggctgaccaagcaaagacantcttgctgttgaataaaactttaataaaacc

SEQ ID NO: 9758 - DNA, 434 bp, Zea mays
  unsure (1)..(434): unsure at all n locations
ttgaganagacaggatatgtagcgcatgccaggccgngaagcaagttggcactcatcatccacacaagaacatcatgactagtgacaggccactggagctcctacacatggatctattcggcccgatcgcttacataagcatcggcgggagtaagtactgtctggttattgtggatgaatattctcgcttcacttggtatttcttttacaggacaaatcccanacccaagagaccttatagggattcttgagacgggctcaaaatgagttcggcttaaggatcaagaaaataagaagcgacaacgggactgagttcaagaactcacaaattgaaggctttcttgaggaggagggcatcaagcatgagttctcttcttcctacacccctcaacacaatggtgtagtggagaggaagaatcgaactctattgtaca

SEQ ID NO: 9759 - DNA, 429 bp, Zea mays
  unsure (1)..(429): unsure at all n locations
tctctngctctacaactcttgtcaacatgaccagaaataacttgggaatcagttttaaggatcgcccttcttatccccattgcctntaacttccgaagccccaaaagtaaagcttcgtattcagcaatattatttgtgcagctgaaatctagctttactgcataacatgttctgactttggaaggtgcaaccaangacatcaactgcacctgcgtcgaaggttctccaggaaccgtcgcagaacaaccgccaagctttggcatctttaattgcttcttcttcctgagcccctggcgtccagtcagtgatgaagtctgctaacgcctgcgactggatcgaggatctatgcacataatcaatgctgaattcgttgagttccgcagcccactctccaatccttccagtagctnnncttgtcctcataatatc

SEQ ID NO: 9760 - DNA, 401 bp, Zea mays
  unsure (1)..(401): unsure at all n locations
atgagaactccgctaaaggtaaacattcgtcccatttcagtgagaaatccaagacacatgcccgcagcatatcttcaagtatttggttcactctctcagattgtccactgtgttgaggatgataggccgaactgtggagcagtntagtacccagggatttatgaagttcttcccaaaacttggatacgaatngaggtccacgaaccgacactatggtctttgtaacaccatgcaaactgagaatacgggcaatgtataactccgcaagggtaatgacgggatatataactttgacagggaggaaatgggcgatctttgtgagtcgatcaataataacccatatagaatcataccctttngcggttcgtggcaatnccacaacanagtccatactaatgtct

SEQ ID NO: 9761 - DNA, 230 bp, Zea mays
gactgcgagtacctgatgcgttggtgctagaagctatcgcacgagaacctgaggctgcagagggaggtggcggatctgcagcgtctttgctccgccgactactccgtttacggtgcagcagcagggtatggtgtggccaccagccgagtgtgcctatctcatgcgataacgacgtcagcgaggctgctatcataggacgctcatcagcagcggtaccaccgccatccacc

SEQ ID NO: 9762 - DNA, 490 bp, Zea mays
  unsure (1)..(490): unsure at all n locations
attatctcttggacacccaagaggacttccttattaaagaaaataagaagcatgttaaggttaaaaatgcttatgctctagaaattgaaaaatgtcaaanattatctagtgagctaagcacttgccatgaaacaatagacaaccttagaaatgaaaatgctaatttgttagctaaggttgattctcatgtttgcaatgtttcaattcccaaccctagagataataatgatgatttgcttactaggattgaagattgaacatttctcttgtagccttnagtagnaatgaaaatttaattgtaaggctaaagaactagatgtttgaatggtacaatntccaaccttagaagtaaaaatgaaatattgcatgctaagggtgtagaactaanatcttgcaaaccctctacatnctaccgtgagcacacttctattngcactagatgtagagatataacattgatgtatacatgacacatggcttattaaacaca

SEQ ID NO: 9763 - DNA, 473 bp, Zea mays
  unsure (1)..(473): unsure at all n locations
acctctaagncacctgcngcatgcaagcttcgcttatctatattatgaatagtcttcatattcttccaactcccttcagccctcctggcagcttcttgactcccgtgtacagcaatgggtccttgttccgaaggtatcttgatgcanagatatgctggatgaagtattgcttcgaaggcattaagcgtncctcaaccaatgattgcactgtctcgatactccatatgaacaatgtcaaagacaacctattctcgtcttgtgntgtgaacatatccgaaggtaaccggcatagttatcttgccaagtgccacaatatgtcttcctccgaagccacaaagagggtgtgttgcatcatttatcttgtcctctggctcttgcatttgcctgaaagcctttgcaaagatgatatccgctgcactgcctgtatccaccangacattgtggaccacatatcccttgatgacacaagatat

SEQ ID NO: 9764 - DNA, 421 bp, Zea mays
  unsure (1)..(421): unsure at all n locations
tgcattatggatactacacgtatatgcgtatgtacgtaccgnttntattttgtatgcatggcgcgctggagtgactctatcgagcagatcggaacgcgtacggtattgacctgcggtgctgatctagacagctttttatcccgaacagagcaatgatggaggaggtccggcgctgcaagcaacagcgggtaggccaccaacacttccgagacgtgcatgtcgctgatgcgtacgtgtacgtcgatcaatcgaccgcggcccgcattgatgtcaaagcggctcatacggaatagaataggacagcgcgaccgtaacccgggcgcgtacggctcatacgtatgcctatcgtaattgtctgggcgacgctgacactttgcggncgttctttcttcgatctaatcaaccgacacaggtccctcac

SEQ ID NO: 9765 - DNA, 505 bp, Zea mays
  unsure (1)..(505): unsure at all n locations
cttctanagggagaacacattntaggactaacatattgttcattntgagaaagacaggatntgtagcgcatgtcaagcagggaagcanngtggcactcatcatccacacaagaacataatgactaccgacaggccactggagctcctacacatggatttgttcggcccgatcgcttacataagcatcggcgggagtaagtattgtctcgtaattgtggatgattattctcgctttacttggngtattctttttacaggaaaaatctcanacccaagagaccttatagggattcttgagacgagctcaaaatgagttcggcttaaggatcaagaaaataagaagcgacaatgggacggagttcaagaactctcannatgaaagcttccttgaggaggagggcatcaagcatgagttctcttctccctacacgccacaacaaaatggtgtagtggagaggaagaatcgaactctattggacatggcaagaaccatgcttgatgagta

SEQ ID NO: 9766 - DNA, 423 bp, Zea mays
  unsure (1)..(423): unsure at all n locations
ctgcaagcttacaatccttggatttgtttccaagccttctattattatctctattntgnnatcttcanaatcttgctgcattcttaacgctatgcttagcagcatgctctgtgaaaataagttaactttagaatattttaatccatcacaaagataacaagaatctatgcaaaagaatttaccttgaaattggagtaaaataggctactgacgatatgttgccgtcggtaaccactaatgtcagattctagcttcgggagaccaacactatttgagagagtgccgattatatttgcctcggcgcgatcgcggatacatcctaaaatttcttcgtaactctgccgaaagcataaatcctcgctgatagccacaagatattccatatatctttaacatctatntatctgcctcggacaattcctg

SEQ ID NO: 9767 - DNA, 289 bp, Zea mays
  unsure (1)..(289): unsure at all n locations
tgcagctntagcgtcngctgctctgtggaggcgggcatatttcattttgtgtgtttgcgacggccatanggcaggcgggggcgtagccatggtataacttgcgcccactctcgggtcttaatagaagtatggatcgatagatgggcctcatctctccaacataggaagcaacagtgaatacttagaccacatagactaccgcgacgcaaatataatgcaccatatcttgcagtcaaaggttggtggtgaaacatataaaccttcctgctacatgctcagaggaagcagt

SEQ ID NO: 9768 - DNA, 338 bp, Zea mays
  unsure (1)..(338): unsure at all n locations
ttagcaatgaagcgagtatcgagnttagctctattaaaatcaaccaagtatagctgatcctctaatactctcttagatgctaccacatcatcacttcttctaaagacagtaacacctaaatctgtaaaaagacagatgtagcccaatttgcatatatgagaaacttgaagcaagttataatctcaagaatctacancataacattggtaatggaatggtcacgtgatatatcaattntaccaagttctttgaccaaaccttgatttcatcctcgaatgagaagctcttcgggatctggttttcttgtagaggagacattctttctccctgtcatgggt

SEQ ID NO: 9769 - DNA, 503 bp, Zea mays
  unsure (1)..(503): unsure at all n locations
ctctntacctttctccagtttagatgtaataggtttcactaacttnggaaaaccctcaataaatcttctatagtatcctgccaatccaagagaacttctgatcttggacgcatcctttggttgcttccaatctagtatctcacttatctttcctgggtccactttaattccaccatcagtaacgatatgccctaataaagcaacttcctttaaccagaantcacactttgagaactcacatatagctggttgtacgaagttcttgaggactagccttagatgatcttcatgtgtttcttcattcggagaataaatcagtatgtcgtcaatgaatacgaccacaaactgatccagatattccatgaatactntattcatcaagttcataaagtatgctggtgcattagtcagtccaaacgacatgacctaaaacttgtataatccgtatcttgtagtgaacgctgtcttgggacatcttctgctcgaattttaactgatgatat

SEQ ID NO: 9770 - DNA, 385 bp, Zea mays
atccacatgtacaggtattgggcactcttaaaatataattaacttctaggacaattaatatacgaataatgaataaaccacacgcatcaaataaaagcatgtacatctagtagattaaatctaatcttgaatcaaatcattattactcacgacacatattaatacacgaatagagaactaaattatacttggtaacaatctgagatatgatggattcaattctaacttggacaaagttgaaacatgagtgggtcttgagattcgtttggaaatattataagaaatgtacaataaatctgacattctagatctatggattaatcttacttacacaaagtggaacatgatggccttgaattgtctacatatattattacaaatgaca

SEQ ID NO: 9771 - DNA, 404 bp, Zea mays
  unsure (1)..(404): unsure at all n locations
gctcgcgagttntggcggttaggcgcagtacgtgccggcgtgccggtattgggacttgggctcgtccgagtcccaccgagctttcaaacactatactccaatctctccttctcgcaggacaaaggcagacacacagtagtgagtgctacggctgctagtacatgacagaaggcagcattggagattggaacagaggagaagagagaagacaggcgtgatctgaaagttcatgtctgcagtgcagactgcacggcaaagcatgcatggggtttctaaaggccctggcgcctggcggcttcagcaggggtgggtctcggagtgcccgacgccggccccacatgcaggcagcagacacacacacactctctcatgatgcagcaattcattagtccagagtccacaca

SEQ ID NO: 9772 - DNA, 410 bp, Zea mays
  unsure (1)..(410): unsure at all n locations
tgcagcttcttcaaggatttctgtcagaatattttttatgtctaaatgagcatgctgatttgttagctaagtcagcagcacaggggctgcctttaccttctgatgtgttcttctaaacaataaaagcaccttcggtggaacttcttgaaagggcacgcctcagtatatctcctgcttatagcgaagattggagaactgagatcatctcttatcttcagggcaaattcctttctgatgacgaaccttataacaggaggatagaggcacgagctcgtccatatgtcatgatataaggagagntatacaagcatggagtttgtgctccgctactcaagtgtntatccacaaccgaaggtatatagttgatgaaagaaatacatgcangcctgtgtgggtctcacattggatct

SEQ ID NO: 9773 - DNA, 329 bp, Zea mays
atagagatagatatccaatatattcagcacctccacaacgaagctgcttcagggagatcgcagtccagctttcataaagcttccgtactctacgacttctttctcttccggatgtgggcacattttacccttcgtaccgcctccaatggacaaataccggaaataccttcctctcatattgacaagatgatattctttgatagtcgattaccataaactgaatggcttgtgcgctatggacgaatcttctgagtcttcaccaccactatccacatcattagctgtcactgtcaccagtattctcagacaaaccttccagaatcctcttg

SEQ ID NO: 9774 - DNA, 445 bp, Zea mays
  unsure (1)..(445): unsure at all n locations
tagcttctanagggagaacacgtgataggttngactcacttgcttttctgaaaagatagaccttgtgcagcttgtcaagcaggtaaacaagtgggaggagcacatcacaacaagaatgtgatgaccacctcaagacctctggagctgctacatatggacctcttcggacccgtcgcctatctaagcataggagggagtaagtatggtctagatattggtgatgactnttcccgcttcacttgngtgttctttntgcaggataagtctgaaacacaagggaccctcaagcgcttcctcangagagctcanaatgagtttgagctcaaggtgaagaagataaggagcgacaacgggtccgagttcaagaaccttcaagtggaggagtttcttgaagaggaagggatcaagcacgagttcttcgctccctacacaccacagcanaatg

SEQ ID NO: 9775 - DNA, 394 bp, Zea mays
actcaagcctagctacgggtgcatagggtttaccgaaatccaaacctacgacttgtgaataacccttggccacaagtcgggctttgttccttgtcaccacaccatgctcatcttgcttgttgcggaatacccatttggtacctacaacattttgattaggacgtggaactaaatgccatacctcattcctcgtgaaaagtgtgagctcctcttgcattgctaacacccaatccaaatcttttaatgcatcctccaccctgtatggctcaatagaggacacaaaagagtattgttcacaaaaatgagcgactcgagatcgagtagttaccccttatgaatgtcaccgagaattgagttcacggggtgatctctttaaatcccttggtggactctt

SEQ ID NO: 9776 - DNA, 125 bp, Zea mays
  unsure (1)..(125): unsure at all n locations
accttatgaccctagtgtgctatatagatagaatcggagaatagcacaggatcaattgacatactcccagatcattggctcgctcatgtaccttgcaagtgcaacanggccagacatctcttatg

SEQ ID NO: 9777 - DNA, 414 bp, Zea mays
  unsure (1)..(414): unsure at all n locations
cgcacaaatgaacgcaagatgtagcacacactttctcgcaatgaatctcacaaggcactagagctaaactcacacgagaggctntcttttgcttgctctctctattgtggcacttgtgttggttgtagtggtctaaatcttgtgtataggatgaatcaatgaatagaggtggttggaagggctcgatatgtcaactatatgacttggaatgttgcttgggctccccattattgaagtggccggttggggtggtattatagccaccaaccaaattgtagtcgttggagaaggctgctggcgatgggcgaaccggacagtccggtgcaccgccacatcaccctgtcgttagggcttggagctggtcgaccgttggagactttgtcctcatgtggcaccggacagtccggtgtcaca

SEQ ID NO: 9778 - DNA, 211 bp, Zea mays
  unsure (1)..(211): unsure at all n locations
gcttcggaaatcccatacttctagccatctcccgacttgcttataattctttgntgnctgggaggcagtataggaaatcttcttcgttcgtctcattgaacactaatgcccccttcggatatttcaattctttggcatagtgaatagcttcaaaaacttcttcttccgataactttttccccgaagcatgtcgcacgatatagtcgtatat

SEQ ID NO: 9779 - DNA, 346 bp, Zea mays
  unsure (1)..(346): unsure at all n locations
cacgaagcttcggaattattttcaagcatatcatataattgttccttccgcgcatcctttgatgaggaagagagaagctactggaaggatcagaatatgggctgccgagctcaatgaattttctattgactatgtgcataggtcctcaattcagtcccagacgatagcagattcatcgctgattggattccacgcgctcangaagaaataacaaaagatgtcgaagcctgcacaatcttctgtgatggttctagttgaaccttccgcgcaagagccgtcgctgtcctagtagcgctctctanagtcagaacatgctatgcagcangacttggatttagttgtacaa

SEQ ID NO: 9780 - DNA, 310 bp, Zea mays
  unsure (1)..(310): unsure at all n locations
gtgcacaatgagtttgcggtatggccagatatatacgctcggngcgttgaaaattgaaagaccccacttgtcattgaatgttgctattctagcaaagggaaggtgttttttctgaccttcggcgtaaagccttcgtccatatcgcaatctatatttattatntctaacaaantaatattgcgaggggctactgttggggaccttctgcgtccgaaggtcctcaaaacaggatttaacagtatttctgtagtacaatgtgtgaacaggtaccctcggactaaagtctgcattgcagtagaccggaataata

SEQ ID NO: 9781 - DNA, 285 bp, Zea mays
cttgcacagatccaaagcgaagctgcgtactcaccaatattatttgtgcagctaatatcaagtctggctgcgtagcaagtcttaactctggagggtgcaaccaatacagctgctgctcctgccccaaaggttctccaagaaccgtcgaaacatatctttcatacttcagtatcattagtagtgtcctctccttgagcccctggcgttcaatcggcaatgaagtctgcatacgcctgagattgtattgaggatctgtgcacataatcaatgctaaactcattgagc

SEQ ID NO: 9782 - DNA, 424 bp, Zea mays
cacacaagagagattgttgtttcgtgagatcagccgaagcctatgctcctatgtgaagatatagcagatcacagggtactgctaggatctcagctatctgatgagcaagaacaaactctaataagggttttggtcaacaacaaagatgtcttcgcttggacagccaatgatctgtgtggtgtcaacagagatgtcatcgaacattcacttaatgtggattcatctttcaggccaaggaagcaaagactttggaagatgtctgatgataaagctgaaggtgctcggaacgaagtaaagagactccttagtgctggtgttatcagagaagtaacatatccagaatagctagctaacactgttatggtgaagaaggctaatggcaaatggagaatgtgtattgatttcacagatctcaacatagcat

SEQ ID NO: 9783 - DNA, 427 bp, Zea mays
  unsure (1)..(427): unsure at all n locations
agaggagatcttgcacaatacgacaatcacaaagaattcaacacagagaagacacagtgatttatcccgtggttcggccaagtacaacacttgcctactccacgttgtggcgtcccaacggacgagggttgcaatcaacccctctcaagcggtccaaagacccacttgaataccacggtggtttgcctgcttatctntatcccactcgcgaggaatctccacaaattggagtctctcgcccttacacttaagattcacaaagaagcacggagtaagggaggggagcaacacacacaaatccacagcgaaatgcgcacacacacggccaagaatcgagctcanagactatctcanagttctcacaagaacggagctcgaatcacttagaataacanacggatgcgcacagactgagtgtggatgatca

SEQ ID NO: 9784 - DNA, 234 bp, Zea mays
  unsure (1)..(234): unsure at all n locations
tgtcaacgaggatatgacgctcatcatcaatagcttatgccgaatcctcaagcacaggaaggcgaaagatacaaaccncattccaaagggtgtgctacacatgaggaagcctaatcatttatcgtaaaaatcctatgtctagtgacaggacagggcgaaacaagatggaagagaatgaaaaaaaaactaaagaaaatgcgggatgctattatgctggaatggacttcatagaac

SEQ ID NO: 9785 - DNA, 375 bp, Zea mays
  unsure (1)..(375): unsure at all n locations
agctntgtccgaggtatataggaccgtctactatcttattctgagttggcagcttggcttaacacatgcaattgtcggagtctatgatcagtgtacaccatgtattccatgtctctatgttgagaaagtatttgcagaatccagatcaataaattgagctagagtcgattcccatgtagcaagacctgactctagagtgtcgtctgctgcgtatcctagaattcttggagctcgaggagctgatgctgcagaagtactccgaacttttcgttatggggtgagcttctgtcgacgctgatctttcctttggtgttctgatagaagcgtcagaattcgaggtcgaattcttttcaagaggggtagagtgtgataccc

SEQ ID NO: 9786 - DNA, 456 bp, Zea mays
  unsure (1)..(456): unsure at all n locations
agctngtgcaggtcagagttcagttgtcctatgaagtatatgcagcaagtgacaccactcatcgttgcactgatcaagtggttcaagtctccaactgtccagaaacaaactgtcaaaagtattcaaaaatttcaaagatactaaatgacaacatgatttctgtaaacactaagaagcacattcattgtttgaaatctagtacagatcanatgccagcttgtttnttttatttcggcagcaagtgacaccgctcatcgttgcaatgatcaagtggttcaagtctccaactattcagaaacaaactgtcagaagtattcaagaattntaaaacactaaatgacaacatgatttatgtaaacactaagaagcgaaatcattgattgaaatctggtacagatcanatgccagcttgtttntttatatcngtagctatgtgtatataatctgctaaccata

SEQ ID NO: 9787 - DNA, 386 bp, Zea mays
  unsure (1)..(386): unsure at all n locations
cccgaaatagaagaacttaaagagtatgccanatcttgcnggtacaagccaggagcactcctcttcngaggtattgatgatgaagaaatagatggtatccgaaaccaaactggagccaaagntatcggtactctgtcaaagagtatcggttttccgaagctagaaatggacattagccgctaccgacgacaacatatcgttggtagtttattttattcaaatttcaaggtgaactacttttcctttaacttttattggttctaataatgaaaacatgtctaacgaanggtgttntcgtgcagagtatgctgttgagcaaagcctcgaagatgcaacaagattttgaagacaagaagcacgaaagtataattgaaaatttggaaagc

SEQ ID NO: 9788 - DNA, 463 bp, Zea mays
  unsure (1)..(463): unsure at all n locations
catgcaagctccatggagagaacgangttccttctctgtattatactgactgtctggcgggcgtanggatggcaactgtgactggttcgtgatcggtgcaacccgaattctaatcccgagacacgtacccgaacctgactctgttacgggtaataactgagctccggactcgaactcgtatggactctcaactcgatcgggcacctgtggacccgagaatacctgatgccccctgcgctgcgtcttcacaagaattttgagagtgaattcttgctatatatagacagacagaataatgtattctacatggatactacgtcatgtctagtcaccagatacatcacggttggatgcaatgaaggtccnctacaatcatgagaatgaagatgctctctccagatcaacataacggtgtcctgctagtattcctaccggaccaggagatactccttacatcgtacgt

SEQ ID NO: 9789 - DNA, 445 bp, Zea mays
  unsure (1)..(445): unsure at all n locations
gcttcactataaatctacaagaaatttcaattgattctacatgtgctctcattccacaatnggtatcatntacatgtcttttgattagactatatttcatatctcttacttaccatgttgctataaaagcatatgttgtcaaaatatatctcttaatcaaactatatcttgcatctctctttctcatatgctcttcctaagtagaggatctccgtcagggggagtatttcctcgtctgtgacaatgcgggagaatactctttcaaagggagaatactcatttatgcggagtattccttttagagggcatgacgtttatttgctctctatatagctttaatggcttccttttcggcggctgatgccaaaggcggagaagatttatggaccaaagcatgaataatatatcaaacaccacccacattacatatttaattttttttatc

SEQ ID NO: 9790 - DNA, 480 bp, Zea mays
  unsure (1)..(480): unsure at all n locations
ctgcaagctgacccacatatccgtactgacacagtattcttctgatttatttattcaannncagggaaaacttacttggctttcattgtntaacgacgaaggtgttntctgacgaaggttgtttctgcatagagcatgctattgagtaaagccttgagaatgcaacaggaccttgaagataaaaaaacatgaggttataatngaaggcttatagagtaaaataatagatcacgaagctgctctatagaagaaggattttgaacttcaatcaatggaaggcttactggcggaagcccaagctaaaattgccagattgaatagcgaagtcctcgcaaagacagaaaaattggaacagggaaagcagaaattcgatgcgaagcttgggcttgaagtgaaataagtcaaattacagaatcattgaagacttaagataatgcgtgacttcgcaccgatcatgcacggtgagcagtctctactcgt

SEQ ID NO: 9791 - DNA, 364 bp, Zea mays
  unsure (1)..(364): unsure at all n locations
gacgtgaaaagtgccttcctcaatggatctatcatggaagaggtctatgttgagcaacctctcgtgcttgaagatagtgagtaccctaaccatgtgtataaactctctaaggcgctntataggctcaagcaagccccaagagcatggtatgaatgccttagagatttccttatcgctaatagaatcaaagtcggaaaggctgattctactntattcactaanactctctgaaatgacttgttcgtatgccaaatttatgtcgatgataatatatttgggtctactaacgagtctacatgtgaagaatttagtaggatcatgacacanatattctagatgtctatgatggnggagttgaagtact

SEQ ID NO: 9792 - DNA, 394 bp, Zea mays
  unsure (1)..(394): unsure at all n locations
acatgtgctaagtgttgatgccacagccagcccatgctagtcttagcaattaagcatgcatctagaccggcctcttcttttgcagaatcaactaagtaaagctggccgtctaatacacccttaaaggctagtgaaccatcactccttctaaagacagatacatctacatttgtaaaaagacaattatatcccatattgcatagttgactaacagatagcacatggtaaccaagagactcaactaaaaacacattggagatagagtgctcattagaaattgcaattttacctaacccttntaccttgccttgattcccatcaccgaatataantgaatcttgtgaattcttattcttgacgtaggaggtgaacatcttcttctccctcgtcatat

SEQ ID NO: 9793 - DNA, 343 bp, Zea mays
  unsure (1)..(343): unsure at all n locations
tgagtgagcgggagcagttggccagagagcgtgccanatgcgtntgcggtatggccgtatntatacgccaagtacgttgaaaattgaaagaccccgcttgtcggtgaatgttgctattctagcaaatggaaggtggttttttggaccttcggcgtatagccttcgtccaggtcgcaatctaaatttattagttttgaacacaatatatattgcgaaggggctactcgttggggaccttcggcatccgaatgtcctcaaaaacaggtttaatagggcttctggagtataatgtgtgaacaggtatcttcggactcaagtcaggcatcacagtataccagaataa

SEQ ID NO: 9794 - DNA, 335 bp, Zea mays
  unsure (1)..(335): unsure at all n locations
gcttggtgccgatggagaagcacatatcctttgtgtcttggctgtcanactgctnngctgtgtcaactgttagttcggacggtactccgaagcggcaaacaatgttttgccaaaagaatatttgggcagtcttcgatgttattgtggaaagagcccttgtctcgatccatttggtgaagtactctacagcgacgaaggcgaacttaaggttcccctgagtcgtgggcaggggaccgacaatgtctatgccccagcgctcgagaggccatgtgtgggtgatcagctttgttaatagcgaggggctgcctgatcgaggagaaaacttctggcaggct

SEQ ID NO: 9795 - DNA, 454 bp, Zea mays
  unsure (1)..(454): unsure at all n locations
agcttcataactcctagtggtacttattgttatctnatgatgcctgaggngctcaagaatgctggaggaagcttcagcagaatgacagccaagatccttcactctcaaataggcaagaatgtgctgacttatgttgatgacatcatagtaaaaagcacgaagcaagagaatcatattgctgacttgcaagagacgtttgccaattttaggcaagctagtcttaagctaaatccagagaagtttgtttttgagtaaagaagggcaagttcattggctgtctggtatcaacgaagggaatcgaagctaacccaagtaagatcaaagctatccttcggatggagccgccaaattcaaaanagagggctccacgattggcaggaagggctggcatcgtaaatagaattatatcaagatcagcagaaaggaatctgccattcttttgaatactaaagtc

SEQ ID NO: 9796 - DNA, 409 bp, Zea mays
  unsure (1)..(409): unsure at all n locations
cgtctcccattatagagcatgctcctagcagattaatatttatcattatctatttcgtgctcggtaattntaacatctagtttagctatatgatcattctgttgtttaatcatagcaatgtgatcatggatagcatcaacattaatgtctctacatctagtacaaatagtaacatgatcaacactagatgtagagggtttgcaagcaattaattcatcaatcttagcatgtaacattgcattttcatttctaagattggaaatagaaacattgcacacatttaaatctttagccttagagattaatgtatcattctcaatcttgaggcaagagagtgattcattcaacttgtcaatcgtcgcaatgagactagcattatcatntntaatgttaacaagagaatcatcac

SEQ ID NO: 9797 - DNA, 349 bp, Zea mays
  unsure (1)..(349): unsure at all n locations
ctcatccctacatgagctaatctgttatgccacagncagcccatgctagtcttagctattaagcatgcatctagaccggcctctttctttgcagaatcaactaaataaagtgtgccgtctaatacacccttaaaagctagtgaaccatcacttcttctaaagacagacacatctatatttgtaaaaagacaattatatcccatattgcataattgacttacagataataaattatatcccacagactcaactataaacacattggaaattgagtgctcattaaagaatgcaattctacctaaccctcttacactgccttgagtcccatcaccgaatatgattgaatctt

SEQ ID NO: 9798 - DNA, 218 bp, Zea mays
tgtggaggtttttcatttctccacatgtgctaagcggcgatgccacaaccagcccatgctagtcttagcaattaagcatgcatctagaccggcctcttcttttgcaaaatcaactaagtaaagcttgtcgtctaatacacccttaaaggctagtgaaccatcacttcttctaaagacagacacatctacatttgtaaaaagacaattatatcccatat

SEQ ID NO: 9799 - DNA, 441 bp, Zea mays
  unsure (1)..(441): unsure at all n locations
agctngacaatgaggaaatggcgctcgtcatcaagagcttttttcttatcctcaagcaaaggagagggaaagactacaagtcccgctccaagaaagttagctacaagtgtggtaagcccggtcactttattgcaaaatgtccattatcaagtgacagtgacagggataacgaccagaagggcacgaggagagaaaagaagaggtactacaagaagaaaggcggcgatgcccacgtttgtcgggagtgggactcctacgaaagctcaagcgacttctccgacgacgaggacgccgtcaacatcgtcgtcaccaagggactcctcttcncaacgttggcacaaggcctcatggacaagacggtaacggaagaaagtaaattaactcctcacttatatgagcttttatgatgaaatgctatgataagaagatattacgtccctt

SEQ ID NO: 9800 - DNA, 215 bp, Zea mays
tgacaatgatgaaatttttctcgtcatcaagagcttccgccaaattctcaaacaaaggaggggaaaggactacaaatcccgctccaagaaagtgtgctacaaatgtggtaagcccggtcattttatcgcaaaatgtccattatctagtgatagtgacaggggcgacgacaagaaggggagaagaaaggagaagaagaggtattacaagaagaagg

SEQ ID NO: 9801 - DNA, 434 bp, Zea mays
  unsure (1)..(434): unsure at all n locations
agcttaagtaaaatgatcataaaatattactaaagatggatccaagtggcattcacacccttgaaataccaaaaaccctaattggaaccctgtaaaaccctaaacctaaaccctagggggctaagtgtaaaatcagtgcacttttggactaaagtgcaaaaactagtaaagtaaagtgttcacaattatgaagatttgcaacttgaaccctgagttttggacttaattgcaaaagagccacatttgaactcttctgactaagtctgaatttcagcgtaatgtcctcatctttgtgaccttgtaactttcacacaaaaaggattttgccctaagtcaccacatcaactttgtaggtctatgaaaggtgaacaactntgcttaaagggttcaacatggttatcatgaacaatatgaagaaaaatgcacccanagtc

SEQ ID NO: 9802 - DNA, 215 bp, Zea mays
tttctgctcacagcttcggtgctgtatcaaccttcgtatgctttgagcttctccctctgtgataccgattcgagtccgaagatacctgtttgcacattatactccagaaacactattaaatcatgtttttgaggaccttcggacgccgaaggtccccaacagtagcccctcgcaatattaatttgtttgaaataataaattcagattgcgatatg

SEQ ID NO: 9803 - DNA, 402 bp, Zea mays
  unsure (1)..(402): unsure at all n locations
agcaagctttccaactcaactggcccaacattaaaatattctcatagtcaatagaaatcatcgtaacaagattatgtccaaaatatggtagcaatcacgacatgtgttttgggacccaaaggccttgtacaccctaagtttgctcagccatccctttgacgccaccttggccatctttcttatgtgtgtgtgtatatatattgagtagtatctattagattatatgtggttttcttagattaatctgtactcttatagttntattgttcatcggtttgtgagaccccaactcatgatcttcatctttattcgcatattaagttgcatcttcttaattnttgctcgtgttctcgatttcacttataaggattaagcttcgtggcaaggtaaaccgagttgcac

SEQ ID NO: 9804 - DNA, 213 bp, Zea mays
tgtgaagccaatcactattttattgaagaatgacattaagttcaattggtcttctaagtgtaatgaagcctttgagcaattgaagacattattaaccactgctccggtattagctcaaccggacatcactaagccttttgatgtatattgtgatgcgtcaggcaatggactcgactgtgtactaatgcaagagggccgagtaattgcgtatgc

SEQ ID NO: 9805 - DNA, 330 bp, Zea mays
caagcttgagaactatgcccgtatccaatctgcctgagccggaactataagagcttgccagatgcccccgttcctgtcgaccacgaccagcacccaacataagacttccctagttatttagccaagaccagagccatgatagttctcatggtagcactgttttcccgggtggtcactccatgttccaattaatatgcaataatcttgtttaaccatcgggttaacaacaataaagtaaacttaccatttggaacatcaatatcataagcgggagtgactgcataaatttagagttgtagcaatagcatagctacttgcttagatcataat

SEQ ID NO: 9806 - DNA, 214 bp, Zea mays
ttcatgagaatatggatacaaagttgagcttcagttcggtctgtcatcctcaaactgatggccagactaaaaggaccaatcaagtactagaggatatgttgtgagcttgtgccctccagcatggagatagctgggacaagagtctaccatatgctgggttctcatataataatagttaccgcgcaagtctgaagatgtcaccatttgaagcttt

SEQ ID NO: 9807 - DNA, 256 bp, Zea mays
gaatattgacctgaggaccttcccgactagagttctggatgatgcatgtattccacattgcccagcatggacctcctccagaagtcgctttccagcagatgagagaatgcacttcatgaagacgcccgatgcacctcttctgtacaatgattcctcaatgagtgtgtagtgagccgactgtctggcaatgcgctcggctgagctcttatcatctggttcttcttcattctctatatacttgatgattggccttctc

SEQ ID NO: 9808 - DNA, 187 bp, Zea mays
gcttttgagtctgaccaatttccttcggcccttctggcagcttcctgacttccatgaatagcaatgggcccttggtccgaaggtatctgcatgcaaagataagctggatgaagaattgcttcgaaggcattgagagtaccacgaccaatgattgcattgtaagggtattccatgtcaacaatatcag

SEQ ID NO: 9809 - DNA, 389 bp, Zea mays
  unsure (1)..(389): unsure at all n locations
accacacactctccaggtataaccttgcaatctaagcaggcatgcctgtcctctgttctcaagaagatgaaatcaatctggctagtggtgtggccactactgaaggtcaccaggtgggatttcctcttcctaaagaaagtgtttgctataagcatgtcataagctanggcaaagttcaagatttcctccccttcttgattcctagtcccaaaggcgaagcctccatgcacaccctcgaaactggtgctaaatgtacccacatggccattgagatctcctcctatgaagagcttctcgccaactggcacactactacctccaggccttcccagaacatcctctttgagttctcattaaggcctacttgangagcatatgcgctgataaca

SEQ ID NO: 9810 - DNA, 210 bp, Zea mays
tcggttcgattgaggtagctgttggccgcgctgggtctttgtccggccgcaactgcgggcctgcggctcgcgattggcgtcgcctcgccggcggattgctggtttcgtctcgtgatgcctcagtggtactacttgttagggtttgctctatggggaactggcctgtatcattgtggtgattctgattcgcatggtttatggacgcttgta

SEQ ID NO: 9811 - DNA, 410 bp, Zea mays
  unsure (1)..(410): unsure at all n locations
gcttatcgtgtaacccctggattctcattctgaactcataccgagttaagccaagacaacgaggtccacgagcattgtgctccttccaattcaaactatcaggctttatttggcttggtatgacaaatcgcaaatataagaggctgctttcaaatacggatccaagatattactttggcacaaaaaggtttgcatagtctgacgaactctgaatccaaaaatgcgtgtgctccttataaaaaaatggaggggttgttatagagcacccatttggcaccttttcagtttttatagaaatattcctgaagagactgattttgatatcgtgaagttagtcttttccagtctgtaagagaaacctttttgtgtgtatgtgtgtnggtggggggtanncgggtggagggtggggg

SEQ ID NO: 9812 - DNA, 210 bp, Zea mays
tggaggcgtttatggggagtctacttgatgtagactcttctttcttctcctcggtcgccttgaatgcgacgggttgcatttcgggtgtggaggaggcgccttgctcgatgattttcttggagcctttgatcatcaattcaaagctcacaaattttcctataacctcctcaggagacattagcttgtatctaggatcaccatgaattaatt

SEQ ID NO: 9813 - DNA, 431 bp, Zea mays
  unsure (1)..(431): unsure at all n locations
agcttcttccggccaccagctccaagaggtatatgctgccagtggcttggcggaagatttggagatcaaccaaagagaatatnttgcttgttttgcggtgaaaacaaaggccataccaccaggatgtgccatgttaccatccaaaagcaaaaggagatagccgaagctgcagcacaacaagctcagccgaagcaggtcatgcatactgcttcgtaccatgtgccttacatcccagaatacgtaggtaaccaccctgcagtttctgttgcttcggcaagtcaacctcaagcttcctggcaacaacctccgcctccaccaccgctgcaacaaggccaacagccagaaaggagccaatatgctccacaccaaagggacttatagagcagtccgaagctcgtacagtcaacagcaccgtgccggagtcanagcac

SEQ ID NO: 9814 - DNA, 210 bp, Zea mays
tgccgcccgcatgcagcagcgccaaatacaaaatattattttaatttatttttttattatatcttttaattaaacgatttaattactaaactaatttcatatttatgtttctaagatttttatgaacaaaactaaaccattgatacttatatatatttgaacatttatttatgtacccttatgttttaatatacacaaccaaacagagtc

SEQ ID NO: 9815 - DNA, 389 bp, Zea mays
  unsure (1)..(389): unsure at all n locations
agcttaaagccatggtaagtagcatatgccaataatatgcgaattgactcaagcctagctacgggtgcataggtttcaccaaaatccaaaccttcgacttgggaatatcccttggccacaagtcgagctttgttccttgtcaccacaccatgctcattttgcttgttgcggaagacccatttggttcctacaacattntgattaagacgtggaactaaatgccatacctcattcctagtgaagntgttgagctcctctagcattgccaccacccaatccgaatcttggagtgcttcctctaccctgtgtggctcaatagaggaaacaaaagagtaatgttcacaaaaatgtgcaacacgagatctagtagttacccccttatgaatgtc

SEQ ID NO: 9816 - DNA, 209 bp, Zea mays
tttttcttcgaagagttttgtcacgtagtttatagaaatatcatgccatgtacagcgtctggggcccgatggctgggagggatgtgggtgagaaaaaataaacctatctctatacaatgtgggcctaaccctgtcttagggatgagtgttgtattaataggcttgagttaactaggcctgacccattacagagaggtgagagagtaatt

SEQ ID NO: 9817 - DNA, 491 bp, Zea mays
  unsure (1)..(491): unsure at all n locations
agctnttcttttcttcggagcagccacctttggctcaaggctagaatttttctttttcgaagctctctcatcttcttctatcattctagcagcttgccttttcataacagagacaactctttttcgctttggcccttctgcacccttgcttaaccgttcatagtcagggtattcaaacttcaaggcatccatcactcagttcagccttcatttcggtggggtacccaaggccgcggtcatcaattgatcttctttcttagtataattgcccaaaatttcattgcacatagcttcaatcatctctaaccattcttggcaaggctctttgaaatgtttcttgaacttgaggtgataaagcagtcgaacaagttcattctttttcttttcttctttaagcttcggcatattccattcctttaacagtggaaatactctattggctgaactattctgcaccaaatctctagtaccaatatgctcagacacaactc

SEQ ID NO: 9818 - DNA, 205 bp, Zea mays
tagaacttcggagacaaaatatactggtgcttgttttttgacctggccatcttgcttctcctgtacaagcaccacactgagtgtagagtgggaggctgctacatataaaagtaatggagcccctagcgaaggtggagttagagttgtcaagtctatcaagtattgctttaactcttcgaaagccttttgctgagccggaccccat

SEQ ID NO: 9819 - DNA, 480 bp, Zea mays
  unsure (1)..(480): unsure at all n locations
agcttagctaaagtaagtggtaagtttaattttggtgttccactgaattctttttaagtattaaggagaattgataagttctcaagttagacttattgtggtggggtttattccttctttccttttcttttattctttttaatgttttggagtgggtttgaactacaagttgcttttataaaattctaaaaattctgaaaaaattacagcggcttggtactggtgtatgtttctctgtcgcaaaatttggggatcagaaagtgaatagttttctctggacaaaattattaaattctatggcagaaagggtgctttgaactacaactaccatttaacagtgggtaattctctaaaacttatttttgcttggctttangtgttattacatgactcgatacaaatttatagtcattaataccttctaatcatttttctatagttttctcaagtttcaagccaaatgggtgctttctactacca

SEQ ID NO: 9820 - DNA, 213 bp, Zea mays
tgagggtcttttcgtttatgatgttgaggcagctgcctccgtccatcaggaccttggtgagcctgacatcgccgacaacggggtcgacgacgagcgggtatttccccgggctcggcacatggtcggggtggtcggcccggtcgaaagtgatgggcttgtcggaccagtctaggtagactggcgccgccaccttcaccgagcagacctcccggc

SEQ ID NO: 9821 - DNA, 479 bp, Zea mays
  unsure (1)..(479): unsure at all n locations
agcttcttcataaggcactcaagcgaaggctcatctatggagtggagcattgttgccggtgttgtggcacaaatgggcgttctgtactacatggtgggaggtatgcaaattctgngaactcgttcaagggtgcagttgcaaagtctatggccattggtgagaggaagtcgacatttttcgcattctgttgaaccacatggggctagcttgtgtgtagctgttcaagatagacgaggttgcatagttgtttgaggaggcaaaggcggttctggagcaagagtgtggcacttctcatcctaatactcttggtgtgtacaacaaccttgctgcaatctataatgccatgggaaggtatatgtcatatnttgttcttctgcaaccttcagtcattattcataatccgtgatcatatatctttctatgatgcaattacagtcctaatctgtagtacagatagatggagtacacagcgacatatt

SEQ ID NO: 9822 - DNA, 215 bp, Zea mays
tgagaagatatttcctcccggcttcttcaatccaatgcatcatttgattcttcatctcccctatgaggcacgaatgggggggcccgtgcagggacgttggtgctatccaatcgagagatgtctaaagactattcgaaagaaatgtagaaataaatgcaaaatcgaggcttccattgcagaggcatacattctagaggaggtctcaaacttcacaa

SEQ ID NO: 9823 - DNA, 493 bp, Zea mays
  unsure (1)..(493): unsure at all n locations
ctgcaagctgaatggttagtttatatttcgtatcttgtttcttgtaagctcctcctgacgtgaacatattaggagatcctgttagccctcccccagaatcaagtacaccacggcttaatagcttgggattagtggatcttgttgtgaatggctctgttattgaaactaaactttcactgtatgggaaggtaaaacattacataaatttcggtaatttttctcaaatgagacctattatactcaagaagcatctgactttcatattgattactgtgtttccccatttatctcactatcgtagctggacagaaagagcagtgattcgcaagagcttctaatgctagagctccttgngaatggagggaaggtaattgttccattcttacttgaagtacctatttcactctgggcccttaaaacttttcatggattctcgttcaatgttatcagatngtatanttaaagctagtcgtanagcaccaatcatacacct

SEQ ID NO: 9824 - DNA, 213 bp, Zea mays
tctaaagggagaacacattttaggattaacaaatgttcattttgagaaagacaggatttgtagcgcatgccaggcaggaaagcaagttggaactcatcatccacacaagaacatcatgacgaccgacaggccgcttgagcaactccacatggatctattcggcccgattgcttacataagcatcggcgggagtaagtattgtcttgtaatagt

SEQ ID NO: 9825 - DNA, 410 bp, Zea mays
agcttatgaagattcttcattccaacatgggctagtcggcggtgccatagccaacccatgttagtcttagcaattaagcaagtgtcgagttcagctctatcaaaatctaccaagtatagctgaccctctagcactcccttaaatgctattgaatcatcacttcttctaaagacagtgacacttatatcagtgaatagacagttgtagcccatttgacataattgcgagacagaaagcaagctgtaatctaaagaatcaacaagaaaaacattggaaatggaatggtcaggagatatagcaattttacccaaacctttgaccaaaccttgatttccatccccgaatgtgatcgctctttgaggatcttggtttttctcatatgaagagaacatctttttcttcccagtcat

SEQ ID NO: 9826 - DNA, 214 bp, Zea mays
tcaggaaccccatacttctggccatctcccaacagacagataattctttgttgtctgggaggcaatacaagaagtcatcttcatctgtgccattaaacactaaggcccctttcgggtacttcagttctcgggcatagtgtttagcttcaaaaatttctttttcagataatctttttcctgaagcgtgtcgaataatataatcaaggacttcaga

SEQ ID NO: 9827 - DNA, 358 bp, Zea mays
  unsure (1)..(358): unsure at all n locations
gtgactgccgctgcagctttgagcatggacatcctaagggtcgttctttcatagatatggacccggctgaaagacgtacccatggcagggccgtaaagatggtcgaaaaagaacttggtctgctatatgacgaagaanaagaaccggaagcggaacgtgaagaggaggaagatgaggatgagatcgaggagtccgattagagttatgtaattntattttaattatcatgtcattttattttaattattatgtactttggaatttttaattcaataaaaaaaatattatgttgtgtgttttctaagcgttgaaataaattcgcgtgaattacttaattctgaaatagaaaagctgacgt

SEQ ID NO: 9828 - DNA, 209 bp, Zea mays
tgtttatttgtaaaaactgcagcaagtgtcaagctcaataagaagaatgttcctaaaaatgaagaaatcaacatgagcttggaaaaaggtaaagattcaattaatcatgttgtttgcactgatcttttctctatgtcatctaagaacaaaaagagaaaagggaaaaggaggtgttttaagtgcaacaagtcaggacacctcatcgcatc

SEQ ID NO: 9829 - DNA, 400 bp, Zea mays
  unsure (1)..(400): unsure at all n locations
gcttcttcaccatgtgatcacagttatcttgagaagttgggcaatgcatttcccttttagttgtgtcaagctcttctttagcctctcattttcttctttgagcttttgatatgaatcatcatttgttcctgcaaattctagctcaaaggaagatttgcttggtgacaaacaacaagcattagcacatggtaatatagtattaatttgaatacatgtgcacgagtgaggttgttgggaatttaagttctctatcacaacctcatgagcaatgtntaatatgatatgattatccataagaatttcatgagaacataaaagcatatcatatttatcttgaanagctagaaatttcaactttagcttttctacttggccttgagcaggtattcctattactaat

SEQ ID NO: 9830 - DNA, 207 bp, Zea mays
tctacgtatatatattttgtattaattacaagatccaactctaacgatctatggttctagatttatcttggtcttgcagtcggggttgccataaggctggcgtccacgccgaggtgagcggtacgggtgctgagtcccaacgggagcgggggaaccatcgtccaggtgacgacgttccgcgcgctcagcccgcagcagggcaatctc

SEQ ID NO: 9831 - DNA, 425 bp, Zea mays
tcatattttggtacaatgaaggtagtatgatgttttggggagcaagaagttatttcatttccccggtttgaattccgggaattaataacttggacttgttgcatggtctggagactttagttttttttttggtagaagttggatttatggagcaagaggtttcttatgagaaccgtacgatttgttggaagcttaaaatacaataatttcaccctactaggcatgtaacatgtttatgattaaaaaaacgaataaactccacccaccatggttgaaatcctggtgatagccgtatctagttgtcctagtcggtgttgagaccaaaaagtgcgtcagtgcgtgcaaccagccaaccactttcaactacactatagtatagtacgataaaatattaatcgacatgcgtgataggactacacgcatgc

SEQ ID NO: 9832 - DNA, 209 bp, Zea mays
ttaaatttattgtagggaggagtgtttcttgtgtttttgtagtagccaaataagcattgaattgataaaacactatttgactcgttgtggttccactaccaccatcgcccactttagtgacccattcatttaggttatccttgggattgataatttcaatagcacttgcctcactaacggcctccaggatacacccttgcttgctctaa

SEQ ID NO: 9833 - DNA, 484 bp, Zea mays
  unsure (1)..(484): unsure at all n locations
gtagcataagcttataatatgcgaattgactcaagcctagctacgggtgcataggtttcaccgaaatccaaaccttcgacttgtgaataccctttggctacgagtcgagctttgttccttgtcaccacaccatgctcatcttgcttgttgcggaagacccatttggttcctacaacatnttggttaggacgtggaactaaatgccagacctcattcctcgtgaaattgttgagctcctcttgcatcgccaccacccaatccgaatcttggagagcttcctctaccctgtgtggctcaatagaggaaacaaaagagtaatgttcacaataatgagcaacccgagatcgagtagttaccctcttatgaatgtcgccgaggatggtgtcgacggagtgatctccgtggattgcttggtggactctcgggtgtgggggcttaggtcttcctcatcctccttttcttgtcattagatctccccctgata

SEQ ID NO: 9834 - DNA, 209 bp, Zea mays
tgctactgttttactagtgtttcgacaaagtttaagtttgccattgtgttttactagtgtttcctgcggatccatgtttcgataaagacaaagcttgacattgtgtttccatagacactcaaattcacatattttagtaattcctgatgagcaattatgatcttggatggatctggtgcgctttagactggcaattttttattcaggaa

SEQ ID NO: 9835 - DNA, 338 bp, Zea mays
  unsure (1)..(338): unsure at all n locations
agcttagcanaagaaatntctagaatcaagaatattgagctcatgccctaagttggtaaaagtttgttcatcaagaggcttggtaaagatatcggctaattgatctttagtattaatgtaagaaatctcgatatcccccttttgttggtgatccctaagaaaatgataccgaatggctatgtgcttagtgcggctatgctcgacgggattgtcggccattttaattgcactctcattatcacatagcaaagggactttggttaatttgtaaccgtagtcccgcagggtttgcctcatccagagtaattgcgcgcaacaatgtcctgcggcaatgtact

SEQ ID NO: 9836 - DNA, 211 bp, Zea mays
tgatttttataatgacatcagcttctcccaaatctttcattttgaaattgctcgatagaagatttttaacttcctcaatcacattgagatttgatccaaagatcaagatgtcatcaacataaaggcacagcataacagactcacccccaccataccgataatacacacatgtgtcagattcatttacaacaaaatcagctgctgtaagagt

SEQ ID NO: 9837 - DNA, 431 bp, Zea mays
  unsure (1)..(431): unsure at all n locations
agcttgngaactatgctcgtatccaatctgcctgagctggaactataagcgcttgccagatgcccccgttccggtcaaccacgaccagcacccaacataagacttccctagttatttagccaagaccagagccatgatagttctcatggtagcactattttcctgngtggtcactccatgttccaattaatatgaaataatcttgattaaccatcgggttaacaacaataaagtaaacttaccatttggaacattaatatcataaacaggagtgactgcataaatttaaagttgtagcaatagcatagctactttgatggatcataatcccaggttaaacaaagagtaaggttggaaaggttaggngtatctaaataggtaacccatcacattatgcatatatatccaagaataaactctattaaatgtat

SEQ ID NO: 9838 - DNA, 205 bp, Zea mays
tcggcccaacaacagagttcttttcggccgccagcgccaaggggcagaggcgccaggggcttcgggggaaggtttggagaccagccaagaaaaatatattgcctattctgtggtgaagataagggccatactaccaggatgtgccatgttaccatctagaagcagaaggaaatagcggaagcagcagcgcaatagagtcagccga

SEQ ID NO: 9839 - DNA, 497 bp, Zea mays
agcttgaagccatggtaagtagcatatgccaataatatacgaattgactcaagcctagctacgggtgcataggtttcaccaaaatccaaaccttcgactagtgaataccccttggccacgagtcgagctttgttccttgtcaccacaccatgctcgtcttgcttgttgcggaagacccacttggttcctacaacattttggttaggacgtggaactaaatgccatacctcgttcctcgtgaagttgttgagctcttcttgcatcgccatcacccaatccgaatcttgtagtgcttcctctaccctgtgtggctcaatagaggaaacaaaagaataatgctcacaaaaatgtgcaacccgagatcgagtagttacccccttatgaatgtcgccgaggatggtgtcgacagagtgatctcgttggattgcttggtggactcttgggtgtggcgtccttaggtggtcatcctccttgtcttgatcttttgcatctccccc

SEQ ID NO: 9840 - DNA, 205 bp, Zea mays
tgtgaaggttcttcatccccacatgtgctaagcggcgatgccacagccagcccatgctagtcttagcaattaagcatgtatctagaccggcctcctcttttgcaaaatcaactaagtaaagtttgccgtctaatacacccttaaaggctaatgaaccatcacttcttctaaagacagacacatctacatttgtgaatagacagtt

SEQ ID NO: 9841 - DNA, 358 bp, Zea mays
  unsure (1)..(358): unsure at all n locations
gagagcacattntaggattaacaaatgttcantttgagaaagacaggatttgtagcgcatgtcatgcagggaagcaagttggagtccatcatccacacaagaacatcatgacgaccgacaggccgcttgagctactccacatggatctattcggcccgattgcttacataagcatcggcgggagtaagtattgtcttgttattgtggatgattattctcgcttcacttgggtattctttntgcagganaaatctcatacccaagagaccttanagggattcttgagacgggctcaaaatgagttcggcttaaggatcaagaaaattataagcgataacgggacggagttcaagaactc

SEQ ID NO: 9842 - DNA, 214 bp, Zea mays
tcagctccatctatgttatggattgcttttgagtcagtccaattaccttcggcccttcttgcagcttcctgacttccatggatagcgatgggtccctgatccgaaggtatcttcatgcaaagataggcaggatgaaggattgcttcgaaggcattgagagtaccacgaccaataattgcattgtaagggtattccatgtcaacaatgtcaaaca

SEQ ID NO: 9843 - DNA, 369 bp, Zea mays
agcttcgcatctctgaactaattcggctgcatcgttcttcttcgtcggccaatagaatcctgacctagaaaccttcccgactagtgttctagatgctgcatgtatcccacattgccctgcatggacttcctctataagttgtttcccggtggacgggagaacgcacttcatgaggatgcctgacgcgccccttctgtacagttcccccccaatgagtgtatagtgagccgactgcctcgcaatgcgctctgccgagtttttgtcgtctggttcttcttcgttctttataaacttaataatcggtcttctccagtcgtcagaatctgactcgagttgatttataatattgcattcttctgtttgatccat

SEQ ID NO: 9844 - DNA, 214 bp, Zea mays
tttaaagggttaacatttgttaggactaaccaatgtctgttttgagaaagacaggccttgtgcaccgtgccaggtagggaagcaggtgggaactaatcatctaggaaaaaaatgtgatgacaacgtcaagaccactagaactcctccacatggatctcttcgggcctgttgcttatcttagcatcgggggaagtaagtatggacttgttattgt

SEQ ID NO: 9845 - DNA, 499 bp, Zea mays
  unsure (1)..(499): unsure at all n locations
atcctctcagtcacctgcggcatgcaagcttacacagtaacacgggtgccaatctttccaagtctgtctccacagtccaagaataactctttgcacaaagctgacggaagaaatatctcaactctgaaagcgctagccataaatgctcaaggacatagcctcgaaccatctcaagaagaatccgttccatccatatgtggaagtcatgactcttcatccctaagactcgcatagtacataagttcaccccctactcaagttagctgcatacccatcagggaacatcaacatcttgatccactgaagtacttccttcctctgggccctgcttaagacgaaatcggccttaagccttctccatgtcnttccaccacttggcggcttcatctgttgggttggctatcacataacgctgccagatccactcttgcctttatgtatcctttgaccatcaagaatgtcataattagtagccacagtgcctcgacaacattctttt

SEQ ID NO: 9846 - DNA, 215 bp, Zea mays
tcagctccatttatgttatggattgcttttgagtctgtccaatttccttcggcccttctggcagcttcctcacttccatgaatagcaatgggcccttggtccgaaggtatcttcatgcaaagataggctggatgaaggattgcttcgaaggcattgagagtaccacgaccaatgattgcattgtaagggtattccatatcaacaatatcaaatac

SEQ ID NO: 9847 - DNA, 119 bp, Zea mays
cgccggaccttagcacgcgctgcgcttggacttccgatcttctggtaaggcttcttgagagggtaatgaaaggagctaagggggatacttattggactatggtttaagaaacttttaaa

SEQ ID NO: 9848 - DNA, 214 bp, Zea mays
tggcaaaagctctacatacttttataatcaccaagaattgattctatgctgaactgaatcaaacaattcagttttcgaaatctgttctgtcagtggatagaatacaataaccagtttgtaaaattcataactcctaatctgtcaggactatggttatgaaattttaacacaagcaagataagaaaagcatctataactttcttataacgaccat

SEQ ID NO: 9849 - DNA, 462 bp, Zea mays
  unsure (1)..(462): unsure at all n locations
agctntcactgcataatcggaacatcctgcgcgtaattgggcctattaggcgtgacagatgatagagcgccaaccagatcagaggcctaaaaactagcgagagacaatccctgtaacaatccttgctcgagctaacgcaaggcatccggtacgttataagaacatccaacccgtgtacaaggcctaattatgcaaatattaagtacatccttggtgaaaaaggacaaaccgtgatggatcagatctactgggtggaacggagcaaggcgttgtcctcgcactatagaacgtgcacgaagacggctatgcattcacagtcgacaaacaacgtatgtacacggtggaactaccgataatactccataaatgcctacgataactagttgcttctcaccataaaacgctttagtacgagaaaagcatatgatgtaatgaataagaacaacaacaccctgatcgtgt

SEQ ID NO: 9850 - DNA, 215 bp, Zea mays
taaataaccttgcaggtttatgcatccgggggcacaagctggattattgacagcggatgcacaaaccacatgacgggggagaagaagatgttcacctcatacgtcaagaacaaggattcccatgacacgatcatatttggagatgggaatcaaggaaaggtcaaaggtttgggtaaaataagcatcactaccgagcattcaatttctaatgtgtt

SEQ ID NO: 9851 - DNA, 504 bp, Zea mays
  unsure (1)..(504): unsure at all n locations
ggatcttaagtcacctgcggcatgcagcttctgaacatacatgaataggtgtactaaacataaccctggggtaaggaacagtatcacaaccaatttggctgctacagcttcggctcccggtctaggtcaagctgccccgtgccgacctttctaaagaggtggcctgacgactggatgacggaatggttttacgtgaagaatgacttgaaatcatgagaagatataaagaagatcattatgcgtcccatctggcaaagcttcggcctgcgaaggccgaaagtggaaatgaatgaagcagccgaagaatgccagagagccttcggagttanttgctcttttattgngacgagaggattggtccaagagcacattgccttcatagtatggccacttgtggaaaaatgggatgccgcaggagaccattaaagagactgacgaaggtggactantcaggctganatacacatttaagtttggagataaattcttgagccgatgatgact

SEQ ID NO: 9852 - DNA, 210 bp, Zea mays
tggtttatttttttgaagtgatgaagctgaagacactgcttatgaaaaagcttaaagagatttttgaattaaccatgtaaaaaatattgtaatttaggaatcaaacactactctgtaaatttgtccataccttgtaatatatttttacctttccatctgtgtatgaactgcttggatgtggacgaaacttgtattttttgagccgaaggc

SEQ ID NO: 9853 - DNA, 274 bp, Zea mays
cactgaaataaagcttatgcagtaatgggtttagactgaaagccatggaagctggtgaaaagcatttccttgagcttcggccacgaagtgactgtccttaaccgaagtgatgagtatcaagtctatgccacacttcggacagccatgacgaaagacttcgccatgactactgagttaccatcatacgagaatatggtagcttcgtaactcatgaggaactgcttcgggtcagtcaggccatcatacataggcaatgtatgaagcatgtacaatg

SEQ ID NO: 9854 - DNA, 210 bp, Zea mays
ttagctccatctatattatggattgcttttgaatttgtccaatttccttaggcccttctggcagcttcctgacttccatgaatagcaatgggcccttggtccaaaggtatcttcatgcaaagataagctggatgaagaattgcttcgaaggcattaagagtaccacgaccaatgattgcattgtaagggtattccatgtcaacaatatca

SEQ ID NO: 9855 - DNA, 384 bp, Zea mays
cttaatcactgggcatgcactggcatttattgctactgtcctcatgttgtgatcagaacaaggacaagaggagaagaaaaaactataaagcctaagcgaggccatctagcaaagaggggattctgattgctctcttccactccacaatgaaggactcccgccaccgcttaacaaatcgaccctcttcccaagagcgtacacatccttatggaagggagaagaaggatgtctcaaacttacttatcttttcagtaggacaattatgataggataaaatatattatgttgttaagcctaataaaccagtgacaaataatgaatgtgatcctgaatgaaaaaatctttaaaacaaaaattgtgataaaaatataattgagagccaaa

SEQ ID NO: 9856 - DNA, 212 bp, Zea mays
cctttatttaatggacgcgaaaagtgccttcctcaatggaccaatcaaggaagagggctatgttgagcaacctcccgggtttgaagatagtgagtaccctaatcatgtttacaaactctctaaggcgcattatacgctcaagcaatccccaagagcatggtatgaatgccaaacagatttacttatcactaatggcttccaagtcggcaaag

SEQ ID NO: 9857 - DNA, 312 bp, Zea mays
  unsure (1)..(312): unsure at all n locations
atactttaatgttnataattggcccaagccatgagtctacaattttcatactcttttccccattttcttgaattttgtttataaggctcaattaggggttttgttggggttgcacattttgccttttataaaagcccatttgttttgaacatgatgcttttaagtataagcttagtgggttctttattcttaaatcaacttgatgttcatgctcaattttggttcacataagatgatggttcttgggttatcactttgagaaaaaccctatgtgacacggnggtgtcacagccttcctcccataaaagaatc

SEQ ID NO: 9858 - DNA, 210 bp, Zea mays
tgtgaagattcttcatcccaacgtgggccagtcggcgatgctagagccaacccatgttagtcttagcaattaagcaagtgttgagttcagctctattaaaatcaactaagtacagctgaccctctaacactcccttaaatgctactgaatcatcacttcttctaaatacagtaacacctgtgtccgtaaaaagacagttgtaacccattt

SEQ ID NO: 9859 - DNA, 444 bp, Zea mays
  unsure (1)..(444): unsure at all n locations
agctagtcaatacttatcanaacagcagcatctactatcacaacaactgcaaaccatacatgtgacatgagccattgcatgctanggactggatatgattggacccttaaagaaagctcaagggggatacactcatgtactggttgctattgacaaattcactaagtggatagagtacaagcccatcgcttctctaactntggctaaggcagtggaattcatacaggacataatattcaggttcggaataccgaatagcatcataaccgacctgngatccaatttcacaagcttagagttcttcgatttctgtgaacaaaaaagcattcaaatcanatatgcctcgatggcgtacccaagagccaacgggcaagtagaaagagccaacgagatgatattggaagcactcagaaagaaagtcttcgacaagaatgaaaaagtcac

SEQ ID NO: 9860 - DNA, 211 bp, Zea mays
tgagagtgacttgctgaagcagcagaagtcgtaggctattgattgcctacgtattctaggatatatggagagtagcacgaagtagtatgcagaacctgcttcggctgattctatcgtgcctcggcttcagcaatttccttttgcttttggatcgtgacctggcacgtcctcgttgtgtgtcccttgtcctcgccacagaaaaggcagaaaa

SEQ ID NO: 9861 - DNA, 360 bp, Zea mays
agctatggtcatttatagctaactgtcccgacaatgatagtgaccaggatcaagggaacaagagggagaagaagaagaactataagaaggcaaagggcgaggcacatcttggcaaggagtgggattcggattgctcctcgtccgactccgacaatgaaagactcgccgccaccgccttcaacaagtcatccctcttccccaatgagcgtcacacatgccttatggcaagggagaagaaggtatgtactcgaaactctacttatgcttcttcaagtgaggatgaatctagtgatgaggatgaaatagattattcatgtttatttaagggcctagatagaaccaaggtagataaaattaatg

SEQ ID NO: 9862 - DNA, 204 bp, Zea mays
ttaggtggcacatggattcccagaggtaagaactccgtagagaggcagcaactatctgagcccttgaccccttgcgtacaacagggagtacttgtctgaaatcacccccgaacacaacagtcctcccaccaaagggcagcccaggccgtcccattatatcacgcatgctattgtctagcgcctcaattgcttgtctcttagtca

SEQ ID NO: 9863 - DNA, 456 bp, Zea mays
  unsure (1)..(456): unsure at all n locations
agcttgtcaatacttatcaaagcagcaacatttaccagcacaacaactgcaaaccatacctgtaacaaggccattcgcgtgctgtggactggatatggttggacccttcaaaaaagctcaaggaggatacactcatgtactggttgctattgacaaattcactaagtggatagagtacaagcccatcacttctctaacttcggctaaggcagtggaattcatacaagacataatattcaggttcggaataccgaatagcatcataactgacctgngatccaatttcactagttcagagttctttgatttctgcgaacaaaaaagcatccagatcaagtatgcatcagtggcacacccaagagccaacgggcaagtagaaagagccaacggaatgatattggaagcactcagaaagaaagtcttcgacaagaatgaaaagtcacangaaaatggatc

SEQ ID NO: 9864 - DNA, 205 bp, Zea mays
tgtgaagattcttcatcccaacatgggctagtcggcgatgccaaagccaacccatattagtcttagcaattaagcaagtattgagttcagtgttgttaaaatcaactaagtatagctgaccctctaatactccattaaatgctactgaatcatcacttcttctaaagacagtaacacctacatctgtaaatagacagttgtagcc

SEQ ID NO: 9865 - DNA, 457 bp, Zea mays
  unsure (1)..(457): unsure at all n locations
agctnngacaacaccattgacattntacataaaatttctgagatcaagaatatttagttcattcctcaacatgcaaaagcgggtcttatcaagtggcttagtgaaaatatccgctaattgatcttccgacctcactccttctaaaatgatatctcctttagcaacatgatctctaaggaagtgatgacggatatcaatgtgcttggtgcgagagtgttgtacagggttattagcaattttaacagcactctcattatcacacaacanaggtaccttttctagaactacgccatagtctagaagagtttgtttcatatataaaatttgtgtgcaacaagcacctgcggcaatgtattctgcttcagcagttgacaaggcaacactatttngctttttggatgtccatgaaactagtgatctaccaagcagatggcatcccccagaagtacttttccta

SEQ ID NO: 9866 - DNA, 213 bp, Zea mays
  unsure (1)..(213): unsure at all n locations
tatgctttcatcagattgctatattgntgctttgatttccgtatgcagtatctcatgtgttgctacctttacgatgcaggcgggtttttggtcgcagttatttactaagtaagacaccttgcggtgaccattaaagagtaaccaatcaccctgggtaggtcaatttttatctgcaagaactgatgaggccgcttggtaggagtaaatcgcttt

SEQ ID NO: 9867 - DNA, 460 bp, Zea mays
  unsure (1)..(460): unsure at all n locations
agcttgtagactaacatctcatgcataatatagcatcaagagcacatagatgaactgattagcaagcttaagaccattgaggtagtgaaaataagatatatccatggcttaacaaagcatatatatgtcgagcaaataaaaaaataactgcaaagctggcattattcatgtagtatatggaagtgcaaaggacgacacacaaaatggaaagagattacattactgaagaattaagacatccgtgaaaggcatggtcctgtgcaactaanaaaagacactcgcttgatatatagacctaatatgtagtacttcgttntgcaaatatttgcccattatcttgngagatgccatatcaaagagactacaatttaattaatttctagttctctatccatactctaataacattgtgaaagagaacaaaatattgcagcgtgccacattgatacagtgataaaat

SEQ ID NO: 9868 - DNA, 215 bp, Zea mays
ttgccaaatttggcgcataattacacctttaatatcttcccgtgtttcaaggtcattcttcacataaaaccattctgtcatccagtcgccgggccatctcttccgaaaggttggcacgggacagcttgacctagaccgagagacgaaactgtagcagccgaaattattgtgatactgctccttaccccagggttttgtctcgtatgacaattcgt

SEQ ID NO: 9869 - DNA, 451 bp, Zea mays
  unsure (1)..(451): unsure at all n locations
agctagtcaagcatatttgagacccatctctagatgggtccatcaaagttagtcaacaaagatctaggaacccaaacgtcctttgtgttagcactangtaaactcattacctttctagcacaagttggcaatttgggttgcctagtttcatgagaattaattgacaagctaggagtgggagatttaccaatgggacaatccttgcattgatgtcccttctttcggcatatgtagcacaggcgatcttcaagttttgaagatttcttctttccttgtctcttgcttgctacatggntagagagtgttttcttttctaaccctatgcctttttgtntaaatanggacaagaactaattaagtgtcccttctttgagcatttaaaacaaagttatcatccttggtaataatcaaggcattttaatatatggacatgacctaatcgagtgtccct

SEQ ID NO: 9870 - DNA, 215 bp, Zea mays
tctaaagggattaacttgtgataggtttgactaacgtgcaattcgaaaaagatagaccttgtgcagcttgtcaagcaggtaaacaagtgggaggagcgcatcacagcaagaatgtgatgaccacatcaagacccctggagctgctacatatggacctcttcggacccgtcgcctatctaagcataggaggaagtaagtatggtctagttattgtt

SEQ ID NO: 9871 - DNA, 372 bp, Zea mays
  unsure (1)..(372): unsure at all n locations
agcttcatggtctagaggtagtggagtagtttccacacaccatgtaagtctcgctgggtattagtatactcatccttgcttgtggcataattnttcagttacctctattgatggttcggttgttgtgtgacttgactaagttatctaacacatgaggatgattgattaagcgcttgtgggctcagccttctctctaagtatctcatctctattctatctgaggattgtcacataagctagtaatatatttgaacttatggttttaactctattcatcaaagttatatcgttttcaaaatagatttgtattcactttcaaattattaatgggtaatttattataatattattnttgctgcacaactcatgtat

SEQ ID NO: 9872 - DNA, 215 bp, Zea mays
tgcaggacgttttcctcgtacttgagacgacggtgcagtcagtccccgacgtgacttcatcgccgctcatcgaccgaaaggtaccgaccgattcccatcctgcgtcatttggattcagcctcaacccgcctagcggcctcgctttggcggacgctctcgtagaggcgagtccaaaccctctggggttccgcgtgcggtctccttgggaccggctg

SEQ ID NO: 9873 - DNA, 433 bp, Zea mays
gcaagctctccatgaacagctaaacatgcaatttttactttttctatggaatcattgtggaaaacaaaaggcacatgcaattcctattttactattgtcggggaccataattaggggtaccctccagacgcctaattctcagctggtaacccccatcagcataaagctgcagaggcctgatgggtgcgattaagtcagggatcagtccatacgagcgactcgatcacgcctcgcccgagcctagcctcgggcaagggcagccgaccccgaagggttttcgtctcgcccgaggcccccctttttaacagcggacacatatacggctcgcccgaagcttgccttcgctaagaagcaaccctgactaaatcgccgcgccgaccgaccgagtcgtatgagcatttaacgcacaagtagcctgacacctttatcctga

SEQ ID NO: 9874 - DNA, 208 bp, Zea mays
cgcgtatgtttttcatccctacatgtgctaagcggggatgccacagccagcccatgctggtcttagctattaagcatgcatctagaccggcctcttcttttgcaaaatcaactaagtaaaggttgtcgtctagtacacccttaaaagctaatgaaccatcacttcttctaaagacagacacatgtacatttgtaaatagacaattata

SEQ ID NO: 9875 - DNA, 430 bp, Zea mays
  unsure (1)..(430): unsure at all n locations
agcttatcacattatntagaagccatgggtatagtttggtttgatntggaccntgtntgatcactaaacccagaacactccctcctgctccatgaactcctttaccgactccggaaaccctaagttcccggaaccccgtgaaggcaagctgtattcaagacataaataataagtttatgttgtctttgcatcctcatgagcatcccatggcatccattcttatacatatgtatggttatgattagaacgagaagaagaggtagaagtaactgaagagcaagtacaaccacctgtggacactcaggccgggaatagatcctactttgacatttgtggatccgagcctgaatcacctgtaaacgaagggcaaccgcggtgcatgcaacctcttgtcttgaggttgtaaatactttgcgcacactcaagtcta

SEQ ID NO: 9876 - DNA, 210 bp, Zea mays
tctatagggttagcacattttaggactaaccaatgttcattttgagaaagacagggtttgtagcgcatgccaagcgggaaagcaagttggtgcccatcatccacacaagaacatcatgacgaccgacaggccgcttgagctactccacatggatttattcggcccgattgcctacataagcatcggcgggagtaagtattgtcttgtaat

SEQ ID NO: 9877 - DNA, 448 bp, Zea mays
gatcattaagtgacctgcggcatgcaagcttgacaatgaggaaacggcgctcgttatctatagtcttcgccaaatcctcaagcaaaggagagggaaagactacaagtcccgctccaagaaagtttgctacaagtgtggtaagcccggtcactttattgcaaaatgtccattatcaagtgacagtgacacgggcgatgactagaaggggagaagaaaggacaagaggtactacgagaagaagggcggcgatgcccatgtttgtcgggagtgtgatttcgacgagagctcaagcgactccttcgactacgagaacgccgccaacatgcgcgtcaccaaagggcttctcttccccaacgtcggtcacaagtgcctcatggcataagacggcaaacggaaaaagggtaaatctaactccttcactacatatgaatcttctagtgatgataat

SEQ ID NO: 9878 - DNA, 209 bp, Zea mays
tgatttagttttatgataaggaggttgctggaagtagccaacataagatatacgagcagcatctagagttatattggcgttcttctattgcttaaagacaattttgtagaggcctcataaacaaattaaatagctcttctaatctgagaataagtaatcacattcacattgaactaaattaaatagttaatcatatggataaaaaatat

SEQ ID NO: 9879 - DNA, 488 bp, Zea mays
  unsure (1)..(488): unsure at all n locations
gcttctggtagatccctccaaccagtttgtctgataaatacttataggcttacaatttataaatagaaaggttatgaagtaagcaccgtactacatttctcttacttaccaagttggaaagtgcattatcaagataatctaatcgagaaagatctagagattcatctgaataaatgacaattaaatcattcttatctgcaaagtaaatgatggataaaagaaatatgtcaacaacaacaagataagaacccacaagtggggcatccaggatcagaagcaaaaatccacaataagaagctgctagatagtcagttaaacctggtaagcctgtgtcactgtanttggcaccttcaatcctaggtttgaaaatgtngctgccttcagatacgacgctctggaatgagactgatacacctgcagtaggggaaaattagttgctagattagtgatttataccactggtacggttgatggtccggccttggact

SEQ ID NO: 9880 - DNA, 211 bp, Zea mays
tcagtccgttttacttcagcttcgtcatcctgcacacattaaaaagcagaataagaaaggtgcaaatttcaaggagaaggtaaaagtaacaaatataagcttctcaccggcttaaggtggcttcgagcttcgtcaccagccatttttcgcccgccatttacccaaatctgggtcataaatctatttccgatgcttcgggctaggcttggga

SEQ ID NO: 9881 - DNA, 271 bp, Zea mays
tcttcatccccacatgtgctaagcggcgatgccacagccaacccatgctagtcttagcaattaagcatgcatctagaccggcctcctcttttgcaaaatcaactaagtaaaggttgtcgtctaatacacccttaaaagctagtgaaccatcacttcttctaaagacagacacatctacatttgtgaatagacaattatatcccatattggataattgactaacagataacaaattatatcccagagactcaacttaaaacacattagatat

SEQ ID NO: 9882 - DNA, 210 bp, Zea mays
ttagatagaaagggtgactggtatggatcatatatgagcttgcatgtaacaggttactaaaaacttacatctatttcgtatctagtcaatctgcaattttaatatgtgaaccatttacttacaaaatgaaacttttgtaatctaagtattaatcatttggcaagttaggaagtaagccatcaaagtcattgtctgatgaggatgactttt

SEQ ID NO: 9883 - DNA, 368 bp, Zea mays
  unsure (1)..(368): unsure at all n locations
agctntggaatagaacagataaagtcaagaattcattttatctgggaaatatcaccatataactagcgtttgatgaagcaaatgaagataactgcttggcaagaacgaaacaatactagtatccgcctaagatccatcttcaacaacagatattactgctctcatacgaagaaatcatgaggagtagagaggatacaacaggtctctacaagatcttcatatttctatcacaaattatcatcactagtagtctagtggtcaagacatatggctcttctggctccgaagaccatgaacatattaatgtctaatttagcttcaagctctgtggtgatgtgggaattcatagtatttgctactcttctcac

SEQ ID NO: 9884 - DNA, 205 bp, Zea mays
tgtgaagatttttcatcccaacatgggctagtcagcggtgccagagccaacccatgttagtcttagcaattaagcaagtgtcgagttcagctctatcaaaatctaccaagtatagctgaccctctaacactcccttaaatgctattgaatcatcacttcttctaaagacagtgacacctatatcagtgaatagacagttgtagcc

SEQ ID NO: 9885 - DNA, 419 bp, Zea mays
  unsure (1)..(419): unsure at all n locations
agcttaagtacgcccccnctgaatggatcgatcaatttgaaatcatgtttcaccatgtggctgttgatggatcatctgcatgtattcctggagagcagattttcaataaaggtggttgtggtgacaaacaagatgtcgatggcagacaaagagttgggcaaagcagcatatgtgctaccagtccacagaagaaaacaaagagccctatggtgaggatcatgaagggaatatgggagacaatgcaaaagaacgcagcggccacacagaaggcagtggatggtgatgtgcaatcagattcgatcaaaaaagccatgtccttggttgtagagtgcggagcaccagaggggagtgcagagcatttcatggccagccagctgtttgcgaaatcagcctatcgtgacgatctttttaccttaaca

SEQ ID NO: 9886 - DNA, 205 bp, Zea mays
tcatacttggctgcattgttagaggccgggaatagcaattggagggtgtacttgaggtgttcgcctccaggtgcggtgaagagaatccctgctcctgctccctgcagcttcagcgagccatcaaaatacattcgccatacttctgcagtttctggattatctggtacttgctgttctgtccattctgatacgaaatcaaccagtg

SEQ ID NO: 9887 - DNA, 394 bp, Zea mays
  unsure (1)..(394): unsure at all n locations
agctntanggtaaaagtcattaaatgaccncaacaataaagttgaatcactnttatacccctgagataccagaaaccctaattgaaaccctcgaaaaccctgaaaccaaaccctagggacctaagtgtaaaattagtccacttttgggctaaagtgcaaaaaccaagtcaaataagtactttaagttatttgggtcacttatatgagaatttgcaatccaaaacttgagatttggacttaagtgcaaaagtgccccacttaacctttttggattaagtctggatntagtgacattggctcaactntggggctttgtaacttacaaagtatagggtttttaccctaggtcaccacatcaaagttgaagacccattataggagaacaactttgctt

SEQ ID NO: 9888 - DNA, 215 bp, Zea mays
tctgaagggagagcacattttaggattaacaaatgttcattttgagaaagacagaatttgtagcacatgccaggcagggaagcaagttggagtccatcacccacacaagaacataatgacgactgacaggccactggagctcctacacatggatctattcggcccgatcgcttacataagcatcggcgggagtaagtactgtctagttattgtgg

SEQ ID NO: 9889 - DNA, 456 bp, Zea mays
  unsure (1)..(456): unsure at all n locations
agcttatgtccgacggctntggccgtcggaagttgtttcgtttactgtagtgtccgcttgagattntaaagacattntctgctgatcaatagaagaagttgtttgctacttcagatgatcttctatcgtcctatgagactcttaccgtgcttataagttctggttggatgaggatgtgcgtgcttatgctattcttgctgctatggaagatccacttgctgctgatattgttgagtttgagtttgcacatcatatgtggactttctgtcacacccggatttaaggacaaatgtcacacccggatttaagggtaaatccgggcgcgaatcanatgtatgctaggatcaagtctcacacatatgatgactcatgatacacaaacgaatggtcaatgtttacaatataatggagttctatacaaaatagctggatagttacatcttaagaagacacgat

SEQ ID NO: 9890 - DNA, 214 bp, Zea mays
tgtgatgagataacttggctcgatcattaaccctgggatatggcacttaccctggggataaaagcatgcgggtgtgtgaaaaaacaattggagaatgatctcgagggttaggggagatgttcaaagcagactaaccttaaagagtgtgagtggcacatataccctaaaacacttaacaccctagtagagaccctaaaaatcctttattaatgct

SEQ ID NO: 9891 - DNA, 393 bp, Zea mays
  unsure (1)..(393): unsure at all n locations
agcttgccanaatgaatgaagatcttgaagttacatatgcataacaagaaataagtgaatggacaagctcaaggttgcagaagaatgtggaggagcttcatgaatccaaggaaagatgctatgaaaaatccttggattgcgcaaagaaactgaaagacagttttgcaaaggtgggtgcatactcattggagcaaaaatttattcgaggtgatcttgaaagagtcattcaatggatcggcgaagaagttgaagtttttgaagaaatacttagtggccgtggagatttctgtgccttcgtcggtgcccgagtggttgcagcagttttggagaaaactggctgtgaacatgttaaagctgcagcccaagaagaagtcatcttctccatagatgata

SEQ ID NO: 9892 - DNA, 214 bp, Zea mays
tctgcaagcactggatttactaggcaccggaatatcacgacttccacggaccgtttgcctactaacgcagctgaagtacctatacggtgatgcatgcacgatagtgcccaatggtttcctcgggaaggtgacgtcactggaagagttgcatatacatcctcctagcgaaggtgacgagtacaaccaacaacagtttatgcaggatttgggcacc

SEQ ID NO: 9893 - DNA, 347 bp, Zea mays
  unsure (1)..(347): unsure at all n locations
agcttcctggaggccatcanaacagcatacagtactttctctaattctgtataattnttctttgataaactaagaacttcggatacgaaatatattggagcatgtttcttgacttggccttcaaacttctcctagacaagtgctgcacttaccgctgagtgcgaagctgccacatataataacaaaggagcccctggcgttggtggacttaatgttgttagatctatcaaatattgcttcagctcttcgaaagatatcttctagattggtccccattgaaagacttcggctgacttcagcacttggaagaatggtaagtttctctctgctgatctggatatgaatct

SEQ ID NO: 9894 - DNA, 214 bp, Zea mays
tgctcctggttttcttcttggacagtttcttgctcgaggatgagcacgtactctccgtcagcgagattacaatctaatgaatgcaatgagtaagatacatgcatgatatgatatgtgctttagcaattaaacttttgatggtgaatgatccacttaaattagatagatttttggtggtatactcagtaatttagatcacactcagttaaactaa

SEQ ID NO: 9895 - DNA, 425 bp, Zea mays
  unsure (1)..(425): unsure at all n locations
agctaggcatccttcatcccgaaccgcttgagcaagtcttgcgtgtacttcattagtgagaagaaggtgccatcgntgagttgcttcacttggaacccaaggaagtagtttaactcgcccatcatcgacatctcaaatttctgtgtcatcaccctgctaaactcctcacaagacttttggttagtagaaccaaatattatgtcatcgacataaatttggcacacaaatatgtcaccatcacaagtcttagtgaaaagagttggatcggcttttccaaccttganagcattagcaattagaagatctctaaagcattcataccatgctcttggagcttgttaagtccatagagcgccttatagagcttacacacatggtctgggtaccattcatgctcaaaagcagagggtttgctcacatacacc

SEQ ID NO: 9896 - DNA, 214 bp, Zea mays
tctgtccttgaatttcatggatgctactaggtttccatcccaattttcgcaggccaaagcacaacagaaatttacagtggaatcagttcttcagctccagctgtacacgatccatatgccataccataaacaatgtgccgcacagtatgggagcaaccgcaggaatccagcataaatggtcaggcctccagctatacaaaaaaagcttcatctc

SEQ ID NO: 9897 - DNA, 383 bp, Zea mays
  unsure (1)..(383): unsure at all n locations
ttaagtcacctgcggcatgcagcttgatggagtccaaggtttcaattttctcttttgtaactaatatccatatatatctattcgataacattgtaccatctgctattcctaggaaatcgctgccgacgaagagttggttaaaagggctggtacatatcttatagacatagtgatcccaaaaattgttcacgatctatgctcccttgatatctcccctatggatggacagactntaaccgatgcattgcatcttcatgggataaatattaagtatctgggcaaggtgagtctatatgtggaccagcttanattgacattacagttcatctggtttagttcatatatgattcttgttttagactgcacgcatggtcaaacattta

SEQ ID NO: 9898 - DNA, 211 bp, Zea mays
tctaaagggtttaacacgtgataggtttgactaacgtgcatttcgaaaaagatagaccttgtgcagcttgtcaagcaggtaaacaagtgggaggagcgcatcacagcaagaacgtgatgaccacttcaagacccctggagctgctgcatatggacctcttcggacctgccgcctatctgagcataggagggagtaagtatggtttagttat

SEQ ID NO: 9899 - DNA, 422 bp, Zea mays
  unsure (1)..(422): unsure at all n locations
atgatccccacgtttagctcttccatttcttgacacanagtgttcttgaaggtcttcgccataagacagtggcaggaagttttacgactcaacgcatctgccaccacattggccttgcctgggtgataatggatctccagttcataatctttaatgagctcaagccatcgtctttgcctcatatttaactctgattgggtgaagatgtactttaaacttttatgatctgtatatataacagatattacccagcagatagtgacgccaaatctttagggcatgaaccacagcagctagctccagatcatgagttggatagtgctcctcatgccggcgcaactgccttgaagcatacgcaatcactcggncctcttgatcagtacacagccgagcccattgccatatgcatcacaatatacgtc

SEQ ID NO: 9900 - DNA, 210 bp, Zea mays
tgagcattattctagcgagtgcgaggagagaaagtagaagcctaataataaatccgcaaacatgattgaggctgatggaggtatggtaatttactgcctacatttcttccagtttgtcattcatctgattggtagattgacacaaattttaatatttatctgtgtgttgatattttttgtttccttcttattcgatacgagaactttctc

SEQ ID NO: 9901 - DNA, 496 bp, Zea mays
agcttatgaaagttcttcattccaacatgttttattctatagtgccagagccagcccaaggtagtcttagcaattaaacgtgcatctagatcgacattctctttagtaaaatcaactaaatagagcttgtcgtctaatacacctctaaaagctaatgacccatcacttcttctaaagacagatacatcaatatttgaaaataagcaattacaccccatatggcataattgacttacagaaagcaaattataaccaagcgattccactaagaaaacattagagattgaatgatcggtagtgatggcttatttaccaaacccttggacattaccacgaatccgatctccaaagataatcgtaaattgagaatccttgttcttgacgtaggaggttgtaacaccctatatcccgtcattgaaaataacgtagtttatattatatattctagtagaaagaacacaatatgtttcaagtatgaaatggtgattcttattga

SEQ ID NO: 9902 - DNA, 211 bp, Zea mays
ttgttttggttcagactaatacccgaataagataacacgcaatgggcatggagagatggcgagagtagcgtgtaccctccgtggcaagaggctggacggtggtgtatctatgctctcggttggcgtgaacctgatctcgtcttaagaacctcggtggtgagttgacatatgcaagggttaagtgctacatatgtcgtgtggttagagatcc

SEQ ID NO: 9903 - DNA, 421 bp, Zea mays
agcttctccaccatgtcgctgctagccaagtagttttagctacctccatcaatgatcaaacgacatgaacgctccttaatgacacactctgtttgaaacaacgtatgtcgctgattctgctctgccttctccatttgtgcactaagcacacgctgtacaatgaggctctcataatgctctgcatcatctgcaccaatctgttcttcgggtggttccttagtgcctacatcatcagccgcaagcaaagcaagtgtagcttcatccaaatcactagcagaggaatacccaccatcgtcttttaccaccaaaacacgctgattaagacaataacgctgcacgtgtccatagcccttgcatcgataacacagaacatctcttgttctacctgtggaagctactgaagaggcactacctgcgggtt

SEQ ID NO: 9904 - DNA, 211 bp, Zea mays
tcatttcaactgctgctagaaatgagaggtgaactgcgttcctctatctgacactatcttctttggcacaccatgaagacaaacgatccgagacatatacaactctgctaatactgcactgctgtagttggtcttgacaggtatgaagtgggctgatttggtcaagcggtccactactacccagatggaatcgtagccggctcgagtgcga

SEQ ID NO: 9905 - DNA, 407 bp, Zea mays
tctgagtcacctgcggcatgcaagcttcggtttagatctgaacacacaagggtatcatatgatgagtctatagaaattagattgttttttcagcgatgttcactcttggtatcagctaagcgctctggcgcgcggagatccctgcaatttcgaacgttctatgtatggaaatccgcggagccgagaggccggattccactctcattggcgaatctaccaaatttagggtggctagtagatatactagccgatgtttatcacctcctagagcaggtctaagcggcgaagctagcagctaaaccaccgaactatcgaagatttacctcacgaggaggagcagatctgcatgggacgacgagacctgtgtgtcggtcgcgcggagagcgcaactcggctcggatccggga

SEQ ID NO: 9906 - DNA, 211 bp, Zea mays
tcatataggtttgaagttttattctgaatgcattgattacctattacaacacagatgcttttgaggatgcttcaagcttactacaatcatgtccgagcatttgaggataccttactgacaaagttctttggcctacattgcgtgaagtctggatcacaccaaaagaaggttagaaaactatattgttgcctgttgcattctcatcacttat

SEQ ID NO: 9907 - DNA, 325 bp, Zea mays
agctggagccgaggcattgccgcaccggagaggcggtttcaccctcgccagacttcggtcttccgccgccgtgcgtggaccgagctaaccagtaagtctttctccaattccttgcacccacgtcttccctagcatcctgtgaagctctctgacccgttcaattgacctatcgcgccgtgagtaggccggattcctcgccgccgacgagcatctccgcctgcgcacgtggaccggccgactctgaccatccccgatggcgacccgcacatcgccgtaatcctcgagacctcccctacgtcctcaaccacctcaccagagcaacctc

SEQ ID NO: 9908 - DNA, 205 bp, Zea mays
tgagcagtgaccggcttcgtctggaacccttagaagctggtgatgagcatgttcttcaacttttgccacgatgtaattgttcctggacgaagagaagagtaccaggtttgtgtaacatttttgactgccatgacgaaggatttcgccatgactgcagtattgccaccatatgaagatatggttgcttcgtagctcatcagaaatt

SEQ ID NO: 9909 - DNA, 443 bp, Zea mays
  unsure (1)..(443): unsure at all n locations
agcttnctncagcattcttgagcctttctggcatcctaaagtaacaataggttccactaggagttatgaagcttgtctttggcccatcctccttcttcatccatatttgatgatagcctgagtagcagaccaataagctcatgagctccgaagtagctgctgcatcgataagggaatctattcttggcaatgggaattcatccttcgggcatgccttattgagatcggtaaagtcaatgcacattctccattttccattggctttctttaccatgacagtattagctagccactctggttatgtcacttctctgataacaccggcactcagaagtcttttcacttcgtttcgtgcaccttcggctttgtcatcggacattttccgaagccttttctttcttggtctgaaagttgggtctacgtngagtgagtgctcaatgata

SEQ ID NO: 9910 - DNA, 205 bp, Zea mays
tcagcaccgtattgtgtcccgttgtccacagtaatagcctttggcactccaaagcgacaaacaatattttgccagaaaaatttctggacagtgactgaagttattgttgctaaaggcttcgcctcaatccacttggaaaaatactctaccgccaccacaacatattttagatttccttgtgctggtggaagtgggcctaataaat

SEQ ID NO: 9911 - DNA, 486 bp, Zea mays
  unsure (1)..(486): unsure at all n locations
agctntataaagaagtggctaaacgtaaaggtttatgggtactcaaaatacgctagacaatttagacaacacacctcacaagtaaatgtgagatgtgtcattcccaaatgggtgacacatacattttcctaagtgtgtctcctacacgtaagtaattgagacaacaacagtataaatgcgtgaaaaaattaggtaccgccatttaccttaattacaagtgattgaggtaaatggttgtacctacaatgatatcgtactcaaaattaagtgtcacatgaaaatatctagcatactagtattagcataattcatatctaaatagtgaatgcagaacatgtagcatactagtattagcataattcatatcaaataacgattgcaaaatatatctagcatactagtattagcataattcatattcaaatagagaatgcaattgcagcaacacacaaggtgaatctagttaaacacaaaacaattaaacct

SEQ ID NO: 9912 - DNA, 214 bp, Zea mays
ttggtccaaatcatggtaggattgtttggatgtttacttatccaaaatttacttgtacatgtaaaattatcatatcttgacttcatctttgtggttcactcagtataacgtatacaaaatgtataaacaaatattaattgcactggtacccataccttgcgactgagcctcttcactcacgcttttagctggttttgttgatgaaagcaaaata

SEQ ID NO: 9913 - DNA, 480 bp, Zea mays
  unsure (1)..(480): unsure at all n locations
agcttacctttagtcttatgtaactaagtgaagacttttgttaggnggagaaatacttgacaaaaggtggagaatcataagtaaaacataagatgtaggaaattgatgagtgcataatatgtcatgagcatcacgtttattttatgacacaatgcaccccatgagtagtatgatataagttgtctccatactttgactcanatatgtgcttttggcatttgaggccaaaaatggtattttctgaaatgcacatatttatggggaggaaactatatcataggattcanaatcttatttatcaaaacttatgtaagctttaaatgttgtgtcatcaatcaccaaaaggggggagatngaaagtgcattcatccattttgtgagttntggtgatttggataacaacacatttaaaggtctaacaagtttgctagtgttgacaagaattcatatgatgacatacttgatagtgataatgatcat

SEQ ID NO: 9914 - DNA, 214 bp, Zea mays
taacaagaacttgactttcttgctgatttgaccacgtgtatttacgcccaaaaagtggaacctcattgagactcaagtcctcaaccaactttctaaatctccccatcatagctctgttaatatttgaattatttttatctgaagccctgtagatgagattgaagtcaccagcaatcaaccagggtccagtgcaagcagccctgacgtctctcag

SEQ ID NO: 9915 - DNA, 334 bp, Zea mays
agcttcttgaccacctcaacgttcaccaagttggtgtatctaccaccgttaatgatggtatgtacacggcagtccttgacgatgaggaacatgttgaaaaggttgtggcgctgtctgctgtcgtcgtcactagccgtggtactcaaagctcgttgcacaatcaaggccttataggtctcggtcgctgttgtaccaagaacctcttcatcaccatcataagtctctgcaatgttagctccaacagtatcttcatcttcaacattagaagcactaacatacccaccatcaccagtagcaatgtatgcccgtttgctggggcaatctcgctgaatat

SEQ ID NO: 9916 - DNA, 217 bp, Zea mays
tgtcctcggttctcgcgtaccctaggtcagtcgggactacccgctgagtttaagcatataaataagcggaggagaagaaacttacgaggattcccctagtaacggcgagcgaactgggagcagcccagcttgagaatcgggcggcctcgccgcccgaattgtagtctggagaggcgtcctcagcgacggaccgggcccaagttctctggaaagggac

SEQ ID NO: 9917 - DNA, 414 bp, Zea mays
  unsure (1)..(414): unsure at all n locations
gcttacanagttaggtggaagttttttctcgaatatgcatgagagttacgtatcattatattaagaagatgaaaaacaagggcgagatcccagcacaaaacaaaacattgaccatacacacgctcatgcacaaaacacacacacactagactaaagcaatgttgaacgaccaaaagccaataaattgctcggggagaagaggcagccaagaaggtaaaactcctcaaaccagccaagacccacatctccttttcatccttggctctaaataaagtagcacgtatattagcacaatgtccctcaaagacacattcattcctgattttccaaagcgtccaagctcccagaatggaagggtattgacacccattcaggcaaatccttcaacattctcgaagaacccgtttcatcata

SEQ ID NO: 9918 - DNA, 215 bp, Zea mays
tgaagaatattatctaatccgaagcagaaaagagttccaaattatctaaagctttaatgtcgcttcgggagacatgctcaagcttcgtggcacgaagctccacccgcctgcacgaaattttcaactcaattggggcagtatcagaggaaaagaattattctattaaatacattccaaaggcctcaatttcgtggagaaggaaattaatgaatttg

SEQ ID NO: 9919 - DNA, 341 bp, Zea mays
accttaagtcacctgcggcgtgcgagctccgatggaactcggatggtctccacctccatattctgttgtccgctctctagtaggctgcggctgctcacgcagacgtcgccggagacggagagatgcgcggtgtagagagtgtatgtcgtcaccctagacttacagcctcgacgagcgaagcccgccgcgccgcgccgagccgagcctttccccgcctcgctggtgtgcgggaggggtggctttaattatgcgggcctatgattagctccatgacgtacaaaattagtaggtgtgtatggattgctggaaaaaactttttgtccgatataaaaaattggcgc

SEQ ID NO: 9920 - DNA, 216 bp, Zea mays
tgtgcgtcactaaaagtcagagctcgctgcggttgcttgcatgtctcactcactcacactcacatgggggccgagatattgttaggcgccagcgccaccaccgtgacgtgcgttgcggtggttaaacaagctactagcagcagtaaggcatcgtcatcagttcttccatgagactctctctctctctctctctttctcttgctagtactgtaggag

SEQ ID NO: 9921 - DNA, 377 bp, Zea mays
  unsure (1)..(377): unsure at all n locations
agctntatcatatggacgtgaagagtgcctttctcttggaccaatcaaagaagaggtctatgttgagcaacctcccggctttgaagatagtgagtaccctaactatgtgtataaactctctaaggcgctttatgggctcaagcaagccccaagagcatggtatgaatgccttagagattttcttatcactaatggattcaaagtcggaaaagccgatcctacactctttaccacaacacttgaaaatganttgtttgtatgccaaatttatgttgatgatattatatttgggtctactaatgaatctacatgtgaagaagttagtacgatcatgacacaaanaatcgagatgtctatgatggnggagttgaaatatt

SEQ ID NO: 9922 - DNA, 209 bp, Zea mays
ttaattgatttatagtcccttgttgaatgatccccaggtttagcttttccatttcctgacacaaagtgttctcgtagatctttgccataagacagtggcaggaagtcttgcgactcaatgcatctgccaccacattggccttgcctgggtgataatggatctccagttcatagtctttgatgagctcaagccatcgtctttgcctcata

SEQ ID NO: 9923 - DNA, 357 bp, Zea mays
  unsure (1)..(357): unsure at all n locations
agcttctanagggagaacatgtgataggtctaaccaatgttcatttcgaaaaagatattgtgcagcttgtcaagcagggaaacaagtgggaggctctcatgacaccaaaaatgtgatgacaacatcaagacccctggagctgctacatatggacctcttcggacccgtcgcctatctgagcataggaggaagtaagtatggtctagttattgttgatgacttttcccgcttcacttgggtgttctttttgcaggataagtctgaaacccaagggaccctcaagcgcttcctaaagagagctcanaatgagttngagctcaaggtgaagaagataaagagcgacaacgggtccgaatt

SEQ ID NO: 9924 - DNA, 212 bp, Zea mays
tctaaagggtttaacacattttgggactaacaaatgttcattttgagaaagatagggtttgtagcgcatgtcaggcagggaagcaagttggtgttcatcatccacacaagacaacatgacaactgacaggccactcgagctcctacacatagacctattcggcccgatagcttacataagcatcggcgggagtaagtactgtctagttattg

SEQ ID NO: 9925 - DNA, 432 bp, Zea mays
  unsure (1)..(432): unsure at all n locations
agcttctaaagggagagcacnatttaagactatcttatgttcattttgagaaagacaggacttgtagcgcatgccaaacaggaaatctaagtggagtccatcatccatacaagaacataataatgactgataggccactcgagctactccacatggacctattcggcccgatcgcttacataagcatcggcgggagtaactactgtaacaccccaggtgttacccaaggccctagccaaaggagcacacttgtgtcctactcaccctatatgctagattggaaagtgaaggcactcaaagctctagaatcatggttaagtattaatcataacaagaaagaaaccctagccttcatccattctcactcttgaaaaaaggtctaaaaccctaaattcccctcttatagccattcaacccctaacatgtgataaa

SEQ ID NO: 9926 - DNA, 211 bp, Zea mays
tcgtttacgtgtatcttcgacatcatgttcaagcagcttcagctgaagctgtttctttttgcaggaccttcggcgatgaagcatggtcccaacagtaattaggggtacccccaagactcctaatctcaacttgtaacccccatcagcacaaagctgcaaaggcctgatggttgcgattaagtcaaggctcagtccactcaatggacacgat

SEQ ID NO: 9927 - DNA, 335 bp, Zea mays
gaagttcttagtttatcaaagaaaaattatacagaattggagaaggtgttgtatgctgttttgatggcctccatgaagcttcggcactatattcaagcatacaatatatttgttccttcttcacaactgttgaaagatattatgagaaatagagaagctactggaagggttggaaaatgggctgcggaactcaatgacatttgtattgattatgtgcatagatcttcgattcaatcccaagcgttggcagacttcattgctgactggacgccacgggctcaggaagaagaaacgagtaaagatgcccaagtttggacagtattttgcgattgatc

SEQ ID NO: 9928 - DNA, 210 bp, Zea mays
tgagttgtaatctcacgaactctgcaggcaagccaacgccgcaggctgcttgtgcgatggcctcgttccacgatctcaccgccaccgccgtgctcctcttgctcttttccatcctctccggcgggttggcgccgctgcaagtccaggcgcagcagccgtacggcagccagatcgccgactgcaccaaccagcacaactcctccagtctgc

SEQ ID NO: 9929 - DNA, 463 bp, Zea mays
  unsure (1)..(463): unsure at all n locations
agcttaatattatgatagtctctgttcagaaaaactattattatagcatagtggcgagtcaaaatcantttaaatttagttttttattaaaaaatattgatacctatagtatcaaataagtgtcatcaaatttatagtaagagaccgcgatatagtactatggtacactacacacgtacaattagttaagaggaaactaagataagacaataaagtggcaagggtgtgttaagtggatcttacatatggtcaggcccgtgccaaggggtgtgcgagctgttcgctcgtatagggccccgcaaaatctanggccccacatatgtaaatgtgcaatatatntatataatagaaaatatacattagagcatctctaagactatntctaaaattcactctctaaanntatcatttgagaatcactttgtatatcttttaatctctaacaacttntttatatctaatt

SEQ ID NO: 9930 - DNA, 212 bp, Zea mays
tgatttgaagtgcaggtcattttgagacaggatcttccattccgctgcaacctactcgaagagtcttctcactccactgcgtactaagtcttcgagtagagtaagaatttaagtttttaagtaataagttttattcgcctattcacccccctctaggcgacatccagatcctgttcccgggtcaaagggaactttcaattggtatcagagct

SEQ ID NO: 9931 - DNA, 393 bp, Zea mays
  unsure (1)..(393): unsure at all n locations
tctcgacccngatcctctgagtcacctgcngcatgaagcntttcgcgagcgtgctggcgtcgtccgcttgctctggactggcgcgtcgcggagagacagcgctcgtcttcgtctcaagcgcgaagtcgatacccgacgcgccccccgttggggtgctggagtcgtcgactcgctcgacagccgacgaggcgctgcctcctgctaggccttggttgcctcgcctcctcctccgtcagcggaggagaagacggggtgagctctaatagtgtcttcaccacgtggggaagacgtcgtccattccgccgccggcgggcgggctgtcggccgccattgtcgttgtcacacgacggtggaaggagtatcatgttgtatctgccgtcgagggacatgaac

SEQ ID NO: 9932 - DNA, 206 bp, Zea mays
ttgtaaagtgtagcttgcaagatatgattggacaaagggtgagtcgcttcaatcactctttgatcggttgatggtgttagtaaacaaaataagagtacttgggagtgaagattggagtgactccaaggtcacaagattattcatgagagcatataaagaaaaggataagagtcttgcaaggatgataagggatcgtgatgactatg

SEQ ID NO: 9933 - DNA, 391 bp, Zea mays
atcctctgagtcacctgcggcatcaagcttaataaacaatctggacccactccatcacgctacagtcagcagagtcagagctcccttcaggcaccctctgttgcaagcaaccagccgccagcaaacgcctgttggcactgcggagaccccagtcacttcaagaacaactgccctcagttgaaggcacccggaccaacttactccaactcggtgaatgagcccaagattccatcggcacctacctccaaggcacttccttcaaacagccagcagagcaagactcagtatcagggcagagcccgggtcaaccacgtcgacgctcaagaagctcagcaagccccgggagtagtgctcggtgagttccttagttgaattactcccgctactgtac

SEQ ID NO: 9934 - DNA, 205 bp, Zea mays
tctactttttttttcttgaacgcgcaggagaactgcatatcattatattaagaagaaaaaaggagaactgcatatcattataagcttttacttagtgatatataacatgttcattttttctggaacacacaggtgtgtatcattgcattattaaaagagagttacaacaaacacaacctagtgaaaaaacaactacattagcacc

SEQ ID NO: 9935 - DNA, 338 bp, Zea mays
  unsure (1)..(338): unsure at all n locations
agcttagcanaagaaatttctagaatcaagaatattgagctcatgcctaagtctggtaaaagattgttcatcaagtggcttggtaaagatgtcggctaattgatctttagtattaatgtaagaaatctcgatatcccccttttgttggtgatccctaagaaaatgataccgaatggctatgtgcttagtgcggctatgctcgacgggattgtcggccattttaattgcactctcattatcacatagcaaagggactttggttaatttgtaaccgtagtcccgcagggtttgcctcatccaaagcaattgcgcgcaacaatgtcctgcggcaatgtact

SEQ ID NO: 9936 - DNA, 215 bp, Zea mays
tggcccgcatcgggcctaaacgggcccgtttagcacgaaaaaataggccgaaaagcgggctaaacgggccggtaagcatgttttagtgtaaaaaaacggacttagaggtaaacgggccgtgccgggtgtaaggaaaatggaccccgggccatttggctaattgagttttggtgtttgatgaacaacacaatccgtgaactaataagttttctagt

SEQ ID NO: 9937 - DNA, 394 bp, Zea mays
agcttataataagagaatggaggcaaggacaagactttatgttattatataaggggaattatacaaacatggagtctgttctccactcctcaagtgtttatctagaaccgaaagtatatagttaatgaaggagatacatgcacgtctgtgtggatctcatattgggtctaagcccttgctgggaaaagagtttcgataaagattctattggccgaaagcagcttctgatgcagcggagttagttcaaaagtgtgagaattgtcaaaaatgtgttagagatcagaagcaaccttcgtctctcgtgcagctgatacagccaacttggccattgcaaagatgaggtctggatttgttgggtccactctcaccggcacaagagaaattgaagtatgtt

SEQ ID NO: 9938 - DNA, 214 bp, Zea mays
tgccaagccttttgattcgaccggacttcaccggaggcccgagatcaacctcaccggacttcggtcttccgccgccgcgcgtggaccaagctatccagtgagtctccgcccgattcctttcactcatgtcttctctagcatcccgtggacctccctgacctatttgattgaactatctcgccgtgaccaggccggtctcctcgccgccgacgag

SEQ ID NO: 9939 - DNA, 351 bp, Zea mays
agcttaatcctgagaagagagtcttcggagtgcccctatgcatgctcctaagtttcatcgtctccgagcgaggcatcgaggccaacccggagaagatcgcggccatcaccagcatgggacccatcaaggacttaaaaggggtacagagggtcatgggatgcctcgcggccctgagccgcttcatctcacgcctcggcgaaagaggtctgcctctgtaccgcctcttaaagaaggccgaatgtttcgcttggaccccctgaagccgaggaagccctcgacaacctgaaggcgctccttacgaaagcgcccgtcttggtgccctcggcggatggagaagccctcttggtctac

SEQ ID NO: 9940 - DNA, 213 bp, Zea mays
tgttagagattttgattgtggggtaactttgttgcaatcccattatgtggaaaaggtattgagtcgctttggttttagtgactgtgatcctgctccaacaccttatgatcctggtgtgctattgagaaagaatcggagaatagcaagggatcaattgacatactcccagatcattggctcgctcatgtaccttgcaagtgcaacaaggccaga

SEQ ID NO: 9941 - DNA, 394 bp, Zea mays
  unsure (1)..(394): unsure at all n locations
gtcacctgcggcatgcaagcttagcanatcttagtgcacaagaatctaaaattgttttatcgggagcagatggccagagagcgtgtcaaatgagtttgcggtatgaccgtatttatacgccaaatgcgttgaaaattgacagaccccgcttgtcagtgaatgttgctattctagcaaagggacggtgttttttcggaccttcggcgtaaagccttcgtccatgtcgcaatctaaatttattattttaaacaaattaatattgcgaggggctactgttgggggccttcggcttccgaaagtcctcaaaaacaggaattaacagtatttctggagtataatgtgtgaacaggtatcttcggacacaagtcggcatcacagtagaccagaataatac

SEQ ID NO: 9942 - DNA, 214 bp, Zea mays
tctaaagggataacttattttgggactaacaaatgttcattttgagaaagacagtgtttgtagcgcatgtcaggcagggaagcaagttggtgttcatcattcacacaagaacatcatgacgactgacaggccactcgagctcctacacatggacctattcggcccgatagcttacataagcatcgacgggagtaagtattgcctagttattgtg

SEQ ID NO: 9943 - DNA, 382 bp, Zea mays
  unsure (1)..(382): unsure at all n locations
agcttcatgaagaggaaccttcggccatcttatacaaacagtttcagccgaaagccgcttcttcctagaagaccttcggcgacgaagcatagacccaacaccaaccggacaggtgcaagagggaagggtatagatataaaaggtaagcatagatggattaaagagagaaaagggagagcacccacctacctaactctatggcactccactaataaactgatgtcattgcggaccaaaggccacaacgcatcaacactcatcacaaagaagcaaatcagtcatcacacaaggacaaacttgacaagcatacaacaacanacatcttcgtgctatacgttaatgttaactagatgctggtcttttcttaccaangggaaactac

SEQ ID NO: 9944 - DNA, 215 bp, Zea mays
tggccactggtccatggattgtcggcagccacgacgtggccaggccaacgtcgcacaggcggaggcggaggaggaggccctgctcctggcacatgcaagcatcgagccatctccagcggcaccggccgcagcggcactcctccaccttgatgagtcgaaagcacgcgctttcctcggcgacggctccaacaaggacatgatcgaaggatggtgcc

SEQ ID NO: 9945 - DNA, 351 bp, Zea mays
  unsure (1)..(351): unsure at all n locations
agcttagccatcttaaagatgttagttaaggtatcttctcacaaagtgcaaaaccatttaatcttcgctccccactatttctgtgtggtcaggaaggggggaaaccttacatgcatgtaaattttgaggacatcatgtgctgttgtatattaagaatacctttgcatntgctggtgcgacacctaatcttcctgtctattaacagagctatttggccatgtatcatgaacatcattgtaagtttttttaagatttctcactgctagttgtggcgctgtatttgtagtttacaaaacttctataaagtagaactctgaatattgactaaagcagcttgaactatatcgaact

SEQ ID NO: 9946 - DNA, 211 bp, Zea mays
tcatgtcaatttcaaggctccttccgaccaccagccccaagaggcagaggcgccaggggcttcggcggaagattcggagatcaaccaagaagaatcttttgcttgttttgcggtgagaacaaaggccataccaccaggatgtgccatgttaccatccaaaagcaaaaggaaatagccgaagctgcagcacaacaagctcagccgaagcagg

SEQ ID NO: 9947 - DNA, 412 bp, Zea mays
  unsure (1)..(412): unsure at all n locations
agcttatgcaacatcgctagagatggtgtggacatattctactaagacctgaagaggcaccagtgcatatcggaataattatgcgtcccgaacatgtgaagagaggtagaggtcgaccaactttgacgtggacagaggctgtgaagagagacctgaatgagtggaatattgacaaagagctcgccgcacataggaaggggtggaagtgtgcaattcacgtgccagaaccctgattgataggttcgcttttcctccttaatcgtttgaccttttcttgtgtccattntagatcttgctggtccttgtgggttntatctcttttatgtgtttccccggttcgttggtttcgagtctcctttagccttcgattcccttttctggtctttgaggggtgagctctgaggttttcata

SEQ ID NO: 9948 - DNA, 211 bp, Zea mays
tgactgtcgtttcctttaagctcagaaacgaatcatgatctagtcgcaacgcgaagcgaatactaacaagcacaagcaaataaacatagatgtatgcataagaacattacaccatgcaagataaaatgttataaaaacatgcagcataaaatagagttcgattctatagtcacgcgagagaaagaaacgcgacggtcgaagctagagtcga

SEQ ID NO: 9949 - DNA, 412 bp, Zea mays
  unsure (1)..(412): unsure at all n locations
agctagtgaagaattttcatcccaacatgtgttattctgcggtgccagagccagcccatgttagtcttagcaattaagcatgtgtcgagttcagctctatcaaaatctaccaagtatagctgaccctctaacacacccttaaatgctattgaatcatcacttcttctaaagacagtgacacctacatcagtgaataaacaagtgtagcccattctgcataattgagatacagaaagcaaattgtaatctaatgaatctacaagaaaaacattggaaatagaatggtcaggagatataacaantttacccaatcctttgaccaaaccttgatttccatccccgaatgtaatagctcgttggggatcttggtttttctcgtaagaggagaacattatcttctccccagtcatat

SEQ ID NO: 9950 - DNA, 210 bp, Zea mays
tcgttagcattttccttttctttcccagatactgcggccatggcctcttcggcggcagtagtagcttcttctgtggccatgtctagcagcattttatcgatgtgttcgattgtgctttccaagttcaaatcttcaattgaggtagcttcggcagccgcgacctccgaaggtgtgatttcaatatttgttatttcctcagccgctggtatc

SEQ ID NO: 9951 - DNA, 432 bp, Zea mays
  unsure (1)..(432): unsure at all n locations
gatcttaagtcacctgcggcatcaagcttgatgaagtattgacataaagaatatatttatcttttgtataagcaaacaaaactttgtaagattcgcataacacctgtactggatgtgaacatgcgttaacaataataacaactggtaaccaggtacatattaaaataatattggttatttgtctaaaatgaaaatatatatttatgctgcatgtaaatgttgatgtatttgggttgtgctctaaaagaagacaacatgagattntcacatgatgttggtgatacaagttcttcgtgtcacgtatcacatgaacaaatggaacatattgctgcatcctcagaagctaaagaagtgagcattgataaatgagtttactgactggtatacatatatgtgaatatgcgtatactanatagtaacgtatattattat

SEQ ID NO: 9952 - DNA, 210 bp, Zea mays
tgaatctggtttaagcgccatgacgaaagaagatctcgcagacagtcttgcgtacaacagcctgaaggtataggaattagacacttgaaaaacccccttatttttacgcaactcattccttttttcttatatgaattctttttcgtatagggcctgatcctaagcaacgcactaagagcccaaaagagcgtcgaagatgaaagctatgaa

SEQ ID NO: 9953 - DNA, 385 bp, Zea mays
  unsure (1)..(385): unsure at all n locations
agcttgtgaaagttcttcatccncacatgtgctaagtggcgatgccacagccagcccatgctagtcttagcaattaagcatgcatctagaccggcctcttcttttgcaaaatcaactaaataaagtttgtcgtctagtacacccttaaaagctagtgaaccatcacatcttctaaagacagacacgtctacatttgtgaatagacagttatatcccattntgcataattgactaacggaaagcaaattatattcaagagactcaactaaaaacacactataaatagagtgctcatttgatattgcaattntgcctaagcctttcaccttgccttgattcccatcatcgaatatgattgaatcttggggatccttgttcttgacat

SEQ ID NO: 9954 - DNA, 206 bp, Zea mays
tgcaataggtgaggtgaagccacaagaaaaggacgatgatgaagggagaatttggatgacaaatagggttgttgatgggagtgctagagtggttggtgaaaatccttccatccaagcaaacccatcaacctcaagtcatccaattcttgaagaagagcttctaccacaagatatgtcaaccattgtgtaaaatgagcaagaagaag

SEQ ID NO: 9955 - DNA, 418 bp, Zea mays
  unsure (1)..(418): unsure at all n locations
agcttatatcatctgtgggtacctgcataacttattaagtacatnttggtacccatttttggatgggtccaccaaagttagctagcaagtacttatgcacccaaatggcctttgtgctagctctaggtgaactaattacctttctagcacaaatgtcanttttgggtctcctaagcgaatatgaatgaattgacatggtaggcttaagatacttactcatgggacaatccttgcataagtgtccctttcttcggcaagtgtagcaaatctgaattttaattntgcaagactccttcttgccttgcttcttggttgctacatgagtagagagcctctttctttctaaagttaagccactatcttttatgtagggacatgactaaatctcatgtcccttctcatgacatngataacactt

SEQ ID NO: 9956 - DNA, 205 bp, Zea mays
tctgtaatgttcatgaattattatatgaaacaaagccttggggcaaagaacagtaccataacaactttggctgctacagcttcgtctctcggtccggggcaagctgtcccgtaccaacctttcggaagagatggcccggggattggatgacagaatggttttatgtgaagaatgacttatcagcacgagaagacatcaaaggtaa

SEQ ID NO: 9957 - DNA, 332 bp, Zea mays
agcttctgcgcgtcgatccgtcctccgtccgagcatgtgctgcgcccttccatgggatcatccctgggaagcgcgtccagcccctcgggcgactcgacctcccagtctgcttcgggacaccctccaacttccgaagggagaccctgacgttcgaagtggtcgggttccgaggaacctaccacgccgtgctagggaggccatgctacgcgaagttcatggccgtccccaactacacctacctgaagctcaagatgccgggccccaacggagtcatcaccgtcggccccacgtacaaacacgcgttcgaatgcgacgtggagtgcgtggagtac

SEQ ID NO: 9958 - DNA, 215 bp, Zea mays
tgtgaagatttttcattccaacgtgggctagtcggcgatgccagagccaacccatgttagtcttagctattaagcaagtatcgagttcagctctattaaaatcaaataagtatagctgaccctctaatattcccttaaaagctattgaatcatcacttcttctaaagacagtaacacctgtatccgtaaaaagacagttgtagcccattttacat

SEQ ID NO: 9959 - DNA, 411 bp, Zea mays
  unsure (1)..(411): unsure at all n locations
agcttctatagtcgacacacattcttcttgaaccatctttcttgttcacaaatagaactgggctccccatggagacgaactgcggcgaataaaacctttttctagtaattcttctaattgtttcttcagttcaattaaatctttgacatccattcggtaagctctttttgaattactgcacttccgggtaatagttgttggaacttgctctcatttgcaaggggatccaacaagggtgaacaatgacgttagcagggctctcgcgcgtgtgggcaatagctctgttaatctgccctctcacgggcactgtgcggaggtatttataggtgtctgagcacncagcgccttgtgttaaagatgcatgtgccctcatccacctatgttatccccagaatattcccataaagcacg

SEQ ID NO: 9960 - DNA, 214 bp, Zea mays
ttgggcacacttatgtatttcaggccagccgatcatccgcagacagacggtcagactgaaagaactaatcaaatccttgaagatatgttgagagcctgggtgttgcaagatcagtctggatgggacaagaggttgccttacgtagagttctcctataacaacagttaccaggccagcttgaagatggccccatttcaggcgctttatgggagga

SEQ ID NO: 9961 - DNA, 364 bp, Zea mays
  unsure (1)..(364): unsure at all n locations
catgcaagcttctctgcatcaaaattgtgatagatcttttgtatctgcaactgcaatgccaactnttatactaattcgtatgagaacatatcatatgcttaagcatccaatgtacttctatatagttctataccttttctttctgtcataagggtatggcgacggcgggagatatatattctttactaaatatacatgacatgtggaaagacgttaggtcttgaatggataaccgtgtntcaatatgtatatcatattcatatgcacccaactaagatccaaagaaggtttgcttctaactctgatatcgtggcgtctgtgcgcattggtttgaccgtcatagctgcaaagtgcgatgcaagct

SEQ ID NO: 9962 - DNA, 214 bp, Zea mays
tgctggagcacattttgtgtccacaacacaacctatgtcacattcttactcaactctaccaagtttggcgcacgcatgtacttgtttcacacgcactttgctggcctttctactttcgattacctggccaggggcgtagctacattcaattgtcggggtcgaccgaccccgacgacttgcaccacgctatttgaccctgtcggccaagcgccca

SEQ ID NO: 9963 - DNA, 317 bp, Zea mays
tgtaagattatgtaattctcttccgcatttctttatctccgatgttctgtaatgtctgctagacgggtgagacgttcctggtgaggtaaggaaagataccgaacttgtcaagtagttcaagggcacctacagggttgtctgatgtccgttggacaaagacaactgtaggtgggcctaattacttgggaggttccgtcacaaccaccgtgggcaagccctcttccgtccttcttcgttcaatctaagccctcagttagcttcctggtgaagccgtgagactagctcaagcttgacccggggaccctcgtcaccggaat

SEQ ID NO: 9964 - DNA, 214 bp, Zea mays
tctaaagggataactttttttgggactaaccaatgttcattttgagaaagacagagtttgtagtgcatgtcaagcagggaagcaagttggtgttcatcatccacataagaacatcatgacgaccgataggccgcttgagctactccacatggatctattcggcccgatcgcttacataagcatcggcgggagtaagtactgtctagttattgtg

SEQ ID NO: 9965 - DNA, 440 bp, Zea mays
  unsure (1)..(440): unsure at all n locations
agcttctnagggagaacacgtgatatgtctaaccaatgttactttcgaaaaagatagaccttgtgcagcttgtcaagcaggtaaacaagtgggaggagcgcatcacagcaagaatgtgatgaccacatcaagacctctggagctactacatatggacctcttcggacccgtcgcctacctaagcataggaggaagtaagtatggtctagttattgttgatgacttttcccgcttcacttgggtggttcttttgcaggataagtctgaaacccaaaggaccctcaagcgcttcctaaggagagctcanaatgagtttgagctcaaggtgaagaagataaagagcgacaacgggtccgagttcaagaaccttctagtggaagagttccttgaggaggaanggatcaagcacgagttcttcgctccctaacaccacaacaaaa

SEQ ID NO: 9966 - DNA, 206 bp, Zea mays
tctaaagggttaacacattttgggactaacaaatgttcattttgaaaaagacagggtttgtagcgcatgtcaagcagggaagcaagttggtgcccaccatctacgtaagaacatcatgacgatcgataggccgcttgagctactccacatggatctatttggcacgatcgcttacataagcatcggcgggagtaagtattgtcttg

SEQ ID NO: 9967 - DNA, 428 bp, Zea mays
  unsure (1)..(428): unsure at all n locations
agctntggcgcatcgccgccctgttctcatgtgtttttactggtaagagccatgccaccctgatcacgtcttgcaatcatgggctcctcccgcgccagcgcctgttttagcaacatcgggtggtacatttggatgtagttggtcacttcctcgtacaggatgttgttatacacttgaaggttttctaaggctagactcaactcttccacccaagctcgggcagtcgcctcacaattctagctatgaatcgtgaactcatagaacagtcgatagcctgatcatgctccgccaactcccactgtaggagttctacttctcctcacaactcatcaatgcggcgactagcacgcattcgctccctaccttcgtgtcgcaactctgcagtcagacgttcgactctatcctcccagtctcctatgggatcattg

SEQ ID NO: 9968 - DNA, 212 bp, Zea mays
tggcttcacgtttcgaatacaagataacgtgaacagtatgggggtattgttcatctatttataggcacaggacgcagcctgtgagaaattacattcatgccctttacaaatgattacaatcataatacaagctatcatggaccgattggtcatttcatctttaagttggtacatctggtagtacgctacgaagctctctgattggcatcttc

SEQ ID NO: 9969 - DNA, 420 bp, Zea mays
  unsure (1)..(420): unsure at all n locations
ctgcagcttaaccctccgagacctttccccacctctttctaaccaaagtaaattcattatcgtatgtgatattctatgcatatttactttatttgttcccttgtatggtgtactgtttgtttcctaatttgaatggatgaatgtatgtatgcttgcaatcgcatagagaacgatccggttgaagagcccgaggagctcgcaggagaagcccctgagtagctgtcggttggtggaggcaagtgtcccttgacctatctctgtcctattcattctttaattcacctcccgctttacacatttatgcctaaagattgactagctntgttatccatatcctctgttaccctatttgggtgggatattattggnntactttatgctattgctcaactctcatccatgacatgatgagatatctat

SEQ ID NO: 9970 - DNA, 210 bp, Zea mays
tggattatatttaacttgcccctcttgatatcaaaatcaaagtgcatgtctcctacaagtattcaaaacttgtatgcacaccttcaggggggaggttactctataatctaagttttgagactaatatatgttctcaagtctattatatctagtagtctcattgaaggaaaatgcagtccccggagaaggacaataagcttccacttcaaa

SEQ ID NO: 9971 - DNA, 294 bp, Zea mays
atcttaagtcactgggctcagctttatagaaatggagcaggacttattttattgtgtaatagacagggagttatataaacatggagtctgttctccactcctcaagtgtttatcaagagctgaaagtattgaattaatgaaagagatacatgcacgcctgtgtggatctcatattgggtatacgcccttgctgggaaaagtatttatacaaagtttttactggccgaaagcattttctgatgctacaaagctatttcaaaaatgtgagaattgtcaaaaatgtgcacaagacca

SEQ ID NO: 9972 - DNA, 210 bp, Zea mays
tcattttctttttcttcagggaaaattgccggggttgaaacaaaaccggccgaagttgaggctgcagtgggccagggtagcgccgaagttgggccttcagagcctgctgataaacaaccctcggagtttgaagagaaggccgcagaggaagaagctatagaacagagtttgcctgagaaaactcccgcgcctgctcctgaagctttaaag

SEQ ID NO: 9973 - DNA, 386 bp, Zea mays
  unsure (1)..(386): unsure at all n locations
aagtcacctgcagctgcagcttgacatgctccctgttgaagcctatgttttcttattgtcaggcgcctcccactatagagcatgcttctagcanatctaaaatcttcattttctaagtcatgctcatcaatcttagcactaagttgagctatgtgatcattttgtttgttaattaactctaagtgatcatgaatagcattgacattaatgtctctacatctagtgcaaatagcaacatgctcaacggtagatgtataggggttgcaagaatttacttcaacaatcttagcatgtaatatagcattttcatctctaatattggaaatggaaatattgcacacatttaatttcttagccttagcaattaatttttcattctcatttct

SEQ ID NO: 9974 - DNA, 210 bp, Zea mays
  unsure (1)..(210): unsure at all n locations
tgnggcatgttttaatgatagacacacccacgcagttggattgcagaatgagggagagagatgggctccaaagcctaagacctttctagagaaggcaaaggaaagggcaaacacacagactgttgattgttttgacttacagtcagggacatatgaggtattccttcaagctgttactacttctgacggcgagtcacaagagtcgaggaa

SEQ ID NO: 9975 - DNA, 480 bp, Zea mays
  unsure (1)..(480): unsure at all n locations
agcttagcanaagaaatntctagaatcaagaatatttatctcatgcctaagtctggtaaaagaatgttcatcaagtggcttggtaaagatatcggctaattgatctttagtattaatgtaagaaatctcgatatcccccttttgttggtgatccctaagaaaatgataccgaatggctatgtgcttagtgcggctatgctcgacgggaatgtcggccattttaattgcactctcattatcacatagcacagggactctggttaatttgtaaccgtagtcccgcacggttagcctcatccaaagcaattgcgcgcaacaatgtcctgcagcaatgtactctgcttcngcggtggaaagagcgaccgaattttgctttttgaacccaagacacaaagatcttccaaaaactgcagtcctgatgtctcttctataatttgcacccgcaatcgcatcgataaccataatcaatgtgatccctag

SEQ ID NO: 9976 - DNA, 206 bp, Zea mays
tgtccgttctcacataggagtaatcacacaggggcggagccaggattaaaatataagggagtcgactaattcatcaatattatatagtgaaaaatattgtataatgttattaatcttaagcactaacatgaaataagaattctagttttttataaattatcttagtccatgattctattttctagctaattgttatattgaactaa

SEQ ID NO: 9977 - DNA, 461 bp, Zea mays
  unsure (1)..(461): unsure at all n locations
agctttaacccccccgcgagacctcttcctcgttttttctaaccataatgaatgcgatatcgaatgtcatacttgatgcatattcactcttattgttcccttgtatgatgtactggtcgtttcccaatttgaatggatggatgtatgtatgcttgcaatcgcatagagaacgatccggtcgaagagaccgatgaactcgcaggagaagcccctgagcagcagtcgtttggtggaggcaagtgtccctcgacctatctctgtcctattcattatttaattcacctcccgctttacacatttatgcctaaagaatgactaacttttcgtaaccatgntctctgtcacctatttgggttggattattactgtttagctttatgctattgctcaactataatcaatgaacatgatgagatcatctatgatacgctcgttttccctttcttatgatgatgtaatac

SEQ ID NO: 9978 - DNA, 206 bp, Zea mays
tgacccgggttaccctcatcaccggatgttggggaccttcggcatccgaaggtcctcaaaaacaggatttaatagtgtttctggagtataatgtgtgaacaggtatcttcggactcaagtcaagcatcacagtagaccagaataatacgaaggttggtgaagcgccgaaggtgtaagcaggaaagcttcggcgtgacagcagcagg

SEQ ID NO: 9979 - DNA, 264 bp, Zea mays
  unsure (1)..(264): unsure at all n locations
cttcatccncacatgtgctaagcggcgatgccacagccagcccatgctagtcttagcaattaagcatgcatctagaccggcctcttcttttgcaaaatcaactaagtaaagctggccgtctaatacacccttaaaggctagtgaaccatcacttcttctaaagacagacacatctacatttgtaaaaaggcaattatatcccatattgcatagttgactaacagaatagcaaatgtaaccaagagactctactaaaaacacatt

SEQ ID NO: 9980 - DNA, 204 bp, Zea mays
taccacatttgaagcatgagcgcttccccttggctttggtattgcttggctgtcccttgcgacctttaagcaccgtcttgaatcttttgatgatgagagccatctcttcatcattaagtccggccgcctcaatctgtgccaccttgataggtagcgcctccttgcttcgtgttgccttgagagcaaggggttgcggctcgttga

SEQ ID NO: 9981 - DNA, 437 bp, Zea mays
agcttctaaagggagaacacgtgataggtctaacttatgttactttctaaaaagatagaccttgtgcagcttgtcaagcagggaaacaagtgggaggagcgcatcacagcaagaatgtgatgactacgtcaagacctctggagctgctacatatggacctcttcggacccgtcgcctatctaagcataggaggaagtaagtatggactagttattgttgatgacttttcccgcttcacttgggtattctttttgtaggataaatctgaaacccaagggaccctcaagcgcttcctaaggagagctcaaaacgagtttgagctcaaggtgaaaaagataaggagcgacaatgggtccgagttcaataacattcaagtagaggaataccttgaggaggaagggatcaagcacgagttctccgctccctacactccacag

SEQ ID NO: 9982 - DNA, 392 bp, Zea mays
tcttgaagcctcagaggctaaagtgcatgaaggaaccaatgtgagcgtactgcaggtggtaacacgtcttatggcgatgaagtcaaagtacaccttctccaacaactgttacaacgatattgtgaaactgattattgatatcatcccaccgaatcataacatgccgaaggacttgtaccattgcaagaagctcgtagctggtcttggcatgaactaccaaaagattgatgcttgcgagaacaattgcatgttgttctggaaggagcatgaaaataccacacattgcatccactgcagtaagtcaagatatgcagtggtgctagatgaggatggaaacgagggtacgacaaaggtgccgatgaagcaactcctgtacatgcctatcactccac

SEQ ID NO: 9983 - DNA, 362 bp, Zea mays
  unsure (1)..(362): unsure at all n locations
tatgattcgagggctttggttccaggcattcgacgaagctatttcaaagctggatagtcttgtggaagagtcgtacaacgatatcacccttatcatgcagcttattcgtgacaacctcaccttgtggacttctgacatgcaagtaaacacttggaattatgctgtcatgtcaagacgtacctgatgctaatcatgctatgtatcaggaggatggtggcgatgaaatgcgggaccccttcaggatcatttacatgtataggaacattcaatctgtacgataaacacagatagactcatgtactctgcctttaaagtagatatgaagtgactcatacacgcnaagatttattatccaaaatcta

SEQ ID NO: 9984 - DNA, 261 bp, Zea mays
gtttacacctaccggtttcctgaacacaaattaggagaattaactctatgaagcttcactctgagcctaatcatgcttttatgtatgatagtgacgcatctagttctatgctaccaacccatgctatattgcctaagaagaaactcctgctacatcaaaagatcatcatcgctcattcaaaactgttgatgcttcctatgtgctatctaacaaatccagcaaggtagttgccaagttctttgaggcaaacacaaaggaaca

SEQ ID NO: 9985 - DNA, 433 bp, Zea mays
  unsure (1)..(433): unsure at all n locations
agcttctagcaaatagattggctagtcaccttgtttatatggtatcttataatcaaagtgcttttattaagggcagatccattcttgacaatnttatgcttgttcagcagacaaccattatgctccaccagaaaaattgtgcaaggatactacttaaattggatatcaccaaagcgtttgattctgtctcatggccgtttctcctcgaagttatgaggcatttgggctttgggcaaatttggtgtgatattatcagcactcttcttgcatctgcttcttctcaagttcctcttaatggtgcgccagggcagaaaattctccatagaaggggtcttcggcagggtgatcctctctccccaatgcttttcatcctggttatggatgtnttgtgctacctaacaaaaaaggcagccgctgtgggattgttggagcc

SEQ ID NO: 9986 - DNA, 303 bp, Zea mays
aacataacgttgcttaacagcagttctagttttgcccttttcacagaagagaagtcatcactcagagaaatagtctacagggaatgtatgctgtacgattcaggccgccaagatatagataggtgtatggaccaagaacataactacagacaggtatgtcatacctgctgcaccatatgtctccgcaagactgtccaacaacttaagattttagcacttcttaaacctctgcctactgtgactactacacatgcgattgcaagatcatgccgcaatgagtcttgcgatgtcagattcacccat

SEQ ID NO: 9987 - DNA, 437 bp, Zea mays
agcttgacaatgaggagatggcgctcgtcatcattatcttccgccatatcctcaaacaaaggagggggaaagactacaagtcccactccaagaaggtttgctacaaatgtggtaagcccggtcattttattgctaaatgtcctatgtctagtgacagtgaccgaggcgacgacaagaaggggagaagaaaggagaagaaaaggtactacaagaagaagggcggcgatgcccatgtttgtcgggaatgggattccgacgaaagctctagcgactcctccgacgacgaggacgccgccaacatcgccgtcaccaagggactcctcttccccaacgtcggccacaagtgcctcatggcaaaggacggcaaaaagaagaagttaaatctaaatcctccactaaatatgaatcttctagtgatgacaatgctagtgatgagg

SEQ ID NO: 9988 - DNA, 328 bp, Zea mays
  unsure (1)..(328): unsure at all n locations
ctaagctttgctggcaactgttcggcgctctggaaagatagctattgcttctgcgacgtcatgagtagcggcatctattatgcctgtgggtaggaccgcacattcaagattcaaaatcccattgaacattaaagaaggtgacgtgtgtagcttcacttaatataatgggacagcccaaatgttacgaaggtcatcactgatcttatgggatgaggccccgatgactaaacgacaggcaattgaggcacttgataagagcatgagagatataatggatagacctgatttgccttttggagggaaaacagtggtattnggtggcgacttt

SEQ ID NO: 9989 - DNA, 430 bp, Zea mays
agctttgatgttgtcctttagctgtttctgcattgcaacctgtattcttttctcctccgcttcaaccttcttctcgccatcagccttcttcttcacaacttcttcagctgcagccattctcttaatctcaacttcttcagcctcggcctttctcttaatctcagcttcttcggcctcagcctttctcttaatctcaacttcttcggcctcagcctttctcttatcctcagcttcttcttccttcttcttctcagcttcttcagctacagcctttctcttgatctcagctacttcggccttagcctttctcttattctcagcttcttctgccttcttcttatcagcttgttcggcttcagcctttctcttctcagcctcctcagcttcagcattcttcatctcaatctcagccttcttcttctcagtctct

SEQ ID NO: 9990 - DNA, 347 bp, Zea mays
tctgcccactctgcctcttatagatggtggcccgaatgagctttgttgtggtcctgatgattgggagctgtgttgtcgcctttgtggttgatttcctctatcatcacttgggttaacattatggattgacttgacgtgcctggggtgaattcttgctccgaagcccctggccatctgagaaaacctgtatgcttctcccttgtttggcggaaatcattatcggaccggatgtactcatccatcttctgaaggagcttcttcagggtctgtggaagcatcctggcaaaatattaagctgtacgtcatgggcgaagcctctcgatcatggcctcaatgacaatatcatt

SEQ ID NO: 9991 - DNA, 423 bp, Zea mays
  unsure (1)..(423): unsure at all n locations
agctnttgatgaacagcgccatttctctcgtgtttatcttggaggcgtcgatgggtgttctacttggtgtaaactcctccttcttctcctccgtcgccttgaatgcgaccggttgtacttcggatgtggagggaccgtaaagctcgttgatcttccgtgagcccttgatcataaactcaaagctcacaaaattcccgattacctcctcgggagtcattagtgtatatctaggattaccacgaattaattgtacttgagtagggttaaggaaaataagtgatcttaaaataaccttaaccacctcgtggtaatcccatttcttgctcccgaggttgcgcacttgattcaccaaggttttgagccggttgtacatgtcttgaggctcctccccttggcgaagacggaagcgaccgagctccccct

SEQ ID NO: 9992 - DNA, 285 bp, Zea mays
tacttcaaagtcaatctgaatcgagttgtctttgttcaccaaaaccacacgacatggctgtcggccacggacctcgggcgcatgtcgggcccatttcgaagtaaacgtacttaacgcaaacacgggatgtcgggcccaccgaagtcgatgccctgtcgggcccgcaaagcgcgaatgcttccacggttattgagtgggctatatatacttcccaccgcattggaggtggagcccacacataccagctattgaacattcaatgctaacaccaaggtaataatactc

SEQ ID NO: 9993 - DNA, 423 bp, Zea mays
agcttggagtagcatgattcctggggggcaattatattagaagccttatgatagtcgatttgatcaccacccatacccacagggaaccaggatacccgagtttgcatagttttcgggtgaccaagtaaagagcacgcgtgagcacatagaccagttcctagcacaattaggagaattggtcgacaccgaagcattctgtgtgcgtttattttcattatccttaacagggactgcattcacatggtatgccacgctccctcctaattccattttgtcatggggagacttagagcaaaaatttcatgaacatttcttctctggtgattatgagctagaattagtagacttagtgaccctacgacaagaaaaggatgaatcggttagtgattatatccggagattccaggatacgagaaaccgatg

SEQ ID NO: 9994 - DNA, 415 bp, Zea mays
  unsure (1)..(415): unsure at all n locations
aaagatcagaaggacattgtatattatacatatgttaacaatgcagaggtntcctttgacaatatctttttcttccttaagattgaccaatgaataaaacagaggtttcctttgctgacaatgcgcaaattcatatggcatacatagtgtgcatatgccacttatgtaaatcaatagtataatcagatctgagaaagaaaagctaccaaaaagatcattccaacaatagaaggggtcctagcaagtaggaacaaaaatatacaaaaggatctgattagcatgtagtagcctctcttccacgacattatcatctgtgattggcctcaattgatctctggtgcgttgctccactacctcatcttgatcttgttaaaacaccttcttcgacttctgcaccatgatgtctctcacattg

SEQ ID NO: 9995 - DNA, 416 bp, Zea mays
agcttcgtgagagaggggatgtgtccctggtctcctgagaagtctagggatgtgaggaggagttcgatgtttgagcgagtccgtctccgtcatcctctccgcctctccccccttgggaaggctctgggcatccccttttgtagatacaagaggatggtccagctgtacatatgggggtgtagctatgtgctaacgtggccggcggagaagtgcttgagccctgtagaagcgtatctggcggtgcggccctaggtcctgctgacgtttctttgctttcatagagagcttgagaacaatcgatgtcatggacgcatgcagggaaccatcattacctgttgccggagtaatctagatgtgacaccggtcttgttccttcgtagcctgaggcggctagctagaggtagggtaatgatgta

SEQ ID NO: 9996 - DNA, 450 bp, Zea mays
  unsure (1)..(450): unsure at all n locations
tacccctccctatgaaaggccgttcgcatcgctttattttgaacctggaacatacaagctggccaacaatcaaggcgaagtctacagcaacgcttggaacatccaacagctacgtcgcttttacccttaagatgtttcaagtcattcatatacctcgctcgagggcttgcatacataaataaagtctaaccgtcaaggaaaggtcagccttgcctcggcaaagcccgaccctccctcgggggctagaaagggggaaccccctctgcgtcaaaattttcctcggaaaaaatcttttgccagaacgtctttcgcgctattcgactgcttcgatagcgggatcctganaacgacgagagtgcacgtaagctgcaaggccgatcgagccaatggactcctacgccttcgggatacgaatacctcactcatcaccttccgcgataagtaacccac

SEQ ID NO: 9997 - DNA, 419 bp, Zea mays
  unsure (1)..(419): unsure at all n locations
agtctgcacatagnctcggttattatgcctntttatgtccaagtcttctaaagctattacttcttgcgaaaccgcattgaaaaagtaacacaagcgtgtgaagacaactttgacatgctctgtttcgagggctcttaccgcaattgggaggaacaccgtcatcatcacatggcagtcatgagagttgtagccaaattgagacaagaccttcatcctgactagtctgctgatattggatgagaaacctgtgggcactatgaccccacgcaaacatttgcaaatctttgttctctcctcaactgacaaggtgtagctaactggggggaggtaatgcttccctttgccactatccactggatgaagtgttggtctgatttgaagaactactagatcattgcgtgaatngaagtccccttttg

SEQ ID NO: 9998 - DNA, 324 bp, Zea mays
gaacataaaatgagctccaaaacaattgcggatatccctgcactacttccatttcttatctatggagcattaagcttcctccttaattaacacccttgatgagagtccattaaggtgagaagaataagatcgtatttgtgtgccttgttttaacctcttatccagcagagcttcagtgatcaagcttcactagatcactattataacgtatcatgctatcaaagcagctatggatggtagtcactcctggcgacaataggaatgtggactatgtatcctgaccacgtcgtcggtaaacccatatgtgatagctggctatcatag

SEQ ID NO: 9999 - DNA, 409 bp, Zea mays
agcttgaagctggcctctgctctctgacgaatgtttaccttgcggatagccttgcatataacagtttgaaggtagaaaaaattgtatatttggaagtttatgaattttgaattattcttttgttcttatattaactcattcattcttttcatatagggtttaatagttagcaacgccttaagggcacagaagaatgccaaagacgagagttgcactattgccctcaacaaccttcgaacagaggttatcaagctgaggaacgaagctttggaaaaagacaaaattgtacttacattggtggacaaagtaaagggggatgaagctaacttcaaggctcaatctgaaatccaaaggaatgagattgaaaaccttcaaaaacaactggccgaagccaaattgaaatgcgcta

SEQ ID NO: 10000 - DNA, 392 bp, Zea mays
  unsure (1)..(392): unsure at all n locations
gattggataatataatttaattcaggatgggtggcctttaaactctaatctattgaataaatctaaacttttattacccataaaatagacctacaaatggctgcattttacatttctacaatttctatgaattctctagtcctggaagacaaagaagagaaaggttctacagtatcnggctgaaccggccaatctgcccatgcccagtaaacgtgcgcccccgctggcggtttacacagaaacctcatttttgaatagcataaaaaccctgatactatttgttatctattacgctgcaccagaccccctatttatccatacatccagatcagacgggacggtgagaccaactcggacctactggcgatactaataccggtcatgcaaaacaa

SEQ ID NO: 10001 - DNA, 391 bp, Zea mays
  unsure (1)..(391): unsure at all n locations
agctctccaagctctcggacccggcagaacttcttcggagaaccaagatcgtcctcgacggacttcggccgcccgcctgcgcgcgtagaccgagcaatccggtgagcatttcttcaatccctcgcacacacaccttccttgatccctagtgaagctctctgacccatttgattggtcaattgtgccctagataggccggactcctcgccgncgacgagctcccccgcttgcgcacgtggaccggccgactccgaccatccccgacgccgacccgcacatcgccgtgaccctcatgacctcccctacaccctcggccacttcaccggagcagtctcaccgccggtaagcccctccgccctttcctctgccgcgggtactgttcaatttgggg

SEQ ID NO: 10002 - DNA, 181 bp, Zea mays
tagcaaagaggtagccattacgtgatgttctaagggcttaattgtgctcgtacccagagtttattatgtttgtctataccactgggggatacaaacaaaaattatatctactatcatcttcgtccccaagctccctctctacctgcttgctcccttccatcagtaggtgttgctaacatat

SEQ ID NO: 10003 - DNA, 405 bp, Zea mays
agcttgtgaaggttctttatccctacatgtgctaagcggcgatgccacagccagcccatgctagtcttagctattaagcatgcatctagaccagcctcttcttttgcaaaatcaactaaataaagttggccgtctaatacacccttaaaagctagtgaaccatcacttcttctaaagacagacacatctacatttgtaaatagacagttataccccatgttgcataattgactaacagatagcaaattataaccaagagactctactaaaaacacattagagatagagtgctcattagaaattgcaattttacctaacccttttaccttgccttgattcccatcaccgaatacaattgaatcttgggaatccttattcttgacgtaggaggtgaacatcttcttt

SEQ ID NO: 10004 - DNA, 331 bp, Zea mays
tcaacttatcaatggcacggaagtgccttctcatggcccatctagaagagctatgtgagcacctccgactttgagacaagagtatcctaacatgttataagcttctaagcacttttgggcttaacaaccccaagacatggatgatgcttaagattttttatacaatggttcaagtggtaaaccacctacttatcctaaacttgatatgattgttgatgcaattatgtgagaatcaattgggctactacaaactctgtagaattgaggacataccaaaattcaatgcatgaggggattgagattctagatcagtaacactccaaggcacctt

SEQ ID NO: 10005 - DNA, 428 bp, Zea mays
  unsure (1)..(428): unsure at all n locations
cttgtctgtcgttcagttgttgaaatgtagcagttatatatttatctttaaaatgtgtcattctcagaaaatcatctgcaattgaacatgcacatatacgggatgtggattataaccccaagaagcaacacattattgtgagtatgacacttactttcatgtttcccatatgaagcaatatttcatatatatttacattaatcgaacattcctatgaattatctttatgtagtaacattgaagacaacaactttgtattaccttgtgtttcttggttatatttctacattatttttgttataatttgattatggattctttttttttcttgcttctgtagttcactgcatgttcacactggagtatgacatgattttttactttgttattattaaataactggntagaactcttgattgtgttctacg

SEQ ID NO: 10006 - DNA, 410 bp, Zea mays
agtgtttccgaagatgtctggagataagaaggctgctgctgagacgaagctgagtcttgacgaagagaaaaacttggggtttcttatagcgatgtcgaagaccaacacggaaaaaatcaccaaggagattctagaaggtttgtctgaggacactggtgacagcgacagttatgatgtggacagcggtggtgaagactccgaagatcgtccctggcgaccaagccattcagtttatggtaaatcaactatcaaagagaatcatcttgtcaacatgagaggaaggtatttccgggatttgtccattgtgagggccgacgaaagggagaagacttgtccacacccttgagagaatgaagtcgtagtgaccgaagctttttgaagctgggctgcgattcccttgagcagcttca

SEQ ID NO: 10007 - DNA, 418 bp, Zea mays
agcttgtgaaggttcttcatccccacatgtgctaattggcgatgccatatccagcccatgctagtcttagctattaagcatgcatctagaccggcctcttcttttgcaaaatctactaaataaagtttgccgtctaatacacccttaaaagctagtgaaccatcacttcttctaaagacagacacatctacattagtgaatagacaattataccccatgctgcacaattgactaacagatagtaaattgtaaccaagagactttactaaaaacacattggaaatagaatgctcattggaaattgcaattttacctaacccttttaccttgccttgattcccatcaccgaatatgattgaatcttgggaatctttattcttgacgtaggaggtgaacattttcttctcccccgtcatat

SEQ ID NO: 10008 - DNA, 442 bp, Zea mays
  unsure (1)..(442): unsure at all n locations
agatattgtcactcggcttcttcaatccaatgcagcatttgatttcttatctaccgtatgaggcacgaatggngggcatgcagggacgttggtgctatccaatcgagagatgtctaaagactattcaaaagaaatgtagaaataaatggtaaatcaaagcttccattgcagaggtatactntgcagaggaggtgtcaaacttcacaataacttactatggtgacaaacaatcgagcgtgcataatccaccctctcgttacaatgatggcgacaatgaatcgaaccttagcatatttctaggccaactctgaagcacaagtggttcgaccactaagaccctgagacatgaagagtggcgtcatatcatgctatatgtattgaacaaccgtgaagaggtgacgccatatatggaacaggttcttcatgaattctagcgtcaatc

SEQ ID NO: 10009 - DNA, 435 bp, Zea mays
  unsure (1)..(435): unsure at all n locations
agcttcagctccatctatgttatggattgctnttgtgtcagcccagtttccctcagcccttctggcagcttcctgactcccatgaatagcaatgggtccttgatccgaaggtatcttcatgcagaggtaagcaggatgaagaattgcttcgaatgcattgagggtgccacgaccaataattgcattgtaagggtattccatgtcaacaatgtcaaacacaacttgctcagttctggtgttgttgatgaatccgaaggtcactggcatggtaatcttgcccagtgctacaatctgtcttcctccgaagccacagagagggtgtgtagcatcatgaatcttatcttctagctcttgcatttgcctgaaggccttagcaaatatgatatcagctgcactgcctgtatcaaccaagacattgtggaccagaaacccttt

SEQ ID NO: 10010 - DNA, 439 bp, Zea mays
  unsure (1)..(439): unsure at all n locations
gctcttaactatgtagctccggtctccttggggagatctgaacacaagctggaccgtctgctcaccggcaggcagtcatgcgcatgtgttctgttgtntcgagcattagcattgatggtgtatctgtcctgccatcgctgcgacggcattggcagttcggcacatgtcatgattccggcgaccattatttgcgaaaagcatgatcaaaaattggacagaattttataagaaaggacgactggggcatgcatgattgcccncgctgcttgtgattggatcaacgcaaagcgcactcgcaggcgacccgcgcgatgcctctgtcatggccaacatgatgacctaataacacctttggaatagcacgaagcgccttgcacttgtgaaagataccctcgtcgtctcgtcagggtgtttggcaaaactgagtggaatggaatga

SEQ ID NO: 10011 - DNA, 431 bp, Zea mays
  unsure (1)..(431): unsure at all n locations
agctntaganaattgttaaaaatggtagaaaaatcttataaatatgagaccaattttcttagaaccctaatttcctgtagtatttaataaaaataaattcatgatttttagctcaaatagggaattttagggtatttaaaatagcctaaactattggttctggatttttagaaaataaataataagtccaaaattccccaaactttttatgtgagcttttcacattatttagaagccatgggtagagtttggtttgatttggaccttgtttgatcactaaacccaaaaccaccccccctgctccacaactcctttaccgactccggaaaccctatgttctcgggataccgtgaaggaaagttgtactcaagacatagataataagtttatatcatctttgcatcctcacgagcatcccatgacattcattc

SEQ ID NO: 10012 - DNA, 365 bp, Zea mays
  unsure (1)..(365): unsure at all n locations
tcagtcttagcgttggtctcggtcttaggtagtcctagttagacagggtagtttgctatatcctgngcatttatgtttgtcatgatgaactatgtttggtttggatctttgtaatgattgtcaccagagtgtgggtatcccctgcattttggtttacatattatgttaataaagctaggtatatagttgggaaaacctttattctactttcctctttatctgagaagctgtgtggtctgtgttggagatcagtgaaaatgctcatctgttcagtgctgttggagaattctacactcttttcttatgctgcaagatttgccagatcagttctgatgtgtggntgcgttctgcaaatgtcagagaac

SEQ ID NO: 10013 - DNA, 440 bp, Zea mays
  unsure (1)..(440): unsure at all n locations
agcttttagcgtttggttccaaaccttggcttctacagcccagactaaaatccccattcttataatagcttcgggagtgagttgatgaaggtagatttggaatgttttcagtacctcaacaacaaaattgctcagggggaatcgaagcccagctttgaggaggcttcggaaaattacaacttcatcctcttcaggggtgggagaagtcttttccccggcatcagctctcacaatagatatgtctcggaagtatcgccccctcatattatcaatgtgactctgcttgatggttgttttcccaaaaactgagtgacttggtcgccacggtcgatcttcggcctcttccccactactttccacatcatagctgtcgctgccatcagtatcttcggacaaaccttcgagaatctccttcgtgattntctctgtattagtctctg

SEQ ID NO: 10014 - DNA, 425 bp, Zea mays
agcttgtgaacagtacaagtttttaatagagaatgctgtctcggctgatcagacgaagcctatgcttctaagtgaagacatagcagagcagaaggtactgctgggatctcagctatctgaagaacaagagaaaaccttgataaggtttttattcaacaacaaagatgtttttgcttggtcggccaatgatctctgtggtgtaaacagagacgtcattgaacattcactcaatgtcgacccgtctttcaggccaagaaagcaaaggctttggaaaatgtctgatgataaagctgaaggtgctcgaaatgaagtcaaaagacttctcagtgctagtgttattagggaggtaaaatatccatagtggctagctaatactgttatggtgaagaaggccaatggcaaatggagaatgtgtattgatttca

SEQ ID NO: 10015 - DNA, 441 bp, Zea mays
  unsure (1)..(441): unsure at all n locations
tcagcttggaaattcttatcccaacatgggcaagtcggttatgccttatcctacccatattaagcttagcaattaagcaagtgtcaagttcagcttggttatcattaaaatcaactaaatatacctgaccctctaacactcccttaaatgctatngaatcatcacttcttctaaagacagtaacacctatatttgtaaatagacagctgtagcccattttgcataattgagatacagagagcatattgtaatctaaagaatctacaagagaaacattgaaaatagaatggtcaggtgatatagcaattttacccaaacctttgaccaaaccttgatttccatccncgaatgtgatagctcgttgaggatcttcatttttctcatacgaggagaacatccttttctcncctgtcatgtgggttgtgcacccactatcgatta

SEQ ID NO: 10016 - DNA, 411 bp, Zea mays
  unsure (1)..(411): unsure at all n locations
agctnntaagtttcttaacttgtgttaagttttatccttttaacctctatttagggttaagtcctttaaccagggttctatttgcaaaaacattaaaacaatacaacttgtttgaaatttttacctagtgaatgtactctaggtgtatcaaacatatgcaatgccaatgcttatgatgccatgctcaagttttagttatagtaacaccaggggtgttacacaaccagaacattgtggaccagaaatcccttgatgacacaagatataaccatagcatcattgtgagggtaatccttgagctaaagctcctcctgngagaaggtgattgggatgtgggaccattttgacttgatgaagggtccctgcaccccaacatgttgcactcttctctaagcctccttcttctgcttc

SEQ ID NO: 10017 - DNA, 376 bp, Zea mays
  unsure (1)..(376): unsure at all n locations
actcagcttattcaccgtattctcattcaaagcatcgntgtgctgtagcttcgtcacaagagggagcttcngcaaagctacaaatagtcatcaacttcgtcacaaccgcaagagattcaatatcaaatggccagggtgcgttcaactgctagagtcacacgcgacggtgaggaggccgaagctgccgagactgccccaatatccgaagtaatgagacaatcangcctggttgtgttagagggtgcttctgacgaaggtgcaccttgctgccgaagccgagcaagctgacattgaagaaggtgaggttgatgaagaagagatagattattccgtcatgccatctaaacccaaccacctggaatttggaaagtctact

SEQ ID NO: 10018 - DNA, 417 bp, Zea mays
agcttctaaagggagaacacgtgataggtttaactaacgtgcaattcgaaaaagatagaccttgtgcagcatgtcaagcaggtaaacaggtgggaggagcacatcacagcaagaatgtgatgaccacatcaaggcccctggagctgctacatatggacctcttcggacccgtcgcctatctaagcataggaagaagtaagtatggtctagttattgttgatgacttttcccgctttacttgggtgttctttttgcaggataagtctgaaacccaagggaccctcaagcgcttcctaaggagagctcaaaatgagtttgagctcaaagtgaagaagataaggagcgacaacgggtccgagttcaagaaccttcaagtggaggagtttcttgaggaggaagggatcaagcatgagttct

SEQ ID NO: 10019 - DNA, 313 bp, Zea mays
agatcattgaccagccttcaaaataaatggctggagttcagcgaatgatgcgttcaacggcttaagcaggtggtctattttggtggagccagcaacgagaaatatacttccttcggtgaagacctgctaagtgccctcgagcatatctaaggtgaaattgatgaccttgacgaaagtatagctggacatggtgacttctgtggcctggtagcttcgcggggcacaactattgcctttctgaagtctgtgtgtgaacacagaaagattatcaatagaccctatgtcaacttattaccaacagatttggattaca

SEQ ID NO: 10020 - DNA, 427 bp, Zea mays
agcttcgggcctcgtcactatccaactctcgactacccttcgcccaaatttgtgttataaatctgctaccaatgctccaggctttactagggatgacaactaaatctgatggagataggctaaagtttggcctatttacaatttttgtgtgcgtacaaccagcctttagaaatgctgcagctgtgccacgagaagctagcagggcacagaagtcactgtgcccgactattacttcatcgagcgccgctacttcgccttccatatgttcgaaggtgctggatatgttttcggccgaaggggtaaacttttcagcgctggccccaaccgagttaaaaaccttttttagtcgttgtacgcagcggttgccaaaatccagacacatgttccgaagctcttccaaagattgcttcagcttcgtattttcaac

SEQ ID NO: 10021 - DNA, 406 bp, Zea mays
  unsure (1)..(406): unsure at all n locations
ttacggacctataaatctcagctgtgaatgcctcgctgaagcaacagaagctgcatgttggctgcccacatattctggtatgtaaggagagtggcacgaaacagtgtgtaaaacttgctttggctggttctgccgaacttctgcttcagcaatctccttttgtttcagaatagtgatttggcacgttcttgtagtgtggcccttgttctcaccacataataagcaatagaatttcttgggcttatccccatatcttgctccgaagcccctgccgcctctgccccttggagctggtggcctgaaggagctttgctgctgctctgtagactgtgaggtgtgctgtggcctctgaagctggcttcctttgtcantcatttgacttgagctgtggattgatctgacatgc

SEQ ID NO: 10022 - DNA, 408 bp, Zea mays
agctttctctccctttggtttatatatacgagtttagattataccaaattggagagcgttgtggagcgacggcgaacgatgaataattcgatggagtggagtggaagccttttgtcttcgccgaagactccatttccctttcaatctatgacttagcataatattcacttgaaaacacattattcatagcacatgaaagagatatgatcaaaggtatataaatgagctatatgtgcagaatatcaatcaaaattcctagaatcaagaatatttagctcatgcctaagtttggtaaaagatttctcatataatggcttggtaaagatatcagctaattgatctttggtgttaatgtaagcaatctcgatatctccccgttgttggtgatctctcaaaaagtgataccga

SEQ ID NO: 10023 - DNA, 409 bp, Zea mays
agcttgtgggaattgtaagaatgaataccatgtattggcttgggcagtcacagtatgctacccaaacagtctactggtcatctttatcgtcagcaatctcagaggtattcacaactggatccaacatttgaccctggcaaaaaaaaacccagatttgctctcttttctgaaggtttttcttcaatctacctctaattagcaacaaggcagtgctctgacaccaagggtaaactgactctcgccaggtagtattctcaaagaacgcgaccgtgaggctactcgtcgcctactgggcgcatctcatcccaaacaccgagaaatacctgaagagcctactgtactccaacgttctctgcgcgtcttcggcgtacaaccactgtggcggcaaggtcgagatcaagtactacgt

SEQ ID NO: 10024 - DNA, 286 bp, Zea mays
gtgagtaccctaaccatgtctataaactctcaaaggcactttatgggttcaagcaagccccaagagcatggtatgaatgcctgtgagaattccttatcactaatggcttcaaaggcagaagagccgatcctacactctttactaaaactattacaaatgaatttgttgtatgccaaatttatgttgatgatatcatatttgggtctactaacaaatctacttgtgaagagattagtaggatcatgattcaaaaacttgagatgtctatgatgtgggaagtaaagta

SEQ ID NO: 10025 - DNA, 429 bp, Zea mays
  unsure (1)..(429): unsure at all n locations
agcttcaaggcaagatagtgcttggcaatgatgattagctatcaatcttatgctnttttctgattctattcaatcgacttctttttccttctgcttcatggggcattacaaacaatgaggtactaatgacttcaaacatggcccgaatggctgatattgactggtgtcaactagtttacacggatttttgtgatgctgccacacgttggcatanaaggaacaaaacaaacatcacagcaacaatatatggatgttcactcattgttctagtaagtaatttttttgtttactgcgcatatatatgatatgcaaatatttggtatgtacctaatttatatatttgtgcattctttttttcagatatactatcttgatcacttacatcaccctgcatctcctgataacaaatatggtactcctcgcattaag

SEQ ID NO: 10026 - DNA, 350 bp, Zea mays
acaatttcttcttgagaatgagtgttatctcctaacgtctcacgtgggcacctttacatttcttcacctcaacaagcttctctttacttagatgttatggaagaagaccctaatgagctgcaccattgccaccctcgcccttgtcaccatcaccatcgttgccttgtcgtgttcaccgctctcgcccttgtagtcgtcgcccttgtagccgttgatctccctgctatcgtcgctggactccccctcctcatccaactcatccaagctagtgaggcctagtgctccatatccttgaagaaagctcgtgcgccctgggagagccccattgagttgtcgatgttcaccgatga

SEQ ID NO: 10027 - DNA, 431 bp, Zea mays
  unsure (1)..(431): unsure at all n locations
agcttagcaagagacaccaagtgtgtggtgatccttgcggngtcttattgacccgtgtgattaagggaaggctcactcggtctgggtgaccgtttgagagagagggaaaaggttgaaataaactcggcctttgtggcctcctcaacggggattagtgaaagggaaatgtgcccttgggccatttctataagtattttggtgattagatgtccaacacatattgagtaagttcctgtgcaaaatgagtgagaaagtgtgaaatcaagaacaaggtatgtttctagacttagtgaattgtttttgtatactaacatggttatctaagtgctagaaatagtgacaagaaaagaagatttgatttggagaaaagttggcaaagtttatccaacaccagctcgggtctggcacaccggactgtccggtggtgcacc

SEQ ID NO: 10028 - DNA, 424 bp, Zea mays
agcttgaagccatggtaagtagcataggctaatattatgcgaattgtctcaagcctagctattggtgcataggtttcaccgaaatccaaaccttcgacttgtgaataccccttggccacgagtcgagctttgttccttgtcaccacaccatgctcgtcttgtttgttgcggaagacccacttggttcctacaacattttggttaggacgtggaactaagtgccatacctcgttccttgtgaaattgttgagctcctcttgcatcgccatcacccaatccgcatcttggagtgcttcctctaccctgtgtggctcaatagaggaaacaaaagagtaatgctcacaaaaatgtgcaacacgagatcgagtggttacccccttatgaatgtcgccgagaatggtgtcgatggggtgatctcgttgga

SEQ ID NO: 10029 - DNA, 310 bp, Zea mays
  unsure (1)..(310): unsure at all n locations
atagactcttgtgcagcttggcaagcaggtaaaccagtgggaagagcgcatcacacccagaatgtgatgaccacctcaagacccctggagctgctgcatatggacctcttcggaccccgcgcctatctgagcataagagggagtaagtatggtctaattattgtagatgacttttcccgcttcacttgcgtggtctttttgcangaaaagtctgaaacccaagggaccctcaagcgcttcctcaggagagctcaatatgagattgagctcaaggtgaagaagataacgagcgacaacgggtccgagtcaa

SEQ ID NO: 10030 - DNA, 432 bp, Zea mays
agcttatcataggcatcgcccccatttctaaaagttcatgcagaatgttcggaccagaattggtggaactcaagaaacaaatagatgatttgttggagaaaggctacatcagacaaaaacctcgccttggataacataaagaacccaacatcgtttgtctatcggttgtacaaagaaattcatccacgtaatcaataaattcttttgaccatcgaccccattgtacatcaactgctaggttcatctgcattattttataaaatgtagcactaatagttaaatattatgcataattaaatattacaaggttatttttacttgtagtaaaattaatattctataatctactggaaaatatttgccggttcatctcttagaaaatatagcatataacaatactataaaaacaaatttccttatattttctctaaa

SEQ ID NO: 10031 - DNA, 429 bp, Zea mays
  unsure (1)..(429): unsure at all n locations
gatatatcgaagaaatcaaaagcacaacacccataatcattgagttgggtgttgttcctttgaaatcttcgaagttttttaataggcccattgctttctatataagggtattctatctcctcgtccataggggcattaacatgattggagactcacggataccaacttggggtatcatgcttctcattaaggcataaaccccgcttctcattacttccactngctaacagataaacacactacaacactttgtcatggtgattttccttccttaacagtcttccatcntgtggtttggcaccatcttggagaaagaacttgntttagaaaatacctctatgtgtcttaaccacaatatntagtgcaatatggatagtattagcggtagctttgttcatacatcacananacatcttgttcttacatcac

SEQ ID NO: 10032 - DNA, 445 bp, Zea mays
  unsure (1)..(445): unsure at all n locations
gcatgcaagcttttcttaaaagatccgctacttcttcacttttctgtatttgcgttcatagntgagcctatgagttcatctgcatataagtcaacatatgtattctattaaatattaaattatttctacttatctaaatagctcagcacagtactgagacacctgcaatcacctgatgtggatttggataataaatggagaccaagtgtgaagtggttttttatgaagcaatcaagcatggtggccctgtgtgctttgttacttgtaccgcgtgagcatgtcctttggccttgtgtggcgttcgactttatccttactctaagaaaggatttctgaacattgtttttgttaacgtggaccttcggtcagggtctttctccccaacaggatgttccaaggctaatcggtatggagggcccacccagggtagtatgacaatgacaca

SEQ ID NO: 10033 - DNA, 444 bp, Zea mays
  unsure (1)..(444): unsure at all n locations
taaaactagctactcctctggaaggccgtcatcatcgcaagattttattcccggaacatacaagctggccaacaatcaaggcgaggtctacagcaacgcttggaacatccaatagctacatcgcttctacccttaagatgtgtcaagtcggtcatatacctcgttctctttacatacacaaatagagtctaaccatcaaagaagggtcagccttgcctcggcaaagcccgaccctccctcgtgggctagaaggggggaaccccctctgcgtcaaattttcctcggaaaagttttctaccaaaatgactttcgtgctttccgactatatcgatcacagaatcctacaaaacgagtaaaacgcaccgtagcggcaaggccgactgagccgaggactcctacgcctccggatacngatacctcactcgtcaccttccgcgaaagtac

SEQ ID NO: 10034 - DNA, 389 bp, Zea mays
tacttaaagccatggtgagttttataggcgactataatgccaatagaatctagcctagctacgggtgcataggctacaccgaaatccacaccttcgacttgtgagtatcccttggctacaagtcgagctgtgttcctcgtcaccacaccatgctcatcttgctcggtgcggaaaacccacttggttcctacaacattttggctaggacgggcaactaaatgccatacctcatttctagtgaaattgttaagctcctcttgcatcgccaccacccactccgaatcttgtagtgcttccttaccctgtgtggctcaatagaggaaacataagagtattggtcacttaaatgagcagcacgagatcgagtcggtacccccctttgaatattg

SEQ ID NO: 10035 - DNA, 405 bp, Zea mays
  unsure (1)..(405): unsure at all n locations
agctttagtttcggtgtgggatcgtcttggcccttatctggttcacaagcctttggactttcctagacgcgccatggagtggcgcaaggtctcttcgccgatcccggccatccagaggtccggtgtggctgatcctaccttgggtggcacgaagaaacgccgccatcgtacgcggggtcgaaggcctaagaccgcccccgttgcaccttcggaggaatccagtgaagttgcacctccaaccggttcctcttccccagagccggttagagtgcatgcccctcaaccggttgttcctgatatggtggaagccacacatctctgcattntggaccgtgcggatgcgcttgctagagaagaactgtggttgcgacggtgtgctctgttcgttgttgtcactggttcaag

SEQ ID NO: 10036 - DNA, 428 bp, Zea mays
gccttcgcctcagtgtaccaccctcaatccaacggagtcgtggaacgctccaacgcgtaaattctcacagccgtcaagaaaatgctcctcgacgacaaaaaacgcaagtggctagacctgttacctgaagtggtctgggcgctgaacacgactgagtgcaaggcgactgggttcaccccttttcgccttctataccgatcagaagctatgactccacaagaaataaaacatgggtcaccgcggacagtcgcgtatgccgtccccgacgtatacgagcctacttcgaaggacctcatcgacggagaccgcgtcttcgccctacaggctctatacaaataccaagctcaaacaaaagcatggcacgaccacacagtcatcccgagggaattcagcgaatgagacctcgtactcgtcctgacagctcggac

SEQ ID NO: 10037 - DNA, 419 bp, Zea mays
cagcaagcttagtatgtatgttgtctttttgatttgcctaaggggactggaaaaaatagactactatcgctctaggttcttctggcaaggagatcatcataaaaaaagtatagacttgcacgttgggatattctttgtcaacctaaagaccaaggaggtctaggtattcagaacatagaggttcaaaataaagtgttgtgaaagggaattatgcttacacctagttcctaaatagttttggtggttgaattgcccaacacaaataattggactaactagtttgctctagtgtataagttatacaggtgtaaaaggttcacacttagccaataaaaagatcaagtattggattcaacaaaggagccaagggacaaccgaatgcacctctggtctggtgcaccggactgtccggtgtacac

SEQ ID NO: 10038 - DNA, 291 bp, Zea mays
actcatgacccgattccgaagatacctgttcacatatttcacttggaagacattgtcaaatcatgtgtttgaggaccttctgaagccgaaggcccccaacagggatatttatgcttcttatgatgttgagatgatatcacgaggctccctagagtagtactaccatgagatatgagagttctatattgggacattcacagaattggtaactctacgacagcatgagaacctcgcgacctcggcaaataatatacaaccttgttgtgtggattcttgagacgcatatttcta

SEQ ID NO: 10039 - DNA, 422 bp, Zea mays
  unsure (1)..(422): unsure at all n locations
agcttctatagggagaacatattttatgattaatattagtncattntgataaagacaggatttgtagcgcatgtcaagccgggaagcaagttggaacccaacatccacacaagaacatcatgacgaccgacaggccgcttgagctactccacatggatctattcggcccgattgcttacataagcatcggcgggagtaagtattgtcttgttattgtggatgattattctcgcttcacttgggtattctttttacaggaaaaatctcaaacccaagagaccttaaagggattcttgagacaggctcaaaatgagttatgcttaaggatcaagaaaataagaagcgacaacgggacggagttcaagaactctcaaatcgaaggcttccttgaggaggagggcatcaagcatgagttctcctct

SEQ ID NO: 10040 - DNA, 362 bp, Zea mays
  unsure (1)..(362): unsure at all n locations
actcagcttctaaagggagagcatgtgttatgactaacacatgtgttgttctagaattatatgccttgcgcaacatgtcaggttgggaaatatgtgggaagcactcatcatagcaagaatgtgatgacaacatctagaccactggagcttcttcacatggacctcttcggacccattgcctaccttaacatcgggggaagtaaatatggtcctggaantcgttgatgatatttcctgcttcacttgggtgttctttttgcaggataaatcacaaacccaagggaccctaaagcgctttctaaggagggcacaaaacaaaatttggctataggtgaaacatataagaagcgacaacgggtctg

SEQ ID NO: 10041 - DNA, 424 bp, Zea mays
  unsure (1)..(424): unsure at all n locations
agcttgaaggccaagttaatatgttgccccaatatattntgtatccgaggttcttagtttatcaaagaaaaattatacagagttggagaaggtactgtatgctgtcttgatggcctccaggaagcttcgacactattttcaagcttacaacataattgttccttcttcacaacctctgaaggatattatgaggaaccgagaagctactggaaggattggaaaatgggctgcagagctcaatgaattctgtattgattatgttcatagatcttcgattcagtcccaggcgttagcagacttcattgctgactagacgccaggggctcaggaggaagaaacaaataaagacgccgaagcatggaccagtgtttgcgatgggtcttggggaaccttcngagcgagagcggctgctgtgttggtttca

SEQ ID NO: 10042 - DNA, 411 bp, Zea mays
agcttcaaaatattacgacttcatcttcctcatgtgttgggcaagtcttctctccttcgtcggcccttacaacagacaaatcccggaagtatcttcccctcatgttgacaagatgattttctttaatacttgatttgccgaaaaccgcatggcttggccgccaagggcgatcttcggactcttcaccaccactatctgcatcataactgtcgctatcaccagtgtcttcagataaaccttccaaaatttctttagtgatcttttctgtattggtcttcgacatagatcgaagaaaacctagatgcatctcttcagaaagactcaacttcatttcggcagcaaccttcttctcctcagacatctcttcggaattctttctgaagcttaaaactaggaaggcaacaaaatatt

SEQ ID NO: 10043 - DNA, 423 bp, Zea mays
  unsure (1)..(423): unsure at all n locations
ctttatataataaatactaacatgggaaatattaacttaacttctttctcattatataacatctgggtagtataaacatggcacctaattaatttatctcgtctatcatgcgtgttgttccggacgtggtgacgtgctggatggcgcgtcattcgtactggtcgcacgcactattttatgtgttgncagcgtgctatgacgtgtgtatcccgtaattaaagtagtaatatgaatgcatatttgataatgccgaattaaatgtcctagctcatattagtttagcataaacgccataacttatcgaccatatctccgaccgacgtgtttcatattctcacgtaatcatataagcgctctctattttatattgctcgctcttataacatcttatatttgatagtggaaagttctatgcatatgata

SEQ ID NO: 10044 - DNA, 411 bp, Zea mays
  unsure (1)..(411): unsure at all n locations
agctttcatcgcgacaaatgtaatggtgaaattatntttcaaatttggcactcgatttagtagatattaatttttaattggaacattaaatcttgcatgcacgtgtcctttttcggaacactaccgaaattcggctctttgccgagtgccaaatattttgtcgagtgttttttttggaaactcggcaaagaaaagctctttgccgagtgccaagcaaaaaaccctcggtaaaagaaaacactcggcaaagaagctctttgccgagtgttttatttttcacactcggcaaagagttttttgtcaagtgttttttaaaacactcggtaaagagcttctttgtcgagtgtccaatatataacacttggcaaagagcttctttgcgagtgtttttttcaacactatgcaaagaca

SEQ ID NO: 10045 - DNA, 471 bp, Zea mays
  unsure (1)..(471): unsure at all n locations
cttgggaactatgcctggatccaatctgcctgagccgaaactataagcgctngccagatgcccccgttccggtcgaccacgaccagcacccaacataagactttcctaattatttagccaagggcgttctataccaccctcatggtagcactgttttcccgggtggtcactccatgttctaattaaatcatatgatattgcttaatcggcagaatagcaacaataatggaaacttaccatttggaacattaatatcataaacatgagtgactgcatanatttataagttgagcaatagcataactacttgattagatcataatcctaggttaaacaaggagtaaggctggaaaggctacgtgtatctaagaggttacccatcagattatcatatatatatccacaataaactctataaatgtatatttgggacaaacaagtatgccagggaaagccactcgcttgctattg

SEQ ID NO: 10046 - DNA, 474 bp, Zea mays
  unsure (1)..(474): unsure at all n locations
cgtacccgcgatcctctagatgcacccgcttgcatgcacgctntacatgtatagaanaattggtctaatcttataagtttccttcagactggactgctctttgcatagtcgtctccatgccttgaataacgaaaatatgaagtccttagtgcatgcatgattcaatcatttaaagctttagagaattaggttcgaatggtaagaattagtcattaagaatgttcactatttcttgtaaggtattgactgtcttccttaaggagtcaaagatatgtacactgccttaatccattaagattaccagaagtatccagtaaaagttatagaaagcttacaaatagagacaacaaattagactacacatttatttagaaaagtatggctacaaaaatgtagtggacactaacttaaaattgcaaggaagaattatgtattgcatataatgttgcttctgtaaaagcttgaataatcttt

SEQ ID NO: 10047 - DNA, 451 bp, Zea mays
  unsure (1)..(451): unsure at all n locations
actaagctntctttgccagaacaccctagaaaaagtacatcanattagtatattggtgctacatttgacaaataaaaatacagttttgatgccttatctacctccactagacagtgttgcagccttatgcaccaacttcagccttatgccttagctacaacatctttcataaccaatgttaaaccaaagctggcaccaaaaactatggtgctaagagatacacaatgcttagtcagggtcaaaaaaggcactgattgataatcatatacttatgcagtttgttgaaatggaagtacaacgccactagactgaaggcgagatggggatgctattaaatctgagtattatcggccatgtatattgaaaactatgggcagatngagtacaataaaaagaaccatgacctatctncatttgtatttaacaccaaactcatcattttctcacacta

SEQ ID NO: 10048 - DNA, 430 bp, Zea mays
  unsure (1)..(430): unsure at all n locations
agcttcttgtcattcatatactaaaggttgctcattangaaactattgctngtgtttctaatgcaatctcttttaagctatttcatggaaattcataagtagagattgtgctctttcaattggtaaaatcacaagcattaaagtttaattttcacctaaaagatagaataagattgctcaaggcaaaggtatggaactagttgtttcatttggtatgagataaattatagatcctttcaagtggcattctttcaattggtaataatctattctatggaaagaaatgtcaatatgaacggtaaattccttatggcttaaatttgtaaatcagtgcatattgttaattcactcctccatgtgcactaacttaaaaagaacttaatttatgcctctatgcctcacaaatgatgatttgtttcaaatatatcta

SEQ ID NO: 10049 - DNA, 380 bp, Zea mays
  unsure (1)..(380): unsure at all n locations
agagaaattgcagagaaaaaaacaaggaataagaacttgggaacggaggacaagaccctagaggctcttaatctttgatggtctgcccttgatttatgaacatatgatgggctgtgaaagagtgagggcacatagtatcaatgacgatatcagtggcaaaggcatgtttagcatgtatagactaacattntaccaaaaataggcacctgtcacattatatttcccttttccattatttttggctagccaaacaaaactgtcgcccatgcaatgcttatttgactgtgtaacaaatatatgtataactnttttgtnttcagatcaaagaaacatgtcaagaaaagctccatagtgatcaaagggtggtgttttacagatat

SEQ ID NO: 10050 - DNA, 435 bp, Zea mays
agcttcgtcgtgaagcaaccttggccaaatcgtttcatcaaccgaccgtatcgcatgcacatttaatgaggggatcgcctgacaccttatcctgacacgcgcgcctcagtcggcaaggtcgaagtgaccgcggtcacttcgccctttcactgaccgacctgacaggaaaacagcgccgctcgccccgctccgactgctgtgccacccacccgggtaaggctgacaacagccgagttcagcctcgggcgcaacaggaagctccgcctcgcccgaccttatgcgtcggcctcgggaggaggtctccgcctcacccgaccccaagactcggcctcagcctcggcctcgggaggaatcgcgttctcgcccgaccccggcctcggcctcagtagaagtctccacctcacccgaccttgggctcggactgaccgcgccaca

SEQ ID NO: 10051 - DNA, 428 bp, Zea mays
  unsure (1)..(428): unsure at all n locations
ctcagcttcttcgcttataagagcttgttggtagtctggtgagatttggtagtaattgagacataaaattcaaaagatctgtgaagctagtatcagaccatccggcgctagccttcaacttcagaagttctagaactgtacgcagtgtaatataactctttgtcacaaccctttgattcatcatataaaggttcttttgaggcactttccagtcccttcattttagatagccctttctgcgatctcacagaacttaacatttctggttccatatggcgcaacatctcttcacaatcaaattcttcaaatcttgattagcatccacattatccactntaccatcaactttaagatctaaaattccgacaactctctcgtcattaccaggcacttcacacggatccaactcaccatgttctgaccatatc

SEQ ID NO: 10052 - DNA, 433 bp, Zea mays
agcttacccatgaagaggcatgtgaccaattaatatgtcctcgatcagcaagcctacatcaacacggtccttaatcgactcagacggagacactacaccaagactgtcttctcgtgcaagtcacccgcccggtctcagctttatcatttaaaaaccccaaagtctggtacctggcagaggtacatcttttctgatgtcgaacccatcacggcaatgatggatccaccatcaagttttatttttgaaaacatcccatccactatgaagcatcatcttttgtttaaaaacatatcatttgtttttctaaagcagaattaagcatcagaaaaaccttttaagaaaacaggtaatcaaggaatggtaaatagatccaaggaaggaaatgcatcaactggtttaacacacaactcctaccacctaatgcatcattcaa

SEQ ID NO: 10053 - DNA, 405 bp, Zea mays
  unsure (1)..(405): unsure at all n locations
tatttcggagccgagggttatgaatntttcgtctttaagcacttcttcagagcanggcttcgggtcccgctaaatgacatgatatgggacgttcttaagaaccttgaaatataccttcatcagctgacccccaatgctattggtagacttagtgtctacatatgggctctccgaagcctgggaatggatgcgaatgccgaagctttctgccgggtgcacgaacttcactaccagacaaaggctagagcagatggccttcataggaactttggctgctaccaatttgcgtatcggaaggatacgaangcctcggttattggctatcgtaccaagtggacgactggatggactaatgaatggttntacatgaaagcggatgagaaaaagagggagaagtaatgagca

SEQ ID NO: 10054 - DNA, 441 bp, Zea mays
agcttgagaggattttttcacggttcaagctcgtttctataaacgatctagcgccacgaaaggggctactgttggggccatgcttcgttgcgccgaaggtcttgcgtgaagaagcagcttcggctgaaatcgtccccaggaaatggccgaaggttcctttttatagagcttcggcgttacaaaccgacataaagatagaatgacctttttatccatagaggtctaagataatgttgtaaacttttgtaaagggcataattgtaattcgtcacaggctgcgtcctgtgtctataaatagatgaacagtacccccgtactggacacacgaacctgtcatttgccttcacatcacacttgtattcttcaagaccgaaggtacatttgtaatttggagtcatttacattcgtttataataataaaaatggagatgaatttatgat

SEQ ID NO: 10055 - DNA, 174 bp, Zea mays
  unsure (1)..(174): unsure at all n locations
tttatctntcgctctattctcgtgtagatatacagtgtaatgtctttaaatgcatgtctaggctccattggactatctgtacatacttaaatcgctctaaatatttatattatgtttagccttttggctctcgcctagcgattaaaatgtacagagggtattctgacacctcga

SEQ ID NO: 10056 - DNA, 410 bp, Zea mays
  unsure (1)..(410): unsure at all n locations
agcttctanagggagagcactatttgggactaattaatgttcattttgagaaagacatgatttgtagcgcatgtcaagcagggaagcaagttggtggtcatcatccacacaagaacatcatgacgaccgacaggccacatgagctactccacatggacctatctggctcgattgcttacataagcatcggcgggagtaagtactgtctttttattgtggatgattattctcgcttcacttgggtgttctttttgcagganaaatcacaaacccaagagaccttaaagggattcttgagatgggctcaaaacgagttcggcttaaggatcaaaaagattagaagcaataatgggacggagttcaagaactctcaaattgaaggctttcatgaagaggagggcatctagcat

SEQ ID NO: 10057 - DNA, 464 bp, Zea mays
tcacatgtctcgtatgaatcagaatctaacgaagtttttagtctatcacaatgaagcttcttcatgcgattcttacttatatgacccacacgacattgccacatgtatgtacgacttacatcattatgccgaggccttttagcactaatattacagataggtgcatcatcaagatttaaaatgaataacccattcataatggatgcataagccacatacatgccattcttagagatcacacaaccattgttttcactcgcagatgaataaccatccttcatcaaacatgaaggagacataatgtcttgactcatactatgaactagataacaattatttaactccaaaataaatcctgatgggatgtggagttgcatctgtcccgacggtcaacgcagcaactctttcattattgcctacccggagataacttctctctttcaccttctacttttatcattcct

SEQ ID NO: 10058 - DNA, 414 bp, Zea mays
  unsure (1)..(414): unsure at all n locations
agcttacttcactatttatggcacttgggacactttgatcacttggatgtatcgcacttatgtataaacttctatcttagctcttggatgttcaacacactagttggagtcatatttataggctccccaagcccatagagttgttggaaatccactcccaaatctgccttcaaaacgtgtgcaatggacctcaccctatagtangtccagtgcatcggacctctgactgtgctttgccacaccgatgacagttaggtaaggtgctagcttgtcagtgtgtgctggacctaccacaccagtgccacgtgtaagaaaaatggaccccgggccatttggctcaaaaggttttggtgtttgatgatcaacataatctatggactaatgagtttgctagtgtctatgtttatatttcat

SEQ ID NO: 10059 - DNA, 370 bp, Zea mays
  unsure (1)..(370): unsure at all n locations
tggacgtgaagagtgccttcctcaacggaccnatctatgaggaggtctatggtgagcaaccttccggctttgaagatagtgagtaccctaaccatgtctataggctctctaaggcgctntatgggctcaagcaagccccaagagcatggtatgaatgccttagagatttccttattgctaatggcttcaaagtcggcaaggccgatcctactttgttcactaaaactcttgacaatgatttgttcgtatgccaaatatatgttgatgatattatnattgggtctactaacgaatctacatgtgaagaatttagtaggatcatgacacanaaattcgagatgtctatgatgggggagttgaagtattttct

SEQ ID NO: 10060 - DNA, 413 bp, Zea mays
  unsure (1)..(413): unsure at all n locations
agctnttagggtttctcatcttttgttaagttttatcccattaatccctatttagggtaaagcttcctatccagggtcctatttgcaaaacattaaaacaatacaacttgtttgaaatttttgcctagtgaatgcactctaggtgtgtcaaacatatgcaatgccaatgctatgatgtcatgctcaagttttagttatagtaacaccagnggtgttacattgtggttattgtgttttgttgagactcctctctagccacttggcaatttactgtgctaacgcttaaccaagcttttgtggcttaagttttcaagttttacaggatcacctattcacccccccccctctaggtgctctcaattggtatcagagtcgttctcttcacaaagggactaaccgcccgaagagatgga

SEQ ID NO: 10061 - DNA, 371 bp, Zea mays
  unsure (1)..(371): unsure at all n locations
cttaaatctcagcttgaagattcttcttcttgtgtgttgcttgctatatggttatttaaaactttcttttctaaccctatgcccttttgttntaaatggggacaagatataataaagtgtcccttctttgaatatttataacacagtttatcatcctttgtaataatcatgccacttttaatatagggacatggtctaatcaagtgccccttttcaaagcattcactacacttcttattttcattggtatgaagtgtaacttgattattaccttggatgttaccttttatggaggcatggttgaggcttttggaagaggcactgattttcttctttcgtttcttcctcttggcaaacctcaagttcttgac

SEQ ID NO: 10062 - DNA, 419 bp, Zea mays
  unsure (1)..(419): unsure at all n locations
agcttcaacactttctggggttttgtaacgagatttctcttcaattntgtatgtctgctggagtgaaagccacattttttaaaaactttattcataattataaagacatgttattatatatgggaatgacacaatgaaactaagttccatactcatgatatgatttcagttacttttttttgtctgcttagcagccacattgatgccaattgtcattgctaactaatgcacctagctatgacaggattacaaactggtaaaaaatgcaacaaatcacccctttaatcttgtcattcttgaactctgacaactcccagttgccttcttagttctgagaacttcattctgtcgagtggcttggtcagagcatcagctatctgtctatcagtgctcacagggtttttattcaccaccccatt

SEQ ID NO: 10063 - DNA, 316 bp, Zea mays
  unsure (1)..(316): unsure at all n locations
caatccattctcctgacaaactcaaagatgttcataacaaacattgaactaactggcagtggcttttgccatattcttaactctgatgtcagaatatcttcctcacaatcaatgactcatcgacagagaaagttctgccaacatgggacaataatccttgagtttaatgtgatccaatgatttcaacgatgctgagttaagaagaggcccaaatataccattgaatacttggagggcttcaaatctattttntaatgaactgcttgccatatcaagcataactagaacataatttacgttcaaatctttctcacct

SEQ ID NO: 10064 - DNA, 418 bp, Zea mays
  unsure (1)..(418): unsure at all n locations
agcttgagaaatatntagacactgtccgaagaattgaagcttcctttgaaggattttctgtcaaaaatattcctcgaggagaaaatgaacatgctgatttgctagccaagtcagcagcacaggggctgcccttaccttctgaagtatttttcgaaacaataaaagcaccttcggttgaacttcttgagagagcggtcctcaatatatcttctgtttatagtgaagactggagaactgaaatcatctctttccttcagggtaattttctttcagttgacgaagcttataacaagagaatagaggcaagagctcgaccatatgttataatagaaggggagctgtataagcatggagtctgttctccactactcaaatgcttatccagagccgaaggtatagaattgatgaaggaaataca

SEQ ID NO: 10065 - DNA, 226 bp, Zea mays
cggacctatgaaactaagcttttatgagattctcagtgataggggagacttctgcgccttcttcgatgcccgcggagctgtgtcactaattgagaaggttggctgggtgcatgcaaaggctatggttctgccaggattctctatctcagccaatgacattaagaatcctttagtagaagccgctgtgctaagtggaaagttgtatttcaaagtctggttgagggga

SEQ ID NO: 10066 - DNA, 407 bp, Zea mays
agcttgcacaacgacattatgtacacctacccctttatgcgtgtcaaggtggaggcgtgcccataatgtcgtatatcacatttaatatggtatgtgtcccgttgtagttatcccttttcaaggtgactaccatactaactataagggtaggcatgatgtcgggtaccgtaattaggggtacccccaacactcctaaacacggctggtaagcaccatcagcacaaactgcagagactgatgggcacggttcaggtcaagacctcgcctaccaagagacgcaatctcgtctcgtctcgcccgaccccggcctctggcgagaacagtagtcccgagcgaattcacgcctcgcccgagggtctcctcaggcagtgagcgcaccctcggctcgcccgaggcccagctcgggc

SEQ ID NO: 10067 - DNA, 224 bp, Zea mays
ggtcatcatttgcaagatattgtgctcaatagttatctggttgaaccatcccaaaataagcttacaccaattttaagaaacatcaaggtctatgttataacgctataagcccaaaagaaaactccccacaattttataacactttatcctttatcatcgagcctaatttatactaacatctctgggacaaataaattaatccctttgctatataacttccacgt

SEQ ID NO: 10068 - DNA, 401 bp, Zea mays
agcttgtgggcagcaacgtccagctgttcgactctctcccacgggtcggtggggcacctttcatgttcatcggtgctgacgtcaaccacccgtcaccggggaacgtggagagcccatcgattgcagccgtggtcgcgtctatcaactccggtgtcagcaagtacgtgacaagaatccgtgcccagccgcaccgctgtgaggtgatccagcagctcggcgagatctgcctggagctcatcggagtcttcgagaagcgaaaccgcgtgaaaccgcagaagatcatctacttccgcgacggcgtgagcgacgggcagttcgacatggtcctgaacgaggagctggccgacctggagaaggcgatcaaggtgggcggctacgcgccgaccgtcaccgtgatcgtg

SEQ ID NO: 10069 - DNA, 317 bp, Zea mays
  unsure (1)..(317): unsure at all n locations
cttgacatgcactgcatggcttgtctttntcaaatactacatcttttaatcctctaaccatatctttctttaataccttcttgagtgtgctcattccaacatgtgcaagcctcctatgccatagccaaccaagagaagctttggtgaagaggcaagttcttaagtctgcatcttctgaagtgaaatccactaagtagaggttgttgtatctaanaccctttgataccatcgattcatcatccatntttgttacaataacctctgatggagtgaataagcattgaagtccaagatcacagagttgtcccactgataat

SEQ ID NO: 10070 - DNA, 432 bp, Zea mays
  unsure (1)..(432): unsure at all n locations
agctntaagcacaactacaagccggngttagcgttagaattaaattcgagtccgaaagagatgtgcaaaaacaaatcacaagcgaataagagcggatgacatagtgatttgttttaccgaggttcggttcttgcaaacctactccccgttgaggtggtcacaaagaccgggtctctttcaaccctttccctctctcaaaagatcacctagaccgagtgagcttctcttctcaattaaacgggacactaagtccccacaaggaccaccacacaattggtgtctcttgccttggttacaattgagttggaatcaagaatgaatgagaaagaaaagcaatccaagcgcaagagctcaaatgaacacaagtatctctctctcactagtcactatttgattggaattgtctttggacttgggagaggatttgatctc

SEQ ID NO: 10071 - DNA, 412 bp, Zea mays
agcttcggccttcggaggccgaaggttgaaatgtatgaagctgccgtttaatgccagagagccttcggtgttatctgttcttttattggaacgagagatttggtacaagagcatattgccttcagagtatggccacttgcggagaaatgggaaatgccgcaagaaaccataaaagaggccgacgaaggtggacttatcaggttgaagtacacctttaagtttggagataaattcgttgagccagatgatgactggttaaaaagcattgaaaatctaagtgatgaactgcttggagcttattcgaaggccgaagatactgcactgtcagcagccttcggaggccgaaaaaagaagagactgaatcgggtgtttgatgcaatcgggttcgtctaccctgactatcgttatccca

SEQ ID NO: 10072 - DNA, 360 bp, Zea mays
  unsure (1)..(360): unsure at all n locations
actaagctggtctctggcaataaatacaagaacttattgcagccaatgcctatatctccatcatgtgttncacaaccccaagaagatatgcgtcatantttgcatgaattcatagtttaactaagtagaacttaattaaaataattctctgacaactattatgttgagatgaacatgtgtaggtaatcatcatattgctatatggtgtatacctctcagtgacagacgaaattaatcgctgcattaggcacggctgaaagggaaataggcttacaccttttcctataatgattctggtggttgaattgcccaacacaaatagttggactaactatgttgctctagattatacgttctaca

SEQ ID NO: 10073 - DNA, 416 bp, Zea mays
  unsure (1)..(416): unsure at all n locations
agcttgccccataacatcctaatttgctagggtttgtacttaatatatgaatctcccaatgttctcatgcatcatgatatatattatgtatacttgtgttctaccctttcatgatcaggcatagtatactcaacgcttgagccgatgttatgccaaattgtacagattgccgatccattgtcagtactccctcaattcattctttgttttcaggttgactgtgatccagatattggacagccaaagcattggcaccatgcgtggcaaaactgtgcgtcattcggattgatagtgagaattgcctctctctcagattagctatattgtttggcacaaaatctaatacaacaggacctanaacgagcatgtgcctcttttttgatgcctccgattccttctcttataaaccttaactt

SEQ ID NO: 10074 - DNA, 369 bp, Zea mays
actatgatactcaacttgggcctaagcactgcaagactccctagaattggatatctaatttgagtcttgaacagaaacaatggactttgtaccccattgaagcctgattaccttcttcatatacacagggaccacaatttgaagctgaatgttttgtggtcttcatgggaataaaatgcgcagacttagtcaagcgatgcactaccatccatatagcatctctgcgccgaggagaacgaagtaacccaccacatagtgcatggtgatatgctcccatttacacttcagaatttccaatggcttcagtaaacctgcaggctgcttatgctctggcttacgccctgacttacttacaggcgaccacatact

SEQ ID NO: 10075 - DNA, 386 bp, Zea mays
agcttgatcgcctgcctgttcaagcatccaccactgttgtgatcgttaatggcatcaaaacgaagttctggcaccatggctggctggatggggaggctccactcaacctggcacctcacctgtacaagttgatcacaaggagaaataaaactggggcccaaaaactgactaacagtgcttggattcactctctgagaacgaaaatcacaaccaccacgcaacttgaggaatttgtctacctctggactacgatccgtcacgtgagcttgcagccggatgtagaagacactttactctggaaatggacacagcacggtctctactcctgcaactcagcctacagagcccaattattgggatcctatatcaaccacaagatcagcctc

SEQ ID NO: 10076 - DNA, 342 bp, Zea mays
  unsure (1)..(342): unsure at all n locations
attgagcacttagtacttgcaaggactaatgggagtgataccttattttatgggatgaagggacgtcttagtacggagtgctgattctctgagacctctgcaaaatatctaggtgtcttctaactctttctttattatacatatttacatccgagcaactgatgtaanaaatactccatagaattagctgataatatattggctggagatctgtgtgcacactctatgtcttgtcatatgttcgacacagctgggcttgtaattaagattcaattntagcaatagaatacagaagtcatgtttaanttttttgaacatcttaatacattggcactttatcat

SEQ ID NO: 10077 - DNA, 424 bp, Zea mays
  unsure (1)..(424): unsure at all n locations
agctttagtgaattggttttgggactaatatatttctctaagagctatgtaccttgncaaatcaaatgagattggattggagaaatttggctaagtacagcctgcggtgcaccggacagtgttcggtgccctagctggctcagcgatgaactcgctgctctcgggaatcgtcgaggtcgctgtggctaatattcaccggacttgtcggtgagccaacaacgtctgctccaacggtcgacagcgcgatcgacacgtggcccgcgccaacagtcactaggcgacaccatactgtccgatgtgcaccggacaattgtcgatgtgccaagtggaccaagggttcaacggtcagcttctccaaagaaggaaagaaatcatgcactgttcatgtccggtggtgcaccggactgttcggtgcgcccacgga

SEQ ID NO: 10078 - DNA, 413 bp, Zea mays
  unsure (1)..(413): unsure at all n locations
agcttggaagatacaactttagtctcttcgtgtgtatgaacagacctgtctccatcatctgccctcacaacatacatatcgtggaaaatatcttgctctcatattatcaagatgactctgtttaatacttgattttccgaaaaatgaatggcttggtcgccagggtcgatcttcggagcctctgccaccactttccacatcataactgtcactatcaccagtgtcttcagataagccttctaaaatctctctagtaatcttctttgtatttgttctcgctattgattcaagaaaaccaagattcttctccttagaaaggctcagcttcgtntcagcaacagcgttcttatcttgagacatctcttcgaaaatgcttgaaatgtgcttctaatgccgaagcttcaaatctaaaa

SEQ ID NO: 10079 - DNA, 344 bp, Zea mays
cgtacaataactatatggtattcaatggcaggaatcttatatttgtctcttattaaatgacaggcccttattgttacagaaacccaagaaccatatgttgagcattcaacagcaccaattccagaagaccttatcacacagcatggacaacaaaggattcaccgcggtatgataagaacatatactgatgcaataaaggttgataggcatactcaatgcagatcaacataaccaggctgatcgacatatagcctcagcatacctgcttcctcctctgtcaatccagcaatacaacacagtagaacatcagtgaaactgtcttatctagcaaaatggctcgatac

SEQ ID NO: 10080 - DNA, 419 bp, Zea mays
agcttgaatgttcaaaatcaagaacttcaagtgcttcttgaaaattgcaataacatcaatgtctcatctttagtgattgaatctaagtctagctccttaaatgataatttttgcaaacattgtgccaaatatcatgcttcttgttgtctaactaaccatgcaaggaagaatagcccacaggtgaaggtcaaaggaatattgaaaagatgctctagcaatgatgggttaaagaaagttgaacccaagtacaagtccctaaagcccaacaatagaagaagggggcttgggttcaactcatccaaggaaaaccctagcacagtgcataaggggtggagaccccccaagttcatagagggaaccaccctatatgatgccttggggaggattcactcctcaaatgagaagtcacctcaagtaaa

SEQ ID NO: 10081 - DNA, 369 bp, Zea mays
  unsure (1)..(369): unsure at all n locations
gtaattaacttatgtatactcttaacaagtacagtcacctanaccttgtgcacaaggatcnaacaatggtatgaaagaattaggtttggtcacgggtgagctaaacaagttactttggtcgttcgttacagtactgtggaggaaaaccggcgaaagaaaacatgttagcattccggacgaatttctgctatgagcaccacgccatagttcggtaaaacgtgccagaaacacagggaaagtcgcacagcaagtctgaactgtcacgccgtgcgaaaccgatgcaaccctgngatgcgcaaaaactcggactccgagggtgcgcgatgcaaggaatgcgggaagctggcgtggaaaggtgtagcgagggtc

SEQ ID NO: 10082 - DNA, 403 bp, Zea mays
  unsure (1)..(403): unsure at all n locations
agcttgangttttgccaccgttaccatttctttgtttttcgcaacgaacatgcccaatccactactttaggtccaaaactcatgtctggggtggtttcgcgcaatttcgttgccgcacgtcacccaatccgaaaacgggtgtcgcggtgcatacaaagcttgagttttcgccaccggaaccatttctttgtttttcgcaacgaacatgcccaatccactactctaggtccaaaactcatgtttggggtggtttcgcgcaatttcgttgccgcacgtcacccattcagaaaacgggtgtcgcggtgcatacaaagcacgagtttttttccaccggaaccatttctttttttttcgcaacgaacatgcccaatccactactctaggtccaaaactcatgtttggg

SEQ ID NO: 10083 - DNA, 290 bp, Zea mays
  unsure (1)..(290): unsure at all n locations
aatgcgcataaccaccccgaacatgagttntggacctaaagtattggatagtgtatgttcggtgagaaatacgaagaaatggttccggtggcaaaaactcgtgctttgtatggaccccaacacccgttttcggaatgggtgacgtgcggtaacaaaattgcgcgaaaccaccccaaacatgagttttggacctaaagtactagattgggcatgttcgctgcgaataaacaagatatggttccggtggcaaaaactcgtgctttgtatgcaccccgacaccctgtttcgga

SEQ ID NO: 10084 - DNA, 427 bp, Zea mays
  unsure (1)..(427): unsure at all n locations
agctttccagattgttaaagagtgcattcatattatttgtgaaactccagttatgtttgttttactgtggctgtttctgtttacctgacaaatatgagtgggtctgttcactggtaggtttcatctagtaaatggccgaattggctcttccaactatggagacttttgtagagggataaaagttcttacttccagcagaatttcataatttttggttcagtagtttgggagatatcgaattttaaagttaaccatactgctgtctaaaacagattcagtcagttatcttgtcagatgttttagaacttgtagatggcagaatttaattatctattgaatactgaagttgtagagtattttgtgtagatactcctagagtatttgtttgatatcaccgctgttttaattntaaagatacaaaattaac

SEQ ID NO: 10085 - DNA, 427 bp, Zea mays
tctatagggagagcacactttatgatgtacaaatgttcattttgtgtaatacacgatctgcagcgcatgccaagcatggaagcaagttggagtccatcatccacataagaacatcatgactaccgacaggccgcttgagctactccacatggatctatacggcccgattgcttacataagcatcggcgggaagaagtattgccttgtaatagtggatgaatattctcgcttcacttgggtattctttttacaggaaaaatctcaaacccaagagaccttatagggattcttgagacgggctcaaaatgagttcggcctacggatcaagacaataagaagcgactatgggacggagttcaagaactcacaaattcaaggcttccttgatgaggagggcatcaagcatgagttctccttctcctacact

SEQ ID NO: 10086 - DNA, 430 bp, Zea mays
agcttgaagccatggtaagtagcataggccaatttatacgaattgactcaagcctagctacgggtgcataggtttcaccaaaatccaaaccttcaacttgtgaatatcccttggccacgagtcgagctttgttccttgtcaccacaccatgctcgtcttgtttgttgcggaagacccacttggttcctacaacattttggttaggacgtggaactaaatgccatacctcgttcctcgtgaaattgttgagctcctcttgcatcaccattacccaatccgaatcttgaagtgcttcctctaccctgtgtggctcaatggaggaaacaaaagagtaatgctcacagaaatgtgcaacacgagatcgagtggttacccccttatgaatgtcgccgaggatggtgtcgacggggtgatctcgttgtattgcttg

SEQ ID NO: 10087 - DNA, 431 bp, Zea mays
  unsure (1)..(431): unsure at all n locations
cacatgttaatttcccagacacataaacaagatcattntctttcaagtgggaagcagctatttgtgcccagntatctttgaaaactatgggaaccctgaattgtaaanaaattgggacatcagaatattcgtacgggcgagaaaaatgggaaacaaatggcaacagcagacatgtcaaataataaaaatagtaaaagtgttccagaaacaacaaaagatacttctggtggtccttagtatgtcttagactacaaatgcttgtgttggacattagcataccatgttgaaacaatggttataaaatatggataaataaaggcanaggaacttctgggttttcagaataacgatatatggcagcccagcatgtccatnaatttgttcacagttatatgtaccagatacaaggcaacaacggatttagttagtca

SEQ ID NO: 10088 - DNA, 419 bp, Zea mays
agcttgcacctgtcgccctaactgattcatccttttgtgctttgcctttgattacttgtaatggctagaaatacaccacaaaacatctattatcgagtgattgtgaggaccttcgaaagtgaaatgccccacaacaactagtttgcaaaatagaagacaatcataaacataattactagaaatcatggtgatatacactcatacgatgccaaaaaaagttgaacagacagatgcaacttcataacactgtccctctctctctctgccagtaattatgagttaaaagaccaaagagttgatgctaggataactcactacaagcttcgaacgaagactatggtcttaccatatacattctttgacacacgaatatacgtttaatttagagtactggagcaggagatatttgatatgatcgc

SEQ ID NO: 10089 - DNA, 428 bp, Zea mays
agcttgtgaagattcttcattccaacatgggctattctgcggtgccagagccaacccatgttagtcttagcaattaagcaagtgtcgagttcagctctatcaaaatctaccaagtatagctgaccctctaacactcccttaaatgctattgaatcatcacttcttctaaagacagtgacacctacatcagagaatagacaggtgtagcccatttgacataattgggatacggaaagcaagttgtagtctaaagaatcaacaagaaaaacattggaaatagaatggtcaggagatatagcaattttaccaagtcctttgaccaaaccttgatttccatccccgaatgtgatagctcgttggggatcttggtttttctcatatgaggagaacatccttttctccccggtcatgtgtgttgtgcacccgct

SEQ ID NO: 10090 - DNA, 426 bp, Zea mays
  unsure (1)..(426): unsure at all n locations
tctaaagggagatcacattttgggactaacaaanggtcattttgtaaaatactggtattgtagcgcatgtcaagcaggaaagcatgttggcgcccatcatccacacaaatacataatgactacggacaggccactgaaactactccacatagatctattcggtcctatagctnacataagcatcgacgggagtaagtactggctagtaattgtggatgattattctcgcttcacatgggtattctttctgcaggaaaaatcacaaacccaagagaccataaagggattctggagacaagctcaaaatgagttcggaataaggatcaagaaaataagaagcgataatgggacggagttcaagaattctcaaatagagcgcttcttaaggatgatggcatcaagcatgagttctcttctcctacacac

SEQ ID NO: 10091 - DNA, 467 bp, Zea mays
  unsure (1)..(467): unsure at all n locations
tctagagctcgacnctgcaggggcatgcaagctnntctgccatgacgttgattgttnncctggccagtatatattagtaccttgtctgggccacactttggactgccatgacgaaggacttcgctatgactgcggnattgcccccatatgaagatatggttgcttcgtagctcatcagaaactgcttcggatctgagtgtccatcatacatggagagctgaggtggcttgtatgatggggtccatggggtatcctgcagttctgctgacagaggagaagcatcatcataagcaaaatttccatgatggaaatcgtcataccattcatcattcattgtaggaattggcctgatgaagctctctttgtggaggtcttcaatcctggtcatcttgagtgagatgacagttttctcagcagcctcgtcgatcttcttctgtatatcggaaagacgaaacaccttctctctc

SEQ ID NO: 10092 - DNA, 394 bp, Zea mays
  unsure (1)..(394): unsure at all n locations
tncacgtgttcgacgcgagctgacatccgggggcgcgctcagagcacgcccgtgcgcgaacccccgcgcgcccgcgggcgcccatgaccacgcccgcgccacggttataaagcccggcctagtgcttggctgccttccccgttgcatcctccgtacctcgcctgacttgccgagccagccattagctcctgcgaccttcccgcgacccgtcagtgccgcccgagagcaaccaccgtggccagcccctctcctgtcctcctccgttcgatccaagccctcagatagcttcctggtgaggccgtgagacttgctcaagcttgacccgtggacccgcgtcaccggaatagctcaatcgtgctcaccggagttcaaagacccgccggcgcacgtggac

SEQ ID NO: 10093 - DNA, 431 bp, Zea mays
agcttctaaagggagaacacattttaggattaacttatgttcatttttagaaagacaggatttgtagtgcatgccaagtagggaagcaagttggctctcatcatccacataagaacataatgactaaggatggcaacgggtacatacccgtcgggtagtaccattccatactagtacccatcaaaaaaaaatctacccgtcgggttacccatatatactcgcgggtataaaatcttactcatacccgtacccgcgcgggtatttttacccgtcgggtaacccatacccgctaggaaagaattaaattccaatataccaatcactcaaaatattaaataaacatataaaaacaacttcaatttcacatataacaaatcatatgattatataacttggtatctaaacaaatgataactagagaagggtttatt

SEQ ID NO: 10094 - DNA, 424 bp, Zea mays
  unsure (1)..(424): unsure at all n locations
ctcaagctttctggggttgaagcatgaagaccaacgtggnggtgtgggtgatagtggtcttcagtagcaatgacagctacaagggcgacaagatatgcttcctcgcccgcgtgaagaaactgaggcaaaacgatgcttatgaaggtccctcgtgaagccgactctgttgatgagttctgagctcgattgaattcccttatccgcagtatcattcgttcgaagcattgttttgggtcccatgtcatcggcaattgatgtgctgcgggtctgtagatttggaatcacatggatctgttgtgcctggcagaagacaacccgttcatggtatctgacgagacattcacatgtgtgatgtttcagtaatgtgtacatttaacatgtgttctgggtctgcattggttgctcctagaattcattctcttat

SEQ ID NO: 10095 - DNA, 422 bp, Zea mays
agcttgacgacgaagggtgtcttttgtctccctcttacgtcgagccacctcatggacatctgcagcaatatttcggcacatggagaagaaggtcgcaagcccgtgggccatgcgagcacccatcccatggccacgacctcgaccatgaccacgaccacgtggtgtgggagatccgcgaccagtggaagagcgcgaggccccagcagcagcagcaccggcagacggaccagcagatgtatgaccacgagaactggagggagctttcctgagacgcccagctggattgttgggatcaatccagaagggagtgtatgactgatgacgggtgcctttctcaaatctgaattgggtcacgacctcaatcatcttcataatgaatggggcatgaagacacctcttcaaaggaaagcaggctgcatgaa

SEQ ID NO: 10096 - DNA, 353 bp, Zea mays
  unsure (1)..(353): unsure at all n locations
ctaactattaagcatgcatctagaccgacctcttcttttgccaaaacaactaaataaagtgtggcgtctaatacacccttaaaagccagtgaaccatcacttcttcttaagacagacacatctacatctgttaatagacagttatacccnatgttgcataattgactaacagatagcaaattataaccaagagactttactaagaacacattagagatagagtgctcattagaaattggcattttacctaaccctcttaccttgccttgatgtccatcaccgaatacaattgaatcttgggagtccttactctngacgtaagaggtgaacatcttcttcttccccgtcatatg

SEQ ID NO: 10097 - DNA, 418 bp, Zea mays
  unsure (1)..(418): unsure at all n locations
agcttctaaagggagagcacattttaggattaattttgttcattntgagaaagacaggatttgtagcgcatgccatgcagggaagcaagttggagtccatcatccacacaagaacatcatgacgaccgacaggccgcttgagctactccacatggatctattcggcccgattgcttacataagcatcggcgggagtaagtattgtcttgtaatagtggatgattatactcgcttcacttgggtattctttttacaggaaaaatctcaaacccaagagaccttaaagggattcttgagacgggctcaaaatgagttcggattaaggatcaagaaaataagaagcgacaacgggacggagttcaagaactctcaaattgaaggcttccttgaggaggagggcatcaagcatgagttctct

SEQ ID NO: 10098 - DNA, 367 bp, Zea mays
actaagcttgaggagagaagaagaatgaactcgttcggctgtcctatcatttttgttcataaacactttatagaaccctgcccagaatggttggatacaattgaagttatgagcaatgagattttgggaaatcatatgagaaaagaagatcagttgatgactgcagccttctgcgctcgaccgaagcgaagattgaatcgggtgatggatgccctcgaatttgaatatccggactatgagcgattgaattagggcgccgaagggcaaaaaaagaaaaagaatagttagcgttgtgggcagacaggctgcttgaatggtgaatgaagatgaagaaatcccgatcaagagaatactgagtcctgagccg

SEQ ID NO: 10099 - DNA, 364 bp, Zea mays
  unsure (1)..(364): unsure at all n locations
ttacgaacggacggcgcggaagtcgngcgggcgcggtctgaactgggcgcgggtgctcggtcggtccggtcactccacagcctgtgtcgcgcggtcaaggtctccttgttggtttcctgggcgtcgcgcaaatgggcgttgtttgtggtcggcggatttgccacggggaaaggcggtactcgcaggtgcatcaagtggctgcaagcgcgaccgcgggtggtttctctggcgctcctcggcggcgcgtcggtgctaaacataaggaatagagagagaaatgtcgagtggggccctcgcgcaagaggatgaaagggacttccactggcggcggtggctatcaaatgaacacggatggggctatgtc

SEQ ID NO: 10100 - DNA, 397 bp, Zea mays
  unsure (1)..(397): unsure at all n locations
agcttcatgagtggtagctttatcatcacgtattttctgctnttgccgaagctgtttcttcgtgcaggaccttcggcgacggagcatggtcccaacagtagccccttcgcggtgctagatcgtttttcgtaacgagcttgatccgtgaaaaaagtctcttaggcttcgggaagccgaaggtccgaaaaacaccttccctgagctcgttgccgagaaacgatacagtttctgagcgcggagcggtcccaccatgcaggtttactttcttggtttttgcggcccactgttcagtgggtgcgagcgactgtttgcccggtgtaaaaatcttgacgattcaccttcttacctgcagcactatataaacagacaggtaggtgtgaagttaccacaacattca

SEQ ID NO: 10101 - DNA, 367 bp, Zea mays
  unsure (1)..(367): unsure at all n locations
gttggtattaatcttttctgtctgaggctcatcccttcatttgtgttacatgtgataatggnttgcgttagcttaacgaagaaaccctatgtgacattggggtgttacagccttccccccttataggaatcttgtcccgagatttgggtcagagtcctcccggcgggaagcgaaaggtgagacttacttgaagcgggtgctctatttattaaggcaactgctcttcgaatgtcattctctttgcaacgtcagaaagaagtccttttatttctcggtatataattaactctctctatattaagatcatctttctgaaatttagatttgaagggcacgaggaggggttgggcatgattacgtaccaatt

SEQ ID NO: 10102 - DNA, 428 bp, Zea mays
  unsure (1)..(428): unsure at all n locations
agctntgtcttttgtgtatggactacgtgcggttttatgctagggacatggagttgtagcgtcaccaaggtgccagtgtcagaatgcctggtcccgaggttgagctgcgccaaaaccgtgtcaaaaggatntggtttgagttcaaactttcccagaatgtgttctaagtaatttggcacgactttgatatttggatcttctggctttgagtttggaaaagcagagaacacaggtgatctttgagaagaggtctgaaattcagaaattcagaaatctgaatttctctaagggttcattgatcaagggctgatttggagatttatttgagttattttggctaagccttctcaatctttcttgttgcttaacaaatatactttaacttatataattggctcaactcanaattttaaacttttcatcctctt

SEQ ID NO: 10103 - DNA, 393 bp, Zea mays
  unsure (1)..(393): unsure at all n locations
acatgtgctaagcggtgatgctctcagccagcccatgctagtcttagctattaagcatgcatctagaccggcctcttcttttgcaaaatcaactaaatatagttggtcgtctaatacacccttaaaagctagtgaaccatcacttcttctaaagacagacacatccacatttggtaatagacaggtataccccatgttgcataattgactaacagatagcaaattatatccaagagactctactaaaaacacattagatatggagtgctcattagaaattgcaattgtacctaacccttntaccttgccttgattcccatcaccgaatataattgaatcttgggaatccttattcttgacgtaggaagtgaacanntctcttctccccgcata

SEQ ID NO: 10104 - DNA, 400 bp, Zea mays
  unsure (1)..(400): unsure at all n locations
agcttgtacatatganttataaatgacacaagggtaatattgtcttctatctttatcatcttgacaacagaatcttgtgaacaccttccagcttcgtttgacttctgccttcatcttcccgtatagttatgatgaagctaatgcctttatccattttcttaatctattccaaaggtaactagcgccgaagcacctgcaacaccttgagatgtgttgagaaacaatggttaactatgtttagctcaaaatgtgaaacgaacataagctttatgccaaaggtccaaaaaacaccttcccgtcgccgaatagcgaaatttctgaaatgcgggaaccattttgcagtggtagtttgcgtataaatagaacaaacatcattaaatatttgtcgtgccatctagtt

SEQ ID NO: 10105 - DNA, 220 bp, Zea mays
aggcttagcaactaagcaagtggcgagttcagctctttcaaaatctaccaagtatagctgaccctctaacactcccttaaaagctattggatcgtcacttcttctaaagacagtgacaccagtatcagtagaaagacaggtggagcccactttacataattgggatacgggaaagcaaattggtatctaaagaatctacaagaaaaacattggaatagta

SEQ ID NO: 10106 - DNA, 408 bp, Zea mays
agcttctaagggagatctcgtgataggtttatctaacgtgcaattcgaaaaagatagaccttgtgcagcttgtcaagcaggtaaacaagtgggaggagcgcatcacagcaagaatgtgatgaccacatcaagacccctggagctgctacatatggacctcttcggacccgtcgcctatctaagcataggaggaagtaagtatggtctagttattgttgatgacttttcccgcttcacttgggtattctttttgcaggataagtctgaaacccaagggaccctcaagcgcttcctaaggagagctcaaaatgagtttgagctcaaggtgaaaaagataaggagcgacaatgggtccgagttcaagaaccttcaagtggaggagtaccttgaggaggaagggatcaagca

SEQ ID NO: 10107 - DNA, 265 bp, Zea mays
tagacggctcttctttgaaatcactaataagttgccgctatacacccttataagctagtgaaccatcacttcttctaaagacagacacatctatatttgtgaacagacagttatatcccatatcgcacaattgactaacagatagtaaattatattctagtgactctactaaaaacacattagagatagagtgctcattagatattgcaactttacctaacccttttaccttgccttgattcccatcaccgaatatgattgaatc

SEQ ID NO: 10108 - DNA, 403 bp, Zea mays
  unsure (1)..(403): unsure at all n locations
agcttcagattactgtgctcaatctgaaattcatagttctgttagctctantttgggtatgttttctggagattttatagagttttagggttaggtttcttaattgaacttatacccctaaactagctctaccattttgatgtactaacctaggacaaaatcctcatgagtggagagatatacagctccaaagatggtctcaacctactgaaattcagacttagttacatagccttcatgggtcttttttacaaaaaggtccaaatcccactattcctcttgcaaacccttgaatataaaagttagtgggtttaaggtgcccctttttactttgatacttgcacttangtccagaagtgtgcaacagttgcatataaccccctgtggtttcagtccagggttt

SEQ ID NO: 10109 - DNA, 432 bp, Zea mays
  unsure (1)..(432): unsure at all n locations
agcttctaaagggagaacacattntgggactaactaatgttcaattttagaaagacagggtttgtagcgcatgtcaagcaggaaagcaagttggtacccatcatccacacaagaacatcatgacgactgagaggctgcttgagctactccacatggatttattcggcacgatcgcttacataagcatcgataggagtaagtattgtcttggaattgtggatgactattctcgcttcacttgggtattctttttacaggaaaaatctcaaacctaggagactttaaagggattcttgagacgggctcaaaacgagttcggattaaggatcaagaagataagaagcgacaactggacaaagttcaagaactctctaatagaaggctttcttgaggatgagggcatcaaacatgaattctcttctccctacacac

SEQ ID NO: 10110 - DNA, 439 bp, Zea mays
  unsure (1)..(439): unsure at all n locations
tctaagggagaacacgtgatatgtctaacacatggtactttctataaatatagaccttgtgcagcttgttaagcacggaaacaggtgggaagctctcatcatgccaaaaatgtgatgacaacatcaagacccctggagttacttcatatggacctcttcggacccgtcgcctatctgagcataggaggaagtaagtatggtccttggtatagttgatgaattttcccacttcacttgngtattctntttgcaagataaatctgaaacccaatggaccctcaagcgcttcctaaagagagctcataatgagttngagctcaacgtgaagaagataagaagcgacaatgggtccgagttcaagaaccttcaagtggaggagtatcttgaagatgaaggaattaagcacgagttcttcgctccctaacaccacagcaaaatg

SEQ ID NO: 10111 - DNA, 402 bp, Zea mays
  unsure (1)..(402): unsure at all n locations
agctngtgaagattcttcattccaacatgggctattttgtgatgctttagccaacccatattagtcttagcaatcaagcaagtggcgagttcacctatattaaaattgaccaagtatagctgaccctctaacactctctttaatgctactgaatcatcactccttctaaagacaggaacacctacatctgttaatagacaggttgagcccatattggataattgagagacagaaagcaaattgtaatctaaagaatctacaagaaaaacattggaaatggaatggtcaggtgatatagcaattttaccaagttctttgaccaaaccttgatttccatccccgaatgcgatagctctttggggatcttcgattcttctcataggaggagaacatccttttctc

SEQ ID NO: 10112 - DNA, 367 bp, Zea mays
  unsure (1)..(367): unsure at all n locations
catgctagtcttagctattaagcatgcatctagaccggcctcttcttttgcaaaatcaactaaatataagttgccgtctaatacacccttaaaagctagtgaaccatcacttcttctaaagacagacacatctacatttgtaaatagacagttaatacccatgttgcataattgactaacagatagcanattatatccaagagactctactaaaaacacattagagatagagtgctcattaaaaattgcaattttacctaacccttttaccttgccttgattcccatcaccgaatataatngaatcttgggaatccttattcttgacgtaggaggtgaacatcttcttctcccncgtcatatggttt

SEQ ID NO: 10113 - DNA, 435 bp, Zea mays
  unsure (1)..(435): unsure at all n locations
agcttaaactaccttgcaggtttatgcatctggtgcacaagttggattattgatagcagatgcacaaaccatatgacaggggagaagaagatgttcgcctcctacgtcaagaacaaggattccaagacacaattatctttggagatgggaatcatggcaaggtcaaacgtttgggtaaaatagccatcactacagagcattcaatttctaatgtattcttagtggaatcgcttggttataatttgctttctgtaattcaattatgccatacgggttataatttcttatttacaaatattgatgtatctgtctttagaagaagtgatggttcattagcttttagaggtgtattagacgacaagctttatttggttgattntactaaagagaatgccgatctagatgcatgtctaattgctaagactaacttgggct

SEQ ID NO: 10114 - DNA, 479 bp, Zea mays
  unsure (1)..(479): unsure at all n locations
gcttctaagggagaacacgtgataggttngactaacgttcaattctaaaaagatagaccttgtgcagctggtcaagcaggtaaacaagtgggaggagcacatcacagcaagaatgtaatgaccacttcaagacctctggagctgctgcatatggacctcttcggacccgtcgcctatctgagcataggaggaagtaagtatggtctagttattgttgatgacttttcccgcttcacttgggtattctttttgcaggataaatctgaaacccaagggaccctcaagcgcttcctcaggagagctcataatgagtntgagctcaaagtgaagaagataaggagcgacaacgggaccgaattcaagaaccttcaagtagaggagttccttgaagaggaagggatcaagcacgagttctccgcttcctacacaccacagcanaatggtgtggtagagaggaagaacangacgctcatcgatat

SEQ ID NO: 10115 - DNA, 440 bp, Zea mays
  unsure (1)..(440): unsure at all n locations
agcttctacgtatatatttcgtattaattacaagttccaactctaatttgctatggntctagagatatcttggtcttgcagtccggattgccataaaactggtgtccacgctgaagtgagcggtacgggtgctgagtcccgacgggagcgggggaaccaccatccaagtgacgacgttgcgcgcgctcagcccgcagcaaggcgatcttagcacgagccctactcagctcgtctaatgcatggtccagctccgtgtttagcacggcggctaggttgactgtgctgctcaacctaagattgccctcaccgacaggtgagacaatcacgcctcctgtgctgccagatggacggcggtggtaatacttcatgtcaagaccatcagctgccccaccgaaaaccgagtagtagtgcgaaagcgcacgtcgtgcagcatcttgcat

SEQ ID NO: 10116 - DNA, 386 bp, Zea mays
  unsure (1)..(386): unsure at all n locations
agctntcacaaaacattctattactcccagacttttactccacgcttttgattctcagtgttagcaatntgagctctatttgagttatgaactccgcgtgttgtgtttcgagctcaagttgtgacttgtgtgcgtggttgtgctgcaaatttgagtcttgtgtgtgttgctctccccaaccttactctgtgctttctttgtgatatcaattgtaagggcgagagactccaaattgtggagattcctcgcaaatgggaaacatactctaaaggaaaagaccgtggtattcaagttgatcattggatcacttgaaaggggttgagtgcaaccctctttcattgggacgccacaacgtggaaagttgcaaatgttacttggccgaacca

SEQ ID NO: 10117 - DNA, 439 bp, Zea mays
  unsure (1)..(439): unsure at all n locations
ttaactctcgcgagacctcttaccatttctttcttaccgtggtgaattcattatcgnatgtgataatctatgagtatatactttacttggtctcctgtatggtgtactgtttcgtttctaattcgaatgtatggatgtgtgtatgcttgcaatcgcatatataacgatctggttgaagagcccgaggaactcgcatgaaaagtccctgagcagcagtctgttggtggaggcaagtgtcccttgacctatctcttgcctatctattattcaattcacctcccgctntacacatttatgcctaangattgactagcttttgtatccatgtgcttgttacctatttgggttggttattattgttagcttatgctattcttaactctatcaatgacatgatagatatctatgatacgctgtttcctctttatatgatgatact

SEQ ID NO: 10118 - DNA, 414 bp, Zea mays
  unsure (1)..(414): unsure at all n locations
agcttangcctctaatttcaatcttagtctgatgtcatgagtgagnggctctaagttcacctcctggtgatcgaattaatagtttcttcttcaagggatagtttggtatattatgtttttccacaaatgactttgttacgaaggagtgagatgctctataatcaaataaaactgatgcatgtatggagttaataagaaacataccatacaccatgtcggcatcctcaggaactgattctactgtcacgtgattaactcttcccctactctggttctgcggagtcttgttttatgcagatccatgggtaggtgtgttctgatcagtcctctagttgctattcttctggggtgtctgtttattatgcattgggcaattgttggcatagtggccaagttctccacacttaaaacaac

SEQ ID NO: 10119 - DNA, 387 bp, Zea mays
tactcaagcttgaacatgacatgaatctacacatcaaccatatatttcttctccttcatatattaaactgacaaaccggccgttcagctctagagaacgagtcatagcgaaagtgaatataagattacatgtagcagttggtatgctccttcataggtaccttatgcagggcactgttcatctatttataggaagtcatacaacctcgtatgatattacatttatgcccttagagattacacacgatgtgtacaaatatcacaggcacaacattgtctctttccatcagcaactgggataacaccttctccttgtatcatcttcccgtattggtatgacaaagctaacttcgttaccctttcaccattccgcatcgaagctattctg

SEQ ID NO: 10120 - DNA, 374 bp, Zea mays
  unsure (1)..(374): unsure at all n locations
agcttctaaagggagagcacattttatgactaatcaatgttcattttgagaaagacaggatntgtagcgcatgccatgcaggaaagcaagttggagtccatcatccacacaagaacatcatgacgaccgacaggccgcttgagctactccacatggatctattcggtccgattgcttacataagcatcggcgggagtaagtattgtcttgtatagtggatgattattctcgcttcacttgggtagttcttttacaggaaaaatctcaaacccaagagaccttatagggattcttgagacgggctcagaatgagttcggattaaggatcaagaaaataagaagcgaccacgggacggagttcaagaactctcaaa

SEQ ID NO: 10121 - DNA, 334 bp, Zea mays
actcaagcgtgaagaagagaaagggatcattattcggttcgtcttttgccacatgtacgatggacacagactctgtggctatccttagttggacgttacaacgagatctggatttactcgtttcaaccgtgaaagtaactcaccttaagctccacgtgccttgcagtgctatatcatgtggaattgttgatagagcaatcgaagcataggacatgaagcatggtgatttcatgaggataggaagttaattccttggtgctctcgcgcacgagtgatacatgtgaactctgttctgagatatgctcagacggctgggtttctctccatattcaca

SEQ ID NO: 10122 - DNA, 418 bp, Zea mays
agcttaacgacgatgagtgtgtctctcagttggttttgaaggagatgatgcgcgcgatgactgaagcttttaaaaaataccatgactctgcgacgacatcctatgaacagcttgatcgatgagttgctaaacttgttacacgcatggacgtactggaggctcgtcccccaccaccaactccagccctagcttactctcctgtggacgacgacgatgatgacgacgatgtttatgcaccgctacgacaacgcctcgcacgtaatctacaaggtatgggaggtaatggtagacgtcgtcatcatatatttgaaccagaccatgatccatttgctaagattaagttatctattccaccgttcatgggttcttatgatgctgaagcttacttagactaggagatgacggttgaacaaaaatt

SEQ ID NO: 10123 - DNA, 415 bp, Zea mays
  unsure (1)..(415): unsure at all n locations
agcttatatcangaggatataagcaagagctctttctgttgtcataatagaaggggaactatacaagcgaggggtctgttccccgttgctcaaatgtttatccagatccgaaggcatataattgatgaaggaaatacacgcacgcctttgtggatctcacattggatctaggcctttgcttgggaaagtatttcatcaaggaatttattggccaaaagcagcttcggatgcagcggatttagtccaaaagtgcgaaggttgtaagaaatgtgcaagagatcaaaaacaacctttgtttttaactcaattaatacaacccacttggccgttgcaaaggtggggccttgatttgctaggcccattaccaccagcacaggggaatttaagatatgtggtagtggtagtggaatatttt

SEQ ID NO: 10124 - DNA, 391 bp, Zea mays
  unsure (1)..(391): unsure at all n locations
agcttctagcgccaggcatgacgctggacaccctggccgccgtggtcctggagctgatgaccatggggcagcagtccgcggcgtatagtggtggacctgctccgggccgcgtcccctgctgcagcgtctccgcaccaggagctcgcggccgacatcctccgctgctgcggctgcgtcatcgacgcgctcagggccgccgccgccaggacgaggagatctcgcgggcgggcgccacatgcgagcgaggggaggttgggcgtgggaggacgccaggacgaggagatctcgcgggcgggcgagcgagatgtcggcggcggggatggctggtgggaggatggggcggtgacccngtgtgatgtgcgggggcatgactgcgcggatgggaggggag

SEQ ID NO: 10125 - DNA, 408 bp, Zea mays
  unsure (1)..(408): unsure at all n locations
agcttctaaagggagaacatgtgatangtctatttcttgttcatttcgaaaaagatagaccttgtgcagcttgtcaagcacggaaacacgtgggaggagcgcatcacagcaagaatgtgatgaccacttcaagacccctggagctgctgcatatggatctcttcggacccgtcgcctatctaagcatagggggaagtaagcatgggctagctattgttgatgactcttcccgcttcacttgggtgttctttntgcaggataagtctgaaacccaagggaccctcaagcgcttcctcaggagggctcaaaatgagtttgagctcaaagtgaaaaagataaggagcgacaacgggtccgagttcaagaaccttcaagtggaggagttccttgaagacgaaggatcaagca

SEQ ID NO: 10126 - DNA, 433 bp, Zea mays
agcttctaatggagaggattcctgcattattttggagtccatgtgctgcacattgcttggacctaatgttggaggacataggaaacttgaaggaattcaagaaaccaattgcacgtgcaaggcgtgtgacaactttcatataccgacatgggagaattcttagagagaaaactggtggggatgatcttgtgagggctgctgccactcgttttgctacttcctttctcacattgaagagcttgtacaagcacaaggatgctttgaaggctttatttgcaagcacagcttggactgataacagattgtcaaagactagtgctggattggatgtgtataacattgtcttctccacacagttttggaattcagtagaagattgccttagagcttcagggccactacttattgtacttagggtggtagatggagatga

SEQ ID NO: 10127 - DNA, 372 bp, Zea mays
ctcttcggcttcgtcatcctgtacatattaaattggtataaggaaaattcaattttaaaggaaaaggttagcacaagatatgattttgttaccggcttaagatgacttcgagcttcgtcaccagctaagcttcgtccacccttcgtccatactagctttataaatctgtttcctatgcttcgggcaagactgggaatatcaatcagatctgctggtgataagctaaagtttggtctattgacaatctttccatgtgtgcaaccagatttcatgaaggcaacagctgtgccccaagaagctacaagggcacagaaatcgtcgtgtccagctataatttcatcaagagcatcaatttcaccctcgatatgttcg

SEQ ID NO: 10128 - DNA, 432 bp, Zea mays
agcttctaagggggaacatgtgttaggtataacatatgtatctttcatacaagatagaccttgtgcagcttgtcaagcaggtaaacaggtgggaagtactcatcatagcaaaaatgtgatgaccacatcaagacctttggagctacttcatatggacctcttcgaaccaatcgcctatctcaacatagggggaagtaagtatggtcttgttattgttgatgatttttcccgcttcacttgggtattcttcttgcaagataaatttgagacccaagggaccctcaagcgtttcctaaggagagctcaaaatgaatttgagctcaaggtgaagaagataaggagcgacaacgggtctgagttcaagaaccttcaagtataggagtaccttgaggaggaaggaatcaagcacgagttctccgctccctacacacc

SEQ ID NO: 10129 - DNA, 344 bp, Zea mays
  unsure (1)..(344): unsure at all n locations
ctaagcttaccgcattngaagcatgatcgctttcccttggtcttagtcttgcttggctgtcccttgcgaccctttagtgccgtcttgaatcttttgatgatgaaggccatctcttcatcattaagaccggccgcctcaatttgcgccaccttgctgggtagcgccttcttgctccttgttgccttgagagcaatgggttgaggctcatggattgggccattcaacgcgtcgtccacgtacctcgccttcttgatcatcattcgcccgcttacaaattttccaagaatttcttcgggtgacatcttgatgtacctatgaatttcacgaatattngtcaccaagtg

SEQ ID NO: 10130 - DNA, 436 bp, Zea mays
  unsure (1)..(436): unsure at all n locations
agcttgcaacaatcgagcctgcattaggagcacttggcacgttctatttaaacagngcctgcatataattactaagaaactttattacatatatgtgaattaacttgcaattttctttaattttatatagctgaaaatagttctaactattcaatggcacctacaaatatgttcacttatgtggataacagaaagaagaatcaactgtcatagggtcctaccactggttcttaatctgtattcctggaaacaagctagaccacagaatagatcttcaaaatattctggtgactttgcaagcctttcactaaaccaagtaaagcaatattattgtgaccaaatattatttgtttataataaaaaacaggatntacttcgaaacacaaggagttgttacttgcaaagtccttgacaaagtttgcacaaaggttcgtcg

SEQ ID NO: 10131 - DNA, 377 bp, Zea mays
tctggattaagcgccatgacgaaagaagatctcgcagacagtcttgcgtacaacagcctgaaggtatatgaattaaacaccttgaaaatccccttatttttacgcaactcattccttttttcttatatgaattctttttcgtatagggcctgatcctaagcaacgcactaagagcccaaaagagcgccgaagatgaaagctatgaaattgcgtttaataatttacgctccgaatgtatcagactgagaaacgaagctttggaataagataatattctgcttacactggtagataaagtgataaaagacgaagctgcttcaaaggcccaggccgaagctcaataacgcgagataaagatcttcagaaacagctggcta

SEQ ID NO: 10132 - DNA, 447 bp, Zea mays
tcttaatcgacgcggctgcagcttgggccacttgaacttagctcagctatcttccgcagacagacgggcagactgaaagaactaatcagatcctagaagatatgttgagagcctgtgcgttgcaagacaagtcaggatgggacaaaaggttaccttatgcagaattctcctacaacaatagttaccaggccagcttgaagatgtcaccgtttcaggcactctatggacggagttgtaggactccgctgcattgggaccagcctggagagagacaggtgtttggccccgacatcttgcttgaagccgaagagaatatcaaaatggttcgggagaacctgaagatagcacagtcaagacagcgaagctatgcggaccgaaggagaagagaactgagttttgaagtgggagactacgtctatctgaaggtgtcgcctatccgaggagtca

SEQ ID NO: 10133 - DNA, 340 bp, Zea mays
  unsure (1)..(340): unsure at all n locations
tatgaaactaagctataagattttatcccacatgagctagtcggcggggccagagccaacccatgttagtcttagcaattaagcaagtgtcgagttcagctctatcacaatctaccaagtatagctaaccctctaacactcctttaaatgctattgaatcatcacttcttctaaagacagtgacaccaatatcagtaaaaagggcagtcgtagcccatttgacataattgggaaacagaaagcanattgtaatctagagaatctacaagaaaaacattggaaatagaatggtcaggagatatagcaatnntacccaatccttggaccaaaccttgatttc

SEQ ID NO: 10134 - DNA, 411 bp, Zea mays
agcttttgtgcactcactatcttggacaagaggagagaaaaccctagacctctcttgaaccctatcttccagagccatggttaaaagggggaaagaatatgcaaatgtgcaaaccatgagttaatctttaaccaaaccttgagtaactttataaccagcaattgtgggaaggaaatattgcaaaaagacccctggagaaaccccaaatccattccctaagtagagagagagctagagctctctaattttctctaagtcaaaaactacacctacactaaagatcaaccatgttcaccttgaagatggcaccaaaaccacctatgttctataccaaaaatgtggcataccacctagggcacccactggaaaaagctgagcccgagatcttgacgtttgacatgccttggcatg

SEQ ID NO: 10135 - DNA, 362 bp, Zea mays
  unsure (1)..(362): unsure at all n locations
atggaaccgacttaaagatgataagactatctagtgctcagtagattntccttaagtcaatagtaaacataaagggcatgagtgtaatttacacaggctgcgtcccatgcctataaatggataaaaagtagcaccgtactgttcacgctgactagtattgactcgcacgttactctcaagctttttaccttctatcaagccaaaggtataaatgtaactcgatattgttcatattcactcatgataatataatagaaattttttgatgttactttccatgtttcatatgtcttcattcccattattatatactgagatgatgaaggtatgtccttcacaaccttcatctgaagatcattata

SEQ ID NO: 10136 - DNA, 401 bp, Zea mays
  unsure (1)..(401): unsure at all n locations
agcttctggacatncttgattttggtcggaggctctattgcttcaattgccttgatcttctccgggtttgcttcaatgccccagtgcgaaaccaggaaccccaacagcttccctgcggagacaccaaagacgcacttgtccgggttcagcttcgtgcgggttgcccgcagactgtcgaagaccagggttaagtcttctactagagtcgaccctctcttagtcttgaccacgatgtcatcgacgtatacttccaccttgtccctaatcaggtccccgaaagtcttactcatcgcccgcacaaatgttggcaaggcgtttttcataccgtacagcataacaacgtagcagtaaagcccatccactgttacaaaagcggtatgcttcctatcttccctagacat

SEQ ID NO: 10137 - DNA, 380 bp, Zea mays
  unsure (1)..(380): unsure at all n locations
ataaacctcagcttctaagggagagcgcattntacgagtaacaaatgttcatttttagaacgacaggatctgtaacgcatgccaagcacggaagcaagattgtgctcatcattcacataataacatcatgacgactgacatgccactggaactcctacacatggaactattcagcccgatagcttacataatcatcggcgggagtaagtgctgtctacttattgtggatgagtattctcgcttcacttgagtattctttctgcaggagaaatctcatacccaagagaccttaaagggattcttgagacgggctcaaaatgagttcggcttaaggatcaaaaaggatataagcgacaacgggacggagttcaagaactcac

SEQ ID NO: 10138 - DNA, 421 bp, Zea mays
  unsure (1)..(421): unsure at all n locations
agcttgcaagaggctntgaacaaatctctgaaaactcctcagcatctgaggcatcaacgcaaacagtgacctgaaagaagcaaatacatttaccaaaccttcagtgtgagtaaacatttagtccttgaagaaaatacttgaaatgtagatgcttacatcttctagcagttgttcttctatagtgtntgcacaattgtactgcaatacaatgtagccgtcataaatgtgtttaaccacactaacagcatattcagtttctgcctctgtcagctccatgggttcagaggactgcagagattgagggaattagcaaatgtacttatcaaatttcaaaagatagaacagtatacaaaccttgaagagccttccaaacccagagaactcgggaatgaacgaaagcattttctgataagcatcaaca

SEQ ID NO: 10139 - DNA, 455 bp, Zea mays
  unsure (1)..(455): unsure at all n locations
cttgaaactcagcttgtaatctcaccctcaatatgttcgaaagactttgtgtaatcttcagctgacggagcgaatttctcactgctagctccaactgagtggaaaacttttctcagtccgtgaatacatttgttgctaaattccaaacatttgtcttgaaggcccgccaatagtttnttcaaatctgaattctgtgggacttcggcttcaaattttgcattaaagtcttgcttttcttgttcaactgtcagatggcagagaacttcgcgtcaattctgtatttatcttcggcttcgccatatgcttcattgttgaactcgaagtttcttttcatagagctgattgtctttatttacttctaatttcaatataactcggttctgtctacagacttgtgctttcaagcttgtcacacatcttggcaaacaccttgtgactgttcatataaacataaa

SEQ ID NO: 10140 - DNA, 401 bp, Zea mays
agcttaagaaatcccataatcttatctatctcccggcaaacggatatttctttgttatccgggagatagtacaggaaatcatcttcgttactaccattgaacactaaggcccccttcggatattccagtctttgggcgtagtgtttggcctccaagatttcttcttcagataatttcttccccgaagcatgacaaacaatgtaatcagtgtcttcagctaaggattcggggataggagattttgctttttctatcacgacttgctctgttgtcttgccggtatctgaactttgctgacccatcttatcttcaggcgcagtggccttcgtcttagtaggcgctgaaggcccagcttcggtttcgacttgatttttggtagcttcggcagttttcttggtaga

SEQ ID NO: 10141 - DNA, 354 bp, Zea mays
  unsure (1)..(354): unsure at all n locations
tcgatgatatgtngacgtccgtaaccacttatgntagattctagcttcgcgaaccaacactctttgacagagtgccgattatttttgctccggcgcggtcgcagatacatcccataatttcttcgtcaactccaccgaagagcataaaccctggctgatagccacaagatattccatattcttttaactcctctntatccgcctcggacaattcctgacctccangtgccgaaagtcaaaactnttctcttctgacgaagcatcaacaacttctttccccttgcangcattgtggcatgttctctctgcggctcactgtctctctggacctatctgattgagcttgtcattcta

SEQ ID NO: 10142 - DNA, 417 bp, Zea mays
  unsure (1)..(417): unsure at all n locations
atcttaagagactctcntctctgatctagctcgttacgacaaacgaactatcaccgcgataggcgctactgctgggtctatgcttcgtcgccgaaagtctcctgggaagaagccgctttcggctgaagctgtttgtataaaatggccgaaggttcctcttcatgaagcttcggtattacaaaccaacttaaagatagaatgaccctttagtccatanatgtctgagtcaatgttgtaaacttttataaggggcatacttgttattcctcacaggctgcatcctgtgcctataaatagagaacagtattcctttactgttcacgcattctgataattgcaatcgcatctttcggaatccaacctttgccaaggcagaggtattatcgtatgattcaatatattaattaaatataatat

SEQ ID NO: 10143 - DNA, 396 bp, Zea mays
  unsure (1)..(396): unsure at all n locations
cataaacactcagcttctggataacacttaagcactgactgtcgcggccctngatgctgatcgtacgcggaaccaatgaccaagggtcgacccttcatctccaaaagtgatgaccctcggacaagaacactgcctaaacgcaagtcgacactacggaccgtccgatggataagccagcaccgcccgagaccatatgcgaagccgtcggcctcagacgcggaccatgcggtcggtgaataccaaagagacccgaaggagacgggttcagtaaaatgtattattagtgtgctcgcggacctgtcggggtgcaccaccgggctgcacatgactgactttatttgacatctggcgacgcatcatatgaaaagtagctgttgttatagcacgtacagctga

SEQ ID NO: 10144 - DNA, 409 bp, Zea mays
agcttctatagggagagtacattttagagtaattttgttcattctgagaaagacagggtttgtagcgcatgccaagcagggaagcaagttggtgttcatcatccacacaagaacatcatgacgactgacagaccactggagctcctacacatggacctattcggcccgatagcttatataagcatcggcgggagtaagtactgtctagttattgtggatgattattctcgcttcacttgggtattctttttgcaggaaaaatctcatacccaagaaaccttaaagggattcttgagatgggctcaaaatgagttcggcttaaggatcaagaaaataagaagcgacaacgggaaggagttcaagaactctcatattgaaggctttcttgaggaggagggcatcaagcatg

SEQ ID NO: 10145 - DNA, 411 bp, Zea mays
  unsure (1)..(411): unsure at all n locations
agcttaacatcaatctgaatatacttgtacaatcatgctaatgctcggggaggccccatcagacacacaagcattcctatgttttcatagccaccagcataactagggaattaaagcccttcctctggttntttggcactttctgctcagcctccctccattcctgaaatactatatctgatatttctggagccaaagacagacggccctacctttgatcaagacctatgtccaagtgtctctagcaaaaatgcaagacaccaggatgtgttgtgttatttctttgtgctgatcacaaaaaagacatttatctagatggtccattccctttcgagccaatctttccgctgtccagcatttattaagggatgcaagccagatgaaaaaattgcatctccagggagccaggtc

SEQ ID NO: 10146 - DNA, 413 bp, Zea mays
agcttcttgtagctgctgccaaaaatgagaggtgaactgcgttcctcgatctgacactatcttcttcggcacaccatgaaggcagactatccgtgacatgtataattcagctaacgttgctccggtgtatgtcgtcttcacgggtatgaaatgggccacctttgttaagcggtccacaaccacccagatggaatcataaccggcccgggtacgaggtaggccaactataaaatccatcccgatctcatcccacttccactgaggaatccgcaatggttgcaacaatccggcaggcctctgatgctctgctttggttctctgacagctatcacagatggcgacatattctgcgatctctcttttcataccataccaccaaaaccttcttttcaaatcctggtacatcttctcac

SEQ ID NO: 10147 - DNA, 366 bp, Zea mays
cctttatctcacttgcgacacgcgacgcatgtggcacgtttactgctttataggtcgaactggcagtcgccaaacttcttctcgtcgtcgatgagcgacgccaacgcgagcgctttctgccagtggtgtttgttcggggtttccaagtaagaaatatggattcatctctggggttgggttatgaaaatgactcacaatattgttaataagaaaatgtttcataatccatttgtaatcctagccatacataaattttgttattctaatttagttatttcactactacattgcaaccatctgtattatgcagacctcgatatatgccaccgattgcatggtctcatcattgaagagcacgtgccacat

SEQ ID NO: 10148 - DNA, 256 bp, Zea mays
  unsure (1)..(256): unsure at all n locations
agtgagctcttgccaatcacaataatcacagagaaagacaacacaagagacatagtggtttatcccatggttcggccaagtataacacttgcctagctccacgttatggcgtcccaatggacgagggttgcactcaacccctttcaagtgatccgatgatcaacttgaataccacggtattcttccttatagttntcttcccgtntgcgaggaatctccacaagttggagcctctcgcccttacaagattgatcac

SEQ ID NO: 10149 - DNA, 295 bp, Zea mays
  unsure (1)..(295): unsure at all n locations
gcacatctaggtggtgaatcttctcttcataacttgatgttcatgagcgtaaaccaacagaccaggtttataatggtggaccttaccaggctggcgtacatatatgtgctacctagttacaaaggaagaaaactacattccccagctttgcttttatgggaagaacttacggaggtgctctatgttccacggattggacagatgctctccttcagttgtggcgaggcggacacacccgggtggcatactttcgcaccttgaagggccttcccactggggagagntatggaccctt

SEQ ID NO: 10150 - DNA, 187 bp, Zea mays
ccactgaatcaagaactgccggtgcccgtgaacaaagcgaagagccatgatcttgtgaggagttggtagtgcatattctgaagaggggtatgatacatcctcaagaaagtctggtgtggtggatggaggaggcccttctaaacgtctcaacatggagacgtgatacacatcatgtactctaacagtt

SEQ ID NO: 10151 - DNA, 400 bp, Zea mays
  unsure (1)..(400): unsure at all n locations
gatctctgagtcacctgangatgcagcttacacctctggactaactcggcagcattgttcttcgtctgttgtcaatataaaccagatctaaaagccttcccgaccagagtcctggatgatgcatgtactctgcactgcccggcatggatttcatcaacagttgcttcccaatggctgagtgaatgcacttcatgaggattcctgccacacatgttctgtacagtgtgcctnctacaaaggtgtagtgngctgactgccttgcgatgcgtttcgctgtagccttgtcatctggttcttcttcatttttatgtacctgatgataagctctcttcagtcattggggtccgattctagttggctcaagatgttgcactcttccacctgatatgagaggatgctt

SEQ ID NO: 10152 - DNA, 220 bp, Zea mays
  unsure (1)..(220): unsure at all n locations
gtgagtaccttaaccatgtgtattaactctctaatgcgctttatgggctcaagcaagccccaagagcatggtatgaatgcctaagagattatcttatcgctaatggctgtcaagtcggagaagccgatcctactttctttactaanactagagcaaatgattttttgatgcaaattatgttgatgatatcatatttgggctactaacanatctacatgtg

SEQ ID NO: 10153 - DNA, 172 bp, Zea mays
  unsure (1)..(172): unsure at all n locations
cctctagtccttccttccaatagatatcgaanacactcattgtagtanatataccggctagttgaaagtaacgatatctcagttacttcttatgatagaanagttaaccacaaatattatgtattacacattaagtttgccattatcatgatcttaanaaacttggccgata

SEQ ID NO: 10154 - DNA, 241 bp, Zea mays
atgggaccaaacaaattcctggggtttgcaaaacctttgatcactctttacttatttgaccatgtaactaaccactaatttgatatatgcgagactgcttgttaataaggcttggcacagtgcactactatggactatgcatactgagatgaatacttcactgtttcggcatgctggtatccaatattatgaaatgccctttcgataacagccctttgtttaatattgcaaggcgttgtga

SEQ ID NO: 10155 - DNA, 292 bp, Zea mays
ttctggcagcttgctgacttccatgaatatcgatgggtccttgatccgaaagtatcttcatgcaaagataagcaagatgaagaattgcttcgaaagcattgaatgcgccacgaccaataattgcattgtgagggtatttcatgtcaataatgtcaaacacaacttgctcagctctagtgtcgttgatgaatccgaaggtcactgacatggtgatcttacccagtgctacaatctgtctttctccaaagccacagagaggatgtgtatcatcatgaatcctatcttctggctc

SEQ ID NO: 10156 - DNA, 390 bp, Zea mays
  unsure (1)..(390): unsure at all n locations
agcttaaagtagatgactaccagttggtgtctttaaacttttacattnngatcggttagaggcatcaatcgggacttaatgctctctacaaggacgcggcggtattgatgcatgtatcaacattggtcttgagcgaaagcctcgttctaaagtattatcgatgtttgttcgagaagatgacaataactntataggctatttgtccaatttagccatctatgagagaatgagacgcggcaactgaaacaaaagcgccatgattcanacaataagacttgaaacacnnttgtcttgtgtctcttgcttactgagtntgagcgaattggacatttaggtacctctctcgagatctggtcccaccttcagaaatccatgtgggaaatgatcatg

SEQ ID NO: 10157 - DNA, 348 bp, Zea mays
  unsure (1)..(348): unsure at all n locations
tctagaactttatttgttctctctgtctgactatcagnnntgggatgataggccgagctaaagttcaactttgtatccatgcactcatgtatcttctgccaaaaccacgaagtgaactatgatcctctgtcagatacaatcttctttggcacgccatgtaggcatacaatacgtgccatgtacaactctgccaatcgggctcccgaataagtggtcttcaccgggataaagtgggctactttgtgtagcctatccacaattacctaaatatagtcatacccagcagatgtgcggtgtggacccacaatgaaatccataccatctcttctaactttcattcanggatct

SEQ ID NO: 10158 - DNA, 250 bp, Zea mays
  unsure (1)..(250): unsure at all n locations
cttcttctgatgttaattgtgtgtgtttgacctctaacatttggtctggtaatgccaaagaggactaccttagtgttgttgcccattacataaaccctgattggcaactagagaaaagggtgcttgctntagttcttattgatgtgtcacacaatggacaaaacattgctgatcgtgttgctggtgtgcttgctgattatggcttgacaataaggtgtntgcttttaccctagacaatgcatcatctaat

SEQ ID NO: 10159 - DNA, 357 bp, Zea mays
  unsure (1)..(357): unsure at all n locations
gctntatcatatggacgtgaaaagtgccttcctcaatgtacctatctatgaagaggtctatgttgagcaacctcccggctctgaagatagtgagtatcctaaccatgtttataaactctctaaggcgctntatgggctcaagcaagccccaagagcatggtatgaatgccttagagatttccttatcactaatggattcaaagtcggaaaggtctgtaacaccccacgtgttaccttggctagagccactctggcactagaagctgtgttcacaatggtaaagacttatggcaccacataagaaacctggaactcatgtgctaatcaagttgccaatgacatgagaagcactactct

SEQ ID NO: 10160 - DNA, 361 bp, Zea mays
  unsure (1)..(361): unsure at all n locations
tactctgtaacagagtgcttcgcgcatgtcttggtntatcactctgaaactgatttgctcaacgacatgtgatgtttacatttgaaaccctcctgaacgcatactgtaaacaaatgagatacgtaagatggatgtngtatttgacagtctctgcacgttggttatgtgattcacgttcttgtgtgctgtatcgatacccaggtgtttgttgtgttcacattgcagattagctgtagtgcatggatttcgtggctgtaagaaatcaagtacgctatcctactgatgcgctgttggcgtgtgataagttgtttaacctgatgcgcctgtgcaataggccatgagaagcgatatgtgcttgatc

SEQ ID NO: 10161 - DNA, 463 bp, Zea mays
  unsure (1)..(463): unsure at all n locations
gatcctctgagtcacctgaggctgcagcttgatactgctgcgttgtgtttagactgtttggttggttntataagggcttatgtaggacagatatgagggtctaagcggaaatgcaacttataaaaaggatctttgttggtgttgttgtatgctcatggccattgtgtgactattctgcgtggggcacaggggcatggagtgtttcactgtttatctattcatgtggacgtcttgctagttttacttcccgttggacatatggggtgtttgaatgcactaaaactaaagtgttgtttggttcaagatatgtaacggaaatgataatggtagtggtttacgctcgattactggcgtgaacatgtttgaataggctgatatcacttcttactgtgatatctgattacgggtagactaaaacacatatgagttaacggtatttagtacctattacgttatgactatg

SEQ ID NO: 10162 - DNA, 480 bp, Zea mays
agcttgctacctcgaaccttatgaactcgggtctgtagttttcctaagttcctaacgagaccggcatgtagatgtgtccgagtgggtattctccttcagatggcacaatgccgaataaaggagtgtctgactcgtggagctctatgagtgcgactcccaatccttggagtgtccgggggaaggagacgttgatgctgcttcccccatccactaacaccttctttaccctgctctctcggatcaccggatcgacgaggagcgggtattttgtaacaccccatgtgttacccaaagccctggcccatacatacacttatgacttgttatcacatgtgtttaagtggaggagaaagagcaccaaacctcggagacatggtgttactaggaatgtcatataaaagtttccctcactttatgcattatcccttggacaagaggtcaaaccttacccctttagcctagaccttagcagagatagtg

SEQ ID NO: 10163 - DNA, 439 bp, Zea mays
  unsure (1)..(439): unsure at all n locations
agctgtgaagaatattggggccttngctgctgactccctctatctgtcatttgagtagagttatgaattgacctgacgtacctcgggtgaaatcttcctccgaagcccctggtcatttcagagaacctgaatgcttcgtcccttctttggcgaaagtcattgtcagctcgaatatactcgtccatcttctggagcagcttctccaaagtctgtggtggcttcttggcaaagtattgcgctgaaggtcccggccgaagtcccttaatcatggcctcaatgacaatatcattatgcactgttggcgcctgtgccctcagacgcagaaaccttcggacatacgcctgaaggtattcttcgtggtcctgagtacactggaatagagcctgagcggtgactggctttgtctgaaatccttggaactggtatcaacatattcttc

SEQ ID NO: 10164 - DNA, 433 bp, Zea mays
gatctctcagtcacctgcggcatgcacgcttcatttaccttatataactatataattcaagtattgagtttaaagcaagcgttgtttttgtaattaaaagtatttatcaggccatgtgctcaatagcggatgtttgtggttaatattatacgccgtgaagttcaaccacctgaattttttgtgatttagctaaaatggttagctaataacacataatatcggttcattcaaagattgggtttatacacatcactcgctcttctttcttcatggataatgctgtcaatacattctttcgattatttatcaatttttataatcatatgatgacttacattcgtgaactccaaaaattgtctcaacgacacttgttgactcgtgtctggctcttcacttggtaaaattcttgaatgctatataatactatatatat

SEQ ID NO: 10165 - DNA, 187 bp, Zea mays
atatccgacgatgcatttgttgaatatgatgcctctcaagaagaagacgttgctcctgaagcacacactgctcccgatcgacgatgttcctttgcatgatactgcgcatcataaagatggatttcatacacccaagaaaatccattgagtgtgcatcagtgagtaatgggtctccatattctgggct

SEQ ID NO: 10166 - DNA, 423 bp, Zea mays
  unsure (1)..(423): unsure at all n locations
agcngaacgaagaacaattaagaacaagtattcgtttcctcgaattgaagatctatntgatcagatgagaggagctacaatattctcaaagatagatctaagatcatgctatcatcagttgaagattcggactgcagatatacctaaaacagctctcactacaagatatggactatatgagtntttagtcatgtcttttggactgactaatgcaccaacgtactctatgaacttgatgaataaagtattcatggaataccttgaccagtttgtggtagtattcattgacgacatactagtatactctcagaatgaagaagcacatgaagatcatctgagattacttctacagagacttcacgacactcagttgtatgccgacatttcgaagtgtgatttttggctaaaggaagtttcttttct

SEQ ID NO: 10167 - DNA, 430 bp, Zea mays
acccaagatgagctaatgcttcggttatactaaagtccgcaataactaacgggtgtgttgtcttgttcttgatatatagcttttgagaaaaagtgaccaacattggcgcccacctccggtgaactcacttccacaattgcgacaatggcttcgcaaggcaaccaagatgtggcaccttctgctacgaagttggtgctcccaatcacaggcggctcaagttctgaaccagccaataagaagcagaagaaggaagcacatagaagggtacaatatgttggagtgcaaggacccttcatcaagtccaaatggtctcatatatcaatcaccttctcccaggaagacctatagctcaaggattattctcataatgatgcaatggtcatatcttgtgtcatcaagggggttttggtccacaatggtctattggaca

SEQ ID NO: 10168 - DNA, 409 bp, Zea mays
  unsure (1)..(409): unsure at all n locations
agcttgcnagagacacctaattgtgtggtgatccttgcggtgtcttagtgactcgtgagattaagaagaagcactcaaccggtctgagtgactgattaagaaagggaaagggttgaaatagacctggcctttgtggcctcctcaacggggactagattctttggaaccgaacctcggtaaaacaaatcactgtgtttactcgtcaatcttcacttgatttgttttccctctctaaaagttcccttgctcatattgatttgagtttgctcccaaaggtcatccgcattgattgaggaactctaagcaagaagaactatattccgcactccaatntaattctaacgctaaccccgacctttactgcaagttaagtttataaatttcagggttcgcctattcacctccctct

SEQ ID NO: 10169 - DNA, 493 bp, Zea mays
  unsure (1)..(493): unsure at all n locations
atcctcagagtcacctgaggctgaagcttgcttgctatntaaattccttgtattgcatctttgtcttgtctaacctagttgagataaccgccaataaagcgagtgaaaaagcttaactcgggtcaaacttgacaagtcctagctntaagcttttagcacctaaattcttactttcatgcaattattggttcttgaaatatgcatgaggtactgcacttaaggggagtattcaaaactcaaatcactcatgaaaacccctagtgcaaaccaaaatacaaaattcaccatttgcctattttctctaanaaattatctagcctatggcaaaatattntgaaaagtatatgagggtgccaatacctgtcccaacaagtgttcttttgtgtgaatataagttgggatnntggttggttaggagttagatagaaaaattcanaattttccaaactcccctctgtcttggctcaccngacagtccggtgtgaccngacac

SEQ ID NO: 10170 - DNA, 278 bp, Zea mays
  unsure (1)..(278): unsure at all n locations
tcccgagaagtgtgtctttggggttccccgatgcatgctcttgtggttcatcgtctccgagcggggcatcgaagccaacccggagaagattgcggncatcaccagcatggggcccatcaaggacttgaagggcgtacagagagtcacgcgatgtcttgcggctctgagccgcttcatctcacgcctctgcgaaagaggcctgcccctgtaccgcctcttaagtaaagccgagtgcttcacatggacccctgaggccgaggaagccctctggaacctga

SEQ ID NO: 10171 - DNA, 127 bp, Zea mays
agatcaatttggaagagcattcttgccttctgtcgagtggtgcaccggacagtcctgtgcaccacctgacagccactgatcatgtgtggtgcgagatctccttccatatcgagcacagccaaccatt

SEQ ID NO: 10172 - DNA, 352 bp, Zea mays
  unsure (1)..(352): unsure at all n locations
aagctagatttaatataaaaatgatgctctgattgtaaacatgggtgttgagactgctctcctcataataagtcaacatcttcctaagaataggtagccaatttcacaattatgggcatctatgagtacaatattacacggccattatgtcacgtaaaggggtacatgatcagttaaatgttttnttacttnttacgtaatcantgtaaacanactctactattactaagcattgcagtcatgttacatacctgaccaaggactgtgatgaataatgaatcaccaatagaaaaccactcatcgctgatcccaagctgccgattatcccagttacaagaagcacctaatatat

SEQ ID NO: 10173 - DNA, 355 bp, Zea mays
  unsure (1)..(355): unsure at all n locations
gctcaagcctagctacaggtgcataggtttcaccgaaatccaaaccttcgacttgggagtatcccttggccacaagtcgggctatgttccttgtcaccacaccatgctcgtcttgcttgttgcggaacacccatttggttcctacaacantttgattatgacgtggaactaaatgccatacctcattcctagtgaagttgttgagctcctctttgcatcgcaccacccaatccgaatcttgaagtgcttactctaccttgtgtggctcaatagacgaaacgaaagagtaatgttcacaacaatgtgcaacacgcgatctatgtggtacccccttatgaatgtgtcggcgtttcta

SEQ ID NO: 10174 - DNA, 476 bp, Zea mays
  unsure (1)..(476): unsure at all n locations
agcttatganantatctacaacttatgttaccaacctattatttaattntattgataanatcgcctaaaccttaagagaacagattctgcacagaattgtgagactcgaaaactgctataatcaaactgcaataactntctaatctgatgtccgattgnggtgttcttcacggccacagaaagatctacagattatctacgactcatatacagactttttattttnttgatgccactaatagcacggaaaactggtatgaacataaatagtcgaatctgccattctacagaaactcaattcgagataaaaaactaatcccccatctaatccaacctctaatccttcaatacccatgattcacaacctccanaaacacataattacagggaggaacatgtatcttatccttacctatggttccccaagaaaactacataagagatgggtnaacatctncttgtcctctcttctcttc

SEQ ID NO: 10175 - DNA, 302 bp, Zea mays
  unsure (1)..(302): unsure at all n locations
agcttcaactagtgactntaaaattacttcaataattcatcattcaatcataaaaaatcacccaacanatcanattgtgggtgatataagtaagggtgttcaaactcgatcagatatttcttaattntgtgaacatttctcttttgtatcttgcattgaacctaaccgtgtagatgaagctctacttgatgttgattgggtgaatgcaatgcatgaggaattaaataactttgcacgtaatgaagtttgggagggtgttganagaccaaagaatcacaatgttattggaaccaaatgggtat

SEQ ID NO: 10176 - DNA, 328 bp, Zea mays
  unsure (1)..(328): unsure at all n locations
agcttgcacaagtctntttgaattgtctgtgatgtcatttgtattagacggagcanatgtgcaatcattttatccttgctcttataccattctatcatctctaanaaatttcccttgttgctcgaggaagaggactcatcatgttcgcgaaatgcaagagcctgaagcaaaagaaatctgataacttcaagtataacaatcatatgactnttatattcattgtccaccttatggcaccagatttcataccatatggcacactttgcctctgatttttgtaatcttcataatgccttctagcattattatgagcaacacctctatcatg

SEQ ID NO: 10177 - DNA, 399 bp, Zea mays
  unsure (1)..(399): unsure at all n locations
agctngatgtngcaacctcatgtgatgtttttattctataatatcaaactagtctacatgctgaattgactgagagagttgatgtcctgactctacacaaacaaaaattgaagaattacttgactgatgcaactactataggaaaagttgctattgagaacaatgatttcaacgatgagttggcagtggataatcaaaggcttaagaatgaggtcaagaaactataaagtgataatgaacatcttgcaacaagtgtgcataagttcaacacgggtcaatatctccaacatgagctgcttatgaacactgctatgaaaaataacaagagtggtattggatacaatgcttctgtgctaaagaaagctatcactccatacaagccatagtagactcacaagc

SEQ ID NO: 10178 - DNA, 483 bp, Zea mays
  unsure (1)..(483): unsure at all n locations
agcttaagaaactntnttcacggatcaagctcgttacgtttatctatctatcaccgcgaaaggagctactgttgggtccatgcttcgtcgccgaaggtcttatatggagaagcgatccttggatgaagctgtttgtataagatagccgaaggtccctcttcgtaaagcttcggcattgcaaaccgacttaaagatagaatgaccttttagtccataaatgtctgagtcaatgttgtaagtttttataaggggcatacttngtaattctcacangctgtgtcctgtgcctataaatagtgaacagtattccgttactgttcacgcattctgatttttgcaatcgcatctctcggaatacaacctttgtcaaggcatangtattattgatntaatgattcaatgtattaagtgaatatgatataatgtatcntgtggaatattatcccgtnntataccttctatttgtatatcttacaatgttat

SEQ ID NO: 10179 - DNA, 264 bp, Zea mays
  unsure (1)..(264): unsure at all n locations
agaaccaatcagattcttgaagatatgttgagagcctgtgcgtcgcaagatcactccggatgggataagagaatgccttatgcagagtttttctataacaacagttatcaggccacgttgaagatgtcaccgtttcacgcgctntatggaaggagttgcagaactccgttgcaagggatcaacctggagaaagcaagtgtttcgccagacattttcgttgtgccgaagagaacatcaagatggctcgagagaatctgaagatag

SEQ ID NO: 10180 - DNA, 423 bp, Zea mays
  unsure (1)..(423): unsure at all n locations
aaatgtaagattatgtaattctctttcttatttcttcatctccgatggtctgtaatgtctacaagacaggtgagacgttcctggtaaggtaaggaaagataccgaacttgtcaagtagttcaggggcacctacagggttgtctgatgtctgtgagacaaggacaactgtaggtgggcctaattacttgggaggttccgtcacagccataggcgaggagatccacaagctgatggctgtagggttcatcaaagaggtattccatcccgaatggcttgccaaccctgtgcttgtgagaaagaaaggagggaaatggcggatgtgtgtatactacactggtctaaacaaagcatgtncganagttccctatcctcagccttgcatcgatcagatcgtggattccactactgtgtgcgaaaccctgt

SEQ ID NO: 10181 - DNA, 239 bp, Zea mays
ccacactctggactgccatgatgaaagacttcaccatgactgcggtattgcccccgtacgaagatatagtttcttcgtagctcatcaggaactgcttctgatctgagtgcccatcatacatggcgagctgatgtggtttgtatgatgggggccatggggtagcctgcagttctgctgatagaggggaagcatcgtcaaatacaaaatttccatgatggaagatgtcataccaatcatca

SEQ ID NO: 10182 - DNA, 380 bp, Zea mays
  unsure (1)..(380): unsure at all n locations
agtcacctgacgctgcaagctgcgagccgggatagactctcctacctgatacccgnacgacgtcgttgacttacccgacgccggcgccgtagccgaccgattcggcataccgtcacgagtccacctcgacggacgcaggacctctgagctaaccccgccttcccggaccttcttgcgcggaagcacccccctgttattccacgtctgttcaggggggggactcgggaaaaaaaaaccgagggattgacagcaggactaagaaagccccagggatgttaaactatttaggaagccgggctcgtgtagtgtttataaccttaacatatattaatgaacgactgaaatacactagttatcaccaattgcaacaattgtagtct

SEQ ID NO: 10183 - DNA, 374 bp, Zea mays
  unsure (1)..(374): unsure at all n locations
cactccgagnagagatgtgaattgtcttgacgagcctcgggtggattcttcctccgaagccactgctcatatcatagaacctgaatgcttcctcccttctttggcggaagtcattgtcagctcggatgtactcatccatcttctggagcagcttctccaaagtctatggaggctttctatcacaatactgggcagtatgtcatggacgaagccccttgatcatggcctcaatgacaattacattggcactgtaggcgcttgtgctctcagacgcaagaaccttcgaacgtatgtctggagatatacctcatgatcttgcgtgcattgatacatagcttgagctgtgactgccttcgtctggaaaccctggaaac

SEQ ID NO: 10184 - DNA, 394 bp, Zea mays
  unsure (1)..(394): unsure at all n locations
gcacctgcngctgcagcttgcatacttgcaagcacaacacatgcactcatatctacgaccataccagtacctgcctttctgtgctgggctggattgattgacctttaagaagctcaaggggaatactcatgattggtgggattgcaaattcccaaatggaagaattcagcccattgctttttacctctgctaagccgggattcatacagacatatattagattgggaacccaaagatcatcactgacctagatccacttaccagtagaatttttactttgcagcaaaacattcaataagaccattgagccatccaaccaacggcagcagcaccacgatgatataagccttgaaaggctcatagatgaaatccagaagaataagatgctactgtg

SEQ ID NO: 10185 - DNA, 240 bp, Zea mays
  unsure (1)..(240): unsure at all n locations
gcaaattggagtccatcatccacacaagaacatcatgatgacggataggccacttgagctactccacatggacctattcgacccgatcgcttatataagtatcggtgggagtaagtattgtctagttattgtggacgaatattctcgcttcacttaggtattctttttgcagganaaatctcaaacccaagagaccttatagagattcttaagacgggctcaaaatgagttcgaatcgag

SEQ ID NO: 10186 - DNA, 340 bp, Zea mays
atgtgtaactttatgaggagataattgaattcttccaggctgtgcctgtgtctataatagtgacaacattccttactattacgcattctggaattgcatccatcattatgaataatctttgcaaggagaggataactgattcaatgatcaatatattaagaaatataatatgattcgttatgggtcattacctctgatgccctttatttatgttatcttatacagctattaaaattaagtacgaagacttaaccttcgtagtatattctatcaaccttttgtcaggttcatattctcaagggataatgctcgtgacgaaagacgtacattaacatttatg

SEQ ID NO: 10187 - DNA, 270 bp, Zea mays
cttggtgaaccttctgtgcttgagtggctgcggtcctagtggcaccttcaaaagtcataacatgttatgcagccaaactgtgattcagttgcacaaataatattgctgagtacgaagcacttctgttggggcttcagaagctaagggcaatgggaataagaagggccatcttaaagactgattctcaagttatttctggccatgtggacaaaagtagcaaggcaagagatccgaagcttgatatatatctggatacactttgaaagttgg

SEQ ID NO: 10188 - DNA, 364 bp, Zea mays
  unsure (1)..(364): unsure at all n locations
tgccagagccaacccatattagtcttaacaattaagcaagtatcgagtttagctctattgaaatcaactaagtatagttgaccctctaatactcccttaaatgctactgaatcatcacttcttctaaagacagtaacacctatatccgtaagaagacaattgtagcccattntgcataattaagaaactgaaagcaagttgaatctaaagaatctcaagaaaaacattggaaatagaatggtcaggtgatattgcaatntgaccaagtcctttgaccaaaccttgatttccatccncanatgtgatagctctttcgggatcttggtnttctcatatgaagagaacatcctttttctccctgcat

SEQ ID NO: 10189 - DNA, 363 bp, Zea mays
  unsure (1)..(363): unsure at all n locations
agcttatgagtatggtgatgagtcctctgctattaaacttcngcatgactcggcccctgtgcaacatgcagttggggtctccttgccagttagctgaagtgaaatttaaggtcgtggctgaacatatcgacatgagagatttggtacaagaaaatctggcaaaccaaacattcccaacatctggcggctagggaatgccgaagaaaaagaagggggaagaaatatgagcttgtccgtctgtcataccgtttcatgtttcanaanaggtttaaagaaccatgcactgaatggttagaattgatagaaaccatgtgcaacgaaattcttggaaactatacaaagaaagaagatcaattgatgact

SEQ ID NO: 10190 - DNA, 472 bp, Zea mays
  unsure (1)..(472): unsure at all n locations
cagcagcttctaataacagtgttgtttgatctnntgtgcaatttctagagtaagcagggcatcaagtttattagtttaaactgttgtgcttctggatttcttggntataatttgtcctttctataattatattactaatgacatgggccgtgatgattntatttatctaaaacttctcatgtttgtgttggttgtcttatacctgctaaacacattatttatatttagttcattggtacctgtaacctatatacttcaacgtttcatcttaaanattcaatatagtaagttaacaatgttagaaccttccagattcacttgagagaaacctttggagagctgttntacctatgatcctatcagttgtaggcctcatgatgtattcgtcattattgatcttatgttcctcctagagaatataaatggtctatgcgataaccctctcattattgatgtggatgtttagtatcgt

SEQ ID NO: 10191 - DNA, 301 bp, Zea mays
  unsure (1)..(301): unsure at all n locations
gttgatggagatagatttcgaatattttcagcacctccacaacgaagctgctcanaggaaatcgcagtccagctntcaaaaagcttcggtacactacgacttcattctcttcagggtgggggcaagttttttccccttcgtcggccctcacaatggacaaatcccgaaaataccttcctctcatgttgataagatgattctctttgatagtcgatctaccatanactgaatggcttggcgccatggacgatcttctgagcttcaccaccactgtcacatcatagctgcactgcaccagatc

SEQ ID NO: 10192 - DNA, 269 bp, Zea mays
  unsure (1)..(269): unsure at all n locations
gtggagaagctccctanagattaaactttcaagatggaaagtacaccacaacatggtaaaggtacaaaaggaagtattgaccttttgcgtatttgtaccttaattnttctccaatgcttgtgttgcatatgtttaatgtgtaagggggagtaatgntagtgtggtgcattttccctgcttaataccctgttgtcccttgacatcatcctatgttcatgcttgaatatggntntggtgtttgatgtcaaaggaggagaatttgtgcatta

SEQ ID NO: 10193 - DNA, 390 bp, Zea mays
  unsure (1)..(390): unsure at all n locations
agcttctccttgtcgtcatcaactntgacgtttatccattccgatttccagcctgccggccacttgcttcgatagctgatcataggaaattatgtagttttccgatatgcaaagatgtaacaaccaatattttcatgtagcccatcctttctggccttagtttggtagtgtagctcgtgtactcggcagaaaccttcggcaaatggctccaccgcctggcttcggagagcccaaatataaacactaagcctaacaatagtgttaggagttagttggtgaanatagatcccaaacttttctagcacatcggcaatcatcctattcaaaggaaatctcaaaccagctttgatgaaactcttganaatcactatttcatccttctctggcttc

SEQ ID NO: 10194 - DNA, 485 bp, Zea mays
  unsure (1)..(485): unsure at all n locations
tgcaagcttanacttgtaacgaggataagctacctttgtncttatgtgtgatggccttangtctctctgaaatccttaagggtaaatgcttaatatgattccaacatgctttcataagtgtatagtctgtcgcgagcatcacacttttattatgacacattgcacttcacagtttatatgataaagatatgttatcattaacctaattatgtgcacttggcatttaaggccaaaatctgtattcctctcaaggcacatatttagggggagtaatctatattatatagaactatntaagcttaattgacatatccttttaatcatatctctttcgtttggacattcgcatatttcctatctctattgtgccaaggcttagactaatatgtgttcatgagcatcttgtgtattaagtattagattgaaagggaaatggagtattcggcgaagacatcagttccactctacatcttcgctattatcct

SEQ ID NO: 10195 - DNA, 393 bp, Zea mays
  unsure (1)..(393): unsure at all n locations
gatctctaagtcacctgaggctgcagcttgcttgatgttaaattcttgattgcatctattgcttgtctaacctagttaagataaccgccaacaaagcgagtgaaaaagcttaactcggatcaacttgacaagtcttagttntaagcttttagcacttaaattcttacttcttatgcaattgttggttcttgaagtatgcatgaggtactgcacttanggggagtattcaaaactcaaatcactcatgataacccctagtgcaaggccaaaatgcaaatttcaccatttgcctattttctctaanaattatctagcctatggcaaaatattttgaaaattatgagaaaagtatatgagggtgccaatacctgtcccaacaagtgttattttgtg

SEQ ID NO: 10196 - DNA, 248 bp, Zea mays
  unsure (1)..(248): unsure at all n locations
tctaaagacagacacatctacatttgtaaacaaacagttatatcccatattgcataattgactaacagatagcaaattatatccaagagactctactaaaaacacattagagatagagtggctcattgagattgcaattntacctaacccttttaccttgccttgattcccatcaccgaatattattgaatcttgngaatctttgtttttgacgtaggaggtgaacatcttcttctcccncgtcatat

SEQ ID NO: 10197 - DNA, 308 bp, Zea mays
  unsure (1)..(308): unsure at all n locations
ttgagaaagacaagatttgtagcgcatgccaagtatggaagcaagttggagttcatcgtccacacaagaacatcatgacgaccgacaggccacttgagctactccacatggacctattcgacctgagtgcttacataagcatcggcgggagtaagtattggctgttattatggatgattattctcgcttcacttgggtattctttttacaggaaaaatctcagacccaagagaccttaangagattcttaagacgggctcaatatgagtttggattgagaataaataagattatagcgacaatggaac

SEQ ID NO: 10198 - DNA, 334 bp, Zea mays
  unsure (1)..(334): unsure at all n locations
gtggccatttacacaacctttgtattttgctaaacatatccttcttatttaacctcanattctaaacaggcttaatgaccatggaacccactgtgattttacagaattttggaaaagtaaaccactgtgagtcaacctacactaaaaccataatagaaataaagaagggagaatgataatgggattagtgtcatctaaacccttatactngtcactgaataataaggaataccattatatgctacctaacaacctaacctaatgatacaaaaacactaaggcccgttgaccgaacctaagtactattactagtntctctctacatatgtagaat

SEQ ID NO: 10199 - DNA, 403 bp, Zea mays
  unsure (1)..(403): unsure at all n locations
ttcctattcttagagtctattttcttctcaccaactatgaaggcctctttgatttagctntctgagctatattcactcttaaaactagaatgccaaccaaattggttaaggggtgaatagattctttcagatttctatcatccaatnttttcaaactactagttacatgacactatntataggatcaaatcgtnttcttttctgtcatcaccgacgacatggctcagatgtccctaaatgaccaaacctctttctcattgatctttgaacgtngctcatcgttcaacatncgtgtcgtccaatcccatcagacagtngtctttctcatntgatcttgaacgttgctcatcgtcacatccgtgtcgtcatcccatcaaacgtgtccctcacatctatacacccc

SEQ ID NO: 10200 - DNA, 264 bp, Zea mays
  unsure (1)..(264): unsure at all n locations
tcacgataatgaacgctacattntataccctgctaattaccctgagcgcaaaattatgaagattcatgctaggaaacctcatactanttctcaccatgcatacatgtattaaaatgaggcatctagctttaggcaaaccactcatgttaaattgcctagaaagaaagtttctgctgcatcaaatgagcataatgtttcatttaagacttttgatgcatcatatgttctaactaacaaaatatgcaaagtagttgccaatatttt

SEQ ID NO: 10201 - DNA, 406 bp, Zea mays
  unsure (1)..(406): unsure at all n locations
gcttatgaagattcttgatcccacatgggctagtctgttgtgtttgatccaacccatgttagtcttagcaattaagcaagtgtcgagttcagctctatcaaaatctaccaagtatagctgaccctctaacactcccttaaatgctactgaatcatcacttcttctaaagacagtgacacctacatcagtaaatagacagttgtagcccatttgacataattgagaaacggaaagcacattgaatctaaagaattacaagaaaaacattggaaatggaatggtcaggtgatatagcaattttacccaatccttggaccaaaccttgatttccatccccgaatatgaatagctcgtggggatcttggtttntctcataggaggagaacatcttcttctcccctgtcat

SEQ ID NO: 10202 - DNA, 144 bp, Zea mays
agcgcatgtcaagcagaatagcaagttggtgcccatcatccacacaagaacatcatgacgaccgacaggccgcttgagctactccacatggatctattcggcccgattgcttacataagcatcggcgggagttagtattggctt

SEQ ID NO: 10203 - DNA, 441 bp, Zea mays
  unsure (1)..(441): unsure at all n locations
cttaagnnactgagctgcagctgacgctcttattgnagagaattatgggtacacctgaagttgatctctattgattaagctttcacgttaattgtaccatagggtgatgctttatatattagcttaattataggctattggatatgtctataacctatgtgaccaaactctttttgcgatatagatagcaatgctcaaccataatcttagttgcacatatatatgatgggttatatatatagtttggttacagaaaatatacgcggatatgggtactgagatatattattgccattatacttgntnttagaatcaaagtttctacaacgccatgtgtgtgacactgtcgttcactgaaagatcatgcatcttgcttaacaacatttgttctcgatctttgaaacctcgatattataacatattcacgaactatcacagggc

SEQ ID NO: 10204 - DNA, 287 bp, Zea mays
  unsure (1)..(287): unsure at all n locations
gacttcgtctgaggtagcatatatggagggggaagcaccatataccattgttgtggcatcaatttctgaaatgacaaaggcgtcagtcgaaagtggctgaagaggaagtcgcccccgtatagagtgcctctgatgctgaagatgacaatactgaagaggatgacattgtgcttctgtctaacaaaccaagccatattgagtttgtgaaatccactgtanagcctgaagatctggtcgttttgaagaggctcgcgtatattggtgaaaaggacgatgacatgatttga

SEQ ID NO: 10205 - DNA, 299 bp, Zea mays
  unsure (1)..(299): unsure at all n locations
tttctaaagacagacacatctactatttgtgaatagacagntacatcccatattgcataattgactaacagataacatattatatccaagagactctactaataacacactagagatagagtgctcattagaaattggcaatttacctaacccatttaccttgccttgattcccatcaccgaatataattgaatcttgggaatccttattcttgacgtaggaggtgaacatcttcttcttcccatcatatggtttgtgcatcgctgctataatccacttgaaccccggatcataaacct

SEQ ID NO: 10206 - DNA, 320 bp, Zea mays
  unsure (1)..(320): unsure at all n locations
gcttaagatctnttatctactttccaatccttcaattataatttcatttttctatcttcagtatcctcctgcatttttaatgctnttcttagcagcatactctacaacaacaaattagagtcagaacatttaattcaccataaagataataataataacctagtcacaggtttcaccttgaagttggaataaaataagctaccgacaatatgttaccgtcggtagtagctgatatcagtttctagcttcgagaagccgaaactctttgataaagtgccgactatcttcgccccggcgcggtcacggatacatcccaagat

SEQ ID NO: 10207 - DNA, 190 bp, Zea mays
cctttaagcgccgtcttgaatcttttgatgatgaaggccatctcttcatcattaagtccggccgcctcaatttgtgccaccttactaggtagcgcctccttgcttcttgttgccttgagagcaaggggttgcgactcgttgatcggaccattcaaggcgtcgtccacgtacctagcctccttgatcatca

SEQ ID NO: 10208 - DNA, 417 bp, Zea mays
  unsure (1)..(417): unsure at all n locations
aacaaagctctntccagctgccagttccaagaggcagttgttctatgggcttcggagaaagacatggngactagcccaggaagatctactgcttattntgtggagaagacaaaggccacaatacaagaatgtgtcanatcaccatccaaaagcaaaaggagattgcagaagccgaagcccagcaaagtcaaccgaagcaggtcctgcatactgcttcgtgtcattcaccctacataccagaatatgtgggaatcatcccgcacttctgtgcttcactagtcagcgcagtttctggcacaacttcactcagcgcactacagctgctactacgagcacagcacaaggaccataaccatacacgaattcaagaagctgactcccagtatacctggcgatcnaactaatgaaaatctactt

SEQ ID NO: 10209 - DNA, 334 bp, Zea mays
  unsure (1)..(334): unsure at all n locations
ctctagcactgngcatcagctttctcgcctctgcccatctgcaatgtgtttgtacttcgtccaccgaagtcgggcctaggacaaacctattcttgtttcactgatttcatatcagttttgtctacttgtgagtagttctaagtgaccctacactgatatagtgtgatgtgccacactaatagactctttggtatcactattgcaccctctatagacggtaaaagataaagactactaatcggaggcccactcttgcctgactcgaacctactttgtcgcgttaccgcctcagttatcttgatgataccggagacttactcatggcactacttgc

SEQ ID NO: 10210 - DNA, 419 bp, Zea mays
  unsure (1)..(419): unsure at all n locations
tgcatgtttaaattcttgtatagcatctattgcttgtctaacctanttgagataaccgccaacaaagcgagtgataaagcttaactcggatcaaacttgacaagtcttagttttaagcttttaacacttaaattcttactttttatgcaattggtggttcttgaaatatgcatgaggtactgcacttanggggagtattcaaaactcaaatcactcatgaaaacccctggtgcaaggccaaaatgcaaatntcaccatttgcctattatctctaaaaattatctagcctatggcanaactatttgaaaattattgagaaagtatatgatggtgccaatacatgtcccaataagtggtattttgtgtgttataaattgggatttggtctgctggaattatataaaaaatcaaaattaaat

SEQ ID NO: 10211 - DNA, 103 bp, Zea mays
  unsure (1)..(103): unsure at all n locations
aacaagtgggaggagcacatcacagcaagaatgtgatgaccacctcaagacctctggagctgctgcatatggacctcttcngaccagtcgcctatctgagtat

SEQ ID NO: 10212 - DNA, 330 bp, Zea mays
catctgccaccacattggccttttctgtatgatagtggatttctaaatcataatatgtaatcagctcaagccatttctcttcctcatgtttagttctgactgggtaaagatatatttcagacttttatgatctgtatataaatggcaagtatttcccagcagataatgacgccatatcttgagggcatgaacaactgcatctagctccaaatcatgtgttggaaagtgctcctcatgccggtgtagctgtcttgaatcataagctatgactcggccctcctacattagaacacattcgagtccactgcctgatgcgtcataatacacatc

SEQ ID NO: 10213 - DNA, 220 bp, Zea mays
  unsure (1)..(220): unsure at all n locations
gctgcgctaatacacctaaaggtagngaccatcacttctttaagacagaccattacctttgaaaaaacaatatatccatattgatagttactaacgatagcaattgtaccaaaaactcaactaaaacacattgaaatagagtgctatttganatgcaatttacctaaccctttaccttcgctgattccatcaccgatataattgaatcttggaatcctta

SEQ ID NO: 10214 - DNA, 425 bp, Zea mays
  unsure (1)..(425): unsure at all n locations
agcttctaaggagaacacgtntaggactatctttattcttntgagaaagacaggatctgtagcgcatgccaagcaggatagcaaattggagtccatcatccacacaagaacatcatgatgacggataggccacttgagctactccacatggacctattcgacccgatcgcttatataagtatcggtgggagtaagtattgtctagatattgtggacgattattctcgcttcacttaggtattctttttgcaggaaaaatctcacacccaagagaccttaaagagattcttaagacgggctcacaatgagttctaatcgagaataaaaaagattagaagcgactatggaacggagttaatgaactcacaaatcgagtgatttcttgaggaggaaggcatcaagcatgagttctcttctccttcaca

SEQ ID NO: 10215 - DNA, 393 bp, Zea mays
  unsure (1)..(393): unsure at all n locations
aagatagaccttgtgcagcttgtcaagcaggtaaacaagtgggaggagcgcatcacagcaagaatgtgatgaccacatcaagacccctggagctgctacatatggacctcttcggacctgtcgcctatctaagcataggaggaagtaagtattgtttagttattggtgatgactnttcccgcttcacttgngtattctttntgcaggataagtctgaaacccaagggaccctcaagcgcttcctaaggagagctcanaatgagtntgagctcanagtgaagaagataagaagcgacaacgggtccgaattcaagaaccttcaagtggagaagtttcttgaggaggaanggatcaagcacgagttctccgcttcctacacaccacaacanaatg

SEQ ID NO: 10216 - DNA, 350 bp, Zea mays
  unsure (1)..(350): unsure at all n locations
atctagaactcgtcatattcctggaactcctcgaagtcatccatgttgctagcatcacctcctgagcactgagtacactatggagcaacctgtggtggggtggtgtgtaaagcaagggtgagtgcacatcaacgtactcagcaaatgtcccgtttggctaaagtggactatctgtatatggagttgaggtcaagcagttgcttttagttggtcaaatatttattattattagtagagccaagttntagtaataaacccagttagtacctcctcataagaggaaataccagagatcagaatttataacatcattgttaatcatcaacataatagtatccaaagttcttcta

SEQ ID NO: 10217 - DNA, 174 bp, Zea mays
  unsure (1)..(174): unsure at all n locations
catgaccatgacccacccctgaattcatcaagttgcgaactgtgtcaaaaagaatgggaaatataaacatcacgttcagagatggtgtatctgtccagtgttcagaaatcaagtgctctgctcattcctaacatctccagtgacgaacggtcttcttgtnttcttcttcttctt

SEQ ID NO: 10218 - DNA, 328 bp, Zea mays
  unsure (1)..(328): unsure at all n locations
tgaccctaaatcggataggaactctcatgtttcatctataggtggntctatgtcaactactatgttagctccaatgttaactacaaaaatcgtagattctatacaacagaatcatagaatcaacctaataaactaagattgttaaatcgcaccatggaatcacaattttaacaactatgaccccttctaggtattcatcttcttagctatgatgtcttcttcatccattaatgtaatcttactcacatgtattaatggttacctacaacggacacatcaattatgcagcataactagaatactatggcctgtttcgatccacatgact

SEQ ID NO: 10219 - DNA, 350 bp, Zea mays
  unsure (1)..(350): unsure at all n locations
gcttgcacacatagctcattngaatatctntgatcatatctcttttatatgctatgactaatgcgttntcaagtctatttcagaccaagtcataggtctattgaaagggaattggagtcttcggcgaaaaaaaaggctttcactccggaactcatacttcgccatcactccgagcaactctctctttcttggggagaaatgagcatcacagaaaacgacttcatccttcgaggagagagcataagctcataagcaaaatgaccggatttcgtctntggtataatcttaactcatttacttatgaccaaaggggaagaacttacttcaagagctctaatgattccgttttt

SEQ ID NO: 10220 - DNA, 245 bp, Zea mays
  unsure (1)..(245): unsure at all n locations
caggtgaacaagtgggaggagcgcatcacagcaagaatgtgatgaccacatcaagacccctggagctgctacatatggacctctntggacccgtcgcctatctaagcataagaggaagtaagtatagtctagttattgttgatgaactttcccgcttcacttgggtgttctttntgcaggataagtctgaaacccaatggaccctcaagcgcttcctaaggagagctcacaatgagtttgagctc

SEQ ID NO: 10221 - DNA, 330 bp, Zea mays
  unsure (1)..(330): unsure at all n locations
ctgcagctttaagggaaaccgtgataggttttcttctgtgtattnctaanaagatagacctcgtgcagcttgtcaagcatgttaacaagtgggacgagcgcatcacagcaatgaatgtgatgaccacttcaagacccctggagctgctgcatatggacctcttcggacccgtcgcctatctgagcataagagggagtaagtatggtttagctatagttgatgacttttcccgcttcactagggtattctttttgcaggataagtctgatacccaaaggagcctcaagcgcttcctcatgagagctcaaaacgagtttgagctcatagtga

SEQ ID NO: 10222 - DNA, 436 bp, Zea mays
  unsure (1)..(436): unsure at all n locations
gcttgagcagtaccggcttcgctgaacctctgtttctggtgatcagcatgtccttcagcttctgccatgatgtgattgttcctggccgaagagaggagtaccaggtttgtgcaacattcttgactgccatgacgaaagatttcgccatgactgcagtattgccttcatatgaagatatggtagcttcgtagctcatcagaaactgcttcggatctgaatgtccgtcatacatatggagctggggtggcttgtaagacggnggccagggtgtatcctgtagttctgctgacagaggagaagcatcatcaaaagcaaaatttccatgatggcaatcttcataccattcatcctcgttgtagaagccctcttgatgcagctctctgtgcttgggtcttcggtggtgctcatcttgagtaagatgacatacttcttcagt

SEQ ID NO: 10223 - DNA, 310 bp, Zea mays
  unsure (1)..(310): unsure at all n locations
aagtcacctgngctgcagctatccaatgcatcattatttccatctttttttctatctagagtgcgggaagggattaagaacgtgcttatgcctattgtatattatattattattttctacaatgggtctgacaaatttgtaaatatgaaagcatgttcgctgcggctacggctctacgtattctatctctatggattacagctgcagcagctgcggcgcattgctnttttatgtataactgcacatggtcaaatgggcagcccagccgggcacggcccgggcacggcccgggcacggcacggttagggca

SEQ ID NO: 10224 - DNA, 238 bp, Zea mays
  unsure (1)..(238): unsure at all n locations
cattaaagaattacagctggtcttcaacagtctacggcgatatctatggaagcttaatcctanaaatgcgtctttggagtaccatcatgaaaatagctcgggtttattgtcagccacctgtgaattgaggccaatacagaaaagatcgaggctatcatgagaatggaagcaccacgatcacagatgaaagtacaaagacttaccggatgcatggcagctctaagcagattcatatcaa

SEQ ID NO: 10225 - DNA, 363 bp, Zea mays
  unsure (1)..(363): unsure at all n locations
aggtatgtgtgcacacatgaccattgaagggataaggaagaggtggatataccccttttctatccagtggtcaaatttaagtcgctctagtgctaggttgggcacggtagtgccgctttaaccaagcaaccaagagaaagaaaaaagagatgcttgctgatgtcgctaggctctgaggatgttgtggttcatcttttgatcacatggttgcacattgaagcttgtgcattgtgtccnccttaatagtgtggtctttctatactcatataaaatgaatntanatacctctgagtagatggtcatgttctttagtaaattgggctccaccatcacatgtatttatctctttttcatgtagcctac

SEQ ID NO: 10226 - DNA, 313 bp, Zea mays
  unsure (1)..(313): unsure at all n locations
tagcactggctgcactctttaccgacggttccttatgtgacttagaactgctcactgaagcaaggatcgggggttggacttttacacttgcttttaatataatatcatgacctttttgcttttcctatagccgaaattcttaccggtaacagtacgagacacattgcgcattaagccaagggcacttatgttttgagttattttaaactcgtatggacacatcatttgtgagcaacacaccgacnattcagattataccttattgcctgtgcgtatgcacatgacactaccagatgagtgtcaactgtcatgg

SEQ ID NO: 10227 - DNA, 190 bp, Zea mays
  unsure (1)..(190): unsure at all n locations
atttctcctaacgacataacatctcttcctagtgttgtggctgatcttttgcacgactttgaagatgtgtttncacaagaaacaccagctggactaccttcacttcgtatgattgagcatcaaattgatctcattccaagggggacacttnctaaccattcaccatattgtaccaatcctgaagaatcta

SEQ ID NO: 10228 - DNA, 421 bp, Zea mays
  unsure (1)..(421): unsure at all n locations
ttatgctacatcgacaaggtccttaatcgactcagacggagacactacaccgagactcctttctcatgcaagtcaaccgcccggtctcagctttatcattttcaacccaaagttnggtacctagcagaggtacatcttttccgacgttgaacccatcacggccatgatggatccaccatcaagttttattntgaaaacatcccacccacttgaagcatcatctttggtcaaacaaaacattttgttctctagccaacgtgtagcataagatataccctttatatacaggggatcaagaaaggaactaaatctcaggaagaaatgagcatttgttaccacactctatactatgctgaacaggaaaagtttaaatacaagagtgcaatgcccgcttgcttgttatagtgagggttctgtcaca

SEQ ID NO: 10229 - DNA, 326 bp, Zea mays
atgcaagcgtctctatgaatttattctactacgctcaatatatatatttattatttaacaactctccaatatttagagaaaagataaaaaagttaggataagagagggtcacacctgaatttggtggatattaaaaaagaaattctattcccccaaattcatggtgttacaatatacgcaaaatctgctaaagcggtttgggatgaaagacgccaaacccgctaagactccgatgggaaccgacggacacaccgacctcaacaaaagaggtaagtccggtgatcaaaaagcatatcggtcaatgataggatcggtactctacttat

SEQ ID NO: 10230 - DNA, 293 bp, Zea mays
acttttgacaaagctcatcaatgatctctttattctatgtccggtgattgatgttcttaagaatgaagggaccgatgtgatcctacccctctttagatctatcaccggtgatatcttactaatatattgggtcaccaaaaaggggttgatgtcggaagatatatggatcatacacccgtgccagctatcacgtctgccgtcgacacatgaccttgaacaccacaagggatattacagatttacgaagccaatctatagagtgattaagtcgatgtttatctatttctttgttg

SEQ ID NO: 10231 - DNA, 428 bp, Zea mays
  unsure (1)..(428): unsure at all n locations
agcttcggctttaagaacacattntcaccatttctgaagagattatgtctcaagataaaaaaagtgttgctgagacgaagctgagcgaggaggagaagctccttgatgagaagactgctggatttattgaatcaatagcaaagacaaatacagaaaagattactaaggagattctagaatgcttatctgaagataccgatgacaacgatagttatgatgcggatagtgtgggcgaagactccgaagatcggccttggcgaccaagtcatgtagtttttggaatatcgactatcagacagagtcatcttgataatatgagaggaaggtattttcgagatatgtctattgtgagggctgacaacggagacaggattattcactgtcccgacgaanatgaagtcgtgatctaccgaagcttcttcatagct

SEQ ID NO: 10232 - DNA, 373 bp, Zea mays
cacgtatgcccaacaataacttgttgaatgactcgggcatgttactacactggaactcatatctccatccacctaagtcgtgagctctcgtccacttctgcaaatccggcatcaatccattcaaccaatctctaccttcggcatttgttgcgaacttgaggcttgataacctatatctaaagaactatggttccagctgtcgacatgtctcctggaatagctcaaagttatccttgacaccatccttacgcagaagattctcagcaaggtgtcgagtacaccacctgtgatgcagatgatggtacccatcgatctgctcacggaccgcgttgagtattccctggtgccgatctgatattacaccaacttcccg

SEQ ID NO: 10233 - DNA, 484 bp, Zea mays
  unsure (1)..(484): unsure at all n locations
cttcttttgtggaagtcattgtcagcccggatgtactcatccattntctgaagcagcttctccagagnttggggaggtttcctggcaaagtattgngctgtatgtcctggccaaagacccttgatcatggcctcaatgacaatttcattgggcactgtgggcgcttgtgttctcagtcgtaagaaccttcagacatacgcctgaaggttttcatcatggtcttatgtgcactagaacaaggcttgagctgtgactggcttcatctgaaagccctggaaactggtaaccaacatgtccttgagcttctgccatgacgtgattgtccctggccgaagagaagaataccatgtctgggccacatttcggaccgccatgacaaaggactttgtcataacagctgcgttgccttcatatgaaagatattgtgcctcatagctcaattaaaattgctttgngtctgaatgcccatcatacatgggtagct

SEQ ID NO: 10234 - DNA, 467 bp, Zea mays
agcttcggcatctttactttcttcttcctcctgagcccctggcgtccagtcagcgatgaagtctgctagcgcctgggactgaatcgaagatctatgcacataatcaatgctaaactcgttgagttccgcagcccactttccaatccttccagtagcttctctgtttctcataatatccttcaagggttgtgatgagggaacaattatatggtatgcttgaaaataatgtcgaagcttcctggaggccattaagacggcatataacaccttctccaattctgtataagttttctttgataaattaagaacttcggagacgaagtatactggagcctgctttttcaattgtccttcaagcttctcctgaacaagcgccgcacttactgtagagtgcgaagctgccacatacaacagcagaggagcccctgggcacgggtggagttagcgtcgtagatctatcaggtact

SEQ ID NO: 10235 - DNA, 303 bp, Zea mays
  unsure (1)..(303): unsure at all n locations
ttatctagcttatgacatcctanggtactctcttatcaaagaagattatcataccttcataattagatatgatgaacctattcatgatgcacatgatatttggactagaattaaagataaatttggtccaaaaatagttcagataatgcttctacttcctcttggtcttgtgaaactaaccctataaaggaagaagaagaaagtgaaccgtggagaccaaacgatgaatccacctctncaaaatggttatcttcccattntgattcccacatatgtngcttgggttatgaaaatgatagcgga

SEQ ID NO: 10236 - DNA, 487 bp, Zea mays
  unsure (1)..(487): unsure at all n locations
agcttgaagccatggtaagtagcataggcaagtatcttgctaatngactcaagcctagctacaggtgcataggtttcaccgaaatccaaaccttcgacttgtgaatatcctttggctacaagtcgagctttgttccttatcaccacaccatgctcacgttgcttgttgtggaatacccacttggttcctacaacattttggttaggacgtggaataagatgccatacctcattcctcgtgaagttgttgagttcctcttgcattgccaacacccaatccgaatctcttaatgcatcttctaccctgtatggctcaatagaagacataaaagagtaatgttcacaaaaatgagcgacacgagatcgagtggttacccccttatgaatatcgccaaggatggagttcacggggtgatctctntatatcgcttggtggactcttgggtgaagcagtcttggaccctgatcatcttncttgtcttgatcat

SEQ ID NO: 10237 - DNA, 270 bp, Zea mays
  unsure (1)..(270): unsure at all n locations
ctacttggtgtatattcctccttcttttcttccgtcgccttgaatgcgacgggttgagcttcggatgtggtgggttcgtcaagctcgtagattntcctcgagccttcgatcatgcactcaaaacttacaaaatgcccgattacttcctcgggggtcattttagtatatctaggattaccacgaattaattgaacttgagtagggttaaggaaaataagagatcttagaataaccttaaccacttcgtggtcatcccactttacgctcccg

SEQ ID NO: 10238 - DNA, 329 bp, Zea mays
  unsure (1)..(329): unsure at all n locations
tacgggtgcataggtttcaccgaaatccaaaccttcgacttgtgaatatcccttggctacaagtcaagctttgttccttgtcaccacaccatgctcatcttgctttgtgcggaaaacccacttggttcctacaacattttgattaggtcgnggaactaaatgccatacctcattccttgagaagttcttgagttcctcttgcattgccaacacccaattcgaatcccttaatgcgttcttcaccctatatgactcaatagaagacacaaaagagttatgttcacgataatgagtggcacaagatcgagtggnacccccttatgaatatc

SEQ ID NO: 10239 - DNA, 347 bp, Zea mays
cttctggcggcttcctgacttccatgaatagcgatgggtccttgatccgaaggtatcttcatgcaaagattagcaggatgaagaattgcttcgaaagcattgagggtgccacgaccaataattgcattgtaagggtattccatgtcaacaatgtcaaacacaacttgctcaggtctagtgttgttgatgaatccgaaggtcactgacatggtgatcttacccagtgctacaatctgtcttccttcgaagccacagagaggatgtgtagcatcatgaatcttatcttctggctcttgcatttgtctgaatgccttatcaaatatgatatcagctgcactacctgtgtc

SEQ ID NO: 10240 - DNA, 320 bp, Zea mays
  unsure (1)..(320): unsure at all n locations
gcaagcttctaagggagaacacgtgatatgtctaaccaatgttcatttcgaaaaagatagaccttgtgcagcttgtcaagcaggtaaacaagtgggaggagcacatcacagcaagaatgtgatgaccacgtcaagacctctggagctgctgcatatggacctcttcggacccgtcacctatctgagcataggaggaaggaaggatgggctaagtattggtgatgacttttcccgcttcacttgggtgttctttttgcaggataagtctgaaacccaagggaccctcaagcgcttnctcaggagagctcaaaatgagtttg

SEQ ID NO: 10241 - DNA, 512 bp, Zea mays
  unsure (1)..(512): unsure at all n locations
cttaagngactgcggatgcagctnggacttcatattcttaacttctgcacgatgttatgtttcctgncgaagagaagaataccaagtctgagccacactcctgactggcatgatgaatgactttgccatgacagcagtgttgccaccatatgatgatatggttgcttcgtagctcatgaggaattactttgggtcaaagtgcccatcatacatggggagctgtggcggcttgtatgaatgtgggcacgcggtaccctacatatctgccgccaggggagaagcatcatcaaaagcaaaattaccatggtatagatcatcataccatccatcatcgtcgattggagtttcttgacgaagctctatgtgttgaggcccttgtccttgatcgtcctgcgcgatgtaacacatttcttcatatgcttcgtcgatcttcctttgaagttcggctaaccgaagcatcttttcccttttcctctgacctggngatgatagcttctaaatcctgtctctgg

SEQ ID NO: 10242 - DNA, 326 bp, Zea mays
  unsure (1)..(326): unsure at all n locations
gcctaggcaccaacagtgccaaatgaaatcgtcattgaggcaatgataaagggacttcgcccaagtctaatggcattatattttttcaggaaacctcctcaaaccttggataatcttgtgccaaaaatggatgattacatcagagctgacaatgatttgtgacaaagaagggaggaagccaacatatactctgagatgactangtgcttcgagggaaggcttcatccaagacatgtcagaataatccacaatcttagtcaaagcgaagacataaacaatcataatcaagggcagcagcatagctcccaatcgacagggacgcaaca

SEQ ID NO: 10243 - DNA, 356 bp, Zea mays
gcttcaccactttgttctagtgaccttgttatgcttatttctgtcgtaacgaatcttataacggaagtcagctacgacaagcttatgtggggttaccacacactctccaggtataaccttgcaatctaagcaggcatgcctgtgctcttttctcaagaggacgaaatcaatctggctagtgtgttggccactactgaaggtcaccaggtgggatgtcctcttcctaaagaaagtgttggctataaacatgtcataggctatggcaaaggtcaagatttcctctccttcttgattcctagtcccaaagccgaagccttcatgcacaccctcgaaactggtgctagatgtacccacat

SEQ ID NO: 10244 - DNA, 479 bp, Zea mays
  unsure (1)..(479): unsure at all n locations
agcttcaaagggagatacacatttgggacttacatatgttcattntgagaaagacagggtttgtagcgcgtgtcaagcaagaaagtaagttggtgcccaccatccacacaagaacatcatgacgaccgacaggccgcttgagctactccacatggatctattcggcccgatagcttacatacgcatcggtgggagtaagtattgtcttgtaattttggatgattattctcgcttcacttgggtgttctttttgcaggaaaaatcacaaacccaagagaccctaaaaggattcttgagacgggctgaaaatgagttcggattaaggattaagaaaataagaagtgacaatgggacggagttcaagaactctcaaatggaaggctttcttgaggaagagggcatcaagcatgagttctcttcttcctatacancctcagcaaatggtgtagtggagaggaagatagaactctacttgacat

SEQ ID NO: 10245 - DNA, 499 bp, Zea mays
  unsure (1)..(499): unsure at all n locations
gcttcaaagggagagcacattttaagacttacatattgttcatttgagaaaaataggtctatagcgcatgccaagcaggatagcaagttggtgctcatcatccacacaaaaacatcatgacaatagacaggccactggagttactccacatggatctattcggcccgatagcttacataagcatcgacgagagtaagtactggctactaattgtggaacccgaggagccttcacatgcataagatcaaccatcatcttcttccatgcaagcatctncaccaacccaagatgaggatcaagttcaagatgatgaanatgaagatcaagaggagccacctcaagaggaggacaatgatcaagggggagatgctaatgatcaagaacaggaagatgatcatggtccatgaccgctacacccaagagtncaccaagcgatacaacgagatcaccccgtgaacctcatcctcggcgagatcataatggggaaccactcgatctc

SEQ ID NO: 10246 - DNA, 431 bp, Zea mays
  unsure (1)..(431): unsure at all n locations
aagcttgtatcaacatgagagncaaaaacgacccttggttttcggagtntntgctgcgcgtaggcggtggaactgatgacacaaatagtgacggcgacattcgtcttcctgacgatgtgtgtgtgccttacagtgggagtgacaacgatcttgacaacctaatagacttcgctttcccaaatctcaacgaaaatatgtctgattccacctacatcacttcaagggcgatactgtcaacacgtaacgactgggtggatatgataaatgttaagatgattgatcgttttcaaggggagcatatggtgtaccatagtttcgatagcgccacggatgatccccataactactacccacctgagttcctaaacacattgacgcctaatgggctgccacctcatgttttgaagctcaagattggatgtcctattata

SEQ ID NO: 10247 - DNA, 507 bp, Zea mays
  unsure (1)..(507): unsure at all n locations
agcttacaagggttatattatggtcgcctctgactgttgtgcagcttgggtgctaattaattagtttcggtcaagtcttcctccatgcatgagaaatgtgtgacggaactgttgtaccggccatgcactacgaattaagtagtggaggtccaactatcaagtgctatgattacgaaccatatatggatggtggagcaaatctgacctgccatacctacagtttagtttctctctaacgatactagatagaanaaaataccaggntttctgattntttttttcttttttgttccttcctgcttgctagctctagacttgtatgggacagtctccacattttacccanatgatgttttcaaatggattatnggatgtaacccacataacanaacgagcctcatcgatatttaagtagtggttggtttcagagtatagtagaatggaaccgttctagtactgagactgggtttgtcgaatcaaagtggaacgacgccactctattatagg

SEQ ID NO: 10248 - DNA, 381 bp, Zea mays
agcttaaagaaaaattgaataaattataccctaatttacctagtgctactctaccatgcatcacatttatcatctgcattttataaatatacatgcatcctatgcatcatattaaatagattgcaacctcgctgacggagagtacgtgctcaccccgagcaaggagctgaaccagaggaagctaaagaatacagaggctgttactgaggatccacctattgccccagcaattgaaggcaatccctggttttatgcataaccgtttatatatgctattttactacacttaatgtttgtaggtttgtactgtgcatttaagtgtaggactttgttgaaaccatagctgcatgaaaacttatggtttcttttgagatggatact

SEQ ID NO: 10249 - DNA, 359 bp, Zea mays
  unsure (1)..(359): unsure at all n locations
atccttaagtcacctgcagctgcagcttggatatctaacaaatctgaagctgacaagctttattttggtctgttcacaatgtttccatgtgtgcagccagccttcaaaaaagcaacagctgtgccccgagaagctaccacggcgcagaagtcagcgtgcccaccaataacttcgtcaagggcatcaacttcgccttcaatatgttctaatggtcttggcagggtttcagctgaaggtgtaaattttgaagaactagctccgacagagtgaaacacgttcttcagccgctgcacacatcagatgccgaagcttaagcatttctcctgaagttctgtaaaggatttctgcanatttgagta

SEQ ID NO: 10250 - DNA, 305 bp, Zea mays
cttcattccaacatgtgctagtcggcgatgccagagccagcccatgttagtcttagcaattaagcaagtgtcgagttcagctctatcaaaatctactaagtatagctgaccctctaacactcccttaaatgctattgaatcatcacttcttctaaatacagtgacacctgtatccgtaaaaagacaagtgtaacccattttacataattgtgaaactgaaagcaagttgtaatctaaagaatctacaagaaaaacatttgaaatggaatgggcaggtgatatatcaattttacccaatcctttga

SEQ ID NO: 10251 - DNA, 133 bp, Zea mays
gcttcagcagaatgacagcgaaaggtcttcattcttatatattcagatatgtgctaacttatggtgatgatatcattgtgaaaagcatgaagcaagaaaatcacattgctgatctgcaagagaccttcgctta

SEQ ID NO: 10252 - DNA, 317 bp, Zea mays
  unsure (1)..(317): unsure at all n locations
cttgtcaaagcaacagcacatgccatctctttttcttcttaccataccacgaacctggcctttcgcatgctggggactggatatgattggacctttcaagaaagctcaagggggatatactcatgtattggtggcgattgacaaattcacttaatggatataagtcaagcccatttgttctttaacctctgcttaggccgnggaattcatacaagacataatattcaaattcgggataccaaacagtatcatcactgacttatgatccaacttcaccagttcagaattcttccacttctgcgaacaaaagagcattc

SEQ ID NO: 10253 - DNA, 432 bp, Zea mays
  unsure (1)..(432): unsure at all n locations
caagacactttcccttcaaacgagttaagctccttcttagcattccaacttcttccttgagctctttattttcttgtgtgatagaaatatcactaattcctgaaatttctagctcaatggaagattggctttcttgagagcaacatttggtagcacatgataatatagtttctacttgagtacatgtgcatatgtgaggttggtatgatttcaaattagttaacacaacctcatgagccatttctaacatgatatgtgaatccatcaatntattatgagagcacacaagcatatcatgtttttcttgtanagctagggtttcaatatttagctnttctattgtgttcttgagcatatcattnttactttctaatngagcaatatatgatgaatgattaacacgcttatattgctcaattgaaatgcttcata

SEQ ID NO: 10254 - DNA, 369 bp, Zea mays
  unsure (1)..(369): unsure at all n locations
agctngcacacatagctcttttgaataccttngatcatatcttctttatatgctatgactaatgtgttttcaagtcgatttcaaaccaagtcataggtatattgaaaggaaattggagtcttcggcgaagacaaaggcttccactccgtaactcatgcttcgacatcactccgagcaactctctcgtctttgggggagaaatgagcatcaaggaaaaggacttcatccttgggggagagagtaaaagctcaaacgcaaaagaacttcgtctttggtataatcttaactgacttatttatgaccaaaggggaagattgcacttcgagggctctaatgattccgtttttggcgattcatgccaaaaagggg

SEQ ID NO: 10255 - DNA, 340 bp, Zea mays
  unsure (1)..(340): unsure at all n locations
agcttcgtagaaacattcttcaaggctatacttctgtgatctttattgnnnctccttggtacttggcatgatatgccccttnttcaaagcgtttttccgaagattgatatcatatttccttatgccacatgcagtatgatgtatgatgcttatgttatgcaaagatgatgtgatgatgctatgctatgtaaggtgatattccgaagatacacacatatttgcgcgataaaacacataatctttttgtgaatcagcattgactnttcgctataagcctcccttatgagcttcttcgccttttacttcagcggaatcagcgttgacttttcgctgtaagctc

SEQ ID NO: 10256 - DNA, 193 bp, Zea mays
tgtgtgaggaaataaatggttgggtccctgctctatatgggttttatgaagctatggagaatacaaacacagagaagattaccaatgaaatgctagctaatttgtctgaagattctgacgatagtggaagctttgatatggaaagtgaagacgaagatgctgaaaatcgggcctggtgaacaaatcacaccat

SEQ ID NO: 10257 - DNA, 245 bp, Zea mays
ataaaatatcacatgcttaaactatttattcataacgcatgatctcttactatttgctttccaccaaactttgtggaaaccaaacattctcgacatcatcctcaccatcttggtcctgataaaatacaaagttcaattaaagtggtacatgaaaaggacaagtgttagaaataataaaagaccttaccacataagtcatgcttccatcatgtgcacctcgaatccagctagaggagcatatcaat

SEQ ID NO: 10258 - DNA, 458 bp, Zea mays
  unsure (1)..(458): unsure at all n locations
agcttacccatgatgaagcatgtgccagttaaatggttctcggtcagcaggctcacatcgacacggtccttaatcgagtcagacggagacactacaccgaaacttccttctcgtgcaagtcaaccacccagtcttagctttattattttcaacccaaaanttggtacctggcagaggtacatcttttccgatgttgaacccatcaaggcctttgacggattcaccatcattagtattttcttttgaaaaattctatccactaaagcatcactntggtntaaaacaaacattttgttcttctaagcaaggctaacatcataaaaaatttcataaagggatcaaggaaggaatcaatttcaatgaaaaatgcatacggttacacacaccctataccaatgctaaataaggataaatttaaacacagtaggggaatgaccgtgctgctgataacattgtag

SEQ ID NO: 10259 - DNA, 379 bp, Zea mays
ggatcttaagcgactgcagctgaagcttccacgccgtttccacgaactcaccgcgcctttgattcttccctatctccggccgccagtactgctcgggcaaatttgccaccgccgcttaccctcgctataaattgaccgtacccccagctccgccatgcatccaagcatctactgcacccaccggcatcccgaaaaccccaccagagcacgtgaatttgggatttccccaaaaccgttgaagaacaccgcgaagagcaacctcgccgtggccagctcgattccgggtagctcgcattcctctgttgcctgttctagcgtgcttaagccctcctaaaactcttagacccgcccaattggactggaccgccccccccccccc

SEQ ID NO: 10260 - DNA, 324 bp, Zea mays
caagctccgataccagctatggtggaaccgcccggattattccaacttaagtgcctaagtcccgccttataggctataccacacttaaataggaataaaacgtcagtccctcggatctagtctgacaaggccactaacaggatcaagtaccacgtactcactcgaaggtgaggcacagagcaaatacaataaagcataaaaccatacattaatgagtacttaaatttattacaacatcattggagttaatcaaaagtagtgatcattggtcgaaatgcagcggaatataactaacggtaaataaacggagggatggggaagcct

SEQ ID NO: 10261 - DNA, 333 bp, Zea mays
  unsure (1)..(333): unsure at all n locations
gcttgagagcagncttcagcccttcagctgcgatctctgtcttatgctccggtcctttagcagctcctctatccgtcttcctcagatcccatatatgccctctcctgtactttgtccctcggtcataccgttgagctttggctataaaaaaaactgttgtggattgtgagctttggccgtgaaaaaagctgttggggattgtgagctgngaaaaaaacggaaaccactaaaaactggtaaaagttcttcgatatatgttttgacagtttcgtccgaaagccactaataacacgtctgctttcatatttgcactgcgagaaaatcggcttttcg

SEQ ID NO: 10262 - DNA, 278 bp, Zea mays
gcttcccccagcgcttacaggctcacaacgccaaattggatgacctggagcactcctggaacatcgacaaccttcgcaaattttttgtttgactcatcagggctgatttcgcccttgtaattcgccaaaaacaatcttgtaccggcccgcactcttttcctcccggggggtgaggtttttaacgaggcggagccatgtaatatatgtgtgaaaaatcccccgcaaaaacatgcgtcaaaaaaagaccgcgacgacggtcttcgacattcgaccaatac

SEQ ID NO: 10263 - DNA, 382 bp, Zea mays
  unsure (1)..(382): unsure at all n locations
agcttgtgaaggttcttcatccncacatgtgctaagtgtcgatgcctcagccagcccatgctagtcttagctattaagcatgcatctagaccggcctcttcttttgcaaaatcaactaaataaagtttgccgtctaatacacccttaaaagctagtgaaccatcacttcttctaaagacagacacatctacatttgtaaaaagacaattatatcccatattgcataattgacttacagataataaattatatcccaaagactcaactaaaaacacattagaaattgagtgctcatttgagattgaattntacctaacccttttaccttgccttgattcccatcaccgaatataattgaatcttgggaatccttattcttgac

SEQ ID NO: 10264 - DNA, 333 bp, Zea mays
acccaacaagagttgggtacataaaacccaagcctaaattgtcttgcaggtttatgcatctgggggctcaagctggattatcgacagcggatgcacaaaccacatgatgggggagaagaagatgttcacctcctacatcaagaacaaggactcctaagacacgattatctttggagatgggaaccaagaccttatgcagcgtgtcaggcaggaatacaagtgtgaagcactaatcacaacaaatatgtgatgatgacatcaagaccactggagctactacatatggacctcttcggacccgtcgcctatctcaacattcagggaagtaagtat

SEQ ID NO: 10265 - DNA, 444 bp, Zea mays
  unsure (1)..(444): unsure at all n locations
agcttagccttctgtaaagtgaccattcaattntatgtaataatgcagtagtatgggaactatgggtggtggtatttgagacattggggtatgacaagacttgccatcttcttatccttttttgcatggccgctaacacatgggtgaagcagtttaacttatccttttaaagctatgtacagatttaaggtctccctaattccaagcttacagtacgccttcaatgtaacaacatatatttcatttgcttggtaacttggctgcttaccgcggtcaaggttacttgtactattgcactactccatgtcagcagacttntttttggtaaagctgaccattcaaaactaggcaccaatgcaatatatcatgatggaacaatttaagttatccaagtttatttgctttcaacgccatacttaaactacgtgctttcctggaaatctg

SEQ ID NO: 10266 - DNA, 411 bp, Zea mays
  unsure (1)..(411): unsure at all n locations
gtctgttttattcaaatttcaagctaaaaattcttgtttccctaagtttctgttatatttgtgatgaatcaagattttctgatgtcagcttatatcgatagagtatgctgctaagtaaggcactgaggatgcaataagacttcgaagacaagaaaaatgaaatcataatcgagggtttggagagttagatcaaggatttcgaagcttctctagagaagaaggacttcctacttcatacaacagagagctcgcttgcagaaattcaagctgaaaatgctagattaagcgaggagcttctncaaagtcaaacaactttaaaacaaatcagagaacttcgaacaagagaagaaagatctacaagcgatatatgaagtcgaagcttgacaaaatacgaagctgcagaaatatttg

SEQ ID NO: 10267 - DNA, 488 bp, Zea mays
  unsure (1)..(488): unsure at all n locations
agcttctctttatcatcatcaaccttaacatagaaccattccgatttccaccctgcttgcccattgcttcggtagctaatcacaggacacttcgaagttttccgataagcaaaattatagcaaccaaagttgtcatgtaatccatcctttctagcctttgtctgatagtgcagttcatgaactcggcaaaagctgtccgcaaacgggtccaccgcctggcttcggagtgcccaaatataaacattaagcctaacgatagcgttaggggttagctggtgaaaatagattccaaaattattcaatatctctgcaataatcccgtgaagggggaatctcaacccagcctttaagaagctnttaaaaataacaatntcatctttctccggctttggggtagtctcttctcctccgaagcgtagtagcttctttggattntcagtaaaatagcctgactntaccatcttggacaagtcagccttcgaaacagt

SEQ ID NO: 10268 - DNA, 426 bp, Zea mays
  unsure (1)..(426): unsure at all n locations
agcttcaatccataattgtagggactactatggaagagacattaatcagcatggttccaaggtgttcgacaggacgacagcacagtccctttcctcattaacacatggtgatccatccaccaccaccagcatacgacacagaatcatgctcccagtcttaacttggttcatgaaccgagtaccaaggaacaagaatgctgtaccggtccaacactaccacctgctctgctctcctgtcgctgagaacctgagacgactgagacaaggaagcacacaaaatgagatgagatgataccagaaatcaacggtcattaggctatcttcaacagtttacttattctcgtcttttattntaaactctactccgtaaactccgtgctcagaagcaaacagatatgctgtccggatatacctattcaaactcca

SEQ ID NO: 10269 - DNA, 361 bp, Zea mays
agcttgtgaagattcttcattccaacatgtgctagtcggtgatgccagagccagcccatgttagtcttatcaattaagcaagtgtcgagttcagctctatcaaaatctactaagtatagctgaccctctaacactcccttaaatgctactgaatcatcacttcttctaaagacagtaacacctatatccgtaaaaagacaggtgtaacccattttacataattgagaaacggaaagcaagttgtaatctaaagaatctacaagaaaaacattggaaatggaatggtcaggtgatatagctattttacccaatcctttgaccaaaccttgattcccatccccgaatgtgatagcttggtggg

SEQ ID NO: 10270 - DNA, 387 bp, Zea mays
cctgtcaaagcaacagcacatgccctctcatcatcttcagaccataccagtaacctggcctttcgcatgctggggactggatatgattggacctttcaagaaagcccaagggggatatactcatgtattggtggcgattgacaaattcactaaatggatagagttccagcccattgcttctttaacctctgcttaagccgtagaattcatacaaagcataatattcagattcgggataccaaacagtatcatcactgacttgggatccaatttcaccagttcagaattctttgacttctgtgagcaaaagagcattcagatcaagtacgcatctgtagcacatccaagaaccaacgggcatgttgagcgagccaacggaatgatatt

SEQ ID NO: 10271 - DNA, 408 bp, Zea mays
attcttacctggattaataagattttctatcaaatattgcttctccttaatagtatcatttgccttcatgtatctcgtttcaagatccgctatggtgcactctgtttccttcattcttttctgcaaaaacatgagaacgtgtcaatacaaatatcattattcaattatatgactgaaatatgacactacaacacacatacctgtaatgtctgaagttgatcacttagatctgcactcagtactttctgagattcatagagtccatgaagctcttccaattgctggtacaattacagattccaaattatagcagtatttttcagcaagctgtagatcctccaacagaacaaaaggcataccttatcttttgattccaaacaagctccatacgatccagttctctgacat

SEQ ID NO: 10272 - DNA, 489 bp, Zea mays
  unsure (1)..(489): unsure at all n locations
agcttatgaagactcttcatcccaacatgggctagtcttgtgtgtcttatccaacccatgttagtcttagcaattaagcatgtgtcgagttcagctctatcacaatctactaagtatagctaaccctctaacacacccttaaatgctattgaatcatcacttcttctaaagacggtgacacctacatcagtaaagagacagttggagcccaatttgcataattgagatacggaaagcaaattgtaatctaatgaatctacaagaaaaacattggaaatagaatggtcaggagatatagcaattttacccaatcctttgaccaaaccttggtttccatccccgaatgtgatcgctcgtcggggatcttctgtnttctcgtaggaagagaacattntcttctcaccagtcatgtggttggtgcacccgctatcgatgatccaacttgatgccccggatgcataaaccctacaaacaagtttagttcttgac

SEQ ID NO: 10273 - DNA, 279 bp, Zea mays
gcttggacagtgttctgcgatggttccttgagaaccttctgttcatgtatcggtgttgtcctatttgcgccttcaaaagtcaaaacatgttatgcagcaaggcttgactttatttgcacaaataatattgctgaatacgaagcacttctgttggggctttggaagcttagggcattgggaagtagaagggccatcctgaaaactgattctcaagtcatttctggccatatagacaaaagccgcaaggcaagagatctgaagcttgaaaaatatctggat

SEQ ID NO: 10274 - DNA, 444 bp, Zea mays
  unsure (1)..(444): unsure at all n locations
ctaagcactgggctgcagcttgaccagttatacccgctaacccactgtctcaagctcatctttcgagtcccaacggttcaccatgtagagtgagtccactagcttttcctccgaacacaaatcctattgtcacctggtttctgaaaccacgaaaaaatcggttcttggttcaacaactcataaatagattatatgtccacaactttaaaaaatccgtatgcgcatttgatcctatntggttggacgtccagaaaatgctgcgtttattaattttaagattaacaaaatcaccacggacatattcgttaatattttaaaaatgaatggatatataaactcaagcacccgttattagttggagagccaaatcacgatgattgagtttgactattctcttagttggcctacaaaattgataattataaaataatatcctctacatct

SEQ ID NO: 10275 - DNA, 481 bp, Zea mays
  unsure (1)..(481): unsure at all n locations
tgatatgaacctttgttgttgcttgaaggagttaattcaattcctatcaactcaagctatcaatcttcaaatgatctacatattcaagattgacccaaggttacttcaatttattgtattcaaaactcacatcatctctggaagatattaatgttgtacgaaataaagaatcatcatgtgcggaatatcaaagcctacaacatggaggaaaatcaaatgatggtaacatttatattcttaagtgcaattatcctaaattgtcgtgtgtcttgtgtagtcacatagaaataaanagcccttaagcatgntttaacattatgtcatcattctctgaagaaattcctctcatatggtagattgtgtatttatcaattctatattatgacaatctacatgctgtatattgtngcaagttcccatggcatattntactntagttatcctattattgccatgctctagatatagaaagatatttcat

SEQ ID NO: 10276 - DNA, 391 bp, Zea mays
  unsure (1)..(391): unsure at all n locations
agctntgcagagagcgaaagtttgttcttcatcgagacctctgcgctcgatgcgacaaacgtcgagaaggccttccacaccgttctatccgagatctaccggataatcagcaagaagcccctgtcttcggaggagtctggtttggggtccggtaacctcagagagggacagtccatccaagtgtcagccacaaattctggcgcccttacgtcgcggtgctgctcttcttagagccacgcccaccaggatcatctgaagaacaacagttcgtcaagaaggtcctctcttccgagtcgaaatatttactcccctttgtgtgaacaataagcgtagatttaaagaatgtcagactcagacgctgactatatatacttgacctgcatagtcatgt

SEQ ID NO: 10277 - DNA, 358 bp, Zea mays
  unsure (1)..(358): unsure at all n locations
gaacatactaccaagtcctcgactaattactcttgtcaaggacacggatgtatatttacccaggctgtgtcctgtgcctataaatagatgaacagtaacaccgtactggtcacgctgacttgtactcactcgcacgtcactcctgggttcataccttctatcaagccgaaagtacaaatgtaatttactgttattaatggttggccatgattagataatgagaatataaataatctaatgatntaatggtggtgttcatgatattttctatgtttcatatgtttctactttcattattacatattgagatgatgaaggtatgtccttcataaccttcgtctgaagatcattatatcct

SEQ ID NO: 10278 - DNA, 433 bp, Zea mays
  unsure (1)..(433): unsure at all n locations
catgcaagcttttatgggtgcatgttgacaagcacgtgtattttgtttgtntaantaaaatggacaagcacgtgcatgttatataggcacggtatacttgcacgcgagaaattcatttgctgtaccttggacgcacatggccctcccctcttgccgagttcagaggcctgctcctctctgcgaagagacgacccactcgtcagagacacccagtgatccatatggctacggtcaagtgcccgccatccgccaatgccaagcgactccaacggatactttcgcagctaacagcttttctattttccccttcccagttccgacacccgcgctcataaccctctggttccacgcccgctcttgcccactcccataatcttgacgcctgacgtccccacaagtgatcggcatgagtaacacagctgaggaatacact

SEQ ID NO: 10279 - DNA, 301 bp, Zea mays
tgttctgctccatgcgcctatgggtcccttttatatccccaaggcagctaagagccgttggagatgaacttggaaggcaatttttgccttctgtcaagcggcgcaccggacagtccggtgcaccgccggacaagtcctgtagcagtctggtgctcgatctccttccttatctggcgcatctgaccgttgggccggcggtcccgttggcgcactggacactgtccggtgcacaccggacactgtccggtgcacaccggacagtccagtgtgcccaaccgactcttggcgcgggccacgcgtc

SEQ ID NO: 10280 - DNA, 476 bp, Zea mays
  unsure (1)..(476): unsure at all n locations
acctcgaaccttatgaactcagttatgttgttntccggcgttccgaaggtgaccagcatgtagatgtgtctgagtgggtactctccttcagtcggcacaatgccaaagaaaggagtgtctgactcgtggagctctttgagtgcgactcccaagcctatgagtgtccgagggaaggtgacgttgatgctgcttcccccgtccactaacaccttctttaccctgctctcccggatcaccggatcgacgaggagtgggtatttgcccagatgatcgaagttgagccactgatccgcccgagtgaaggtgatcaagtgttcggaccatcgatacggngcgggaggatctggtggccgcaccagtatctaacggtcgttgagcttctgctgnctcttgctctcttgaacccatgtcaccgaaatgatgtgacttctcatcgancncaggaatgtnnncgctctcttctactgctggggtgc

SEQ ID NO: 10281 - DNA, 322 bp, Zea mays
tcagcttacttcgggccttctggcagcttcctgactcccatgaatagcaataagcccttggtcccaaagtatcttcatgcagagataatctgggtgaagaattgcttccaaagcatttatggtaccacgaccaatgatggcgttgtaggggtattccatgtcaacaatatcaaacacaatttgctcatgtcttgttgtattaacaaatcccaaggttaccggcctggtaatcttcccgagtgccacaatctgacgccctcccaagccaccaagaaggtgcgtagcatcatgaatcttgtcttcaggctctcgcatctgtctg

SEQ ID NO: 10282 - DNA, 213 bp, Zea mays
  unsure (1)..(213): unsure at all n locations
ctgatgcatgcaagcttggatattcttcatcacaactctatggatattgttgtgattaatgataactcttcttcacgaagcatgaatagaagggaaggtgttttttccncaaacactcattaacggtacgtatgtaaaatgtcctgcatcgcatagatatgtaccgtatagacaaggatattcctccaatgttacagtgagtacacgtattat

SEQ ID NO: 10283 - DNA, 243 bp, Zea mays
cgagctcactgaatagcaagctacacaacttttttttttaccaaggagaagctataagcgcgttgtatatatcacagcttgaactggggtcccgtgattacgtgtatttacaaggaaggttcgacctcacaaatgtgttacaatatatcagggccgggggcctgttctcgtctaaactataaatgtccaggaattgcagcctcactagaatgtacaagaaaggcaaaagtacactcaatccca

SEQ ID NO: 10284 - DNA, 310 bp, Zea mays
  unsure (1)..(310): unsure at all n locations
cttcatacccacatgtgctaagcggcgatgcctcatccagcccatgctagtcttagctattaagcatgcatctagaccggcctcctcttttgtaaaattaacaaaataaaggttgccgtctaatacacccttaaaagctagtgaaccatcacatcttctaaagacagacacatctatattagtgaatagacaagtataccccatattacataattgactaacagatagcaaattatatccaagggactcaactaaaaacacattagagatagagtgctcattngaaattgcaatcttggctaagcctttc

SEQ ID NO: 10285 - DNA, 263 bp, Zea mays
  unsure (1)..(263): unsure at all n locations
gatatttctcacctgtgagcaacatcttatattcattagcttcccatttatatactacaggagtataatctgtggtgttcctcgagactcttagtttttattttcaaaaaatattagcaaaccttctataacaattgttaagttgcatgtcgtagttctagccattttcttctttctttggtccaataatttttctttttctttggttctgtcattggcagggtctnccaatttttggcattggtgttgggcataacacatat

SEQ ID NO: 10286 - DNA, 478 bp, Zea mays
  unsure (1)..(478): unsure at all n locations
atgtatcaacctcatgtgatgatttgattcaatatgatgcttctattctacatgctgaattgactgagaaagttgaagtcctgactttatacaaccaaaaattgaagaattacttgactgatgcaactactagaggaaaagttgctattgagaacaatgatttcaacaatgagttggcagtggataatcaaaggcttaagaatgaggtcaagaaactaataagtgaaaatgaacatcttgcaacaagtgtgcaaaagttcaacaagggtcaatacctncaaaatgagctgcttatgaacactgttatgaaaaataacaagagtggtattggatacaatggcttttgtgcaaagaaagctatcactcaatacaagccaaagcagactcacaagcctatcatatgctttgagtgtggaaatgaagggtcattttgccacaacttgcaagctaaaccaccaactccctttgctaagcactc

SEQ ID NO: 10287 - DNA, 195 bp, Zea mays
  unsure (1)..(195): unsure at all n locations
atctaaatcccttgaacaccattgattcatcatccatctttgatacaataacctctgttggagtgaataagcattgaagtccaagatcacaaagttgacccactgattattaattgaagctcaaaggtgcaaccaagagaacattngatattgataaatcatttgaaattgccaccttgccaaatccttgcactt

SEQ ID NO: 10288 - DNA, 410 bp, Zea mays
  unsure (1)..(410): unsure at all n locations
gcttgtgaagattcttcataccaacatgtgctagtctgcgatgccagagccaacccatgttagtcttagcaattaagcaagtatcgagttcagctctatcaaaatctactaagtatagctgaccctctaacactcccttaaatgctattgaatcatcacttcttctaaagacagtaacacctacatctgtaaaaagacagttggagcccattttacataattgcgaaactgaaagcaagttgtaatctaaggaatctacaagaaaaacattggaaatggaatggtcaggtgatatagcaattntacccaatcctttgaccaaaccttgatttccatccccgaatgtgatcgctctttgnggatcttgtgttttctcataagaggagaacatcttcttctncccggtcatg

SEQ ID NO: 10289 - DNA, 449 bp, Zea mays
  unsure (1)..(449): unsure at all n locations
ctggatcactctttctggttgtctttagatttanncataggnggnntgaaatgtgaagactgaatctgtccagttctggacagcaaagttttctagtgtattttacccttgatacatattaaaccagccagggatgtttataaataatttgtagaacatttaattagctttccagaaagtctaagatcactttgtttggatgtcttaatcttaagttgtgaatttttgaagttgcaaatctgaatctgtctaaatctggacagagttgttgtattaattagcacgtttcgaccttgctaagtgttgaatcgtgttgagggcaaaataccaaagttgtagttcaccttttaagccttttagataagcctagtttgatatctttggattaatattngatgagttatgattaaaacaagtaactgctgtattgctgtccaaaatctgcaagt

SEQ ID NO: 10290 - DNA, 492 bp, Zea mays
  unsure (1)..(492): unsure at all n locations
agcttatctttacctcttgtgaaatcaactcagtattatttttctcttcaaatgacctgtgaatgcaatagaggcatcatcccttctaaatacaatcacaccaacatctgtgaagagacaattgtaatccatctcacacaattgtgaaacaaacaacatattgtaacttaaggaatcaacatgtaatgcatttgtaatggaatgctcaaggataatagctatcttatcaagaccaatgacatctttggaattatcaccaaatactatgttttcacgtgctttgatttgatctctaactcgattctatgagaaaagtgcttttaggacttatttcgagccaaactgcaaattctggagaaagaacaagtaaaaggtgaggttcctacacttattcaattggagtatgtgctaactatgattgtctaagtgtnggaaaggctcacaagatagtccatgtcaatcgtataagaaatgcatanaaatgacttcatt

SEQ ID NO: 10291 - DNA, 485 bp, Zea mays
  unsure (1)..(485): unsure at all n locations
tgcagctgacttgctcctgtggagccttgcctccttatgccaggcgttcccattagagcatgcttgagcaattataattgcattttctaagtcactctcattaatcttagcactaagttgagctatgtgatcanntttgtgtttaattaaagctaggtgatcatgaatagcatcaacattaatatttgtacatctagtgcaaatagtaacatgctcaacggtagatgtagagggtttgcaagtatttaattcaacaatcttagcatgtaaaatagcattctcatctctaagattggaaatagaaacattgcaaacatttaaatctttagccttagncaattaattttcatttctcaatttaaagctagagagagatgcattcantntgtcaatcttagcaatcaaattagcattatcatttctaaggttgacaagagaatcatcactatcatttaatttctcaaccttagcaaatcaattatcat

SEQ ID NO: 10292 - DNA, 470 bp, Zea mays
  unsure (1)..(470): unsure at all n locations
agcttatattctgtcgcgttattggatgctgagagcagtaactgaagagcatatttgagctattcacctcaaggtgcaatgaanaggattcccgcgcctgccccctgcagtttcaacgagccatcgaaatacatcttccatacttctgcagtatctgggttatctggcacttgttgctcggtccattctgatatgaagtcaactagtgcttgggtcttgattgcagtacgaggtcgaagctcaatatcatgagcccccagctcgcaggcccacttggctattctttcgatggcttctttngtgtggagaatatcccctattggaaatccggtgactactatgactntgtgatcgtcaaagtagtgacggagctttgcgtgcagtagaagtactgcatacnaatagttctgaacttgaggatatttcttcttcgagggacccaggacttcactgatgaaatagacgggatg

SEQ ID NO: 10293 - DNA, 377 bp, Zea mays
agcttgctagagcttgaaccaaggaccctcgccatcggaaaggcgcaatcgtgctagcaggagttcggaaccccgccggcgcacgtggaccggatgagtctctgcgccatttccgattcactgcacacatagcctctacgtcataccggggagctcatcgtgtcgtttaattgaactagattgccgtggttaggccggagctctcgccgccgacgagttcacccgcccgcgcgcgtggactggtcgattccggccacccccgtcgtcaagccgtacctcactgtgaccgccaggacctcccgaagccaaccccacccctcgctggacctctcttgccaccggtaagccgcgccgccctattcctttccgtgggtact

SEQ ID NO: 10294 - DNA, 463 bp, Zea mays
  unsure (1)..(463): unsure at all n locations
agctttatctcttgctcactagctctcacctgattttcatgctttttgtagcttggnttaaagacgtgtttgcaccatgtctggngaaaagatgactgaggaaaagaagatgactggggagacgaagcttactgaggagacgaagttgtttgaagaanaaaaagctgcagatctttntatcgtcggattntttgagtctatgtcaaaaacgaacacatagaagattactaaagagatactagagggtttgtctaaagatattgatgacagtgatagttatgatgtggagagtggaggtgaagattctgaagatggccctatcgaccgagccatgccgtcttcngaaaatcaactattaaacagagtcatattgaccacatgagaggaggtactttcgtacatgtctctcgtgagagtggcggagcaacatcgccctgctctgangaaaatgaagtgtattatc

SEQ ID NO: 10295 - DNA, 473 bp, Zea mays
aagggagaacacattttgggactaacaaatgttcttttttagaaagacagggtttgtagcgtatgtcaggcacggaagcaagttggtgttcatcatccacacaagaacatcatgacgactgacaagccactcgagctcctacacatggaccttttcggcacgatagcttacataagcattagcgggagtaagtactgtgtaggtattgtggatgattattctcgcttcacttgtgtgttctttttgctggaaaaatctcatacccaagaaaccttaaatggattcttgagacgggctcaaaacgagttcgggttaaggatcaagaaaattagaagcgacaacaggacggagttcaagaactctcaaattgaatgcttccttgaggaggagggcatcaagcatgagttctcttctccctacacgccacaacgaaatggtgtagtggagaggaagaatagaaatctattggacat

SEQ ID NO: 10296 - DNA, 476 bp, Zea mays
  unsure (1)..(476): unsure at all n locations
agcttgagcagtgactggcttcgtctgaaacccttgataactattgattagcatgtccttcagcttttgccatgatgtgattgtccctggccgaagagaggagtaccaggtttgtgcaacatttttgactgccatgacgaaagatttcgccatgactgcagtattgccaccatatgaagatatggttgcttcgtagctcatcagaaactgcttcggatctgagtgtccgtcgtacatggggagctgaggtggtttgtaagacgatggccaaggtgtagcatgcagttcagctgacagaggagaatcatcgtcaaaggcaaaatttccatggtggaaatcctcataccagtcatcctcgttgacgaaccctcttggtgaactctctgtgctgggccttcggtttgctcatctgagcagatgtcaactcttcaaggttcgctatctgctttgangcagctagcagcatctttcttttt

SEQ ID NO: 10297 - DNA, 386 bp, Zea mays
  unsure (1)..(386): unsure at all n locations
gaatgctgatttaacatatctcttgcatatgctgcattgctacttgcaatggtagcgcaatatgcagcaaaccagtgagatatttatttgctgcatgatgctccaatgttaccaacatgctacttctaacaatagcactatatgcttttctcatgtgcaaatcttattggctaagtagcatgtaattctgctgatgtacatcaatgttcttggtttacatactgcatgtactttataacctcgtgcagntgtctgttttctttatcatagagtgatgtcctcacacagttgcaaaatgtcctgctgaaaattgcaactacccaaattatggattnggtactactactactcttttatctttctaaaagtgctcctctctatcctta

SEQ ID NO: 10298 - DNA, 325 bp, Zea mays
atagccgaaggggggcatgcacaaaggtactgagccccgacatgtgggcccagggacaaaatgtatataacacttggagctactaatgtttggtgctggggcaatcttctcgcgccctgacatccgagatctgcgtatcctcgtcgtgcaggggaagcttcttgtataagggatggtgagtacagtgcgctgcatggcacggacgtactgtttgacaacagactggacaggcatgccgtctgcaggatgacccctgacgccgtctgctatcgaagtggataggacgcattgaatggtgagagggcacatcacctgccagcatcgt

SEQ ID NO: 10299 - DNA, 360 bp, Zea mays
  unsure (1)..(360): unsure at all n locations
gaagaagctctgctcttatcacacgcaagcatcgaactaccttcagtggcaccgaccgcagcgacactccaccttgatgagtcgaaagcacgcgctttcctcggagacggctccagcaacgacatgattgaaggatggtggctcgacaccggcgccgctcatgacatgaccgatggaagtgaaatgatgagtcaaaaccccccatgaaaatgataaagggaagaatgaatactgtgaaacctggatatttagagtgatttcatgtgtaactccgcaacaagtggaagtgaaatgaaagaaacgttgacatcttatgtaatttatgggccanactattttaagattatatatggatatata

SEQ ID NO: 10300 - DNA, 423 bp, Zea mays
  unsure (1)..(423): unsure at all n locations
agcttgtaaaaggaaatgtcactatagcagtgactttcattctgaaagggaaatgtgcccttgggccatttctaagtantttggtgattgagtgccaacacaagtgcttaaatgtgaatttatgtccatggatgaacaaagtgcaaatcaagagtaaaggtatgtttctaagccttagtacattgggtntgtgtattaatatacttggctaagtgttagaaacagaaagaagaagaatagaaaagaggtgcaaaaggctggctgtgtacagccaagactcatctcagtctggcacaccggactgtccggtggtgcaccggacagtgtccggtgcgccatgctgactcggcgtgaggtggccgctctcgggaattcgccgacggcgtatggctaanattcaccggactgtncggtgtgcaccgg

SEQ ID NO: 10301 - DNA, 501 bp, Zea mays
  unsure (1)..(501): unsure at all n locations
gcttgatacacatattccaagaaagcctgtgtgcttttgattgcgacgaaagagatacttcaagatcctcgagagggtgttccttaagcaatgcaacaaggacttggctgctgccatcgaaaagtgagagacggaggctnttcaaacagggtgctctgtaataagcaacgctataaattatcagcctatatagtcaacaaaagtattaatagtgctttcagaataagcagctagactatttaggctagaacattatggatattattngtacgagaccataatatcataactcanaactgtaagggggtgtttgggaacacaggttttcaaaaccaaaatattaaaataaatacggtatacaaattatgacataagctcagtttacaataccatggtattatgaaatactgagtattgttccaatactggagaanactgtgttcctaaacacaccatataccactgcacacaagatattatccaatatataatatattctac

SEQ ID NO: 10302 - DNA, 370 bp, Zea mays
  unsure (1)..(370): unsure at all n locations
agcttctgtaaaaatttcagaattttngaacaacctttcgaatagttatgcccggcttaaggaaggtatgttaaaatcacgaagttgtatcctttctccttcgttttcttttttttgtttctgttntttttttgacgtaaccgaaggagaaaaacaaggaagcggcgttgactcggtttgttttttctgtttttttacgtaaccgaaggagaaatatnaaagaagttggcgttgactcnnngttgtggcgtgatcaaacggaatatggtggcggcgcgctatggtttgaatggtggaagaacacaatgcaaccagcaacaaatgacgtgaaagcacacaaattcaacaatgcagattattgaaagaaagt

SEQ ID NO: 10303 - DNA, 321 bp, Zea mays
  unsure (1)..(321): unsure at all n locations
ctggataatttgtgtgtctcattaagataaatgaaggtaaggtatgtaatctattgagataagcagtacttagagaaccataaacctctaggtgtagttggctaccctagaacctagattttcccctcttgcgttttacttttcttttgagcttgtgttcatttgattgtacatgtntggtgtactgtttctctgtcattatccaaatgtgttgaatgcacgatcgctttgcgtaaacaacgagcagcccgtggttgctgagtgttntggcgaagacctttctgagcacaaccctatgaggcaagtgtctttgcccattat

SEQ ID NO: 10304 - DNA, 417 bp, Zea mays
  unsure (1)..(417): unsure at all n locations
gctgtgtaagttcttcatccccacatgtgcttatcggcgatgccacaaccagcccatgctagtgttagcaattaagcatgcatctagaccggcctcctcttttgcaaaatcaactaaataaagtttgccgtctaatacacccttaatagctagtgaaccatcacttcttctaaagacagacacatctatatgtgtaaatagacaattataacccatattacataattgactaacagatagcatattatatccaagacactcaactaaaaacacattagagatagagtgctcatttgaaattgcaatcttgcctaagcctttcaccttgccttggttcccatcaccaaatatgattgagtcttgggaatccttattcttgacgtaggaggtgaacatcttcttctcccncgtcatatg

SEQ ID NO: 10305 - DNA, 279 bp, Zea mays
caccaccattgtctacttctctcacccgacgccagcagccagaatggcaccagcacacccaacagcagcgcgacttccaggaggagtccgaagctcatacagtcaacagcactgtaccagaatcgaagcatatatacttagaaatatcctacttttaatggacctttatcttttataccattttatttttttctatgagaaatgaataacgaaggacttaatttcgatttcttataataattgtgcctgcatcaatgaagtaaacataccttcatcaca

SEQ ID NO: 10306 - DNA, 451 bp, Zea mays
  unsure (1)..(451): unsure at all n locations
ggtgctaacataggcgatttcgatatcccccttgtggtgttgatctcttataaagtgataccggatgtctatgtgctttgtgtggctgtgttcaacaggattaaccgccatgcagattgcactctcattgtcacataggagaggaactttgctcaacttgtagccataatccctaatggtttgcctcatncagagtaattgtgcacaacaatgtcctgcaacaacatactcggctttggcggtatatagagctactggaatttatatctttgaagtccaagacaccaggggatctcccagatactgacaagtccctgatgtactctttctatcaatattacatccgacataatcagcatcagaatactcgattagatcaaaggtagatcccttggggtaccatagcccanacttaggatgtgtaactaaacatctcatcattcttttcaag

SEQ ID NO: 10307 - DNA, 441 bp, Zea mays
  unsure (1)..(441): unsure at all n locations
agcttgtgaagattcttcatcccaacgtgtgctattctgcgatgccagagccaacccatgttagtcttagcaattaagcaagtgtcgagttcagctctaactaaatcaactaagtatagctgaccctctaacactcccttaaattctattgaattatcacttcttgtaaagacagtaacacctatatccgtaaaaagacagttgtaacccattttgcataattgagaaatagaaagcaaattgtaatctaaagaatctacaagaaaaacattggaaatggaatggtcaggagatatagcaatnttaccaagtcctttgaccaaaccttgatttccatccctaaatgtgatagctctttggggatcatggtttttctagtaggaggagaacatccatttctnccctgtcatgtggtttgtgcacccgctatcaattatccaa

SEQ ID NO: 10308 - DNA, 458 bp, Zea mays
atccttagagtgacctgatgcatgcaagtcttgactttgacccgagccataagcctttatggtttgctctgaaggtgtttaccagccgtgattagaagtgttgggggtacccttaattacggtacccgacatatagattctatgatatacacatagcaatagctagtagctataactagggctgaaaaaatagcttcgacttatgaaccagctcgagctcggctcgacaaggctcgtgagctgacaacgagccgaatcgagtcgaatttgtgatctcaaaaatttctcgagccaaggcgagccggtctgcacaagctcgtgagccactcacgagctggcccaaacacctgcgcccctttggcccaaccaagcccattattcccttaaaccctacgccaggagccagcgacagtcgaccctttctgttcaagggagcgacgccgagcaagcacacacag

SEQ ID NO: 10309 - DNA, 493 bp, Zea mays
  unsure (1)..(493): unsure at all n locations
agcttcagcaatttcaacactctttnttggagttgttctcgaagacttaattgnctccaagacatctagtacatttaccattcttttcctttttggggtcaccattggagccttttggattnttgntgcttcaacgtttattgcaggacttaaaatttctgaggttctttccttagtcacattnttcgcttcttccatttcttctgtcgatggtgcttcggccatctctgcaatttctggcaataagagtggccgttcaccttcagcggccgaaggggttcctccagtatactcaggcaccgaagctggttcaatatggcgtggtcggtgtgtgaagatcttcagcctttntccttttggntctggctcactaggagcgagttcagcttcttctttttcagaaggttatgttttccttttttgccttcggatgggataacaataatcagggtagaagaacccgatngcatcaaacactcggttcagtctcttc

SEQ ID NO: 10310 - DNA, 358 bp, Zea mays
  unsure (1)..(358): unsure at all n locations
tttattctaatanagtcttttattttttttttatctaccnaacncccttatggggaggtaccctagagagtgggtgtttacctncatgacacttgctgagtaattccgtactcacggttatattccctgttgtttgtcacgtcctaactttgtgatgctgttgatgatgttaagttctggtgggctcggacttcttattagattaagtactccttctttacttcttattgacgatggtcacttgatctatcatatatttcatacttatacttctgtaatcactccgatatataatgtaaaatctttgtaacttgtaaaatatggtagtaaaaactccgctgcaaatatgttggtgtgt

SEQ ID NO: 10311 - DNA, 398 bp, Zea mays
  unsure (1)..(398): unsure at all n locations
acttcatccgtggattcctgcagcttgcagcgttgggtgtctaactcttccattgtaaagcggtgactcctcttcaagatggtcaacgagttgctagattcacgatacaatctgtcaagactgtcgcgagaggcaccgaggatacttttttctttccttgcgagcaaaaatcaacttcttcaaaaaccaagcaagtaataggaacacagcanggcaaagcacagtnttttgtaaattacccttntcagaatcgagctgagcatgaagagaagaactcagtgcattggcgtcatccaaagcagcagagacttgacccagttcagtttggctctgagagtacttcttcttcgagtcagcacaccgctggaccaattcacctgatctcgggaatgttttcc

SEQ ID NO: 10312 - DNA, 277 bp, Zea mays
tgtgcccacaaagggggcagtttagtttaataaagcatgacatccgaagatatcattagtgacagatcagaaccttatcattgtgctggctgcatttgcaaaaattttgtaaagtgtgctctgttattaaacacttgccattctctgtaaggggttatggatgttgcaaaatgacaccaaatcctgtgatgtacaaaggtctaatctctaccacatgtgttgacctttgaacatacaatgctagtcatgacaaaaaacctatagttgtgtctataaa

SEQ ID NO: 10313 - DNA, 79 bp, Zea mays
cgcttgctatatattgccatgggaaacggggcaaaagtgtcatatggcacttaaataaatgggaactacaggatggtga

SEQ ID NO: 10314 - DNA, 478 bp, Zea mays
ttggcacccatttgaacttcagctcagcttatcacccgttgacagactgtcagactgaaagaactaaccagatcctagaagatatgttgagagcctgtgcgttgcacgacaagtcaggatgggacaaaaggttaccttatgcaaaattctcctacaacaatagttaccaggccagcttgaagatgtcgccgtttcaggcactctatggacggagttgtaggactccgctgcattgtgaccagcctggagagagacaggtgtttggccccgacattttgcttgaagccgaagagaatatcaaaatggttcgggagaacctgaagatagcccagtcaagacagcgaagctatgcggacagaaggagaagagaactgagttttgaagtgggagactacgtctatctgaaggtgtcacctatcaggggagtcagaaggttcggagtcataggcaagctagcaccccggtacgtcggaccata

SEQ ID NO: 10315 - DNA, 238 bp, Zea mays
tgcatgagagcctccgaacgtgatgactctttcgtgtcactgagaccccttacccgagcgcaaggtacttatcgcagaaagggactaatgacgtatctgtcagggaccataattatgggaccctcaagacgcctaattctcagctggtgacccccatcaacataaaactgcaaaggctgatgggcacgattaatcagggattcagccacacgaaggacttgatcacgccttacccgag

SEQ ID NO: 10316 - DNA, 485 bp, Zea mays
  unsure (1)..(485): unsure at all n locations
agcttataatatgtggagtgataaaatgaggcatcatctaacctcactccacactagcatttgggatgttgttgagattggagtacaggtaccatcaccggnggatgaagactatgattcggacgaggtcgcccaaatccgacacttcaactcccaagccaccactatactccttgcctctctaagtcgaaaggagtataacaaggtgcaagggctaaagagcgccaaggagaattgggatgtactcaagaccgcgcacgaaggagacgaggtgaccaagatcaccaagcgggagacgatcgatggggagcttggtcggttctgtctcaaccaaggcgaggaccctcaagccatgtacaaccgctggaagaccttggtgaaccaagtgcgcaacctcgggaacaccaaatgggatgaccatgagatggcaagggtattctaagatccatcgtttttcttaaccctatgcaagttcaatttaattc

SEQ ID NO: 10317 - DNA, 361 bp, Zea mays
  unsure (1)..(361): unsure at all n locations
tgcattgcatatntaaattccttgtattgcatctagggcttgtctaacctagttgagataaccgccaacaaagcgagtgaaaaagcttaactcgggtcaaacctgacaagtcttagttttaagcttttagcacttaaattcttactntctatacaattatngattcttgaaatgtgcatgaggtactgcacttagggggagtattcaaaactcaaatcaactcatgaaaaccccgagtgcaaaccaaaatgcaaatttcaccactttgcctatttctctaaaaattatctagcctatggcgaaatattttgaaaaatatatgagggtgccaatacctgtcccaacaagtgttattttgtgt

SEQ ID NO: 10318 - DNA, 468 bp, Zea mays
  unsure (1)..(468): unsure at all n locations
agctntgtgagcttttgctacatggcgcgtccatgaccccactcaaaacagagcatttcgaaaacgataaaatttccgatgatcgaccaggaacgaatttgcatgcacgattgtcatggaccggcaaggccacctcgtgctctgttcaatttcactagacagggtaggatagaagtagtcattagcacttgcacttagctgctctgctcactgaatctgaattcctgtacacaacaacatgcatcgatcgtgcacctgtttcatgcatgcgtttactaaaacctaaactcctgctcgtaccaaatntcagacagaatgcgactagaggacgtgggcctacgcccggacctagggttcttcagggctcgatacaaaaaagcccgaatttctcggtaggcagaattttgatagtgtactactggagtgctgaanaagctncgtgttttatctacctaacctttccgtacg

SEQ ID NO: 10319 - DNA, 459 bp, Zea mays
  unsure (1)..(459): unsure at all n locations
ggccatacatcttggaaagcattagaatggatggtgcangcatcaccgttcatcactggagcagcaggggcagcagcttctgagacaacaatctcatgctgaacagtctggggacgcattacaccattaacaaccctgtgtgccatggcactacccgaaccaaattccatacctaaaacaatgtgttcattcaaatcaattcaaggattatgataatggttgntgctgaagtaattcaaaaaagaacaagcttagaaaactaccttgagcaatggtggacccaattcctccaagaatggagcaaccaccaccatcacgaccaggagctgcangaggagcctagcgcgctgtcaaaaagaaaagtccgaagacacttacgaacagaaatagaacagattataactcctatataacacaatgagctgtaatactaatactaatatgagctaaacataaacg

SEQ ID NO: 10320 - DNA, 468 bp, Zea mays
  unsure (1)..(468): unsure at all n locations
agcttatgaagattcttcatcccaacatgggcttgtctgcggngccagagccaacccatgttagtcttagcaattaagcaagtgtcgagttcagctctatcaaaatctaccaagtatagctgaccctctaacactcccttaaatgctattgaatcatcacttcttctaaagacagtgacacctaaatcagtgaatagacagttgtagcccatttgacataattgagaaacggaaagcaaattgtaatctaaagaatctacaagaaaaactttggaaatagaatggtcaggagatatagcaattttaccaagtcctttgaccaaaccttgatttccatccccgaatgtgatagctcgttggggatcttggttnttctcatatgaggagaacatccgtttctccccggtcatgtggtttgtgcacccgctgtcgagtatccaacttgagcccncggatgcataaacctac

SEQ ID NO: 10321 - DNA, 457 bp, Zea mays
  unsure (1)..(457): unsure at all n locations
tattacggacctataaaactaagcttctnagggagaacatgtgataggtctaaccaatgttcatatttgaaaagatagaccttgtgcagctggtcaagcatggaaacaggtgggaggctctcatcacaccaaaaatgtgatgacaacatcaagacctctggagctgctgcatatggacctcttcggacccgtcgcctatctgagcataggagggagtaagtacgatctagatattgttgatgacttttaccgcttcacttgggtgttcttttngcacgataagtctgaaacccaaaggaccctcaagcgcttcctcagcagagctcagaatgagcttgagctcaaggtgaagaagataaggagcgacaacgggtccgagttcaagaaccttcagtggaggatgttcttgaggaggaaaggatcaagcacgagttctccgcttcctacacaccacagc

SEQ ID NO: 10322 - DNA, 477 bp, Zea mays
  unsure (1)..(477): unsure at all n locations
agcttanagccatggtaaggagtataggccaatattatgcgaattgactcaagcctagctacgggtgcataggtttcaccaaaatccaaaccttcgacttgagagtatcctttggccacaagtcgagctttgttccttgtcaccacaccatgctcatcttgcttgttgcggaagacccatttggttcctaccaacatttgattaggacgtggaactaaatgccatacctcattcctagtgaagttgttgagctcctcttgcattgccaccacccaatccgaatcttggagtgcttcctctaccctgtgtggctcaatagaggaaacaaaagagtaatgctcacaaaaatgtgcaatacgagatctagtagttacccccttatgaatgtcgccgaggatggtgtcgacggngtgatctcgttggattgcttggtggactctggggtgtggcagcctttgttcctcttcctccttgctt

SEQ ID NO: 10323 - DNA, 377 bp, Zea mays
  unsure (1)..(377): unsure at all n locations
tgccttcgcctcagtatatcatccacaatctaacggcgtcgtgtgagctctccaatgacaagattntcacagccattaagaatatgcttctcgacgacaagaagggtaaatgggccgacctgctacctgaagcagtctgggcgctgaacacgaccgagtgtcgggcgaccagattcactccctttcgcctgctatacggatcggaggccatgaccccgcaggagatcaaacatgggtccccacggacaagcgctttagccgtcccgacgtagacgagctaacctccaaagatctcatcgacggagaccatgtcttctccctgcaagccctcaacanataccaagcccaaacgaaggcctggcgcgaccacacagtcg

SEQ ID NO: 10324 - DNA, 475 bp, Zea mays
  unsure (1)..(475): unsure at all n locations
agctngacaatgaggagatggtgctcgtcattaagagcttccgttaaatcctcaaacaaaggagggggaaagactacaagtcccgctccaagaaggtttgctacaaatgtggtaagcccggtcattntattgctaaatgtcctatatctagtgacagtgatcgaggcgacgacaagaaggggagaagaaaggagaagaaaaagtactacaagaagaagggcggcgatgcccatgtttgtcgggaatgggattccgacgagagctcaagcgactcctccgacgacgaggacgccgccaacatcgccgtcaccaagggacttctcttccncaacgtcggccacaagtgcctcatggcaaaggacggcaaaaagaagaaggttaaatccaactcctccactanatatgaatcgtctagtgatgataatgctagtgatgaggaggatagtttgcgttccctttttgccaaccttaacat

SEQ ID NO: 10325 - DNA, 364 bp, Zea mays
  unsure (1)..(364): unsure at all n locations
tactattcgagtagaacttgtgcttgacgggccttttgccctgttctacattggcgctaggaggctaagggacgaggcaccacatatcgnntgtgataagcacccgatactcatcagtcatagcaacctgccaatgtgggtttgcgagcgtgctgctgtagtttgatggcaccgagagactgaagattntgtagcactaaagttgtagacagatggattgagggagcctgtcatggacctagtgatgcaccacaaagatgccggagacggggcaccctgccgggtgaagtagctcggtgccactgtggtgacagactgacgggtgaagtagctcgatgccgagcaggtaagcggcctttgatgt

SEQ ID NO: 10326 - DNA, 334 bp, Zea mays
  unsure (1)..(334): unsure at all n locations
ggtagttataaaatcttactcatactcatactcatacccgcatgggtaagtttacccgtcggttaccatacatgttagaaatgtttcanattctaaaactccaataactcanaatgtcaaataaacgcacaaatataagttcaacttanaatatagcaaatcatatgcttacataacttaatagttaaacaaataacaactganaaagaattttcttttagctaagatgtgttntattattgataataatgatataatgcgggtatantttacctacgggtacatgggtacgagtagtacctatctgtacttgtctacccaacaagtagaattc

SEQ ID NO: 10327 - DNA, 258 bp, Zea mays
  unsure (1)..(258): unsure at all n locations
gggctaactagtgcgtgcgcgcgtacttgctcagcaattcgggttccgtaatcagtgacgaaacaagttggnggttgttatttatttgtgtttgactactagatatgcagcactgttaagaaatgccaacggagtgcttcgaccaaggagaagcgtgatctgccggaatgtggngggcacagcangccgcgcttgcacgtacgtactagtcgtctagtagtacgagagagtgccagggaagcagaacaaatcaacaaa

SEQ ID NO: 10328 - DNA, 352 bp, Zea mays
  unsure (1)..(352): unsure at all n locations
tgctcttggatattcgcaatctgacttcgtttgtctctgttctcatatttctcttggaaaacgtagtcaaattacgtttntgaggaccttttgaagccgaaggccctccacagtagcccctcgcaatattaatttgctgtaagaatagttatattgcgatatggacgaaggctattggccgaanggttcgaaaaacaccttccttttgctagaatagcaacagtcattgacaagccggaccctccagtttttgacatgctaggtgtataaataagagctcatcccccggtttattggcacgctcttttgccaactggtcttgttaaccatctttagcctggcgtgacacact

SEQ ID NO: 10329 - DNA, 466 bp, Zea mays
  unsure (1)..(466): unsure at all n locations
agcttagctcccatctatgtatgggatggctttgagtcagtctagtttccttcgggccttctggcagctttctgacttccatgaatagcgatgggtccttgatccgaaggtatcttcatgccaagattagcaggatgaaaaattgcttcgaaagcattganggtgccacgaccaataattgcatttgaagggtattccatgtcaacaatgtcaaatataagttgctcagttctagtgtttgtgatgaacccgaggttactgacatggtgatcttgcccagcgctacaatctgtcttcctccgaagccacaaagaggatgtgtagcatcatgaatcttatcttctggctcttgcattngtctgaaggccttagcanatatgatatcagctgcactgcctgtatcaaccaagacgttgtggaccagaaaccctttgataacgcaagaaataaccatagcatcgttatg

SEQ ID NO: 10330 - DNA, 372 bp, Zea mays
tacctgactccttctccaccggcacaatattggagacccactctgcgtatctgcaaggtctgataaaatcagcttctagcagccggtggatttcatccttgatgcatgggagaagatctggacgaaatgtactagctctctgcttgaaaggtctgaaaccagatttaataggcagccgatgctctacgatctctcggcttaatccaggcatctcagtgtaattccaagcaaagcaatttgaatattccttcaatagaccgatcatctcatctctaggatcggtctccagggtcttggttacaaaagtcgaccttggagtttaccatctcctatgtcaatctcctcaaaggatcggcaatgtaacccctatct

SEQ ID NO: 10331 - DNA, 476 bp, Zea mays
  unsure (1)..(476): unsure at all n locations
agcttctacgtatatatttcgtattaattacatgatccaactctaacgatctatggttctagagttatcttggtcttgcagtcgggattgccataagactggtgtccacgctgaggtgagcggtacaggtgctgagtcccaacgggagcggtggaaccaccatccaagtgacgacgttccgcgcgctcagcccgcagcagggcgatctcagcacgagccctactcagctcatctaatgcatggtctagctccgtgtttagcacggcggctaggttgactgtgctgctcaacctangattgccctcaccgacaggtgagacaatcacgcctcctgtgctgccagatggacggcggnggtaatacttcaggtcaagaccgtcagctgccccaccgaanaccgagcagtagtgcgaaagtgcacgccgtgcagcatcttgcatggctgcctcagctgagtcccgttcagagatagaata

SEQ ID NO: 10332 - DNA, 429 bp, Zea mays
  unsure (1)..(429): unsure at all n locations
cactcaagcttattgtgcanggatgaataccacaaggtgagcggcttggattacgccatgcatttctgggacaccctcaaaatctcacatgaggggaacgacgtcaccatgctcaccaaggagttggtggagggcgaacttgggagattcgcaatgatcagaggcgaggaaccaacccaaacgtacaactggctcaagaccctcgtcaacaaaataaggagctatggaagcacgcgatggacggaccacgacgtcgtccgcctaatgctaaggtctttcactgtccttgatccacaccttgtgaacaatattcgtgagaatcctatgtacaccaagatgacgcccgaggagatacttggaaagtttgtaagcgggcggatgatgatcaaggaggctatatacgttgatgatgcgttgaatgggccaatt

SEQ ID NO: 10333 - DNA, 424 bp, Zea mays
  unsure (1)..(424): unsure at all n locations
cttaactggggttaagttttacccctttaaccactatttagggttaagttcctcaaccagggttccatttgcaaaaacattaaaacaatacaacttgtttgaaatttttgcctagtgaatgcactctaggtgtgtcaaacatatgcaatgccaatgcttatgatgtcatgctcaagttntagtaatagtaacaccaggggtgttacatccttccccccataaaagaatctcgtcacgagattaaaaatcctagggtaggtaatggtaaaggaaacacatcacattnttatttccttatttttggtacaagacaggggtgatgtggnggttacttctttatcacacagctatacagactntacaatntacatgaagctagaaagcctgngaaattcttatccaagaagtcttgggtttcccatgt

SEQ ID NO: 10334 - DNA, 400 bp, Zea mays
  unsure (1)..(400): unsure at all n locations
ctaagctaaactcgttttgaggatcactccttcaatggatcaagttgtgtgctcgataatgaatgtataaatcatctttggagatagtagctaggggggtaacaactgaatctcaagtgcatattattttcaaatcttatctttntgtgactcgtgtagccactaaggaaaaagaagcacttgaggatatacatcagttgttgattatgaaataaaggtctaattagaagntgaatgaatattattatatggtcaacaatccaaaattatgtgacgtattttctatctagttaatttggattntattcttccatattagacactcaccataatatggattaagtcatccctttagacttcattgaataaccatgcatattatccatgtcattcaaaatat

SEQ ID NO: 10335 - DNA, 484 bp, Zea mays
  unsure (1)..(484): unsure at all n locations
agctntgtaggatgcgctctatgtagccctcgtgttgcaacttccagatttctctcgctcattcgacatcgaaaccgatgcatgtgctacaggcataggagcaattcttacacaagatgttcatgccattgcattcattagcaaggccttcggtgctaaatcccaaggcttctccacttacgaaaaggagtacataaccatccttatgacaatttcttattggcgttcttatcttcaactcagagaattcctcatctatacagaccaacacagtttggtccagctctctgcacaacgtctccatactcactagcagcaccgtgtgttctctaagctcttaggtatcaaatactgtgtcgtgtacaatcatggtacggataattgagttgctgatgccttgtcctgcaagaccgttcatgatgcctcatgtgctgctgtgtcatctgctactccctaatggctattagaagtggtgtctgttaca

SEQ ID NO: 10336 - DNA, 421 bp, Zea mays
  unsure (1)..(421): unsure at all n locations
tcagcgacaggggctgccactctgcagccgctggaccccaatcatgacgttctttntcttanggaggcccgaaaccagaagaggaaggccaccagtccaacgcctccggaggacgacttggaccaggaaatccaaaacctggagatgctccaacaacaggtgcaacgaaagaaggagaagatggctcgtctagctgaccttcagaggcagatagatgatagcttggaagaggttcgtcatcttgttcaggatgaccagaaccgaaggcctccgcgcagagagctccatcaggagggtttctacaatgaggatgactggtatgaagatatccatcatggaaattttgcttttgatgatgcttctcctctatcaacagaatngcaggctacaccatgtgcccagtcttacaagccacctcagc

SEQ ID NO: 10337 - DNA, 477 bp, Zea mays
agcttgtacaaaaactatatgttattcaatggctggaatcttatattgggttcttattaaatgacaggcccttatttttacagaaacccaagaaccatatgttgagcatccagcagcaccaattccagaagaccttagcacacagcatggacaacaaaggattcaccgtggtatgataagaacatatactgatgcaataaaggttgataggcatacccaatgcagatcaacataaccaggctgatcgacatatagcctcagcatacctgcttcctcctctgtcaatccagcaatacaacacagtagaacatcagtgaaactgtcttatctagcaaaatggctcgatacttctttggttggtattggaatctaggcgacttggtacctgtgagacgtagttcgacaatacgcttccatgcatgggctggctttcttagagtgtccttaaacaagtccttctggagagcatggtcctgt

SEQ ID NO: 10338 - DNA, 366 bp, Zea mays
  unsure (1)..(366): unsure at all n locations
tgcgccgaggggtcttttgtatcttcaatagataatgcagcttcgttttgcgccaaagatatacatgttcgcaccctatcttctncaagatagctgcaactccactcgcgccagagaaggcgcagacgttctcacggccatttaaaattttctcgaaggcatcggcttcgctactgatccattcaattgggccctcaggatcgcctcttacgaagttgccctcgctggagtatgcgccaacgttggcgaagctagtctttatttttcccacacattctatagatgtttcataacatctatcttttgaagaccgaagatctacagctgttttctcccaataatatttccagtaatcactggcgtctc

SEQ ID NO: 10339 - DNA, 480 bp, Zea mays
  unsure (1)..(480): unsure at all n locations
agctngcataacanaaacgtgaatgccataaatctgactcatcagaaaaattaacagaatattcactattttattacacacatcatgcagtgataagcggaacaaacctccgcagtcatatcctttaccaacaaaagtaccatgtttcgacacaacacatttatttgactcaagaacaactttgtacccatctcgacatagcatagaagcactaacgagattcttcttgatagagggaacatgttgcacgctcttcaatggcaccgtctttcctgaagtaaacttcagaatcaccataccaacaccaagaacatgagcacgtgacccatttcccattaacaaggcaccagacctcccgacctggtaggaagataacatagagacatcagcacacacatgaatattngcaccactatccatccaccactcagggtgaatacaaactgaaagaaaaatggtanagaataccatacccaaatg

SEQ ID NO: 10340 - DNA, 375 bp, Zea mays
  unsure (1)..(375): unsure at all n locations
gacctatgaaactaagcttactctccaagcagacgaagctccaattntaaagcctacttcatcagaagaaaaagcttcggaagaaaaagttctttagttcccatgaaattcagaattaaatggccagagtgcgctctaccgctagtgttgagcgtaagggaggcgaagccgaatgagcggagactgttcctatctccgaagcgatgcaacgatccggactggtgacctcggaaggaatccgtactgccgagacagggtagactgctgccgagacagaagaagctgttgccgaagcggaagaaggaaatattgaggaagctgattctgatgatgattatcatattgccgtgccaagcaagcctagccacttggact

SEQ ID NO: 10341 - DNA, 470 bp, Zea mays
  unsure (1)..(470): unsure at all n locations
agcttagagcagtcgattntgattggtcaagtatttattactagtagaaagccaagttntagcaataatcccaagttattactcaaatggcactccctccaagaggaaataccaggaaccataattataaccatcaacattaagcatcatcataaaagtatctagagtaactctaatcaaacgagctcccaaggctgctcataaccacgagcacggctgatataccaatttctaacactctatagaggttgcacactttacccacgagccgtgattccctttctgcccgaggatcactactacccgaggagtcatgattccctttctggcagggtatcactacgtagcctttataggtattcccctagtgtcacctattaggtttcaccattcgtacaaacacagttctcctccctaaggtgggtgactaacanaaccaaatcgaatgaacctcgacacccaccttgagt

SEQ ID NO: 10342 - DNA, 339 bp, Zea mays
  unsure (1)..(339): unsure at all n locations
ttggtcttctaagagcaatgaagcttgtgagcaattgaagacactattgaccactgtttcggnattggctcaaccggacatcactaaaccttttgacgtatattgtgaagcgcctggcagnggactccgctgtgtactgatgcaagagggccgagtaattgcgtatgcttcaaggcagatgcgccgacttgaggagcactatccaactcatgatctggagctagctgctgtggnttatgccctacagaattggcgtcactatctgctgggtaatatctgtcacatatatacagatcataaaaagnttgaagtacatcttcacccatgcagagctaaata

SEQ ID NO: 10343 - DNA, 473 bp, Zea mays
  unsure (1)..(473): unsure at all n locations
agcttgtacaggtccgggccgcgcgagaggcatatcaccctacgtcccgcggggatcttagtattgggatgagattacaacctgtgaactatgagaacggtgggctgaggtgagatgaaaatggtatgggtgtctcttggccttatatatgcgaccaagtgtagctatccctgtacagatgacaaacgtaatccattttcctgtctcctagtttgtagcgaactgtcctcctacatcttgggaaatccctgcgctcatccgcctgagttaccgtcggaggcttagcctgttgggtaggtgcaaccatcatgcccgacataaccgtgctctcgtggcgcctaacttagacgtgggcctttgctggatcagaatgggcttgcttcgcctgggtactctcagtcgacccactataggacgctccaaggggatgcttnctaggtggccggaatgtngttttcatgcacatgtggaca

SEQ ID NO: 10344 - DNA, 464 bp, Zea mays
  unsure (1)..(464): unsure at all n locations
agctngcataggtaccacatcacattcaatataatcatggtatgaaccaattgtaaattccacacggaccatacgtgttaccttaagcttaccactgtcgttgaaccattggatgtagtaggggtgtggatttggaagcgttttcagcccaagcttctctaccatggtggtgcttgctaagttgttgcagcttcctccatcaattataatacgacaagatcgttccaaaactacacatttagtgtggaacaaattgtgtcgctggttttgttcagctntaataatttggccactcaagacacgtcttacaacgaggctctcatagtgttcaacatgttcagccccaatatgctcttcatcatcattntcgttntcaacatcttgggtagcaagcatggcatatgtatcattatctaaatcgctggctgatgagtactcaccattntctcttataattagcacac

SEQ ID NO: 10345 - DNA, 372 bp, Zea mays
  unsure (1)..(372): unsure at all n locations
tcaaacaaaagcattgactacattattcgncatgcttctgattattaactatcccatgaagaaatgctagaagcacgacactacacccaanaattgaaatatcagaagggggcgttagtgttcaatggtagtgatgaaaaagattttctgtattgtctctcggataacaaagaaatattcgtttgccgggagataggtaaaagcatcggatttccgaagctggaagacggcctttcgattttatcgaaggatgaacttgctgacagcctagcatacaatagcatanaggtataaaagttaactttgaatttgaaaatgaggtatttcatntgtcatactcaattctttcctcctcttgcagggcttgattct

SEQ ID NO: 10346 - DNA, 442 bp, Zea mays
  unsure (1)..(442): unsure at all n locations
agcttcgagaaactatcactcttcgatagagtgctgataaccttcgctccagtatgatctctgatgcatcctaagctttcctcgttaattccgtcgaagagcaacgctcctggctggtagccacaggatatagcatactcctgcagctcctctttttcagccttagataattcttgaccgattatattttgaaagttgaagcctttntgctccgaagtatcttcagcgatttccttccatattttaggcactgtggccagggtttctttgacggctgcagcagcttcttctgcggccatatccaagagcattctatcaatatcagataatgtgctcttcagattggtttcttcagcagtcgcagcttcggcagtagcagcttcggtaggagcagcttcgacagaagcaacaatttcggcagctggtggttattttgacgctg

SEQ ID NO: 10347 - DNA, 462 bp, Zea mays
  unsure (1)..(462): unsure at all n locations
cttcatccccacatgtgctaagcggcgatgtcacagccagcccatgctagtcttagcaattaagcatgcatctagaccggccttctcttttgcaaaatcaactaaataaaggttgtcgtctaatacacccttaaaatctagtgaaccatcacttcttctaaagacagacatatctacatttggaaatagagaaatatatcccatatggcataatngactaacagataacaaattatatccaagagactcaactaaaaacacattagagatatagtgctcatttgagattgaattntacctaacccttttaccttgccttgattcccatcaccgaatattattgaatcttgggaatccttggttttgacgtaggaggtgaacattntcttctctcccgtcatatggtttgtgcatccgctgtcgataatccagctggaacccncggatgcataaacctgcaat

SEQ ID NO: 10348 - DNA, 389 bp, Zea mays
  unsure (1)..(389): unsure at all n locations
ctcagctgctgaagattcttatatgaattataaatcatgtttaagcatttttattttgtacgatgagcataacaccatgactggatgtgaacatgcgttaacattaataacaacttgtnaccaggtacatattaaaaaaatgttgttcatttgtcttaaaagaaaatatatatttgtgctgcatgtaaatgttgatgtaattgggttgggctataaaggaagacaacatgagaattcacatgaggttggtgatacaagttctccatgtcacgtagcacatgaacaaatggaacatattgctgcatcctcagaagctaaaaggtgagcattgtaaatgattttactgattggtctaatataattatgtaatatgcgatactaatattact

SEQ ID NO: 10349 - DNA, 482 bp, Zea mays
  unsure (1)..(482): unsure at all n locations
agcttgctgatcagagatctcgcacacatgttatcccacccaggatcttggttccagctagactggatatggttatttatagtggatttggtttgtggagctaccctatatttcatgaggtgatgtattataagttcatcccataaattttggtgaaatcaatccacttcttatgtttatactaattattagtctatgagaaatgtggtggtgatagattaactcattctattcacaaaccaaataaaaaagtgaggagtgaaaataagatagatcacttcattgctcanaccaaacacactcttagtgctgtaaaacatattcatgagagacanaaactgagagcaattctaagaatacatacagggcttctgtgagttgacagtgaccctgtttgtttcagctttttggagcttctgaccaccanaatctgctgcggactaccaaacgcttaactnttcagtcagcttttataaaattcg

SEQ ID NO: 10350 - DNA, 298 bp, Zea mays
  unsure (1)..(298): unsure at all n locations
cccaacttcaccccaacaactagcactaagaatataattactagacatggaacanagcttaagataatacttcaaatacttgctaaacaaatacacaatggaaagtgcttgattaagtgcggaatgtaaagcaaacgttagaagactcctccaattttccgaggtatcgaagagtcggcactctcactagttctcgttggacacccgcgcaagggatcgctccccttggtctcgcagaaccagtgttactagagatgatctttgcaatccgcgcggggatcctcagaccgttacaact

SEQ ID NO: 10351 - DNA, 479 bp, Zea mays
  unsure (1)..(479): unsure at all n locations
gctttcgtgaatattctccgaagctataaaaaagtttttggtgcctctctaatgaagctacacttcttctcaatntatcttgtgccttagcacgattttctcttttttcaaaacattctccgaagatcaatactgtatccccttcttgttcctcgtgcaatatgttgtatgatgcttatgttatgcaaaatgatgtgatgatgttatgttatgcaaaatgatatttgtgcacacaatctttntatatcagcgttgactnttcgctgtaagcctcccttaggagcttcttcgtcttttactttcagcggaatcagcgtttattnttcgctgtaagcctcccttagaagcttcttcgccttttactttcaacggaatcaacgtttatttttcgctgtaagcctcccttaggagcttcttcgccttttactttcggcggaatcagcgctgacttttcgctgtaggctcagaanacttacact

SEQ ID NO: 10352 - DNA, 375 bp, Zea mays
  unsure (1)..(375): unsure at all n locations
ntcanatatcttcgagttcaactcttgtgccttctgcctgtctgtccatgttcatcttcaagatgaggcagcttgcgcacttagttgccttgataaatgcagagatggtggacttgaagagctttttatgaccaaagtcgacttttgtgcaaagtttgacacatgtttgaggtatgctgaattatgatgcatcacattggtacgtgttgtattgtggacttctacactaaccgttatttgagtgaacagtgcagcacgtcctcagtttgagactatctagttctgcatctgccattatgttattgttgtgtacttgtgtatggcggtgttaactatatccatatgtctatataaacaaatgcttagtagtaatct

SEQ ID NO: 10353 - DNA, 407 bp, Zea mays
  unsure (1)..(407): unsure at all n locations
agctntattccagtgtaccttggaccacgaagaatacctccagttcgttgtccgaaggtttctacgtctgagggcacaagcgccaacagtgcccaatgaaattgtcattgaggccatgattaaggggcttcggccgggaccttcagcgcaatactttgccaggaagccaccacaaactttggagaagctgcttcagaagatggacgagtacatccgggccgacaatgacttccgccaaagaagggaggaggcatttaggttcactgaaatgaccaggggcttcggaggaagatttcatacgaggcatgtcaggtcaattcataactccactcanagtgatgatagagggagccaacagcanaggccacaatactcttcgcaagcttcgggacaacagcaaagctctg

SEQ ID NO: 10354 - DNA, 415 bp, Zea mays
  unsure (1)..(415): unsure at all n locations
atcccacatgggctagtcggcggtgcctgagccattttttgttttcttagcaattaagcaagtgtggagtttagcgctatcaaaatctaccaagtatagctgaccctctaacactcccttaaatgctattgaatcatcacttcttctaaagacagtgacacctatatcagtgaaaagacacgtgtagcccatttgacataattgagatacagaaagcaaattgtaatctaatgaatcaacaagaaaaacatttgagatggaatggtcaggtgaaatagcatatttatccaaaccttngaccaaaccttgatttccatccccgaatgtgatcgctctttggggaatctggtntttctcatatgaagagaacatccttttctcccctgcatgtgggttgtgcaccgctgtcgagtat

SEQ ID NO: 10355 - DNA, 454 bp, Zea mays
  unsure (1)..(454): unsure at all n locations
agcttgtggaggacccgatcatcttagcatattagtttctggatgagaagaagtcacccaagttccgttgatgaagcactagaagaccaatcaaggaaggaatccatgtgggagttcacaagagaaaggtttgcgtgttggcatcgatgcttcttcaataagctagctgccaagcgaaacctagaaggctgaagatgatctttgagtagccagaatcagcgtttgcaaccggatgctcctgaaaggccagattttgttgaagctctatctcctcgaagagtctgtaaagtgaagatatgtagctgaagtaaagctatacccataacccttctaagtcgaatctcgaggacgagattccttttaagtggngtagatttgtagcatcccanaaattcaaatcctgaaattntctcanactcgctctaaattcanaatgaatntcaaatttcatttc

SEQ ID NO: 10356 - DNA, 68 bp, Zea mays
ctaggagagagcagagagaggagcggacgacgctaggtaacctaggtttggttttggttagatgggat

SEQ ID NO: 10357 - DNA, 438 bp, Zea mays
  unsure (1)..(438): unsure at all n locations
agcttagaaaaatctagtatgaatctgcgataatatccagctagtccaagaaaactccggacttggtgaacagtggttgggggtttccactctagaatatctttgaccttgctaggatctaccgcaattcctttagccgataacacgtgccccaaaaattgaatttcttccagccagaacgcgcacttgctgaacttggcatatagctgatgttccctcaggcgcgtcaatacaatccgtagatgctgagcatggtcctcttcattnttagaatatatcaagatatcgtcgatgaagaccaccacgaacttgtccaactcgggcatgaacaccgagttcatcaaataagtgaagtgggcaggagcatntgtgagcccgaaggacattaccaggtactcaaacaatccataccgcgtagtaaactcggtcttcggtata

SEQ ID NO: 10358 - DNA, 334 bp, Zea mays
  unsure (1)..(334): unsure at all n locations
tcctccgctgctgcctgcgcgagcacccgctcgggcgcctcattattcggcggggttctcggcgtggcggttgcagctttctcggagaagatgggtgtgcgcgcacagggggaggcggtggcacacgagacggtctacactattgccttaatagttagtagagatatggcaggtataacgggagccctgggcttccaatagttaaaggaagctcangtcgatcattcctgcaacctggttcaacccagcgcactgactggaccaggctgtcgtgtgcaccacccgcgctcacgtctgtgcgcgtaaaanaggaatgcatgcatgagtcanacac

SEQ ID NO: 10359 - DNA, 455 bp, Zea mays
agcttgcctcgccttgaggtttccctccacgcgagcaatatcactggccttgtcggtgagttcctgctgcagcttctgcagcttcgcctcagccgtagcttgcttgtcccgctatttttccagcaccacattataagccttcagcttatcatggagtgctgtgacggcctcctccttttggtctaggtgtttttcttcttgtccaagcttctctccttccgggtcacctcctcctctcggtcagacaccttccgtatgtcctccttgaattcctcacgctcctgctcaagctcagcctgctccgaggcgaattggcaggatgccgccttagtgcgcctctccagttgggagcaccagtcgccaaggtgctgatgctcggtctcgagcgccttccactctcgccggatagccgcctcggtttcctggagggcctggtgagcgcgagtcaacacctg

SEQ ID NO: 10360 - DNA, 459 bp, Zea mays
  unsure (1)..(459): unsure at all n locations
cttctctataggattccttttgccgctcgctcgcctgacgtgtctcttcattcgcctcctccagaaatcaatgagtggcaccagcaggcctacggggtggcctttatgtcagctgacgaagaagaagaagaagaagaagaagcatactttgatgatcgcgagcagtttgccccgcctccctaccagggggatccgggtcaattctcttctcatcctccaccccaggatccttcaggaagtgttcctcccccggatcagtctagggaagaacactntgcctctcacctggcgcatcatttctttgctccgcatcagccttctccgcggtgatctttggcttggtggctctctccttttttggtcttgttgccaaaagggggagaatgattctcatctagcagcttttaattatgtatgaacatctggttgaataatattatcgctgatcggatgattggg

SEQ ID NO: 10361 - DNA, 461 bp, Zea mays
agcttcctgcattattgtatactacacgtatatgcgtatgtacgtaccgtttttttttttgtatgcatggcgcgctggagtgactctatcgagcagttcggaacgcgtacggtattgacctgcggtgctgatctagacagctttttatccggaacagagcaatgatggaggaggtccggcgctgcaagcaacagcgggtaggccaccaacacttccgagacgtgcatgtcgctgatgcgtacgtgtacgtcgatcaatcgaccgcggcccgcattgatgtcaaagcggctcatacggaatagaataggacagcgcgaccgtaacccgggcgcgtacggctcatacgtatgcctatcgtaattgtctgggcgacgctgacacttgcggtcgttcttccttcgatctaatcaacggacacaggtccctcacagctttgccatgcttttaggtcattctcattg

SEQ ID NO: 10362 - DNA, 400 bp, Zea mays
  unsure (1)..(400): unsure at all n locations
atctcaactaggttagacttgtcctggatgcaatacaaggaatttaaatatgcaatgcaagtgacaacaccatttgacattgtacataagatttctgagatcaaaaatatttagatcattcctcaacatgcaaaagcgggtcttatcaagtggcttagtgaaaatatccgctaattgatcttccgacctcactccttctaaaataatatctnctttagcaacatgatctctaaggaagtggtgacggatatcaatgtgcttggtgcgagagtgttgtacaggattattagcaattttaacagcactctcattatcacacaacanaggtaccttttctagaactacgccatagtctagaagagtttggttcatatataaaatctgtgtgcaacaagcacct

SEQ ID NO: 10363 - DNA, 432 bp, Zea mays
  unsure (1)..(432): unsure at all n locations
agctngcagcataataaaagagtatagaattcttccacaatagngaacagacgaacgtcttcactgatctccaacacanaccaacacagcttctcagataaagaggaaagtagaacaaaagggcttaccaactagataactaattttattaacacttaacaggtaaaccaaagtgcaggggatgcctacaccctggagacagtcattacaaggatccaaatccaacatagttcatcatgacaaacataaaggcacatgataagcaaactaccctgtctaactaagactaactaagagtaagactaatgctaatactatagcttctatgtgtatatttttgcattaattacaagatctgacgctgatgatctatggttctaaatctttcttggtcctgcagtcngggttgccataagtatggtgtccacgctg

SEQ ID NO: 10364 - DNA, 373 bp, Zea mays
tctatagggagagacacatttgtgactaacaaatgttcatttttagaaagacagggtttgtagcgcatgtcaggcagggaagcaagttggtgatcatcatccacacaagaacatcatgacgactaacaggccactcaagctcctacacatggatctattcgggccgattgcttacataagcatcgacgggagtaagtactgtctagttattgtggatgattattctcgcttcacttggagtattcttttgcaggaaaaatttcatacccaagagaccttatagggattcttgagacgggctcaaaatgagtttggcttaaggatcaagaaaataagaagcgacaacgggacggagttcaagaactcataaatc

SEQ ID NO: 10365 - DNA, 482 bp, Zea mays
  unsure (1)..(482): unsure at all n locations
gcttctacatggtgccaacagcgttaggcacatgcgcgatgtgcacttgcccacgantaagggtaggtaacatacccccacattaactgtgtgcggtgcgcctagtatgcaacgtatgggatacactattacccgcacgtttccaaggtgtgtgaatagactcaatacactgcttangtgcccttcattatgatatttactgttcctcgtgtgttacttactgangcatgaagagacttgcggaggagacaggacgataccgtccacacaaccttatgcacgacagtgtattagactatgccgcaacctacaccaaggtctgcgcctgtgttttgattagatggagcagtaagatggaggatggagttggtcgtccaacggtgggtctgggatatggcagatgggacccagtcactanggttttagtgtttcatgccatgtcgttcattagtggtcttgcatgtcctatggcatggatgtgg

SEQ ID NO: 10366 - DNA, 325 bp, Zea mays
  unsure (1)..(325): unsure at all n locations
ctgtcctgantatgagagtgacctgtatatgggatctataaggaaaagaagaagcattacaagaaggcaaaaggcgaggcgcatctangcnaggagtgggactcggattgctcctcttccgactccgacaatgaaggactcgccgcaccgcctcacaaatcggccctctttcccaacgagcgtcacacgtgtctcatggctaaggagaagaaagaagtactcgaaactctacttatgcttcttctagtggtgatgattctagtgacaatgatgaaatagactattctcagttatttaaaggtctagatagaattacgaatggcaa

SEQ ID NO: 10367 - DNA, 463 bp, Zea mays
  unsure (1)..(463): unsure at all n locations
acatgtgctaagcggcgatgccacagccagcccatgctagtcttagctattaagcatgcatctagaccggcctcttcttttgcaaaatcaactaaataaaagttgccgtctaatacacccttaaaagctagtgaaccatcacttcttctaaagacagacacatctatatttgtaaatagacagttataccccatgttgcataattgactgacagatagcaaattatatccaagagactctactaaaaacacattagatatggagtgctcattagaaattgcaattttacctaacccttttaccttgccttgattcccatcanccgaatataatgaatcttgggaatctttattcttgacgtaggaggtgaacatcttcttctcccncgtcatatggtttgtgcatccgctatcaataatccagcttgaacccncggatgcataaacctgcaagggcaaattag

SEQ ID NO: 10368 - DNA, 363 bp, Zea mays
  unsure (1)..(363): unsure at all n locations
tccagcagcttacacattctatctgctatgttaaattctactctgctattattaaaaaaaatagcacgatccggttgtaaacgtcttaactatcgagaaaccctaatgaaggattatgtgggccaatacccgatatagcccttgaggctatcgcgtctctatatatagaaccctgtacccctcatatggaatagagaagagaaagaggccagaggccccaccatataccctgngtcttgtgtgttattatgacgggcttctgggaagggagacgagtnctctacaacttctcgcgctaatctgctgacgggaggggaaggtgcggatctantgatctgtggaaccgagttctcacacgttatc

SEQ ID NO: 10369 - DNA, 464 bp, Zea mays
  unsure (1)..(464): unsure at all n locations
acatctagtacactatccatcctttttctcttggnggtcgctgctagacatntttgtgtcttcgacacctccactcctgccgaagggcttagaacttctaatgttntcatcccttcgattctcggntcttcaattttgtcagtcttcggcattgcagccggctcttcaatcccctgcgtaagagcaggtcctttggcttcaatagctgaagaagtctcaccgccaaattcaggcactatggccggttcaatatagcacggtcggtgagtaaggaaccttcaatttttcctcttcggcgcangctcgcttggagcagccgaagcggcaacctttctagaggttgcaccctttcttttctgccctcatggcgggtagcgatagtcanggtacacaaatccaatagcatcaaaaactctatntagccttttctttntcggctcccgaaggacgcagatagtgcatta

SEQ ID NO: 10370 - DNA, 476 bp, Zea mays
tatgaagaatcttcatcccaacatgggctagtcggcggtgcctaagcctacccatgttagtcttagcgattaagcatgtgtcgagttcagctctatcaaaatctactaagtatagctgaccctttaacacacccttaaatgctattgaatcatcacttcttctaaacacagggacacctatatcagtaaaaagacagatgtagcccatttgacataattgggaaacagagagcaagttgtaatctaatgagtcaacaagaaaaacattggaaatggagtggtcaggggatatagcaattttaccaagacctttgaccaaaccttggattccatccccgaatgtgatagctcgttggggatcttggcttttctcatatgaagagaacatcctcttcttcccggtcatgtggtttgtgactcgcttgcgagatccaacttgagccccggatgctaaacctacacaacaaattagttct

SEQ ID NO: 10371 - DNA, 353 bp, Zea mays
  unsure (1)..(353): unsure at all n locations
nggacagatgaagtgtgcaagaactgtgatgacacgcgnattcaccatctgtataatattggntgtcagaatgagatacactacggaaaaattgatctcacctctgccatgtagcttgacctctgcatcgctgagagaagggctccgatgtgacaaaatgactatatttttgagctaaagcgagaaacaacctgccttatgttctacacacaagcagcatgactctgctgtgctagatcagaatggatcacctctgcgccagaatgaatgcgcatcgagagatattttagaggctacggatggtgaatagcagagagctggtcgatgccaacgtatgatgacctcgatagagc

SEQ ID NO: 10372 - DNA, 414 bp, Zea mays
  unsure (1)..(414): unsure at all n locations
agcttatcaatcatatntgtgtatntgtgcatattaatttctttgctgcatggtgcattggatcaaggcataaagttactttgaccctgacaaggacatctcttaattaataatgatgtacatggatagcagtaccaccaaacatttgagatagtttgagaaagcaaaatggcactatcttactttactggcacatggtattctggtgagttgaaatatttattatttagatggttctggttggttagtttgtgaaagcaaaatgacactattttactttattggtatatggtattctgacgagttgaaatatttattatctagctggttctggttggtctcttaacataatgtaatgcatttntacttatgactcgtaagatatctgagcaattggcagatgatntactctat

SEQ ID NO: 10373 - DNA, 439 bp, Zea mays
  unsure (1)..(439): unsure at all n locations
actcagcttgccatacctgtcgaagcaacagcacatgccagcgcagcatttacaaaccataccagtaacttggcctttcgcatgctgnggagtggatatgattggacctttcaagaaagctcaaggaggatacacccatgtattggtggcaattgacaaattcactaaatggatagagttccagcccattgcctctttaacctctgctaaagccgtggaattcatacaaagcataatattcagatttgggataccaaacagtatcatcactgacttgggatccaacttcaccagttcagaattctntgacttctgcgagcaaaaaagcattcagatcaagtatgcatctgtagcccatccgaaagcaacggcaggttgagcgagccaacggatgatattgaggcacttagaaaanggccttgataaaatgaaaattcca

SEQ ID NO: 10374 - DNA, 468 bp, Zea mays
agcttctaaagaggttcgtcattttgttcaagatgatcagagccgaaggcctccacgcagagagctccatcaggaaggtttccacaatgaggacgactggtatgaagatttccatcatggaaactttgcttttgatgatgcttctcctctttcaacagaattacaggctacaccatggccccagtcttacaagccaccccaactccccatgtatgatggtcatacagacccgaagcaattcctgatgagctacgaagcaaccatatcttcgtatggtggcaatactgcagtcatggcaaaatcttttgtcatggccgtcaaaagcgttgctcagacctggtactcttctctttggccagggacaatcacttcttggcaaaagctgaaggatatgttgataaccagcttccaaggatttcagacaaagccagtcaccgcccaggctctattccagtgtactcaggatca

SEQ ID NO: 10375 - DNA, 472 bp, Zea mays
  unsure (1)..(472): unsure at all n locations
agctggtggaggctcttcatcctcgcgtgtgctaatcggcgatgccacaaccagcccatgcaagtcttagccattaagcatgcatctagaccggcctcttcttttgcaaaatcaactaagtaaagcttgccgtctagtacacccttaaaagctagtgaaccatcacatcttctaaagacagacacatctacatttgtaaacaaacagttatatcccatattgcataattgactaacagatagcaaattatatccaagactctccactagaaacacattagagatagaatgctcattggagattgcaattntacctagcccttttaccttgccttgattcccatcaccgaatattattgaatcttgggaatctttggttttgacgtaggaggtgaacatcttctntctccccgtcatatggtttgtgcatccgctgtcgataatccagcttgaactccccgatgcataaacct

SEQ ID NO: 10376 - DNA, 472 bp, Zea mays
  unsure (1)..(472): unsure at all n locations
agcttcgcctccatctatattgtgtattgcctttgnaatctgccgacttccttcagctcttctagcagccttttgacttccgtgaacagcaatgggcccttgttccgaaggtatcttcatgcataagtatgttggataaagtattgcttcgaaggcattgagtgtccctcggccaatgattgcattatacgggtattccatgtcgacaatgtcaaaaacaacttactcagttcttgtgttgtggacatagccgaaggtaactggcattgtgattttgccaagtgctacaatctgccgtcctccgaagccacaaagagggtgtgtagaatcatgaatcttgtcctctggttcttgcatctgcttgaaggcctttgcaaatataatgtccgctgcactgcctttatcaaccagaacattgtggaccagaaatcccttgataacacaggatatgaccatagcatcattgtgagga

SEQ ID NO: 10377 - DNA, 374 bp, Zea mays
  unsure (1)..(374): unsure at all n locations
ntatcacaccctttggcacgtactgcttcatcaggatgccatatggactcanaaacgccgggtcaaccttttctcacctcaccaaaagggtgctcgaaagccaagtaggccacaacattttcacctacgtggacgacatcgtcgtcgcgagcaaaaacaaagaggatcaactggccgacctcgcagagacattcgctaatatgcgggacgcacgacttcggctgaaccccgagaagtgtgtcttcggaattcgtcaggggaagatacttagctacctgttgtcacaccgaggaatcaaggccaacccaacgaagattcaggccatcatctacatgacacccccgtagtcagccagggatgtccagcaactgaca

SEQ ID NO: 10378 - DNA, 477 bp, Zea mays
  unsure (1)..(477): unsure at all n locations
agctntactccagggagaaatgccaaggcttctaaagtgcaaatggaagcanaaacaacaatgagccagactagcgctgaagctgggccttcagagcctaccaaggagaaacccttggaaattgaagaaaaggcagcggaggaagaggctatagagcagaatttgcctganaaagctgtcactcctactcccgaagtacctcccgaagaccttaattatgttattagacatgcttcgggaaaaagattatctgaggaagaagtttttgaagtcaaacactatgcccgagaactgaagtacccganaggggccttagtgtttaatggtacagatgaagatgatttcttgtattgcctcctagacaacaaagaattatccgtctgccgggagatggccagaagtatggcgtttccgaagctcgaagctggcctctgtgccatgacgaaggacgatcttgcggatagcctngcatacaat

SEQ ID NO: 10379 - DNA, 399 bp, Zea mays
  unsure (1)..(399): unsure at all n locations
tcatcttcagcactacgtgtgctagtagctcaagcccctgcttctggttgtgatgaccctgatgggtctgacaatgatggaggtgattaccaggatgaagaggaagataacgaccataatgaagatgccaacaatgaacaggaacaagaagacgactntgttgtaatgtggcctgtcgcggagcattacacctcaatgttcgagatgggacacttcccaaactcgatgtangatgtgcttcatgcgttgggaacctacgttcgacctctctatgacacaaggcaggtatctgagccccctcgggattgttactacatcactctcgtgcatgtcagaagtgtggatgcacgagatagaggtnttatgactctatcatctcacgagtctctgacattgcta

SEQ ID NO: 10380 - DNA, 476 bp, Zea mays
  unsure (1)..(476): unsure at all n locations
agcttcgcctagggtttcaggctttcagcatatttatactgctagcagcatgtgcacccaccgcttccaccagagagaagaccatgtgtctcactgactgtggggttctatgtataacgggcccgcatgtcggtggaacgacttatagtgcagatgttgagcaaatctgagccgtcagttcggtcaggtgatcggaccgtgtacggctgcaggggcagggcatcttctcgcgtttgaatcacgccacggacggctgaaagcatgtttccgcctccttttgctcgcctttnttcccctctttgctttctttccttttcattccctcaagactttccacttccctttcagcgtctcctgatcaacgataagaaaacaatggtgcgggaacgntacaaagctcttatgatccgatcgnggtgagaacttgagaatcgttgtgaaaacgcactgtcgtgggatgttcatccttcatcatg

SEQ ID NO: 10381 - DNA, 400 bp, Zea mays
  unsure (1)..(400): unsure at all n locations
cgcactttcatcagagccnctctcaatggccaaacactggttttatctatccatatgacttctccattgtatattgtccttggtcagatagacttaagagtctaacctctaacttgtaaagtgagggttgtgcagcgtgttggtggatttcacatttcagagaggatagagaaagctctgcttcgcttttttgaatggctttcgggaggataagctggtgtagaaggatgtggtggaggtcctgcctttttggctttcaagcgaagggcgcaataacgagcaaccaagcattttgtagcagccaatccttcccgttgaaggacttgagcacagggaggtgagtgggtctgtgctgcttgaaggctatgctctatgtgtagtccctcttatgtctgaaata

SEQ ID NO: 10382 - DNA, 470 bp, Zea mays
  unsure (1)..(470): unsure at all n locations
agcttgcccgagctgngctntgggtgagtcgatgtatcgcccgntgcttaaggaggccctcgggcgaggcatgaatccgtctaggactactgttcccgcccgaggctgggctcgggcgaggcgagatcgcgtcccttgagtagacaaagccttgacctanattgcgcccatcagcctctgcagtttgcgctgatggtgattaccagccgagtttaagagtgttgggggtacccctaattatggtacccgacaattatggccttaattaaagccaaaaaccagatttgatgggcggtgtgaaactgctcacaccccgttcaggccattcaagaataaaattggttttcttaccaagcctctcacaccgtttcctgatcatgaggaagctcagggacatgattccgatgatcagcctatagagcagcacaagccaccacctccacctccacctccacaacagcaaggtcagt

SEQ ID NO: 10383 - DNA, 249 bp, Zea mays
ggaaagactacaagccccgctccaagaacgtttgctacatatgtggtaagcccgggcattttattgctaaatgtcctatatcaagtgacagtgaccgaggcgacgacaagaaggtgagaagacaggagaagaagaggtactacaagaagaaaggcggcgatgcccatgtttgtcgggaatgggattccgacgaaagctcaagcgactcctccgacgacgaggacgccgtcaacatcgccgtcaccaagg

SEQ ID NO: 10384 - DNA, 465 bp, Zea mays
  unsure (1)..(465): unsure at all n locations
agctngagtcagacgaaagatgattatgacgaatgacaaggtgatcacgaagctgtacgcaggaaagcttcggcatgacagcagaaaaggggaaccgacttaaagataaaaaagcaaactagaccttgaaggattactatagagttattagcaaatgtaaagggcatgaatgtaattttacatgggctgcgtcccttgcctataaatagatgaacagtacccccgtactgttcacgctgacttggtattcgctctcgcgtcacgcttgtacccttgtttcccttcaagccgaaggtacatttgtaatttgttattgcttatacaagtaacgtaaataaaaataaattgataataatgtttaaagtgattatgctattntccatatnttgtatataaatctttcttcatcatttattgtgcttatgaaggtatgtccttcataaccttcatccgaaattcattaca

SEQ ID NO: 10385 - DNA, 371 bp, Zea mays
  unsure (1)..(371): unsure at all n locations
tctccccacaatgcttctcctcatgcttcanatccttgactttatcatacaatntaataagcaaaaataacaattagataatgcaggatgtattaaagaaactactgatttagtagttgaccattacttgtctaacacaatccagcttgcatgtgatttcttgcactcaacagctataacatcaggagagccgaaaacaagattatacctcacattaatctatagaaacaacaaattaagcacacaagcatacaacaacaataataagatgtaaacgagcattagccccagctcanatgtctatatcatacacatcaattntcttaactctaataaatcacattatctaatagagaagngttcatatactt

SEQ ID NO: 10386 - DNA, 464 bp, Zea mays
  unsure (1)..(464): unsure at all n locations
taaaacaacctagaaacacggatcagcccatccncagatagctntagaaacacgttgaagaaatatccttgaaaaggccttagtgattcccctatttgttttctttcagaacaaaaaaccaagagtcatgtttagttggatatttcaactatttctagccattaaacaatttagtctcgctattttccatgtagtattcttcatcgtaaatggcatgggttatacgtgcgagctcatcagtacaatcagatctgagcaaagaatacaacaatataacaattggcctaactggtcctatctatttgacacttaccaaagaaggagaacatttaaatatcaagtgattacaaaaaanaagatgcatttaatgaggataccaaacatgttgtgaattctatgaaacacagaggttctaaaataaataacagatattgtggtaggcatatttattactccctccgttc

SEQ ID NO: 10387 - DNA, 237 bp, Zea mays
  unsure (1)..(237): unsure at all n locations
cactcttcgacagagagctgagaaggnttgctccagtactatctcgaatgcatcctacgctctcttcgttaatttcaccgaagagcatcgctcctagctggtagccacaggatatagcatagtcctacagcctcctctttctcagccttggacaattcctgaccaattatattttgaaaattgaagcctttatccttcgaaatatcttcagcgatatccttccctttttcaggcact

SEQ ID NO: 10388 - DNA, 514 bp, Zea mays
  unsure (1)..(514): unsure at all n locations
atcctctcagtcacctgcggcatgcaagcttgacaacaccatntgagatcttaaataatatttttgagatcaagtatatttaattcattactcaacatgcaaaagcgggttttatcaagaggtttagtgaaaatatccgctaattgatcttccgtcctcactccttctaaaatgatgtctcctttagcaacatgatctctaaggaagtgatgacggatatcaatgtgcttagtgcgagagtgttgtataggattattagcaattttaacagcactctcattgtcacacaacaaaggtaccttttctagaattacgccatagtctagaagagtttgttttatgtataaaatttgtgtgcaacaagcacccgcggcaatgtattccgcttcggcggttaacaaggcaacactantttgctttntggatgtccatgatactagtgatctcccaagcaaatggcatccnccanaagtacattntctattcaatttgcaaccggcataatccgaattgg

SEQ ID NO: 10389 - DNA, 375 bp, Zea mays
  unsure (1)..(375): unsure at all n locations
nggatgaggggtcatcatcatcatctgagctagcatccgaatcccattcaactatttaggctttgccatccttcttcttgttgtagaatttcttcttcttcttatcatctccatctttccccttcttcttattagggcaattcatggcgatgtgaccgggttccccacactcaaaacactttctatcattgaaagcatttcttcttgatgtttggcctcttctaggttgacccctcttcttcttcaagaatttattgaatgtctttacaaatagagccatatcttcatcgctctcactttncatttcttcatcatcactatcttctttttcaattgccttagaagctntagctttgagagcgagtgattcattct

SEQ ID NO: 10390 - DNA, 489 bp, Zea mays
agcttattcatcgcactcaaccgaagcaccgctgttgtatttgcttcggaaaaatttaaaaaagtcaacaacttcatcgccaaatggcaagagtacgttccatcgctagggttacacatgacggagaagaagctgaaactgctgagaccgctccgatttccgaagtgatgaaacagtcggggctagtagtgtcggaagatgtttctgacgaaggtgcacctgccgctgaggctgagcaggttggtgctgaggaagatgaatctgaagatgattatagtcccgtgccatctaaacccagccacctggagtttgggaggtccaccattatcgaagatgatatgcctaagctgatgaagttaggctatttcagtgaggccaaaaaggagctaattcgctttggcggagaggaaattactccaaagccagaaaaggatgaggtggtagtctttaaaagcttcttcaaagcaggattaagatttcctttgaatg

SEQ ID NO: 10391 - DNA, 306 bp, Zea mays
  unsure (1)..(306): unsure at all n locations
tcgganaccccatgcttctagccatctcccggcagacggataattctttattgtctgggaggcagtataggaagtcatcttcgtctgtcccattgaacactagtgcccccttcagatatttcaaatctctggcatagtgattagcttcaaaaatctcttcttcggataatttcttccccgaagcgtgtcgcacaatataatcgtatattttggaaggtgcttcnngggcagcagtgtcaatttcttcaaccaaaattggctctgacatttttattttttcggctgcctttgcaattttcgtttctt

SEQ ID NO: 10392 - DNA, 436 bp, Zea mays
  unsure (1)..(436): unsure at all n locations
catgcaagcttgttagctgaacaagattatttctagtgcttggaagtggtccttggaatgaattgccttgaaaccgcctgccatattagcgttgttgttacgtgtaaagaaagaaagaacagacccacaagagaaattctttggtaaaaataaactaaataaatctatatggctacaaatatgaagtatttcatagaggaaaaagatattttgttatctagaaatatcacgagaacatcaaaaatactgaaaaaatacattatttcataaaacacctggccttaaataactaatttaagaggacattaaaaaggtagatcttgcaatcgtagaaaaacaaatcatgccgtgtcttttacagaccacactgagccatggnggttcaaaatgaagtccatactctagccacaccaaattctactacatggaagaatga

SEQ ID NO: 10393 - DNA, 275 bp, Zea mays
cacgacagaacaatcaatatcaataccccaagtcgcttgttatctgctcaactcaaatctaaatccaataagtcacaaaatgactataatttgaacctaaagtaagtcaagtacctgataaatgtaatagacacgatcagatgcaatctcaagtgctcgatcagaatggttcacatctgatctataatgagtgcgcatcaagaaaaatcttaaagccaatggatggtaagagcagtgatctggacacaaacaactattatgacctcaagagaaac

SEQ ID NO: 10394 - DNA, 432 bp, Zea mays
  unsure (1)..(432): unsure at all n locations
gccatggtaagtagcatatgcaagtaatatgcgaattgattcaagcctagctacgggtgcataggtttcaccaaaatccaaaccttcgacttgtgaatagcccttggccacaagttgggctttgttccttgtaccacaccatgctcatcttgcttgttgtggaatacccatttggtacctacaacattttggttaggacgtggaactaaatgtcatacctcattcctcatgaagttgttgagctcctcttgcataaccaacacccaatctgaatctcttagtgcatcctctaccctgtatggctcaatagaggagacaaaagagtaatgttcacaaaaatgagcaactcgagatcgagtggctacccccttatgaatatcgtcgaggatggagttcatggngtgatctctntgaatcgcttggtggactctt

SEQ ID NO: 10395 - DNA, 340 bp, Zea mays
tgacaacaccatgtgacatcttacataagatttctgagaactataatatttagttcattcctcaacatgcagaaccgggtcttatcaagtggcttagtgaaaatatccgctaattgatcttacgatctcactccttctaaaatgatatctcctttagcaacatgatctctaaggaaatgatgacggatatcaatgtgcttggagcgagagtgttgtacatgattattggcaagtttaacagcactctcattatcacacaacaaaggtaccttttctagaactacaccatagtctagaagagtttggttcatatacacaatttgtgtgcaacaagcacctg

SEQ ID NO: 10396 - DNA, 455 bp, Zea mays
  unsure (1)..(455): unsure at all n locations
agctttcttggcatgaaagctctatttccgggatgtcgggctcctgcccttcttccggagctacgttttccggagggttggacccctcttcgccttgcaaaaacaggcaataaacaatacatcaaacaatgtttgctaataaagtgtgtcaagtttctaagcatcattattttgtgacttacagagtgtttggactatttttggtgcataaaatatcaacatgtatatatatatatataaatgggaaaaggaaaaagagaaaaggaaaaagagaagagatcttcggttaattgggcctgngggagaaattggcccagccgagcgcggacgcgcgggcagccggcccggcttggaccaccaacggtgcacggcgcggagacggcgctgtgggcgcgggcccacgtgccagtgagggaggtggaaacgacatcaaggnggaacgacggtccgcccac

SEQ ID NO: 10397 - DNA, 306 bp, Zea mays
  unsure (1)..(306): unsure at all n locations
tctgctnnttgngtcgcaccgaaaggtcaatccccaagctgttctcaattatggctcggctgactccgaccagatcgagggcagaccangcgaagacatctttattcttggccaggcagcagagaagtttctcttcttcaagtgaggtgaggtcttcgctgatagttactgtctgcttgggcgtggcctgatcgagggggacagtcttggtcccgtcttggcactgcaactgtgccttgtcgagctgctagtcggttgggctggccggcgtatggacttcgcgctgggtcgcgagacagtgtacat

SEQ ID NO: 10398 - DNA, 457 bp, Zea mays
  unsure (1)..(457): unsure at all n locations
agctntgcgatggtacagtatactgatcagattgccagctaagagacctcaccgccggcgaccacgcgcgtagattcgtgctatcgtcgtgattcacaccgaattaaacgcggataatgatcacggtgtgaaagatcttgccgcaggtgagctgggatgtgctgtgtgcttgatggttcatcagtgcacaccggcgacgtggccgagtggctatcaccgacgtgttcgccattcaccgtgagggcgccacgccttaggaagtttatcgcatcggtatgagccgtagtgaccatccagtgaccgccgtagttcagtcgctctgcggttgccacagtagatcgccgccgtgactcattcccctctcggcggctagcgcaattcatccaaatgaacaccaccactcaagcacactatanatngagcacaccgacnggtcagtagggtaatcaagcactga

SEQ ID NO: 10399 - DNA, 340 bp, Zea mays
tacggacatgaaactcagctttggcccacctgcagactccattctccctgagcgggtttggtttcctgtccgcaccctaaaactagggtaccccttactactggaagaagacgcagtacccacacggctatctttagtcgcgtggtaaaggagatgtacgtgggactaggccatgactcgccccagcctcgggcggctactctaggctagcaatagcacctgaccccaccaggtgggtggctccggggcttgcacgtgtccagagaaagtgatatactccaaggcctcaagagtgagtccggacccccatggaaaagtgcccgacccctggatatacagt

SEQ ID NO: 10400 - DNA, 476 bp, Zea mays
  unsure (1)..(476): unsure at all n locations
agcttctaaagggagaacacattttatgactaacaaatgttcattntgagaaagacaagaattgtagcgcatgccaagcaggaaagcaagttggtgccaatcatccacacaagaacatcatgacgaccgacaggccgcttgagctactccacatggatctattcggcccgattgcttacataagcatcggcgggagtaagtattgtcttgtaatagtggatgattattctcgcttcacttgggtgttctttttgcaggaaaaatctcaaacccaagaaaccttanagggattcttgagacgggctcaaaatgagttcggcttaaggatcaagaaaatcagaagcgacaacgggacggagttcaagaactctcanatcgaaggcttccttgaggaagagggcatcaagcatgagttctcttctccctacatgccacaacanaatggtgtagtggagaggaagaatcgaactctattg

SEQ ID NO: 10401 - DNA, 400 bp, Zea mays
  unsure (1)..(400): unsure at all n locations
tgtaagagtggggtaagaagcttcataactagnattccacctttatctattgctnntcgttggtactctagtatttacctcaatccacatgaattgaggtggattgaggtataacttatactaatttacacttcaatccacctcaacacatgtggattggagtcagtactatagtacccaaactacgtctaaagagagtagtctagggttcatatccttgattctgctgggattaacaatgataggaacaaagaacaatgataaggactctaagcctaatggtgagtgtgtatcccaactggaattgaaggacatgttacacacgatgattgaaaccttttgcaagaaccaagacactgaacaccatcctttgagtggcttgatctgcgcggttctaatc

SEQ ID NO: 10402 - DNA, 377 bp, Zea mays
  unsure (1)..(377): unsure at all n locations
agcttctaaagggagaacacattntaggactaacaaatgttcattgtgagaaagacaggacttgtagtgcatgtcaggcagggaagcaagctggtgttcatcatccacacaagaacattatgatgactgacaggccactcgagctcctacacatggacctattcggcccgattgcttacataagcatcggcgggagtaagtactgtctagttattgtggatgacgattctcgcttcacttgngtgttctttntgcaggaaaaatctcatacccaagagaccttaaagggattcttgagactggctcanaacgagttcggcttaaggatcaagaaaataagaagcgataatgggaccaagttcaagaactctcaaatc

SEQ ID NO: 10403 - DNA, 449 bp, Zea mays
  unsure (1)..(449): unsure at all n locations
agcttctgctttctcgggttgatgggtgggtctacattaagggagtgctcgatgacatctctgttgacaccacanagatcattggctgaccaagcaaagacatccttgttgttgaataagaactttaacaaagccttttcttgttcctccaatagctaggatccaaacaacactttctgttcagctatgtcttcacacaaaagcatagactttggttgatccaccgaagcagctttatctattatgtatttatgctaccgatgaagcttggcttcgtatatattgtgaatggccctagaatccatccaattcccttcggcccttctagcagcctcttggcttctatgcacattagtagggccctggtctgatggtatcttcatacacaaatatgatggatgaagtattgctttgaaggaattcaatgtcccttgtcaaatgaatacatt

SEQ ID NO: 10404 - DNA, 342 bp, Zea mays
ttgacatccatattcatattggttatcggagtagaaccactttctttttccatgatcaaacttattccattctcctttccagaaatagcacttcgtccagcagaatcttcaatgagataaaaaaagtaatgcattggttttgtgtaaccatttaagagggttaaagtgtgtatcgagtttactttatgttaaaaattaacatgaatggtcaggtaataaaaactttctaaagcttgttttctcaagaagtatgtgccaagaccagctctaacttgtgatcagaattttcaacatcaaaatatgtacgcatggccacttaatgataatcttcatagtgtaaca

SEQ ID NO: 10405 - DNA, 436 bp, Zea mays
agcttagatcaatggtgggcaataaggcaagagttgaaggatgtattgtggaacaatttaaactgaaggaggtagcacacttcacaagttgttactttgcataagaacataatgtatttgctcgaaagaaaaggtaccatgatgatgaacgagagatgcctccgtgtagtgatctttcgatttttcagacaaacggcaaagccgttggtccacccaaggcatatcacctcactatggaagaatggaagtctgctttactgtacatgttcacgaatatgcctgaggtggagaaatactttgtgtaagacttatttcattaaattgttcatatgtgaattagtttatgttatcaaatatctcatgtcatacaataatatttgacagcgagtttgatgaacaaaacatgaggtgtctcggtagacaaacagcgagagac

SEQ ID NO: 10406 - DNA, 398 bp, Zea mays
  unsure (1)..(398): unsure at all n locations
gctgcccgagcttggcttcgggcgagccgagggtgcgcccactgtctgatgatgctttctggcggngcgtaaacccgtccgggactactgttcccttccgaggccgggctcggacgaggcgagatcgcgttccttggtagacgaggccttgacttgaaccgtgcttatcagtctttacggtttgttctgaggatgttttccagccatgttaaggagtatcgggggtacccctaattacggtacccgacactagtcaatattaatacaaaattattgcaactagaatgaatcaatttggagctaatatgaattaaatatgatttatgcaaagttctagaatattnttgtattaaaaatcaattttcataattatttctcttatttcactgctctctgga

SEQ ID NO: 10407 - DNA, 482 bp, Zea mays
  unsure (1)..(482): unsure at all n locations
agcttctanagggagaacacattntaggattaacaaatggtcatttttgagaaagacagggattgtagcgtgtgccaagccgggaagcaaggtggaacccaacatccacacaagaacatcatgacgaccgacaggccgcttgagctactccacatggatctatcggcccgattgcttacataagcatcggcgggagtaagtattggcttggaatagtggatgattattctcgcttcacttgggtattctttntacaggaaaaatctcanacccaagagaccttanagggattcttgagacgggctcaaaatgagttcggcttaaggatcaagaaaattagaagcgacaatgggacggagttcaagaactctcannatgaaggcttccttgaggaggagggcatcaagcatgagttctcttctccctacactccacaacanaatggtgtagtggagaggaagaatcgaactctattggacatg

SEQ ID NO: 10408 - DNA, 445 bp, Zea mays
attatcacatggacgtgaagagtgccttccttaatggaccaatctaggattcggtctatgccgagcaacctgccggctgtgaagatagtgagaaccctaaccatgcgtataaactctctaaggcgctttatgggctcaatcaagcctcaagagcatggtatgaatgccttagagaattccttattactaatggatacaaagtcggaaaagccgatcctacactcttcactacaactcttgacaatgacttgcttgtatgccaaatttatgtggatgatattgtatatgggtctactaacgaggttacatgtgaagagataattcgatcatgacacagagactcaagatgtctatgatgcgggagatgaagacctcctatgattcagtgaagaactcaagaaggaccttctaagcaaccaagttctccgatatctatcaagttgga

SEQ ID NO: 10409 - DNA, 473 bp, Zea mays
  unsure (1)..(473): unsure at all n locations
agctntangcaaattctcaagcaacggaaggtgaatgactacaaaccccgttccaagaaggtttgctacaagtgtggtaagcccggtcacttcattgcaaaatgtcctatgtctagtgacagtgacaggggcgacgacnagaagggaagaagaaaggagaagaagaaatactacaagaagaagggcggcgatgcccatgtntgtcgggagtgggactccgacgaaagctcaagcgactcctccgacgacgaggacgccgccaacatcgccgtcaccaaaggccttctcttccccaacgtcggccacaagtgtctcatggccaaggacggcaaanagaaggtaaaatcaagatcctccaccaaatatgaaacatctagtgatgaggatgatgataaaaatgaggaggataacttgcgcattctttttgctaaccttaacatggaacanaaggaaaaattaaatgaactaattag

SEQ ID NO: 10410 - DNA, 441 bp, Zea mays
  unsure (1)..(441): unsure at all n locations
ctacaattctctttagattgttgagagaggacttgagctcctcatttgacattcttaggctnacatacaactccttcatggacttaaacttatcttttctttgtgcatgaagacatcggtctcacctaacattctaacaagatcatcatatgaatagccaatatgatcaacatcatctacatcattaacatcatcatcatcatctacatcatttaaatcagttatgaattttaccttagcatctcccttcgcatgagacaatgaggggatgagaaaagagaatgggctttcttgatgtgaattcccgcattaagcttggatgaggagacatcatcatcatcatcatccgagctagcatccgaatcctattcaactaggtagcctttgccatctttcttttgttgagaaatactttttttttatgatctcaatttgccttct

SEQ ID NO: 10411 - DNA, 505 bp, Zea mays
  unsure (1)..(505): unsure at all n locations
cgtgatcctctcagtcacctgcggcatgcaagcttgccatatatattattntcctttgaccgtcgtggaattattgtttgcatactgcataagatatcacaacgaatcgcacatatacagttggtagggatgttcctaaaacatccgaattgtatcacaaatctaatattttagcatagatacacatagaatttgaagctaatttttggcaatgttattaagaatattacgaagtatttaaataaatttttatataattntttatgtatattattttctccctacaataaaaaaggtgaaaaaacatccgaatccgtattcgaatagacatccgaagtttatatcaattatttaaaaatatatagaatgaatntaatgtttattttttgtgaagattaatagtctcaacgctaaaaacaagaaatataaattacatagcanattctatatgttatntgttcataatcgaagaaagaagatcaaaanattgacatccgaataaata

SEQ ID NO: 10412 - DNA, 386 bp, Zea mays
  unsure (1)..(386): unsure at all n locations
ccttaaaactaagcttctnagggagaacacgtgatagggttgactaacgtacaattcgaaaatgatagaccttgtgcagcttgtcaagcaggtaaacaggtgggaggagcgcatcacagcaagaatgtgatgaccacttcaagacctctggagctgttgcatatggatctcttcggacccgtcgcctatctgagcataggaggaagtaagtatggtctgggtattgttgatgacttttcccgcttcacttgggtgttctttttgcaggataagtctgaaacccaagggaccctcaagcgcttcctcaggagagctcaaaatgagtttgagctcaaagtgaagaagataaggagcgacaacgggtccgagttcaagaatcttcaagt

SEQ ID NO: 10413 - DNA, 473 bp, Zea mays
agcttgcgaggcggttagaagtaccgcgtataatagcttctgaacttgagggtaccttatctttgagggtccgaggacttcgctgatgaagtaaaccggatgttgcactgggtatgcgtgcccttcttccgcccgctcgactactaacgcgatgcttaccacgtgagtcgtgcaggagatatatagcagcaaatcttctgtcggctgaccgagcgaagctcgccttggtggcttgagtactggaggtgtggtcaagaacttcttcagtgcatccagagcctcatgtgcttctgtggtccactgaaatttgtccaccttcttgagcagtttatagaatggcattcctttctcgcctagccttgatatgaatctgcttagcgctgccatggcatcaagtgagcctttgtgccttttttgtgatcgtggcagttccatcctcataatgccctcaatcttctctggattggttctat

SEQ ID NO: 10414 - DNA, 348 bp, Zea mays
  unsure (1)..(348): unsure at all n locations
tcatgttcttctcagcctcaaccttaagtgtcattttcagagtttcggattcacgggtgaattggctggagttgtctatcaagagtgtctgagcatctgccagctctttgctcaatttcttattctgagcttgtgtttccgcaagcgatccttcgactgagcacaacaactcatctttttcttttaaagaatcctcacagttttttaatttatcttccaaacccttgacaataactttgattttcctgtcctcatcatcttattgcattattaaagcttngcctagcaacaaactctataaaaacaaactcaaagttagaatacttaagttagaacagagatatcaat

SEQ ID NO: 10415 - DNA, 474 bp, Zea mays
  unsure (1)..(474): unsure at all n locations
gcagcttctaaaggagaactcattntgggactaacaaatgttcattttgagaaagacagggtttgtagcgcatgtcaggcagggaagcaagttggtgttcatcatccacacaagaacatcatgacgactgacaggccactcgagctcctacacatggacctattcggcccgatagcttacataagcatcggcgggagtaagtactggctaattattgtggatgattattctcgcttcacttggttgttctttntacagganaaatctcatacccaagaaaccttanagggattcttgagacaggctcaaaatgagttcgacttaaggatcaagaaaataagaagcgacaacgggacggagttcaagaactcacaaatcgaaggcttccttgaggaggagggcatcaagcatgagttctcttctccctacacaccacaataaaatggtgtagtggagaggaagaatcaaactcta

SEQ ID NO: 10416 - DNA, 414 bp, Zea mays
  unsure (1)..(414): unsure at all n locations
tgacacacgtatccgcacgttaatccttattccaatttcgtcttgtagacaacgcatccncatggatctgtgtccacaaactatcatgattctgctatcaaaatggatacaactaattcctgacctcgcgcgagtgctagaaaaatcactcgacttctaccgagaaccctaactaacaaagccgctactcgacctagcatactagtatccatctcaaaaggaattctgagttcatgcaactagggtttcaggccactcctacacttaagtgcacggtacaagcctacaaacattaagtgtagtaaaatagcatatataaatggttatgcataaaaccggngcttgcctggaattcaacactggtagtgtttgctagatgacactcgctttgcgagcatacattggtcatgtaca

SEQ ID NO: 10417 - DNA, 442 bp, Zea mays
  unsure (1)..(442): unsure at all n locations
agcttcatcatgaccgnactcttgtatactcataacccgattntgaagatacctgttcacatatttcacttggaaaacattgtcaaatcatgtttttgaggaccttcggaagccgaaggcccccaacagcaaggaaatttgagatatgttgtggtggctgtggaatatttttctaagtggattgaagcaaagcctttggctacaataacttcggttacaatccagaaattcttctggtaaaatattgtttgccgcttcggcgtgccgaaggctataactgtggataatggaacatagtttgatgccgaaactttcaaggatttctgtgatcagattggcacgaagattcattntgcatcagttaagcatccagagtcaaacgggctggtcgaaagagcaaatggcattataatgacaggaataatgaagctaatcttcaatc

SEQ ID NO: 10418 - DNA, 415 bp, Zea mays
  unsure (1)..(415): unsure at all n locations
ntagagagtgagctngcaagatatgattggacaaatggtgagtcacttcaatcactctntgaccgggtgatggtgttagtaaacaaaataagagtgcttgggagtgaagattggagtgactccaaggtcacaagattattcatgagagcatataaagaaaaggataaaagtcttgcaaggatgattanggatcgtgatgactatgaggatatgacgcctcatcaattatttgcaaaaaatcaacaacacgagtccgaagaagcccctatcaagacaagagactctcatgccttgatcactaatgaacaagacaaccccaagaagaacaaagaccacacagcanagaaagtggtcgagacctcaagtggtgaagatagctcatgtgatgaagacacaactatcgtcattcaaacat

SEQ ID NO: 10419 - DNA, 468 bp, Zea mays
  unsure (1)..(468): unsure at all n locations
agcttatgaagattcttcatcccaacatgggctagtcggcggtgccagagccaacccatgttagtctttgcaattaagcaagtgtcgagttcagctctatcaaaatctaccaagtatagctgaccctctaacactcccttaaatgctattgaatcatcacttcttctaaagacagtgacacctacatcagtaaagagacagttgtagcccatttgacataattgagatacgaaaagcaanatgtaatctaatgagtctacaagaaaaacattggaaatagaatggtcaggagatatagcaattttacccaatcctttgaccaaaccttggtttccatccccgaatgtgatcgctcgttggggatcttggtttttctcgtaggaggagaacatcttcttctcccatgtcatgtggttggtgcacccgctgtcgagtatccaacttgagcccncggatgcataaacctac

SEQ ID NO: 10420 - DNA, 388 bp, Zea mays
  unsure (1)..(388): unsure at all n locations
gctaacaagtactttcaaaatatatacttgtcaacttggcagcacggaaacaggtggaagctctcatcatgccaaaaatgtgatgacaacatcaagacccctggagctacttcgtatggaccttttcggacgccgtgcctatctgagcatangaggaagtaagtatggtcttgttatagttgaagatttttcccgcttcacttgggtattctctttgcaggataaatctgaaacccaagggaccctcaagcgcttcctaaggagagctcaaaacgagtttgagctcaatgtgaagaagataagaagcgacaatgggtctgagttcaagaaccttcaagtggaggagcatcttgatgaggaggaatcatcacgaattttcgctcctaca

SEQ ID NO: 10421 - DNA, 386 bp, Zea mays
  unsure (1)..(386): unsure at all n locations
agcttggtcatgacgtcaggtcctgtgtggccgtgactactatgccaggtggtggaggtggtggtggagaccangacgggcggtggagacgtgccgacgaaagagggctggagcgtgtataggggcccgacgctgtcacatcgggcgagtggggtcctggtggccagatccttcacaaaaaaaccagaagggtcaaactcaatggagcaagaattgtcggtggtgaaccgatagacagaaaggagattgtgagtaatgtgaggggctacgagaacgttgttgagatagaacggtccaaggagtaccgaggcacctaccgaggtgactggaagagtggaaccgtttccaacgactatcgatgtatggtgtgtggagaggatgggtgt

SEQ ID NO: 10422 - DNA, 375 bp, Zea mays
ggtacacatttaaacttcagttcagcttatcattcgttgtattttcttcaaaccgaaagaactaattaagtcctcgtagatatgttgagagcctgtgcgctgcaagatcagtccggatgggacaagagggtaccttatgcaaaattcttctattacaacagttaccaggctagcttgaagatgtcaccatttcaagcgctctattggaggagctgtagaactccattgcaatgggatcagcctggagaaaggcaagtgttctgtgcacacattttgtttcgagctgaagagaacatcaagatggttagggagaatctaaggatagtgcaatcaatgcagcgaagttatgctgacacaagaatgagagagctaatt

SEQ ID NO: 10423 - DNA, 465 bp, Zea mays
  unsure (1)..(465): unsure at all n locations
agcttcatgatcggaatgaataacatactcttttggccataagtagtgctgccatgtttcaagcgttcagaccaaagcatacaattctttgtcatacacagaataatntaattgagcacctcccaatttttcactaaaatatgatataggtttccttgttgcattaaaacttctaatccaatcccactagcatcacattctacttcaaaagttttagtgaaatcaggaagaataagtacatgtgcttcagtcaaaagtttcttcaattcttgaaaagcatcttcttgtgagtttccccatttaaaatcaacacctttctttgtcaattcgtttaaaggggaagcgatggtactgaaatctcacacaaatctttttaaaaaccagcgagaccatgtaaactctttacttgacttacattcattggaaatggccaatccttgattgctctcaccttggattcatcca

SEQ ID NO: 10424 - DNA, 340 bp, Zea mays
  unsure (1)..(340): unsure at all n locations
ngaatgcanaaccaatgctcttatntcaccacacatactccatattgtctcataatatagccataaaatattatatacttttggacttcaaagcatgtgtcacactgtcgctcctcacctagcagtgttgagtattaaagtagtcattgcggctggtaagggtatatatacccctcccatgttacccccaatagtcactattgaatctgaacataccaatgttcaaaatttccgctcactctctctcactccttttaagctcctaactcntttaaaatatttctaagtgaacttctgagagattagagcttccaaatcagagatttgagattctgcactt

SEQ ID NO: 10425 - DNA, 386 bp, Zea mays
  unsure (1)..(386): unsure at all n locations
tcgcggctttgaagacagtgagtatcctaaccatgtctataagctctctaaggcgctttatgggctcaagcaagccccaagagcatggtatgaatgccttagagattttcttatttgcaaatggcttcaaagtcggtaaagccgatcctacactctttactnaaactctttgaaaagacttgtttgtatgccanatntatgttgatgatattatatntgggtctactaacgagtctacatgtgaagagnttagtaggatcatgacacagaagttcgagatgtctatgatggnnnggagtgaagtatttctaggattccaagtcaagcaactccaagaaggcatcttcctaagccaaacgaagtacactcaagacattctaaccaag

SEQ ID NO: 10426 - DNA, 409 bp, Zea mays
  unsure (1)..(409): unsure at all n locations
tgcttgagtaagtaaatgatcaacgtttctatagtcgaattgtagcttgtattatacataacaactcngctatagaaggctggttaagttaccacataaaaactggagaagagcagtcctcagatcgctctatcaggcgctctgatgaagatcaccatggtacagtgactgaaaaagataccatgttgtatgatctatgacaccgactagtgggggtgaatagacggcgttgactaatataacaaacactatagaaacttaatcaatatgacaagaggtataaattctctattgacaacaagttagcaatctatgagaatcaactatggtgattgtatacatgaagaaccatatgccagatactaaatacttgcactgtnataagcaatgccagataagaaagacaccg

SEQ ID NO: 10427 - DNA, 450 bp, Zea mays
  unsure (1)..(450): unsure at all n locations
gcaagcttttncttcttggatcattagctgggtttcttgctaagttgcaccaagtcttaaatcaactcaaaattctggagcagaaagacgctaaaaatgccagattgcgtacgctntgtgaaacgtgagaacttgaccgccttcaatgtttgaacgcagagcatcttccgaaccagtaaaaaaaagcgggttcatctcatttgtggacgagtttacatgaaacatttcgattcacataaagtctacagtctagcgtgccaggacgtctcgaatttcttccaaaatattccaaaatgggctatcagcatccgaattccgaaggcacgatgaatntgcacttcatatttgggagctggaactacagtccctcaccctgttcattcattcagaaaagtgcggtggtttctcgtgaacgagcaacccagaanaagtacacctgtcgcgtaagcg

SEQ ID NO: 10428 - DNA, 281 bp, Zea mays
  unsure (1)..(281): unsure at all n locations
tacttggtgtagactcctccttcttttcttccgttttcttgaatgcgacgcggtgagcttctgatgtggtgggttcgtcaagctctgtgattntcctcgagccttcgatcatgcactcaaaacttacaaaatgcccgattacttcctctgaggtcattttagtatatcttggattaccacgaattaattgaacttgagtanggttaatgaaaatgagagatcttagaataaccttaaccacttcgtgggcatcccatattacgctcccgagggtgcgcact

SEQ ID NO: 10429 - DNA, 502 bp, Zea mays
  unsure (1)..(502): unsure at all n locations
agtcacctgcggcatgcaagcttcgcaatctntgatcttgctttccaagccctcaattatgatctcattnttcttatcttcaaggtcttgttgcattctcaatgctttgctcagcagcatactctatgaaaataagttgacttcagaaaantttaattcatcacaaagataacaaaaatctaggcaaaagaattttaccttgaaattggagtaaaagaggttgccgacgatatgttgccactggtaaccactaatatcagactctagcttcgagaaaccgacactctntgatagagtgccgattatttntgccctagctcggtcgcggatacaccagaggatttcctcatccacttcaccgaagagcatggatcccggctggtacccacaagatattgcatattcttccagctcctctntctctgcctctgacaattcttaaccccncaggagccgaaggtcaaattcttttcctttngatgaagtatcagcaatttcttta

SEQ ID NO: 10430 - DNA, 333 bp, Zea mays
  unsure (1)..(333): unsure at all n locations
actagctgcatctgctcctcgagcgtcttcttggtactctctaatattttgtngaccagngccttgatctctccacccatagagtcctcgtctctgactttcccttctctgtctccccttccaccgcctnctcctctgagtacgacaacctccttgaggtggactctgnggttccccctcttgctcccttgcttcccacaccctcgtgtgcgatgcgctgtcaaggagtctcccgcgccgccacgtaagactgggcagaaaacccgataccagaagcccgatcccgaaaccaaacccaaataacccgaacccgaaaagctcaagagacatttt

SEQ ID NO: 10431 - DNA, 371 bp, Zea mays
  unsure (1)..(371): unsure at all n locations
cctgaggcatgcaagctntgcagggaaatggagatgatatgaagatttgngagctnttgngtgttaattcaatttttaactcaagcaataattcttacattgtctattcctctaaagtttgacccaaagttgcttcaaattattatatctctaacttcatattcatctcgagcaagatattgatgttgtagggaataaaggatagccatgtgtaggaaatcaagcaaaagcctacaacgtggaggaaaatcaaaggatggtaacaattatgtcttanagtgcactatttcaattgttactcattnttgtgtcttgtgtagccacatanganaaagaaatgaaagtcacctagaggggggggggggtgaata

SEQ ID NO: 10432 - DNA, 377 bp, Zea mays
  unsure (1)..(377): unsure at all n locations
cttataaagggacgtgaagagtgccttcctcaatggacctatctaggaagtggtctatgttgagcaacctcccggctgtgaagatagtgagtatcttaaccatgtgtttaagccctcaaaagcgctttatgggctcaagcaagcccccagagcatggtatgaatgcctgcgagatttccttatcactaatggcttcaaagtcanaaaggtcgatcctactctcttcactataactatcacaaaagacttgtttatatgccaaatttatgttgatgatattatatttgggtctactaacaagccatcttgtgaagagnttagtaggatcatgatacagaaattcgagatgtctatgatggggcaggtgaagtatttcc

SEQ ID NO: 10433 - DNA, 420 bp, Zea mays
  unsure (1)..(420): unsure at all n locations
ggtggtctgaagatttagttatggatgtttaaatggtgaagactgaatcttgtcagttctggacagcacaaccttcatagtgtatttacccttgatacatattanatcagccaaggatgtttataaataatttgtagaacnattaattagatntccagacagtctaagatcactttgtttggatgtctgaatctttagttgtgaatttttaaagtggcaagtttgaatctgtccaaatttggacagagctgttgtattagcactttntgaccttgctaagtgttgaatcttgttgagataaaaataccaaagttgtagttcactttttaagaattccagaaagtcctaagttgctctttntggattaatatttgaaaagttatgattaaaacaagtaactgctgtattgctgtcaaaaat

SEQ ID NO: 10434 - DNA, 294 bp, Zea mays
  unsure (1)..(294): unsure at all n locations
tctgaaatgatgganatgtatgtgccactacagcatactgctttggtccattaagtccttcaataaaatgctgctgcttcctctcatcttcagcaacttcatcaagtgcatatctggatagctgaatgaacttgttgcggtactcactaactgacatgctcccttgcttcaatgatagaaactctgtcttcttgatcttcatcagaccagctggtatgtgataggtactaaaatgtgcgctgaactctgcccaagtaatagtatcagcagcatcgtgggcagcattatatgaat

SEQ ID NO: 10435 - DNA, 468 bp, Zea mays
  unsure (1)..(468): unsure at all n locations
agctntntgctgagccggaccccatntgaaaactttggctgacttcagtatttcaaagaatggcagatttctttctgctaatctggatatgaatctgtttagtgatgccagtcttcctgccagtcgttgagcccccttctttgtatttggcggctccatccgaaggatagcttcgatctttggattggcttcgattcccttcgttgataccaggcagccaaggaacttgcccttcttcactccaaaaacactcttttctggatttaatttcaaaccagcttgtctgaagttggcaaatgtttcttgtaagtcagcaatgtgattctcttgcttcgtgctctttacgatgatatcatcaacatacgtcagcacattcctgcctatttgagagtgaaggaccttggctgtcattctgctgaagcttcctcctgcattcttgagccnctcaagcatccgaaggtagcaata

SEQ ID NO: 10436 - DNA, 334 bp, Zea mays
cgaattttaacgtttatatatttctacgacgctgttaattcatggaagattcattattactccattctagctcattaccagtgctttaattgagcattaatactgtctatcacttggtcacactgttctatcatgaaacctgaattaaaattaaacgctttggtattcttgtaccagacacataataccttgtggaaatcataactgcgtactctgttactctgaatttagtgattcttgatgcgacgatctccgtgcgatgcgtagaatattatcattcagtatattcctttgtattggtgacaattaaatactttttaccatgcttggttgt

SEQ ID NO: 10437 - DNA, 416 bp, Zea mays
  unsure (1)..(416): unsure at all n locations
agcttcgacaatcctcctcatgtactcatccttgacaaccttcttcttagcctttggagaaccatggtagataggactctnttctttctatcagttggatgcagtcagagtgatgttctcccccacttggttgggatcttcattaatgccatcagaagaagaggttgcatgtcttggtgctgctcctagaatgagggtggtctcattggtgcacactgttgtaccaacacatgatacgcagatcttcctcattctccagaggcacactntntaatattaagcatcttggcttgcgtgaaaacagaatttgatgtcagctagtacaccaaaagtgttgtatttaagtacagaaacatagagaatgaaacttcattctgttatggccaccaatcatcactaggactaattgtactagt

SEQ ID NO: 10438 - DNA, 355 bp, Zea mays
  unsure (1)..(355): unsure at all n locations
acactatgaaactcagcttgaagcaaaccatctgatccattagatcgngatccaaccgtatgtcacatttaacacttaaacccttccaccaccagctcaataatctttattaaaaaaaacctaacaaaccatggttgtatctgtggttggatcgtaatctaatggatcagatggtttgcttgcacgcttgcacagaaggactgcttgtcataacagtcgtgcccttagagtgttctatctagttgttaattctataccaaaatagttgaacccatgtcaaaaatctagggacatgttaaagccatattttgattttgacaatcgagatagctaattgactaatatttaccttatt

SEQ ID NO: 10439 - DNA, 439 bp, Zea mays
  unsure (1)..(439): unsure at all n locations
agctngtgctacattagtcccattacntttgtgcagttaanaataccagttttagaaatataattatattatttatatcattcctcttcttcttattttcaaaaccctaattttaatttagggtttgatttaacttctagtatttattatcttattatccttattattttattaatgcacaaacatataaactccaatatgaggcatatttttttatcatttgttttagttcatctcttaattataggtatgttcttttcatgatgcanataaggcacataaaatgaggagacctctctatattctttgtatanccatttgagtattacaaaggctagaatataataatcccctagacttgacccttcctgataacatcattataagcagtggtcctttattaaaggtgtagtgcccgtgctgtacatcccttctttcc

SEQ ID NO: 10440 - DNA, 379 bp, Zea mays
  unsure (1)..(379): unsure at all n locations
tgagaataattccgaagcttcctggaggccattaatttattattcaacactttccccaatactgtgtaatttntctttgataagcttaatacttcggagacaaaatatactgcgacttgctttttagtttgtccttcaagcttctcctgtacaagcgtcgcacttactgcagagtgcgaagctgccacatacaatagcagaggagcccctggcgtgggtggagttagcgctgttagatctatcangtattgcttcagctcttcgaaggctttctgctgagctgctccccattgaaagactttggccgacttcagcacttcaaagaatggtaaatttctctctactgatctagatatgaatcgattcaaagatgccagtc

SEQ ID NO: 10441 - DNA, 466 bp, Zea mays
  unsure (1)..(466): unsure at all n locations
agcttagccaanataattcaagataacctccatatcaagcttctttgggtgggactcattgggaattctgaatttcagaattctgaaattcagaccttgagccaaagatcagggatgttcaccttgatccctaactcgaatcctaatggccccattgacaaaattgtgtctaactaacccctctgtcgtgtgccagaagatggcattgggacgcgagccctagacacgacaaaacttgtgatttgcctcgggtttgggcagggagacagaccagatttcctggctccatatctctgcaaccagtaggcaaaatcctatgacctccacacaagaatggtagcttgtagggaggagaagaggttttgtgcactgaccaaggcgagagcaggctcggatgagcgaccacacgcgccaaagcttgggcagaacgcacgggcacacgtgttcgaccctggtcggcacgcca

SEQ ID NO: 10442 - DNA, 335 bp, Zea mays
ttacgcaataatcaccttgtgcaaggaaggagtgaaccttgttctccccctctcttgaagcttttaggtgagagaaagattaggcaaatgcacatttcataatttaaacccttaaccaaagtttaagagtaccaaaatgtttgcaaaagacagtaaaggaactttactaaaagacccctataggacccctaaatcagcccccaagtggagaacactatggaatcacccccattccttatgtccaaaatcaaccataatctagagagcaggggtgttcacctagctaatggcatcaaaaccctagggtctaaataacaaataggagccaaattatc

SEQ ID NO: 10443 - DNA, 465 bp, Zea mays
  unsure (1)..(465): unsure at all n locations
agcttggcctaaccacacgtccacggccacattcataccacattcagtggatcaatgattcaggcaaggttaaggtaacacacatggtacgagtgcatttctccattggtatgtattctgattatgcggattgcgatgtagtacctatggaagcttgttctcttttgttgggtagaccttgggaatatgatactgatgcatgtcaccatggtaggagtaatacatacactnttagacataaagataaaaacattactttgctacctttgactcttgctgaaattgtacaagctaataaagatagagctgcaagtacccataaggaaccaactatgagacaaaaattcagcaacaaattaaattgaaagctcctatcatgcttgctactaaatctgatcttcttgaaactcatgctattgatgcttgttgctatgccttggtttgcaaagatgctttcttttctat

SEQ ID NO: 10444 - DNA, 350 bp, Zea mays
  unsure (1)..(350): unsure at all n locations
tcttcatgcgattctcacttatatgacccacacgactgtgcttcatgtaggtaggacttaaatcattangtcgaggcgctttagcactaatattacagataggtgcatcatcaagatttaaaatgaataacccattcataatggatgcaaaagccacaaacatgccattcttagagatcacacaaccattgttttcactcacaaatgaataaccatccttcatcaaacatgaaggagacataatgtttcgactcatactaaaaactagataacaattatttaactccaaaataaatcctgatgggaggtggagttgcatcgttccgacggtcaacgcagcaactcttgca

SEQ ID NO: 10445 - DNA, 465 bp, Zea mays
  unsure (1)..(465): unsure at all n locations
aattgaaactaggtgttcactacaagcatcaatgtcaaaatctttacacctagtacaaatttcaacatgttctacacacagaatggatttatttgctacttctaatttagcatttaaatcattggtgacacctttcaaagtagaaatggtttcatgacaagtagatagttcaaaagaaagcatttcatttcttttaacttctaaagtataggatttttgtgcctcaacaaatttatcatgctcttcatacaacaaatcctcttgcttttctaaaagtatattcttttcattcaaggcatcaattaattcattaattntgtctatcttagatctatctaagcccttgaacaaacatgaataatctacttcatcctcatcactagattcgtcctcacttgaagaagcataggtagagttgcgagtacataccttcttctcccttgccataaggcatgtgtgacgctc

SEQ ID NO: 10446 - DNA, 492 bp, Zea mays
  unsure (1)..(492): unsure at all n locations
tgcaagctggtgaaggttcttcatccccacatgtgctatacggcgatgccacagccagcccatgctagtcttagcaattaagcatgcatctagaccggccttctcttttgcaaaatcaactaaagtaaagtttgtcgtctaatacacccttaaaagctagtgaaccatcacttcttctaatgacagacacatctacatttgtgaatagacaattatatcccatattgcataattgactaacaaataacaaattatatccaagcgactcnaactaaaacacattagatatagagtgctcggatgaaaatagcaatttacctaacccttttaccttgccttgattcccatcaccgaatattattgaatcttgggaatccttgtttttgacgtaggaggtgaacatcttcttctcccccgtcatatggtttgtgcatccgctgtcgataatccagcttgaacccncggatgcataaacctgcaanggcaaattag

SEQ ID NO: 10447 - DNA, 295 bp, Zea mays
  unsure (1)..(295): unsure at all n locations
ctgntcatatcagtataatcaatgcacattctccatttaccattgaccttcttcatcataacaatattggctagccattctgggtgtttcacttctctaatgacaccagcattgagaagtctgtttacttcggtctggggaccttcggctatatcgtcagacatcttccgaagcttttgtatcctgggtcggaaggatggatcgacattgagtgaatgttcaatgacgctcctgttgaaccacacagatccttgactgaccatgtgaaagtcgcctagaggggggggggggtgca

SEQ ID NO: 10448 - DNA, 471 bp, Zea mays
  unsure (1)..(471): unsure at all n locations
agcttagcaagtgtgagttctggatcagcgaagttctattcttgggtcacataataaaccgagatggactagctgtggatccaaagaaggtagcagcgattctggactggaaagcaccaaaagatgtccgaggaatcaagagttccattggaatggccggttattatcggcgtttcattgaaggtttctccaagattgccagaccaatgacagccctactagcaaagaaggttgagttcaagtggaccccagcgtgccaagaatncattgaaatgttgaagcagaagttgacaatagcaccagtgttggttctgccagatgttcacaagccattctcagtatattgtgatgcttcatacaccggactanggtgtgtgttaatgtangaagggagagtagtggcatcctcgtcccgacaattgaaagttcatgagaagaatactccactcatgaattggagctggcagcagt

SEQ ID NO: 10449 - DNA, 385 bp, Zea mays
  unsure (1)..(385): unsure at all n locations
tncttgttgccttgtccttagtgttaacggacaagcgcccctatgcatatgacttttccatagntagtcaattcaggttaagcaatatacaagtgaaccatagaatcagtaatgcacttacatttagctgtgacacaaagctgttgtagtatttctggtcgtccttgtaatctttccaacgagttaggataggcatggtttcccgaataatgatgccagcctctgatgcaaacttggcagcttgaacaggttcatgtggcctttttttgccttcctcaacagctatgggcagactcctttggataactttagtcatcctgtccagctggtttcccttggttgctgccctgcgtctccttggtgctcgctgtgtaggagctacaaa

SEQ ID NO: 10450 - DNA, 419 bp, Zea mays
  unsure (1)..(419): unsure at all n locations
agcttgtgaaggttcttcatccncacatgtgctaagcggcgatgccacagccagcccatgctagtcttagctattaagcatgcatctagaccggcctcttcttttgcaaaatcaactaaataaagtttgccgtctaatacacccttaaaagctagtgaaccatcacttcttctaaagacagacacatctacatttgtaaatagacagttataccccatgttgcataattgactaacagatagcaaattataaccaagagactctactaaaaacacattagatatagagtgctcattagaaattgcaattntacctagcccttttaccttgccttgattcccatcaccgaatataattgaatcttgggaatccttattcttgacgtaggaggtgaacatcttcttctcccccgtcatatg

SEQ ID NO: 10451 - DNA, 381 bp, Zea mays
  unsure (1)..(381): unsure at all n locations
gaccttgaaactcagcttgtcatgctntcgctacactgtgtggacaacattagcccacaataatcatttttttaaaaaggcaggcaccaatccttacgtattccatacatcttgctaagagtaatgttatccgtgaaatggaaatcttcaagcatcattgaccatgcagtctcgaactccaactcagtcaaaggatgatgtattatagattggaaccttgtcttaaagtccatttcctcacacctcgcatacaactcgtttaaaaaaaagtatatacctattttgcacatgccatagacacaactgatgtattgtgtttgtgaaaaccctctcgagtgctactggcattgcacgatcttgatatcattcatagatgtcaaa

SEQ ID NO: 10452 - DNA, 324 bp, Zea mays
  unsure (1)..(324): unsure at all n locations
agcttcttggcctcagctcccaccgtcaccactactgcaacctacctattctcgaagccagcagccaaaagggcatcaacattcctaacaacaacgagacttcagggagtagtccgaagctcatacagtcaatagtactgtaccagaatcaaaacacatatactgagtgatatcctgattctgaaatacttttaccttctaggctattttactttttgaataaggaacaagcaatgaaaacttagttntaatttcttgtaatgattntgaatctatcagaatgaaatatatcttcttcacagaattacgaagctcaaaagtcat

SEQ ID NO: 10453 - DNA, 325 bp, Zea mays
  unsure (1)..(325): unsure at all n locations
aatctcagctttattggctttattggctctcttgtctttattgtcttcttgtgtggagaagnattgattatggaaaatagggggagtttcttgaaatcttcgatcaatctctcttagaatgactctctctatgcttcaacatgtgtgtttgacttatagatagagatttgagtttgatttgctaaaacaaaccaagtggtggcgaagaatgatccatatatgccaaatatgaataanactcagagttagtttttgtttgaagtgattttgcactcgttctacttgctttatgttgtgttggcatacatcaccaaaaacggggaga

SEQ ID NO: 10454 - DNA, 435 bp, Zea mays
agcttctgacttgtgggcctgccgaggtgtcctgtgcacaccggacatgcactgtttgatgtccggtgcaccggtatgggcagccctgacgtctgcgcgcgctgcgcgcgcatttaatgctgcgcagggagccgttggcgccgcagagagccgttgctccgctggcacaccggacagtccggtgcacaccggacagtccggtgaattatagcggagcggctgtcgtgaaaacccgaggatgacgagttccggaggccgcggttcgttggcgcaccggacatgtccggtgcacaccggacagtccggtgaattatagcgcgccggcctccgcgaattcccgagggcgaagggttgaagtcgaagtcctctggcgaagggtagaaaacgaagtctacgggcgcaccggacactgtccggtgcacaccggacagtccg

SEQ ID NO: 10455 - DNA, 380 bp, Zea mays
  unsure (1)..(380): unsure at all n locations
ngaatcaatcattttgcacagaataattgatgctcaaaaggataatctgcgtatgaagcacattctagagaagataaaggctggagtatccaattgtttccaggaagacaatcaaggtgtgatatggtttaaaaaccgcatagtagtgccaaagaacgacgaactccgccaacaaattcttgatgaagcacatcttagtcgctattctattcatcccggaagcactaagatgtatcaagacctaaaacaacattactggtggactaagatgaagaatgaaattgcacgctatgtggctaagtgtgacacttgtagacgtgtcaaggccatacacatgagaaccgctggtccattacaatccttgcacatccaacatggaa

SEQ ID NO: 10456 - DNA, 475 bp, Zea mays
  unsure (1)..(475): unsure at all n locations
agcttctaaagggagaacacattttaggactaacaaatggttcgtttgagaaagacagggtttgtagcgcatgccaagcaggaaagcaagttggtgcccatcatccacacaagaacatcatgacgaccgacaggccgcttgagctacccacatggatctattcggcccaattgcttacataagcatcggcgggagtaagtattgtcttgtaatagtggatgattattctcgcttcacttgggtattctttntgcaggagaaatctcaaacccaagagaccttaaagggattcttgagacgggctcaaaatgagttcgacttaaggatcaagaaaattagaagcgacaacggtacggagttcaagaactctcanatcgaaggcttccttgaggaggagggcatcaagcatgagttctcttctccctacacgccacaacaaaatggtgtagtggagaggaagaatcgaactctattg

SEQ ID NO: 10457 - DNA, 455 bp, Zea mays
  unsure (1)..(455): unsure at all n locations
agcttgtctgttagaatcgaacgaagctccagtttgaaacctgcttcggaggaagaaaatattaaagtttcacaagttcataattgaatggccagagtccgctctaccgccagggttgagcgcgagggggaggaaactgaagcttcggagactctccccatctccgaagccatgcaacgatcgggtctagtgacttcggaaaagatccctcatgatgatgcagaacaagcagaacaagcaatcgctgaagcagaggaagaagatattgaggaaactgattccgaagatgattatcgcattgccatgccaagcaagccgagccacttggacttcggaaaatctactgtttcgaaggctgatctgtccaagatggtaaaatcgggctttntcactgaaaatcagaagaagctnttgcgcttcggnggagaagagactaccccanaaccagagaaaga

SEQ ID NO: 10458 - DNA, 433 bp, Zea mays
  unsure (1)..(433): unsure at all n locations
taagtganatagtcataaaatgtttctaagaagggacctanattacattcacacccttgaaataccaaaaaccctaaaaggaccctggataaccctaaacctaaaccctacggggctaagtgcaaaatcagtgcatgtttggactaaagtacaaaaactatgaaagtaaggtatcttaagtcatatggttcacgatcatgaatatttgcaagctaaaccctgaattttggacctatttgcaaaaagaacctatttgagttctaaacctaagtctgaaattcagtgacattggctcaactttggagctctntatcttccaaattattgagaatntgccctacgtcaccacatacaatttgtagatctatcaaaggtgaacaactcttgtttaggggattaaacatttgttgttatgaagaatttggagataatt

SEQ ID NO: 10459 - DNA, 474 bp, Zea mays
  unsure (1)..(474): unsure at all n locations
agctngaccaaaataccacagtatgatacatggtccgctccatgacttagttctgacacatagttaactacttgcgcgcaaacataaatcgctggatccctattggaagtggcagcgccttgttcatgcgatggaatgtgagatgatatagggcatgaacacgtaggtctcgagaattgtcctgcaatacaagcatagcattaattatacacgtatatagctaacatgtacaacgatggcaacctgaagataaatatttagcataatcacttactagttgagtgtaagaagtgatgacacctgaattgtgatcataatacttcatgtaactcataacataaaagccacagttggttgaccctgttctcanttgttgggcaattgatgacatatccattggaaagttaccanatttggggaaggatgcattgnggcaaacatgttgtaaagctttgcacaacctactcattataa

SEQ ID NO: 10460 - DNA, 308 bp, Zea mays
tctgacttgtgggcccgcctgtgtgtccggtgcacatcggacaacttctgttcattgtccggtgcgccggaatgggcgcgcctgccttctgcgcgcgtagagcgcgtattaaatgcgctgcaggtagccgttggcgccgagtagccgttgcttctggggcgcacctgacagtccggtgcacactggacatgttcggtgaattttatcggactagcccgtggagtatcccgaaacttgtgagtttctgaagccgctctccgtggcgcacccgacactgttcggtgttcaccggacagttcggtgaatat

SEQ ID NO: 10461 - DNA, 418 bp, Zea mays
  unsure (1)..(418): unsure at all n locations
agcttcaactcttctaaccatatctatatatttttcaagcttcggatctttagccttgcaactcttgtcaatatgacccgaaacaacctgtgaatcagttntaagtatggcccttctgatccccattgcttttagcttccgaagacccagaagcagggcttcgtactcggcaatgttatttgtgcaactaaaatcaagttttgccgcatagcaagttttaactttggaaggtgaaaccaacacagcagctgctcccgctccgaaggttccccaagacccatcgcanaacactatccatgcttcggcgtctttatttggttcttcctcctgagcccctgggcgtcaatcagcaatgaagtctgctaaggcctgngactgaatcgaagatctatgaaacatattcatacanaattcgttg

SEQ ID NO: 10462 - DNA, 345 bp, Zea mays
  unsure (1)..(345): unsure at all n locations
cgaagacttaaaaagccaagcaagtgttggtgcgcattacttttttngagtaagcaagagcagatggcaagaaagcgtgctaactgagctcgtgctatgctcttatttatacgcccagtgcattgaaaattggaagaccccgcttgtcagtgaatgttgctattctataaaagggaaggtgttttttccgaccttcngcttaaggcctccgtccatgtcgcaatctaaatttatcattctaacacattaatattgctaggggctactgttgggggccttcngctttcgaaggtcctcataaacatgatttaacaatgtttctggagtataatgtgtgaacaggta

SEQ ID NO: 10463 - DNA, 471 bp, Zea mays
  unsure (1)..(471): unsure at all n locations
agctntgatacacggattaaacatcgccatatcactgngcgtcaaaagattgatggtatatggagactctctggtagtcattagccaaataaacaaagaatgggattgttcaagtgattcaatgggaaaatactgcgttgccgtccgaaagctggaagataagttcgagggtctggaatttcatcatgtggaaagggatcgtaacacagcagctgatacactatccaagctcggatccggtcgaactcaggtcccacccggagttttcgtgcaagaaattacacggccgagtatctcaatagaccaaacagaagagtgcaacatcgtagatcaacccgagtcagactctgatgactggaggaggccaatcattaagtacataaagaacgaagaagaaccagacgacaagaactcggcagagcgcattgccagacagtcggctcactacacactcattgnngagatattata

SEQ ID NO: 10464 - DNA, 461 bp, Zea mays
agcttcaacccgttattcttcagcttcgtcatctctgcacatattaaaaagcagaataagaaaggtgcacatttcaaagagaaggtaaaagtaacagatataagtttctcaccggcttaaggtggctccgagcttcgtcaccagccatttttcgcccgccatttacccaaatctgggtcataaatctgtttccgatgcttcgggctaggcttgggatatcaaccaaatctgctgctgacaagctgaagtttggcctatttacaatttttcagtgcgtacagccagccttcaggaaagcggtagttgtgcctcgagaagctaccagggcgcagaagtcagcatgcccagcaataacttcatcaagtgcatcaacctcgccttcaatgtattccaaggtgctgggcaggttttcagctgaaggtgtaaaattttcagagctggctccgatagagtgaaacaca

SEQ ID NO: 10465 - DNA, 423 bp, Zea mays
  unsure (1)..(423): unsure at all n locations
agcttcggtacactacgactacattctcttcatggtgtgggcaagttttttcaccttcatcggccctcacaacggacaaatcccgganataccttcctctcatgttgacaagatgattctctttgatagttgatttaccataaactgaatggctcggtcgccagggacgatcttcggagtcctcgccaccactgtccacatcatagctgtcactgtcaccagtatcttcggacaaaccttccagaatctccttggtaatcttttctgtattggtctttgacatcgctataagaaaccccaagtttttctcttcgtcaaggctcagcttcatctcagcaacagtcttcttatcttcagacatcttcggagacagctataaactatnttcaatgccgaagcttcaaaccaaagcctagcaaatcg

SEQ ID NO: 10466 - DNA, 297 bp, Zea mays
  unsure (1)..(297): unsure at all n locations
catgacaccagacggtcaaactcaacgggcaatggatgaattcagaatcattgcagagcatattggtaccaggatctggttcaagaattcttagcattcanagatttccctactctgagacaatgggaactgcccaagttacaagcggagaagaaggacagcgatcttgtcccgcctccttaccactctaaattcaagagatatttaagacgctctgcccagagtggctggatacagttgaggtgatgtgtaatgaaattctttcgaaatattctcaaacagaagatcaactgatga

SEQ ID NO: 10467 - DNA, 419 bp, Zea mays
  unsure (1)..(419): unsure at all n locations
gcttctctctgttctcctttgagggcgaaggtgccataagagcatcttgacnggtctttatttcgtttgcttctttttgccttgcaacccgcgtccatattttcgtggatgaggtggacaatggggttctccgagtatgtgaattctctattcctggtttgtaggaggtagtcttcacccagagcactggaggttgcgctatntcctgcttcattcggagtaggcgaattctctatttcgcgttgtccatcgtcaagcaaggggacctcatggtcgtcgtcaacgtcggcgactctcgggttgttctaggcaccacattcgacgatgacaccatcacgtcgtccagctcatcgtccacctgaagcccaacctgtcacgtaagtcgttactgaccggccatgaattcttgtgcgctggga

SEQ ID NO: 10468 - DNA, 424 bp, Zea mays
  unsure (1)..(424): unsure at all n locations
gagcacaatctctacttatgaatgtcataatatagcttataagagatcgcattagtaacacaagctatagtttcctatttagcaacctctagtatatgaatgacaagaaggttactaatattaggaaacctcatgatatgaactaaattacccttacaagcatcatgcataacatcaattgaaaaaagatgaaagtagcattgatatttaattaagcttatagggcaactctaattcataacatggtgagtgattaatggagaagactccanaccaatctaaacaagaatgaatacatcacatagtatttggtcgatcttctttgaaatgtgaatgacacacatcattttggagacacatactcatgtngtgagactacatanacatttagatataaacattagtctcacaactctagtcatat

SEQ ID NO: 10469 - DNA, 356 bp, Zea mays
aatttttggtgatgcaccacagacagtcacttgtagaatctgtggggaccgatgacatatgtttatccgatgaaacaaattaaatcatattgggatgattgagtttttttattttgaaacaagccaacattgcatattcaaagaagcaaaaaaaagagtccgcaatagctttctctattggacaaccctgtagagctctgcacagaaatggtaatatgtgtcttgattctttggaccaagtatcatgaatggaagctgtcgcctaccaggtgagtcactctggcacgttgtgtagtgctcacctggtataaacaaccgtccaaagctatgacgagtaacgaccttttcacacctat

SEQ ID NO: 10470 - DNA, 342 bp, Zea mays
  unsure (1)..(342): unsure at all n locations
cagatactgatggactcgctctgaaactgatatactgtgtttttctcctatattaacatgacagcagcgcacggtaaatgagctctgttctcaccaatatcttccgctcctctaatcttacatggcaatcggagcatataagttgatccaanccacgtccatggctgacagtacttcctctggatctggacctgcctccaagactgcccactctgtatctgagaagccttgcaaacacaaccatacaacattggagagcccaggtttctcgttatcatctgtggcgctcgccttgaaggctatctcaccggcagtgctcacaagcctgctctgatgatcgac

SEQ ID NO: 10471 - DNA, 367 bp, Zea mays
agcttatgacatttgaaatgaacgactgattatatattcatataacttcacgttgcatacgaatagtgatttacgatttgcattaagcatcatattggagttgatctataggaggttatcaactttatacttggatactaattatgttcataattatgagtatatatgtagcccgtcaataattttttttcacacacatcaactgaacaatcattgcaagggcactcacaggctagctatagtggtgtgactatttttatagttgacctagctagtagaaggggggaaaaaagaggaaaaatctagaactgtgcgctacccctattagtcccacttgttttcattatcttacatgaatgactcattg

SEQ ID NO: 10472 - DNA, 380 bp, Zea mays
  unsure (1)..(380): unsure at all n locations
cctgctntccagctngacatgcactgtatggcttgtctntntcaaataccacatcctntaatcctctaaccatatctttctttaataccttcttgagtgtgctcatcccaacatgtgcaagcctcctatgccaaagccaaccaagagaagctntggtgaagaggcaagttcttaagtctgcatcttctgaagtgaaatccactaagtagaggttggtgtatctaaatcccttgaataccacttgattcatcatccattttgtacaataacctctgatggagtgaataagcattgaagtccaagatcacagagttgtcccactgataataaattgaagctcanaggtgcaactaagagaacattngatatcgataagtcat

SEQ ID NO: 10473 - DNA, 314 bp, Zea mays
agctgatgagagggaggaagccgcggctcttttcaagatcacgtcactgtccttgagaccccgcataacgaagaggactctcttaagtactgagacccaagaccatttgttattggtaaagtttgtaggaaggcgcactcgtgtgtgtgtcttcaatcgccttgggaagaaatgatgatgtatattattagacccattgaaacaattgtaaatcactcttgattgcagcaagcatgccccactgccaaagactaaagagggcgtggtggccttttggacccgcatggtggcactggcaggctacaatgctacac

SEQ ID NO: 10474 - DNA, 225 bp, Zea mays
  unsure (1)..(225): unsure at all n locations
gaaacgcccttctaatcctcattgcctttaacttccgaagacccaaaagcaaagcttcgtactcagcaatattatttgtgtaactaaaatcaagtcttgttgcgtagcacagtttaactttagagggtgtaaccaacacatcagctgcttcttgcccgaaagttccccaagaaccgtcacanaataccgnccatacttcagtatctttagctctttcttctcctt

SEQ ID NO: 10475 - DNA, 497 bp, Zea mays
  unsure (1)..(497): unsure at all n locations
tcagctgaaccatggtaggtctttgggtcctcaaaccgggttgttgtctacatacactagttcactaatcttaccatgtagaaaggcactctttacatccatntggtagagcttgatattgcgtgcacaagcataagcaagtagaatccggattgcttctaatcttgctacgggagcaaatgtctccccaaaatccaatccttcaatttgagtatatccttgtgcaactaatcttgccttggttttactaccacaccatctttaatgtgcttggtgcgaacacccatattgaccaaaacattgtggtctttggctctcacagctctcacactcatttcagcgaagtagttaatcttatgcatgcttcacccaatcaacataaagagagcttatctaacggtaggtccatacagaacaaagagaatgttacaaatgaactatccaagcgagtgacaccttatatataccacattgataaccgtgatctccatggatga

SEQ ID NO: 10476 - DNA, 422 bp, Zea mays
  unsure (1)..(422): unsure at all n locations
acatgtgctaagcggcgatgccacagccagcccatgcaagtcttagccattaagcatgcatctagaccggcctcttcttttgcaaaatcaactaaataaagtttgtcgtctaatacacccttaaaagctagtgaaccatcacttcttctaaagacagacacatctacatttgtaaatagacaattatatcccatttgacataattgactgacagatagcaaattatatccaagactctccactaagaatacatttgatatagaatgctcattagaaattgcaattttacctagcccttttaccttgccttgattcccatcaccgaatatgattgaatcttgggaatccttattcttgacgtaggaggtgaacatcttcttcttccccgcatatggtttgtgatncgctatcaataatccagc

SEQ ID NO: 10477 - DNA, 466 bp, Zea mays
  unsure (1)..(466): unsure at all n locations
gagtgaagagtataccttagtggagtatgatgcggagtaccggcaaatataattggagttgagtggaaacgccttctgttgtggacttgttctcaaatgctatgagttaagaacaaggcaacatagaacaatgttaatcgttaaagtccttcgtccttcgaagcattattcctctcacgatataatgattttcggacgaaggttatgaagggtgtaccttcgtanatacaatgacggaggatgaatataaggaatataaagatatcatgacaattgacattatattatgtaaacagaaatacatcgaatacaaatgtccttcagcttgaggaatgaaagtcaagcggacgcaaagcgattgcagaccacgtaacagacaggggacttgtactattataacacagcacagcatacacatacattatgccttacttgatatatctatatattatcgagctgatagctt

SEQ ID NO: 10478 - DNA, 429 bp, Zea mays
gaggcgtcgatgggaagcctacttaatgtagactcctctttcttctcttccgtcgctttaaatgcgacgagttgcacctcgggtgtggaggtggcgccttgcttcaagttgacaatgtgtttggagtctttgatcattatctcaaagctcacaaacttccctatcacttcctcgggagacattaatttgtatctaggatccccacgaattaattgcacttgagtaggattgcgaaaaatgtaacacccctggtgttactatcactaaaacttgagcataacatcataagcattggcatatcatgtgtttgtcacacctagagtgcattcactaggcaaaaatttcaaacaaagttgtattgatgggacatgtcatgtgtgaaaccatagggtacagaacttaaccctaaactaggcttaaaagagtaac

SEQ ID NO: 10479 - DNA, 368 bp, Zea mays
  unsure (1)..(368): unsure at all n locations
tcgtcgccttgaagcaaccggttgagcttcggatgtgtcgccaagctcgatgattttcctcgagccttctatcatgcactcanaacttacaaaatgcccgatgacttcctcgggggtcattttagtatatctaggattgccacgaattaattgaacttgagtgggattaagaaaaataacagatcctataataacatttaccactttcgtggtcgtcccacttcttgcttccgaggttgcgcactcggtttaccaaagtcttgagccggttgtacatgtgtcgtggctcctcctctttgtgaagccggaaccgaccgagctccccctcgatcgtatcccgctttgtgatcatggtgagctcatctctc

SEQ ID NO: 10480 - DNA, 475 bp, Zea mays
  unsure (1)..(475): unsure at all n locations
agctntatcgaaagaaagaccttattctggataagtgaaagtgacactaaaacctaaagaaatgtataagcaacagagactactgaacgcattggttttacagaaacaggtttgcaaaatacattgaataattcagagaatcaacctgtttaaccctgaacaggaaaccttatcttcttaaaaataaaactagcagcaatccatgcaatcaaaaaaaaaaattagctctcttcccgtagcatttagtcagtacatagaacagaggtaagaaaagctagccatattcttaatgtaatataccttgccccccccccccccccccctcagtgggattacacctcacatctgggtttcaattgcgatagaaactactacgggttccaatttcagaaaagctatagctaatctgacacgcatccgaatgcatataaattacacatcaactaattaacctttagcttcttaagtactacat

SEQ ID NO: 10481 - DNA, 471 bp, Zea mays
  unsure (1)..(471): unsure at all n locations
tgcattgtctcccctgtggaagccaatgtcatccttaatgtcagagtgtctcccattataaagcatgctacgagcaaatntaaaagtttcattntctagttcatgctcggtaagtttagcatctagtttagctatatgatcattttgttgtttaatcatagcaatgtgatcatggatagcatcaacattaatatatctacatctcatgcaaatagaaacatgatcaatagtggatgtagagggtttgcaagattttaattcatctatcttagattttagcatggcattttcatctctaagacaggagatagaatcattgcacacatttaaatctttagccttagaaattagattatcattttcaatcttaaggctagaaattgattcattcaatntgtcaatcttagcaattaaactagcattatgcattttaagagtggcaattgaatcatcacattcatttgacttatc

SEQ ID NO: 10482 - DNA, 442 bp, Zea mays
  unsure (1)..(442): unsure at all n locations
agctntgggaactatgcctgtatccaatctgtctgagccggaactataagagcttgccagatgcccncgttccggtcgaccacgaccaacacccaacataagacnttcctagttatttagccaagaccagagccatgatagttctcatggtagcactgttttcccaggtggtcactccatgttccaattaatatgcaataatcttgtttaaccatcgggttaacaacaataatgtaaacttaccattttggaacattaatatcataagcgggagtgactgcataaatntaagttgtagcaatagcatagctacaaatgtaaagtataattcccaggtttgatcaaggaataaggttggaaaggttatgggtatctaaataggtaacccatcatattatgcatatatatatcgaagaataaacttattaatgtattgttggga

SEQ ID NO: 10483 - DNA, 409 bp, Zea mays
  unsure (1)..(409): unsure at all n locations
aaccatcttcaacacttcgcccataaaatagatcaattatanttttcaattgcttgtctgcaagacaagtgataattgcaataagtaacatgatatgttaaccagaaggtatgctagcaccaganacatgatatgcccagaggtttttacgcggcgtcggcgcatgatacacgatggtggtcaccttntttctctcaaacttgggcagcatatataataaataagttactacacccatcatataacttactntcaccacgttttagctctgtcctggacggctggacccacatattagtggatcatcgccatcgacgtgtgggtaacaaagagagagagggagaggggaattggaaggggtataggtcgcatattcactcctctgtccacagcggcatgtacaaaacta

SEQ ID NO: 10484 - DNA, 394 bp, Zea mays
  unsure (1)..(394): unsure at all n locations
ctacatgagctaaacggcgatgccacagccagcccatgctagtcttagcaattaagcatgcatctagaccggcctcttcttttgcaaaatcaactaaataaagtttgtcgtctaatacacccttaaaagctaatgaaccatcacttcttctaaagacagacacatctacatttgtgaataaacagttatatcccatattacaaagttgactcacatacaacaagttatatccaagcgactcaactaggaacacattagaaatagagtgctcggatgaaatagcaatttttcctaaccctttcaccttgccttggttcccatcaccgaatatgattgaatcttgtggatccttgttcttgacataagaagagaacatcctctnttcccccgtcat

SEQ ID NO: 10485 - DNA, 397 bp, Zea mays
  unsure (1)..(397): unsure at all n locations
aagactactactatatataaaacttgaaaacaagtattagtctcaaagacttagattatagagtaacgctcccctgaaagtgtgcatacaagttttgaatacttgtaggagacacgcacttntatttgatatcaagaggggcaaantatctataatccgagctttggcacatataagttaaatgatatcaattgaagtattataccactagtagcatcactttgtagtatatgtcatatggaaataccaatcgatgtatcattntcttaggaatgttaaataagctatgtgccgcgcttaactaaacattntaaaccatgtaggtnttgctcaaaatatgaatngaaagtgagcaatcctaccatatgattgacatagtatgcatgaacctttaact

SEQ ID NO: 10486 - DNA, 409 bp, Zea mays
  unsure (1)..(409): unsure at all n locations
agcttggtgccgatggaaaaacananatccttgaaatcttggctgtcaaactgcttgccgttgtcaactgttagctcggacggtactccgaagcggcaaacaatgttctgccaaaagaatttttgggcagtctttgatgtgattgtggaaacggccctcgcttcaatccatttggtgaagtattcgacggctacgaaggcgaacttgaggttcccctgagctgtgggcaggggcccgacgatgtccaggccccagcgctggagaggccatgtatgggcaatcagctttgtatattgcgaggggttgcctgaccgaggagagaacttctggcaggcttcgcaggaccttgtgactcgatttgcggcgcagatcattgcaggccagtaaaatccttgtcggatcacctttg

SEQ ID NO: 10487 - DNA, 417 bp, Zea mays
  unsure (1)..(417): unsure at all n locations
tctaatggagaggattcctacattatntaggagtccatgtgctgcacattgcttggacctaatggtggaggacatatgagacttgaaggaattcaagaaaccaattgcacgtgcaaggcgtgtgacaactttcatataccgacatgggagaattcttgctgccatgagagaganaactggtggngctgatcttgtgaggcctgctgccactcgttntgctacttcctttctcacattgaagagcttgtacaagcacaaggatgctttgaaggctntatttgcaagcacagcttggactgataacagattgtcaaagacaagtgctggattggatgtgtataacattgtcttctccacacagttctggaattcagtagaagattgcctttagagctcagggccactacttattgtact

SEQ ID NO: 10488 - DNA, 413 bp, Zea mays
  unsure (1)..(413): unsure at all n locations
gcttgctatatgccttcttctttttctccatagcaggaaccttgctagaacactaccccacttaaaaaggatgagggtagaactcttgaatcttgggaatttgaactccttgaagtacctcataacaagggtgttacggngcctgcttctgctattgctacttgaacaggctgcggagagatgactgacacatggttgattctgggagagccttcttcttatcttctcttcactatcttcttttcactgaccctttctttctctttgctcttcccactggaggattctatcaaagagtattaccatcatacagaggaggaaaccaaagactatgaaccatgtacaacagtcttcaacccaagaatcaccaagcattgtgatcttatgggcgagggagtggaaaatggagtttc

SEQ ID NO: 10489 - DNA, 353 bp, Zea mays
  unsure (1)..(353): unsure at all n locations
gcggaagattcggagatcaaccaagaagaatctttngcttgttntgcggtgagaacaaaggccataccaccaggatgtgccatgttaccatccaaaagcaaaagaaaatagccgaagccgcagcacaacaagctcagccgaagcaggtcatgcatactgcttcgnttcattcgccttacatcccagaatatgtgggcaaccacccctgcagttctggtgcttcggcgagtcaaccccaagcttcctggaacaacctccgcctcaccttcgctgaacaaggcagcagccagaagggagccagatgctcacaccaagggacttagagagcagtcgagctcgtcaagcacagcact

SEQ ID NO: 10490 - DNA, 475 bp, Zea mays
  unsure (1)..(475): unsure at all n locations
agcacctgggctgcagcttaagcatatacctgggcaggtatgattgaacattgtgtcccctctcttaaaagcctttagttgtaaaccctaaaatgtgttaggagttcatgtatttcttctatgtcttttataagaagtaacactaagaaattgagtgataaaaaaaagaaaaatcttcaatctagtaggataagatattctcctcatgaaatttaaaagaatgctcttaatatatatatatattaaagattaagtgactcttggtaaaagagaatacattattaaatgactagggtaatggatactagttttagttaacttgaaagttgatcccatactcaaaagtaactatttcctanaataaaataaaatanaatgagtggatgtcacattntgagcctttaacttaacaagagaataaaataattaatataaacgtttattaaaatatataatctacattcatgtcgatatg

SEQ ID NO: 10491 - DNA, 288 bp, Zea mays
tatatttaacaccttctatgctgccctgctcttgattcatagcatttgagaacaagtcctcaacaaccgccttgtcaaaccggacaaaactattctcctccttatactaccggtgctaccccagccttcataaaccctgggtgggaccgtacgagttaatatcgagtggctggccacacaacctcgagtggttgaccttttatgagtacaggtgaagaacgatgacaaacctgttcttatacgagaggggaatctttctctcacgcctaaacagctgagctatcacct

SEQ ID NO: 10492 - DNA, 466 bp, Zea mays
  unsure (1)..(466): unsure at all n locations
agctnggtcattttattgctaactgtcccgacaatgatagtgatcatgaccaagggaacaagagggagaagaagaagcattataagaaggcaaagggcgaggcgcatctatgcaaggagtgggactcggattgctcctcttctgactccgacaatgaaggactcgccgccaccgccttcagcaaatcaaccctcttccccaacgagcgtcatacatgccttatggcaagggaaaagagggtatgtaatcaagacaatgtcacttatgattcttccagtgatagtgagtctagtgatgatgaaatagattactctagtttggtcaagggattggatagaactaaagtagataaaattaatgagttgattgatgctctaaatgagaagaacatacttttagaaaagcaagaggatttattgtatgaagaacatgatanatntgtagaagctcacagatctcatgctct

SEQ ID NO: 10493 - DNA, 153 bp, Zea mays
actcactggatagggttacaagcgagccactacctactgactctagttgtgagcaatgcagagagcttcttaaagatgacatagttcgtgatgaatcatgaataatcgttgagaatgaagtgataatggatggaatagatactctcactcatg

SEQ ID NO: 10494 - DNA, 259 bp, Zea mays
  unsure (1)..(259): unsure at all n locations
gcttgtggcgccttctggcgtcctgccgcagccgaagtaccaagtctcccacctggaagcctcggggctgaacccctcgggcgtggtagcgtcgcagagactgctgataccgcgccgagtgtagtaaagccatgtcccgagcctcttcgagctggtccagtgagtcttctcggctggtctggttgcttcngtcgttgtatgcctttgtcctcggggaaccgtattctaagtctgtgggcaagatagcctcggccccata

SEQ ID NO: 10495 - DNA, 349 bp, Zea mays
  unsure (1)..(349): unsure at all n locations
taagtattaatagactctatntgcatctagtctaatttcacatcanatcaagacaacattagttntatccatagtgttcacatcttgactctangttgtagaaaagtgaccaagtcttcataaccgcgaaggtacggcgatccgaatcgattatactcagctgaggatctccaatcacacgacatatgtagcacttaacccttgcatatgtcaaccccgccacccgggtcttaagaccggatcangttcacgcaaaccgagagcacagatacaccaccgtccagcctcttgccacggagggtacacgctactctcgccaccgctccacgcccatntcgtgttatcttat

SEQ ID NO: 10496 - DNA, 464 bp, Zea mays
  unsure (1)..(464): unsure at all n locations
agcttcgtcatctataaggaaattaccctgaaggaaagaaatgatctcagttctccaatcttcactatgaacaggagatatattgaggactgctctttcaagaagttcaaccgaaggtgcttttattgtttcaaaaaatacttccgaaggtaagggcaacccctgtgctgctgacttggctagcaaatcaacatgttcattttctcctcgaggaatgtttttgacagaaaacccttcaaaggaagcttcaatccttcggaccgtgtctaaatatttctcaagcttcgggtctcttgctttacaacttttgtcaatatgaccagaaataacctgtgaatcggttttaagaaccgcccttctaatccccattgnctttaacttccgaagacccaaagcaaagcttcgtactcaacaatattatttgtgcagctaaaatcaagtcttgctacgtaagcaagtttaac

SEQ ID NO: 10497 - DNA, 394 bp, Zea mays
  unsure (1)..(394): unsure at all n locations
ctcagctgattattgcctcctagaactacttattcgagctcgctctttatttcaactctccttggctgagtcttcgnctatcagaaggctctaatgagaagcattgcaagatgatcaagctagaattgcggaacttgaagcgaagaaaaccttttcgaagctatcgacgatgccctattctctatcttatccccactccgcaagaagntttgttatggatcccctggatctattatatgacttcttggctaaggtgatcnngatgntctttactantaagattttcgactagatcgtgaatgacgatattatattatattatattataagtgggtttctaatcctaaacatgctatataccctcgacttctatacatttggttcgtaccattga

SEQ ID NO: 10498 - DNA, 398 bp, Zea mays
  unsure (1)..(398): unsure at all n locations
gcaagcttgacaccaccatttaggatcatgtgaatnttttgagatcaagaatggtaagcctattactcaacatgcaaaagcgggttntatccaaaggtttcatgaaaatatccgctagttgatcatccgtcctgactccttctagtacaatatctcccttagcaacatgatctctaaggaagtgacgacaaatgtcaatgtgcttggtgcgagagtgttgactacgattattagcaattttaacagcactctcatattcacacaacaaaggtaccttttctagaactacaccatagtctagaagggtgtgtttcatataataatttgtgtgcaacaagcacccacggaaatgtattccgcttcagcgggtgataaggcaacactattttgtttttttg

SEQ ID NO: 10499 - DNA, 370 bp, Zea mays
  unsure (1)..(370): unsure at all n locations
cagncattaccttcagaatctcttcaacttccgcagcagaaggtgtcgcacgagtatcctcctctcgaaccactgttattggttctggagatgcagattttctttttcttgaagcagctaccttctgctcaaggctcggctattcagaaatatactttttctttttggccaacttggtgctttcttcgcacacggcgctggcacttctttatctcttcggcctccggtatctccgctcaattgcccataatcaggatattcanagcctatagcatcaagcactcatgttagccttcgcttcggccgggtgccgaaggccgctgtcatcaactgatcctctttttagagtatttccaagaattagactcat

SEQ ID NO: 10500 - DNA, 381 bp, Zea mays
  unsure (1)..(381): unsure at all n locations
agcttcaattctagagatgcttataaataactgtcaatgtaccggantttgtgaattgccctcccagaaatctttttctattgctttcttcatttctagaaatttagggaacatgttttgtacagttgctgcagaagttagtttgctaggtacatgcttgctatctttcaaacattntgatattgaaaaaaatctatggagcttgctgtatggctcctggaggtttttagatagaaactttggaacacggagttcacaactcaacatgatatttccatgttgcaattagattccatatgtaaattttttgagattgcaaacatatgtgtatgctagatattgttctatgcanttttaactggttttcttttctccatgtct

SEQ ID NO: 10501 - DNA, 381 bp, Zea mays
  unsure (1)..(381): unsure at all n locations
acttgtngacaggaggcaggtatcaaccgaacatcaagatgccaagacacatagtagtttgaatggttgttctgacacttgtaaggtggatcaagcagctatttcacactgtcataatagtgcacatcagaatatttttcaacaggagaaaaatagtgctgtttcggatgcaagaagggaagagaaaccaggtgtaaaatgtgaaaagacagcagcangccatggtgccaaactggctgaacaatctactggtctgtatagtgacccaatatcactggacaaagagactgnntgtagttgttcaaagcatggcacttctaaggtaaatgcactataggttccagatcatgagaatgagagtacttcactcgatgggtcaat

SEQ ID NO: 10502 - DNA, 428 bp, Zea mays
  unsure (1)..(428): unsure at all n locations
agcttgttcaccaggttgtccatggtaatggtgacaaaccctngcaatagctggtcatcaatacttgtatttattntatcaaggcggctggatgatggagtatatctcaagtgaatgccatgtttagctggcataccgaagaaatctccgggacaagattatttgccctgtacggtagacatctggacttgccctgtacgttagacatgttgacatctgcatgcgaattaatgttgaacaaatggggttggtctaattgtaaaanataattattctgaataaatcttaattgctttgagcgaaactgataaatcttaaactgaataaatcttaattgcttttagtcggcactaccgctggtgatatttctgcagaaatctccccatcatctaccggttggaaatgtagctcttctggtgcatcttcat

SEQ ID NO: 10503 - DNA, 428 bp, Zea mays
  unsure (1)..(428): unsure at all n locations
tgactgagatctctttgtcgtntattntcggctggcaccgcttatttttggtgtangttctgcatccccttaggaacatcttttgaacttcttcgtcttctatttaggtggtattcgcgttgacttttcgtgcttcgtcttatatttcggcggtatttggctccttaggaacgtcttttgaacttctttgccttctatttcggcggtattcgcgttggcttttcgtgcttcgtctatatttcggcggtatttggctctgcattcccttangaatgacttgtgagcagaanacttacgctgcgctcccttaggaacggctttttgtagctcgtcatgctctgcatccccttagggacgactntcgagcttctccctgtnnttttcttttcctacactcgatggccatactcagatttatatttacatat

SEQ ID NO: 10504 - DNA, 473 bp, Zea mays
  unsure (1)..(473): unsure at all n locations
agcttggacacgtaccactgatctattgaacctgtcctcggcttggtgccgaccaacctggtagtagtcctcctctgcagtgcttgctgcttctgcgtctgtggccattgctactggcattccagttgcaatgccacgcaggccctttctcttcttcctccatcgcaagatagctttttccactactccaacggaccataataccttgcggtactgccttctcacttggtgacctctgtatgcagcctgagcaagatttatgagatacacagattgtaaaatttcaaatttgctatcctaaaatgggaacatgaatctacttagatggcatcattcagcgtttgacaacaccacatgaacgaaacgaatcccttggaaaaagaagtagcaaaccaaaacacacaatagtaacagaagctntacttgtattttgatagcttgtcttcgcatgttcatgaagttcctcctaatct

SEQ ID NO: 10505 - DNA, 387 bp, Zea mays
  unsure (1)..(387): unsure at all n locations
accacatcatagttgtagagctatgataggagaacaagtttacttaagtgactaagcactggtgctgaacagaaactggagaacagtgtgcccaaagtcgagctgtcagactgtcttaggtctgaaatcagactgacagtgtgattgagccatctttgaactggtacggatcattatacaacaactttgctactagccgatcagcaagttgcatgtaaatttacgagaaattcggactcaaagttgatctgtcaggctgactgaataggggttccaatggtacagtgccctgaacaagatcgctagtgcagcgcacctgaccgccggcgaccgtgcgcctagatacacgctncgcgtgcgattcgtgctcaccagtgaccggataat

SEQ ID NO: 10506 - DNA, 471 bp, Zea mays
  unsure (1)..(471): unsure at all n locations
agcttgctaaaagtcttttcatctatgggcttggtgaagatatcggctaattggttgtgggtgctaacataggcaatttcgatatccccttttcattcctaagcttgctaaaagtgatactcgatgtctatgtgcttagtgtggttgtgttcaacgggattataccccatgcggattgcactctcattatcacataggagagggactntgctaaacttgtagccatagtccctaagggtttgcctcatccagagtaattgtgcacaatagtgtcctgcagcaatatactcggcttcggcggttgatagaactactgaattttgtttctttgaagcccaagacaccaaggatctcccctgaaactgacaagtcgctgatgtactctttctaccaattntacatccggcatagtcgtcaccagaatacccggttagatcaaaggtagatcccttggggtacctgtggnggata

SEQ ID NO: 10507 - DNA, 447 bp, Zea mays
  unsure (1)..(447): unsure at all n locations
gcatcaacatcaatgtacttactaagctcatgctttaccggatcatgggcaatactaatagcaccaatgtacatatacaccacaatcagcaagcaaccaccgtagccaagtcacctctatcgtcgcaagagccatagcacacaatcagcctctgtacttgaacgagaaactgctagctacttcttagtcttccaagcaatgagagaaccatcaagaaaaacacaatagacagaaagagacagataatctgaggaatcactagcccaagtcgcatcacaatagtcatgaagctgcaaggagctagagtgagganagaacagttgacgagagatagttccacgaagataacgtagaacaccacaaacatgactatagtgaaaccgcgtgagagcagatacaaactaactcagaatatgtatagaatacanatgtcatagcgagtaacac

SEQ ID NO: 10508 - DNA, 425 bp, Zea mays
agctttgcaagagcctataagtggttgctgaactgcacagcaacaaagcttcccagtccactctagagcattgcacaaagaaaggcaaggagaccaagcagatcgttgatgaccacgttgccgatatcttgtacgagaacaagatttcgttggacatggtcaactcaagaagctgggagatcgtgttggagtcaatagggcagtatagtcctgaataccacgacgttagaattccatggcttgaaagggttgtcgagaggacatcgtcgctaaggtccaagcatgaagaatcgtggaaggagtatggctgctcattgatgtcagattcatggacagatattagaggatgacatctcatcaactttctcgcaaaaaagtccaatagggacatactttttttgctctattgatgcatcaagtgagat

SEQ ID NO: 10509 - DNA, 413 bp, Zea mays
  unsure (1)..(413): unsure at all n locations
gatagatgtctgagaaaaactcttgtataacttgtgtaaagaataatgtnattaaattntactttgtggactntgttcataccttggaatacattcttacctttccatcaatgtataaagggctttggtgtgaacgaaattagcatttttgagccgaaggcgagaaacaccttcccttcttttcgtacacagcgaagcataaacctgcttctttttctttctgttgaagccttgtctttagagccaaagcaactgcctgtcgtatgatgatgatgatcctatgtatgtctaaatgaatgtttatgaatgcaaatgtatgatgtaatgtaccgtgcaaatgaatgtccatacacacgcatacaaagccacaaccacaaccttcattcccttatgaataatcaaagtctctttga

SEQ ID NO: 10510 - DNA, 434 bp, Zea mays
agctggtgccgatggagaaacaaaaatccttgaaatcttggctatcaaactgcttgcccgtgtcaactgttagctcggacggtactccgaagcggcaaacaatgttttgccagaagaatttttgggcagtctttgatgttattgtagaaacagccctcgcttcaatccatttggtgaagtattcgacggctacgaaggcgaacttgaggttcccctgagcggtgggcaggggcccgacaatgtccaggccccagcgctggagaggccatgtatgggcaatcagctttgtatactgcgaggggctgcctgaccgaggagaaaacttctggcaggcttcgcaggaccttgtgacccgatttgcggcgcagatcatttgcgggccagtaaacccttggcggatcaccttggcagccagggccctttggcctgcgtgc

SEQ ID NO: 10511 - DNA, 401 bp, Zea mays
  unsure (1)..(401): unsure at all n locations
ntgtcgtgacctatggtccgaccgtaccggacaacttatcatcgtacgttgcccgagaaggagtacgatgtagcttcatacccttagaggtatgaaggcagaggacatatgcattgcattcatatgcatacattgaagtgatatttgcagatgatgtggttttataccctcanaggtatgaagatagatgacctacacattgcattcctatgcatacattgaagtgatatttgcaggtattggtgatgcacggaagtgttatacaacatattgtggttgttcgaggaaatggtatggtattggttatattgtgactactgagttctatatctacaagtatntctgatcttgattgtgactcttttanaatgtngantaattcaatgtggtttaaatatctc

SEQ ID NO: 10512 - DNA, 426 bp, Zea mays
agctttgtagcgaggcaagagacaccaattgtgtggtgatccttgtggggtgtaagtgacccgtgagattaaggaagaagcctcactcggtctatgtgaccgtttgagagagggaaagggttgaaagagacccgatttttgtgaccacctcaacggggactaggttctttagaaccaaacctcggtaaaacaaatcaccgtgtcatccgctttattttcttggttgatttgttttcctctaaccccggcttgtagtttatggattaagttataaatttcagattccgcctatccacccccctctaggcgactttcaggggattgcacaactcttgactcaccaactctttaacgaagttaatacccacgacgactttgctcatatgggactagccaagttaggtgcagatgctttcttgccctcta

SEQ ID NO: 10513 - DNA, 381 bp, Zea mays
  unsure (1)..(381): unsure at all n locations
gcgacgatgccacagttattccatgctagtcttagcaattaagcatgcatctagaccggcctcttcttttgcaaaatcaactaagtaaagcttgccatctaatgcacccttataagctagtgaaccatcacttcttctaaagacagacacatctacatntgtgaatagacagttatatcccatattgcataattgactaacagataacagattatatctaagagactctactaaaaacacattagagatggagtgctcatttgagattgcaatntacctaacccttttaccttgccttgattcccatcaccgaatataattgaatcttgggaatccttattcttgacgtaggaggtgaacatcttcttctcccccgcatat

SEQ ID NO: 10514 - DNA, 486 bp, Zea mays
  unsure (1)..(486): unsure at all n locations
agctggtcccttccatctctcttctttgatggactcctctntgttgttccagttcactactaatatgggttttgcctattggtagggaaaaaaattctttgcatctgggatgtaaagaatctcttttacagacgctcacatacaccagctgctggtacatataaatagaagaaaaaataaattactaaaagattatttagtaaattttgatctgtctttgtgggcctttaagtggtggatgtgagggctgtaaaagatggtgttcacatgcggtatgtatagaatttttttcccggtggtaggcctggtgcgatggcgttggtaacaaanaaaaagtagaatgcacactntatttattttaatgccgaanattcgaatcgaaactgcaattggccgcttacaatattattgttgacaaaaaaatgaaatgcgtgctagcatcatagctaacgatattatcatacatgttgtggtacatntagcact

SEQ ID NO: 10515 - DNA, 474 bp, Zea mays
  unsure (1)..(474): unsure at all n locations
tctaaanactnggttatgcttattatatgacaattggttaagtgaggttttgctcgcatattntcaatgggcaagtgatggcctctgggaaagttgtcttaatcgatgctgaggtcataacttatatagtttaagaatgacttccagggaggaagaggtcgaagatcatggcatgctcacctactgctcanatcgacagtgatggcttgttctctggtttgaagagtaaggcaagtgttgctcggatgtgngggtgacaatgagatggtggttggactgtgaggttctgcggcnagggcatcagtatttataggcggaggaacgacagtttataatggagggagtcttgaccggcgtactgtgagtggtgacgttgccacagtgcagtcgcaacatcccgaggttggagggtaacttgctcatggtgggcattcatttagntggattgtaacaatgactgcgtgtgctcaacgg

SEQ ID NO: 10516 - DNA, 457 bp, Zea mays
gcaagcttgcaatgaggagatgtcgctaatcatcaatagcttttgccaaatcctcaagcaaaggaaggggagagattacaagccccgttccaagaaagtttgctacaagtgtggtaagcccggtcattttattgctaaatgtccattatcaagtgatagtgagaggggcgacgacaagaagggaagaaggaaggaaaagaagaagtattacaagaagaagggcgacgatgcccacgtgtgtcgggaatgggactccgatgagagctccaccgactcctccgacgaggacgccaccaacatcaccgtcaccaaagaccttctcttccccaacattggccacaagtgcctcatggcaaaggatgacaaaaagaagaaggtaaaatctagagcttccactatatatgcaacatctagtgatgaggctagctctagtgatgatgaaggatgattgttaatc

SEQ ID NO: 10517 - DNA, 409 bp, Zea mays
  unsure (1)..(409): unsure at all n locations
ttcacgggtttaccggttaggacgttagacttattggaactcatacatactgatgtgtgcggaccaatgagtacgacagctaggggaggattccaatacttcataaccttcactgatgattntagtagatatgggtatgtctacttaatgaaacacaagtctgaatccctagaaaagttcaaagagtttcagaatgaagtagaaaatcagcgtggcaagaaaattaaagcactgcgatcagatcgtggtggtgaatatttgagtcatgagtttagcaatcatctaaagagttgtggaattggtccacagcttaacgccacctgaacgcctcagaggaatggcgtgtctgagcgacgtaatcggactttattggatatnggtcgatcaatgatgagccagtcggacctac

SEQ ID NO: 10518 - DNA, 470 bp, Zea mays
  unsure (1)..(470): unsure at all n locations
gctttgcacgagaaagatatgatatgaagctttggggtgcttgagagagtccattcaatactcaataactcaagctatcaatcttcaatgatctatatccgcgattgacccaagggtatttttcaaattgctatgtcttaaactcatatcatctcgaggaagatattatatgttgtatgaagtgaagagatatcatgtgcgaanaatcaacgcctacaacatggaggaaagcccaaggatggtaacacttatcttttaagtgccaagattttaaaatatcatttcttatgtgtagtcacatagaaaaattgaagcacttcanatgcctttaaatttatattaccattctttgaagagatttctatcatatggtagattgcatactcatcatttncatcctatggcaatctacatgctntaaattattggaagtacacatggcatgtttttcgctcaagtattctattatt

SEQ ID NO: 10519 - DNA, 353 bp, Zea mays
  unsure (1)..(353): unsure at all n locations
tagctcttcgagttctacgagaatgaagactctgatcatctgnttggtgaaggcaagcgtcctctgacccattatgacctatctacttataattcactgtgccgcatacaatgatcaaactatcgattgactaactttctatttacttatccttcgttacccttatgggttatcatggttagctgtatgctattgctttactctaatcaatgaacatgatgtgaatattattatacgatgatggtatcccatagatgatatgcgagactctatggggctcgggccttgtcctgagtacctctacgtaaggacctgatcgnggagcgacaaccctggataacactgcaaccatg

SEQ ID NO: 10520 - DNA, 456 bp, Zea mays
  unsure (1)..(456): unsure at all n locations
agctttatatggacgtcggtgtcgaactccgctaaattggtctgaacctggagaaagatatttctttangcctgatatggtgaaagaggtcgaagaaaaggttcagagaattattcataatatgaaaaaggcacaagctcgtcagaagagttatgcagacatacggcgaaggcccttatatttcctggaaggagactatgtttacctgaaggtctcaccaatgaagggtgtatcgcgtttcatggttaaagggaaacttgcacccaggtacattggtccattcctggtacttgagcaatgtggaccagtggcataccgacttcaactccccgaaacattgtctgctgtgcacacatgtgtccacgtgtcacaattgaagaagtgtcttcnggttcctgatccgaaccgtgaagtgactgatgttgtccttgaaccagatttaacgtactcggaaca

SEQ ID NO: 10521 - DNA, 367 bp, Zea mays
cagcttgtcaagcacgtaaacaagtgggaggagcgcatcacaacaagaatgtgatgaccacatctagacctctagagctgctacatatggacctcttcagacccgtcgcctatctaagcataggaggaagtaagtatggactagttattggtgatgactcttcccgcttcacttgggtattctttttgcaggataaatctgagacacaagggaccctcaagcgcttcctaaggagagctcataacgagtttgagctcaaggtgaagaagataaggagcgacaatgggtccgaagtcaagaaccttcaagtggaggagttccttgaggaggaagggatcaagcacgagttctctgcttctacacacac

SEQ ID NO: 10522 - DNA, 379 bp, Zea mays
  unsure (1)..(379): unsure at all n locations
agctggtgaagattcttcatcccaacatgggctattcagcgatgccagagccaacccatattagtcttagcaattaagcaagtatcgagttcagctctattaaaatcaactaagtatagctgaccctccaatactcccttaaatactactgaatcatcatttcttctaaagacagtaacacctgaatctgtaaaaagacaagtgtaacccattttacacaattgggaaactgaaagcaaattgtaacctatagaatatacaagaaaaccattggaaatagaatgggcaggtgaaatagcaattttaccgagtcctttgatcaaactatgattccatccccgaatgtgatagctctntggggatgcctcattttctcata

SEQ ID NO: 10523 - DNA, 362 bp, Zea mays
  unsure (1)..(362): unsure at all n locations
cataacatcgggtctatatgctgtaatatanaagaaactaccaattattgagcgatnaagtctttgatcaaccatagtacctccctcatctaagtctagatgaccatttgttgctataggagtctagataggctntcatcttgaaagtcgcctagaggggggtgaatagggcgaatctgatatttataaacttaagcacaactaccagcctggttagcgttagaaatataaacgagtccgagagagagggcgaataacaaatcgcaagcaaataaagagtgagacacaaggattcgttttaccgaggttcggttcttgcaaacctactccctgttgaggtggtcacaaagaaccggtctctt

SEQ ID NO: 10524 - DNA, 475 bp, Zea mays
  unsure (1)..(475): unsure at all n locations
agctngacaatggaggagaatngaccacgtgctcgactggttggttnttcttgggtttatcgggctcgtgaattgtggaagtgaaaactgaatcatttgtctataactntatattttgttctcaagacaaggtgcagttttggacagtgacctgacatgtagctcattgcaagaattaagaatgtataaccccaatacctacagcgaccttatgttgtggtcctaatcaaaattgatcttcataaggtgcacttaaattccttaatttgggtcaaattgttgtattcctaatttcagtgatagtattttctctttgaaccaatatcctgaatttttttatttcatatttgatatgacagatgttntatctattttaatgttgatttccctcgtaggcacatgataggctatcatcattggccttagagatatcttcaattgaacgtgaacgacatcactagagtggtagcaaaaa

SEQ ID NO: 10525 - DNA, 228 bp, Zea mays
agagcttccgaacgtgatgactcgttctgtccacggagtcgctttacccgagcgcaagttacttgtcgcagaaagggacgagtgaggtatccgtatcccggaggcgtaggagtccctcggctcggtcagccttggctgcttacgtgtacctcgtcgtttccaggatccgctttccgaagtagtcaagaagcacgaaagagatcctgctaaaaagagatcctttttcga

SEQ ID NO: 10526 - DNA, 287 bp, Zea mays
agcttactataagttgtgcatgcgttatggactattatctggtcgtttcagcgtgacgttttagaaccatgtcgcctcaagaagcggacgaccagaccagttcaaaacgtcgtagaagtttttcgtattttttccccaaaagcaacaggttttcgggttgtgtggcgcacatccgaggcattgacaagatgtgattttccacgagctaaatgtgtcgtctaggaagtcaatctgtcccgtttacgcccatacctttggtagtaacctcacactttaggtgtgtttga

SEQ ID NO: 10527 - DNA, 439 bp, Zea mays
  unsure (1)..(439): unsure at all n locations
tccttgatctcgtanggtccaatataacgaggagctaactngccctttatcccgaatctctggacacccttggttggtgataccttgagataaacatgatctcccacttcaaactgtaggggcttccgcctcttgtcatgatagctcttttgtttggcctgagcagcttctaggttcttcttgatgatcctgacctttgcctctgcctcaagtaccaagtccggcccanaaatttccctttctcctgcttgagaccaatntagtgnggtcctacaccttctcccatacaaggcttcgaaaggtgccatcttcagactggactgatagctgttattgtaagaaaactctgcanaggaaagacacttgtcccaatccttcccatagtgtagtgcacatgctcgcaacatgtcttccaaaatctgatttatcctttctgtct

SEQ ID NO: 10528 - DNA, 414 bp, Zea mays
  unsure (1)..(414): unsure at all n locations
cactaagggctataaagcttgtcttaagctcatcttctttcatcatccatatttgatgatagcctgaatagcgatcccataaactcatgagctctgcaatagctgttgcatcctcaacagaatctattctttgcaatgggaattcatccttcctacatgccatattgagatatgtaaaatcaatgcacattgttcattttccattaccattctttaccatcacaatgcttgcatgccactctaagtatcgtacttctctgattacaccggcactcagaagcctattgactatgtttcgtgcaccgttggctgtatcatcggacatnttccatagcttcttctttcttggtctgatagacggatgtacatatagagaatggtcgatnacatccctgttaacaccacacagatcat

SEQ ID NO: 10529 - DNA, 341 bp, Zea mays
  unsure (1)..(341): unsure at all n locations
catgctcatattttgttcacataacatgatggntcttgcgctagcacttgagagagaccctaggtgacactaggttgtcacaacctatccccgttaaaggaatctcgtcccgatattctggccagagtcctcccaaggtgaagtgaaaggtgagacttatatgaggcgggcgcttattgttactattagggcaaactgctcttcgaatgtcattctccttgcacctacagaatgacagtccttttaaatcttgtttcatgaatactgcgttctgatctaagattatattgctgaactttagataccaacggcaggaagaggggtgggggtgattacgtacc

SEQ ID NO: 10530 - DNA, 469 bp, Zea mays
  unsure (1)..(469): unsure at all n locations
agctntatgggctcacagaatatctaaacatagtgctactaaagtatnctcctttgagcttttctatgggcaggaagcagtgttgcctgtggaaataagtttgaatgctgtcaggttcgctagacaaaatgatctaaccatcattgattattataattcaatgatggataatactgatgaggtgaccgacaagagggtgataactttgggagcaatagaaaaggacaagatcatggtagccagggcctacaacaagaaggtcaaagcaaagtaatttcaagtaggggacctggtgcggaagaccatcctgcctctaaggaataaagaccggaagtttggcaaatggtcgccaagctgggagggtccttataaagtaaaccaggtgtcggngaccataattaggggtaccctcaagacgcctaattctcagctggtgacccncatcagcataaagctgcagaggcctgat

SEQ ID NO: 10531 - DNA, 324 bp, Zea mays
acataaatttctgagatctagaatatttagttcattcctcaacatgcaaaagcgggtcttatcaagtggcttagtgaaaatatccgctaattgatcttccgacctcactccttctaaaatgatatctcctttagcaacatgatctctaaggaagtgatgacggatatcaatgtgcttggtgcgagagtgttgtacaggattattagcaatcttaacagcactctcattatcacacaacaaaggtaccttttctagaactacgccatagtctagaagagtatgtttcatatataaaatttgtgtgcaacaagcacctgcggcaat

SEQ ID NO: 10532 - DNA, 348 bp, Zea mays
cacgcaatgggagtggagagatggcgagagtatcgtgtaccctccgtggcaagaggatggacggtggtgtatttgtgctctcggttggcgtgaacccggtctggtcttgagaaacctggtggcgagttgacatatgcaagggttaagtgctacatatgtcgtgtgattggagatccccaactgggtattaatctattcacgatcgccgttacttcttggatatgaagacttggtcactgacttgcaatctaagtcatggatggaatcataatgagcaacaatcatgttgtatcgatttaagtgattgatgaaattgactagatgcaaactatgtctattaatacttaa

SEQ ID NO: 10533 - DNA, 458 bp, Zea mays
  unsure (1)..(458): unsure at all n locations
cactatcatactcagctctagttcgaagcttccgcttgaaatagatatttagtgtctcctatgatgtnccaggataagaagactgctgctgagactaagctgagcctcgacgaagagacaaatttgtggtttcttatagcgatgtcaaagaccaacacagaataaattaccaaggagattctggaaggattgtctgaggatactggtgacagtgacagctacgatgtggacagtggtggtgaagactccgaagatcgttcatggcgaccaagccattcagtttatggttaatcaactatcaaagaaagtcatcttgtcaatatgagaggaaggtatttccgcggattgtccattgtgagggccgacgaatgggataaaactngcccacaccctgaagagaatgaagtcctagtgtaccgaagctttntgaaagctggactgcgagttactttgagcag

SEQ ID NO: 10534 - DNA, 464 bp, Zea mays
  unsure (1)..(464): unsure at all n locations
agctttaagctctctgacaagaaaattagttcacctagttttacaaaaatgcatcaatgcaggaatgagaattttgagaggtaaaactatgtataaagtagggatatgcatagacatgctttctctttcttttataaaagatatgcaaagaatgtatataagaggaagatttaagtacatgtataaatgagaggaagtggtttacccttttgtacctttacatagagacgatctcttcattgtgggttgtccttagtcttggttacttaagacgtattttcaagacaatgtatggaaatatattgcacaagagagagttctacaactagtgatccttttctaagtcattggtgtcatatatcaagtagatcacaaattgcataaatctatcctgaattctccttntaacttagtgcanatcaagagagacattatatgatagtatatgaggcactaagcaacat

SEQ ID NO: 10535 - DNA, 375 bp, Zea mays
  unsure (1)..(375): unsure at all n locations
ctaagctntctcgagatccccgggaaaccggagcagaatatctggtggtgtatnctcccgcgccccaagcgaagatcgccctttacaaaccatanatcgggagcttacctacccgaagaactccgctgtccacctcatccacaaaggagtggacgcggatcactatatagaaggaggcaaacatcccgagtaagggacgggacctcgccgagtcttctttacggcaccttcaccctcaaaggaggacggaaagatacgcgccatcacagcagctcctttctaccccgacatnctctntcatcgggggagagtggagtcgactcccatctccgacgacgagccgaccatgcaaggtgaagaacctctccagcgtga

SEQ ID NO: 10536 - DNA, 487 bp, Zea mays
  unsure (1)..(487): unsure at all n locations
gcttagatgcanatntcattcataatggtgcatattggtgacaaacaacacaatacagttccgacaatatgtgcaacctataagtaaatgtgagttttgctcctggctctatattagtaaataaggtactaaggccaatgtaatattaaggtgactcgcgtatagagctgacctgaagatagagaagcaattgtaaggtcaaaatcagtcatccaagaattaaaatgcagataatgctaacatgaattagagacatgatttggtacacaaggacttgcaacagtattgttagttttctgtggccccaagaaattgcagacctggagggggacaagaaccaatagttagtgtaaaagtttagttctgacatttcattattttgcatatgcaaatgaaagaaaattagtaagcaatgcatcagtaaattaacatcttaatatagcccaaacaaaaattgaacttgcatattcaccgagaagtaaacatc

SEQ ID NO: 10537 - DNA, 366 bp, Zea mays
  unsure (1)..(366): unsure at all n locations
tctgaactattcngctgcatactcttcgctggtggcctatataatcctgacctgaagaccattccgactagtgtcttggatgctgcgtgtattccacactgcccagcatggacctcatccagaagttgcttcccagtagatgagaggatgcacttcatgaggacgcctgatgcaccctttctatataatgtttccccaatgagtgtgtantgagctgactgtctggcaatacgctcgaccgcaattttgtcatcccggtcctcttcattctntatatacctgatgattggccttctccagtcatcagagtctgactctagttgattcacaatattacactcttctgcttgatccattgagatgctc

SEQ ID NO: 10538 - DNA, 445 bp, Zea mays
  unsure (1)..(445): unsure at all n locations
tgcaagcttgagaccatnntgttagtctatgctgatcagttcgactgtttattaacaacgcctcccagtcaaaagcagcatgtgtattgtataactgtaaatattgccttgattngaataaacttgtttttttgtgctagaactttatttcacgaacttcatatgatagaccatactgtagagtatttctttctcttctcatttcccattanttttatcacttctctttcaacaagaattttctttcttattttattttatgtagaagggtagaaccatatagtctctttggctaatttaatatggttttgttatctggaaatctggactaatatatttatcccatctttaaaagtggtattttgaattattagatcgacatgttaacaactgggtggggatantttatctactatctttactactataatgcactacttttaat

SEQ ID NO: 10539 - DNA, 421 bp, Zea mays
  unsure (1)..(421): unsure at all n locations
gatatagcacaaggcgaggaggccaacactcgtgaagcctaccgaaccctgaagatggattacaataagaagctaaagaagcttgccctcacgaagaanatccaaaagaagaccaagagctaaagatgccagagtgagcggaagaagaaagcccctccagctccacctctctccaggatagagaatatgttcgacgtcgaggatatgntcctagctagccttgatgaccttctcaaggaatttggggcaccttatataaggagttctgaagtaccttagaaagcgctcgcgtgtagtgcgacttgtggtaactgtatgcttgtatgaactggtgtatgaataaataacttggtgaaaaaattgggacatgcatagagaactctcttcttccctgcaatggttcgataaccaccctccgctc

SEQ ID NO: 10540 - DNA, 397 bp, Zea mays
agcttctagtagagtctatgaagccattgtaccggtgatcaataacattccggtagtatgtgagtttccagatgtatttccggaagatttgcctggactaccccctgaaagagaggtagaatttgtgattgagctaaagcccggtacggctccgatttcccgaagatcgtaccgtatgccccctaatgaattggcagaatggaagattcaattacaagacctgctgaataaggggattatccggccaagctcgtccccgtggggttgtcccgccatctttgtgaagaagaaggatcaaaccttgagaatgtgcgtggattatcgacccctaaatgaggtcacaatcaagaataagtacccccttcccaggatcgacatcttatttgatcaactaact

SEQ ID NO: 10541 - DNA, 317 bp, Zea mays
  unsure (1)..(317): unsure at all n locations
ggacttcggncttccgccgccgcgcgtggaccgagctatccagtgagtctccgcccaattccttgcgctcatgtcttctctggcaccccgtgaacctctctgacccatccaattgctctatatcgccgtgaccaggccggactcctcgccgccgacgagcatccccgcctgcgcgcgtggaccgaccgactccggccatctncgactgcggnccgcacacagttgtgatcctcgagacctccccttcgtcctcgaccacttcaccggagcaatctcgccgccggtaagcccctccgccctttctttcgtcgtggtac

SEQ ID NO: 10542 - DNA, 450 bp, Zea mays
  unsure (1)..(450): unsure at all n locations
agcttgagctctggcaaacaccaaccttctttttggatccccttgatagtaagacgatttctatactcaagttaaataaaatataattaagtaaactccttgagtaattggtgtctcatgtgtgattntttccatggcgttacttcataaggatcacaaacatctttgtctcaccttttgaagcaaacacaaatcaagccatgtgacttaaaccatttcaccatatatgatttcaaatcatggcttcaagtcaccttactgatgcatcaacacaatataactcctcatagctgattagttcatcaacttagtgcaagtactctcttcttcaccttagccatggtacctcagtccataagccgtcgcttggcctttacctttgcttagtccctcgagaccctttccttgctatcttcagcctatcaagccatttgagagcacctagagggg

SEQ ID NO: 10543 - DNA, 323 bp, Zea mays
  unsure (1)..(323): unsure at all n locations
agtcctctaaccatgtgcttcttaagtactttcttaagtgtgctcattccaacatgtgcaagccttctatgccatagccatccaagtaatgtnttggtaaagaggcaagttcttaagtttgcatcttcagaggtgaaatacactaagtagagagtgatgtatctaaatcttttgaacaccattgactcatcatccatttntgacacaacaacctctgtaggagtgaataagcattgaaggccaagatcatagagttgacccactgaaagtaagttgaagctcacaggtgcaaccaanagaacatttgaaattgaaatatcatt

SEQ ID NO: 10544 - DNA, 183 bp, Zea mays
  unsure (1)..(183): unsure at all n locations
agcttctaagggagaacatgtaataggtctaactaatgttcaatttgaaaaagatagaccttgtgcaacttgtcaagcagggaaacaagtaggaggctctcatcacaccaaaaatgtgatgacgacatcaagacccttggagaaaantgatatggaccttttgtgacccggcgcctatctgag

SEQ ID NO: 10545 - DNA, 245 bp, Zea mays
acgagatagatcatgaaatcagagatattggaatggcttatcaacaagtacagaggaagaaagaaaagatggccaggctagctgaactgcagaggcagatagacgaagcctctgaagaagttcgtcatcttgctcaggatgaacaacaccgaatgcctcagcaccaagaccttcatcaggagggttttcccaatgaagatgactggtatgacaatttccatcatgggagattatgtttgatgatg

SEQ ID NO: 10546 - DNA, 400 bp, Zea mays
  unsure (1)..(400): unsure at all n locations
agcttaaatgatatttagaaacgttgggtgaagtttgattntaattggacaatgtttgatacctaaacacaaaaaccctagtctttaggtaatatctgccctctgaaacagaatactgactccaaaaatcctagttttctgctaaacaattgatgcatttccttccttggaagtttgattacctttccttgaacacctattttatgaaaaggttttcctaatgcttagtcttgctctagacaaacaaaatgttttgttttgacaaaaggtgatgcttcaagtgggatgggatgttttcaaaaataaaacttgatggtggatccatcatggccatgatgggttcaacatcggaaaaaagatgtacctctgataggtaccaaactttgggttgaaatgataa

SEQ ID NO: 10547 - DNA, 486 bp, Zea mays
  unsure (1)..(486): unsure at all n locations
accttgatactcaagcttatttgatactntatgtangagatntgntaactatcaagtctttgttgtcatgttactacatgtcanattatgttggacaggcccctggcaccctgttctcatcattactgcaagattntatctgtcagacctgttgctgcaccttattcagcaacaataaatntcagattagaaggttntaacctactcaatacttcctcaaggtacttcatcatcttgaattctgattaacttattcgtgaagtatatacatgtaaaccttgatattcccttcggcttatccatttacatgtaaataccatcttctcatgtttgcagggtaatttgttcatttgaagggcgatgtatattacaggaagacatggattctgtagcagagaatgctgagtataaagatagggacatngaatccccttagttgtgttgtatgttcctggccaagaggagaggatttacaatattatacta

SEQ ID NO: 10548 - DNA, 473 bp, Zea mays
  unsure (1)..(473): unsure at all n locations
agctntagagtntcaattgacaaacgctngtgagccatgacctatacattngactgtctcattgatctaaattctaaaattcatattattctctactttgatggtgtttctgcttattatatggaccgttcaatttactacactttagcttctgtcttcaatcgcggtagggcgcccgaaggggcgcctgatgttctagtataatacaagtacgtcatgtgcctggccgtcgccggagccgggcaggtcacaggccatccaaccgcctgcaatctgcaaaggtaccatacctccggacaggtctggctatcggcgaagattgcgtgttccatttgagttgttaggccatttctcaatttcatctcattaaatgagatgccacgttatctaacaagatggcatcagatataatttaatgaagaanaatattttcatcggacatttcatatttttttctaaaactgacacatcat

SEQ ID NO: 10549 - DNA, 469 bp, Zea mays
  unsure (1)..(469): unsure at all n locations
ctgtagtcgntctgcagtctntatattccaactcacacctcgcatgagctccacctatgggctagtcgatgagtctcggatcgagaagaggttgcgccacaatggattgnggtcggngtgaggtttgtacctcttcgaaccctctccttgttccacgggtgatcctgacgcccaccttccttgtcgcaggacgacttcagctaccttcggccgtgaggcatcaccttccatcgagtcatcgtggtcgggcccattagaccctctgcctcttccctatgagttccgagagtgccacgatgctttccacgcaacgctaaaggcatcgaggccgaggtcggtggatgcaccaaggcgtcctcaccttctatganagcgatgngtgtgcangtcggtgggctagtgtatatagggtgctttgtctcatgganggttcatcataccgaacggtcggctcanagatgtcaattac

SEQ ID NO: 10550 - DNA, 464 bp, Zea mays
  unsure (1)..(464): unsure at all n locations
agctttgaggatgcagcangatctagaagatattaagcacgaagctataattgagaatttagagaacaaaataaaggagcaatcagatgcttttgagaaaaaaaactttgagctccaggcagccgaaggcttactggcggaagctgaagcaaaaatatcagaactaaactcgaagcttctccgccagtccgagcagttngaacgagaaaaacaagatctcaatgaanaacttgaagccgaagctcagcagaattcagatttgagaaaactactgacaaatcttcaagaaaaatgcctggaatttagcaacaggtgcattcaacgattaagaaagatnttttactcggttggagctagcagcgaanaatttacccnctcagctgaagatctaccanaaacctttgaacacattgagggggagatngacgagctcgacgaagtcatagctgggcatggtgacttct

SEQ ID NO: 10551 - DNA, 418 bp, Zea mays
  unsure (1)..(418): unsure at all n locations
tgtgcgagccgaagccatcagctttggcacgtgtgagacttcanatataaatataccaagttcaagacttgtgcaacaagaaagaaggagaaaagtcatcagtgtctcttcatcatttgtaaaatatgtgtatagactntatgggtatgtctgtaattttccatgaagttgttcatctttcctatanatagacgcacaatgccctacacacaggggcctgttttgagagtcatagcttcgtatcgcttagccttcgaagaatctctgtgccaccttgtattaaggagccgaagatatatgtttgaaactcatctgatttggaggaaggtggaatacacatgtccaggcatatgagatgagttttatactcgacactcantatcgctcattttatattgtttaatcacatcttctttta

SEQ ID NO: 10552 - DNA, 466 bp, Zea mays
  unsure (1)..(466): unsure at all n locations
agctntacgaagaggaaccttcggctatcttatacttacagcttcatccgaggatcacttctttctataagaccttcggcgacgaagcatagtcccaacagcccttgacaaagaagctactactaaattggctaaaaaggacaaagaaatttttgagaaaagtcctgagccgaagatggctacttcaaagaaaaggaaagctacggccccgaaaccaaaaacgtcgggccatgaggaagaagctcctgcgatgccttctgctgccgatgtggaagaaattctaaaggtaatgactgaacctttgcctatcaagctaagtccgctggcgccacaactgacgaagctntttcagaaggaaaaggagccttcggcaacggaaagtcctggtaagctgaanaacggagaattatccaagtggccgatgttattcatcagacaccaccgctggcatcagcgtcaaaaatac

SEQ ID NO: 10553 - DNA, 412 bp, Zea mays
  unsure (1)..(412): unsure at all n locations
tgtgagggttcttcatcctcacatgtgctaagcggcgatgccacaatcagccatgctagtcttagcaattaagcatgcatctagaccggcctcctctnttgcaaaatcaactaaataaagattgtcgtttaatacacccttaaaagctaatgaatcatcacttcttctaaagacagacacatccacattngtgaatagacaattatatcccatattgcataatngactaacatataacaaattatatccaagagactcaactataaacacattagatatagagtgctcggatgaaatagcaattttacctaacccttntaccttgccttgattcccatcaccgaatattattgaatcttgngaatccttatntttgacgtaggatgtgaacatcttcttcttccccgcatat

SEQ ID NO: 10554 - DNA, 424 bp, Zea mays
  unsure (1)..(424): unsure at all n locations
agctttgngacagggagtcgctttataggctagcgttcccgctgaccaagacttgggctctgttgatggtgccgagttggtccctgctggttcattgcaagctgcttctggtggcgaccttatgccaagtcatcaattgatctcttacgatttgggaggcccttcgttcttctccaatctccaggtattgtgatatattctgggctggcttttacaccgtacgaactgctgtcaacacgctcatttgttctccatatcaagcattggtggacgggatggctagtcagctgaggatgcaagatgctttcgtttcaaaaggagcttcatcccttgcacgttggaatccggtgttgctccaacatcgcgtctctaatttgaggcgacaaagctggttagactctnttcttcttttgctatctcatga

SEQ ID NO: 10555 - DNA, 384 bp, Zea mays
  unsure (1)..(384): unsure at all n locations
tcngctcagtagcagcacaaggaaccgacttaaggaggaatatgctatctattcctcgataggttgtccttaagtcaataataaacatacagggcatgaatctaattttacacaggttgcgccctatgcctataaatagatgaacagtacccncgtactgttcacgctgattggtattcactcgtgcgtcacgctaggactnttgccttctgtcaagccgaacgtacaaatgtaattcaatattgttcttattcatccatgatgatataataaagatatattaatgatgtcatatgattattcatgttatttctcatgtttcatatgcttcttctttcattaacatatactgtgacgatgaaggtacgtccttcatgacattcg

SEQ ID NO: 10556 - DNA, 452 bp, Zea mays
  unsure (1)..(452): unsure at all n locations
agctntccctttctttcgacctagtttgagagctgtgagttacctatctctcgatttcttttcctttttgtcaccttacaggttttgtcctaattccatcctttgatgcgtttttatttgctatcaccattcccttgtcatccatagatcttaccttgatacttatctttaagcctgctctttcaaaaacctcctctcttccacctcaatttgagagtggcaatntacatatctggcccttggacatatcctcttcttttccacttgcaagtattgtcttaactccatcctttgtggtacttatattcttggttcttaagcacatttacctcctctcctacattcttgtctgttattacatttaaacctttataatatatatacccttaccttcacgcttactttgaacctaccctttaaagcctcctaatttccatccctattcgaggata

SEQ ID NO: 10557 - DNA, 388 bp, Zea mays
  unsure (1)..(388): unsure at all n locations
agaagaagcattacaagaaggcacagggcgaggcgcatctatgcaaggagtgggactcggattgctcctcgtccgactccgacaatgaaggactcgccgccaccgccttcaacaaatcaaccctcttcctcaacgagcgtcacacatgccttatggcaagagagaagaaggtatgtactcgcaactctacctatgcttcttcaagtgaggacgaatctagtgatgaggatgaagtagattattcatgtttgttcaacggcttagatagatctaagatagacaaaattaatgaattaattgatgccttgaatgagaagaatatactnttacaaaagcaagaggatttgttgatgaagagcatgatatatttgtgaggcacaaaatctat

SEQ ID NO: 10558 - DNA, 446 bp, Zea mays
  unsure (1)..(446): unsure at all n locations
agctntggaaaatcccatatttttgccatcttccagcagacggatatttctttattgtccgggagacagtataggaaatcaccttcgttagtgccgttgaacactaaggtccccttcgggtatttcagttcccgggcatagtgtttggcttctgcaatttcttcttcagatagtctttttcccgaagcatgtcgaataataaagtcaagatcttcggacggtgcttcggaagcaggagatntagctntttcggccacatccttctccatagccatgccaatatctggagatttttgctcagctctatcctcagttgcggcaggctccatctcagcaggcactgagggcccagcctcggtttcagcgtgacttatagcagcttcggcaattttctttgcaggggaagggagtaatgcccttgttgtctccatgacatcgtccagcac

SEQ ID NO: 10559 - DNA, 317 bp, Zea mays
  unsure (1)..(317): unsure at all n locations
tatgtgagtgcattctacatatgtctgaatatacgcgcagaggaggaaggcgtgctcatcaagagcatgcattctctcaggaggaggcaccccgtcagcagctgccacccccaccctcgatgaccattgagcagatgttcctaatgcagactcaggcagttcaagccattggtcagactctggccgctattcagtggcagcaacaacaacaaccaccaccatagctctacatgccttatatgcccagtgacatacgtgctgaatncatgagaggtcattccccaatattcgctcactcttctgactccatggatgct

SEQ ID NO: 10560 - DNA, 446 bp, Zea mays
  unsure (1)..(446): unsure at all n locations
aaatgtaaacctctctgcgtatctctatagntagtctttaccccttatttcgaaatatgcttaagattaaggaaaatagacaaaggcgcataaataatgaaccagagagcacctctanttttgttaggatccttattcaatatagttcactggacaaatctatcataccctggttttatataaaataagcaggataccttttgttttaataaataaggataacttacgaaaaccctccacaataacccaaggtaaaacaccccccccttgggatactaatatttgtaatgaaacttcgaaaaatataaactgctgttgacatttcacatataatgagtagaagtgccttttgcattaactatgaaatcataactcataccaccactagtttctgtgttttatacagaacctattttctattgatgctgcaaataacctttgacaac

SEQ ID NO: 10561 - DNA, 428 bp, Zea mays
  unsure (1)..(428): unsure at all n locations
actcgaactaatcttctgttaataccctctctcgttgcaacatgacaccacgaagtccaacacaacaagcattgaatgaattcagaattattgcagagcatatcagtactagagacctggttcagggagttttggctttcaaggtttttcctagtttaaaagaatgggaaatgccgaagctaaagggggagaagaaagaaggtgaacttgtgcgtttaccttactatttcaagtttaagaaatactttaaaacaccttgccaagagtggctggatacaattgaagtaatgtgcaatgagatacttggcaattactccacaaaagaagatcaattgatgactgcggccttcggcacccgtccgaagcgaagactgaatcgagtgctggacgctctgtgttttgaataccctgactatgaanatctgaac

SEQ ID NO: 10562 - DNA, 370 bp, Zea mays
  unsure (1)..(370): unsure at all n locations
gcatgccangcggcgaagcaagttggtactcaacatccacacaagaacatcatgacgaccgacaggccgctngagctactccacatggatctattccgcccgattgcttacataatcatcagcgggagatagtattgtcttgttatagnggatgagtattcacgcttcactcgggtagttcttttacaggaaaaatcttccacccaagagaccttaaagggattcttgagactggctcacaatgagttcggcttaatgatcaagaagataagaggcgacaacgggacggagttctagaactctaacaatganagctctcttgaggaaganggcatcaagcatgagttctcttctccctacactccacaac

SEQ ID NO: 10563 - DNA, 370 bp, Zea mays
cagatacttgacttgcatgaatagcactgagatcctgggctgatcgtatcttaatgcaaagatttgctggaagaagaatcgcttctgaagcattgagagtaccacgaaccatgattgcattgtgagggtattccatgtctaccatatcgaatacaactcagtcagtccttgtgccgtgatatatcgaaagtaccggcatgcgatttttcgagtgctcaatctgcttctccgaagccaaggggacggtggcatttggactgtcttcggctttgcatctgtctgatgcctatcaataaatatcactgcactgccgatcaaccaacatatggacagaatctttgtccacaaagataccataacatactggggg

SEQ ID NO: 10564 - DNA, 471 bp, Zea mays
agcttcagctccatctatgttgggaattgcttttgagtctgtccagtttccttcggcccttctggcagcttcctgacttccatgaatagcaatgggtccttggtctgaacgtatcttcatgcaaagatatgctggatgaagaattgcttcgaaggcattgagagtaccacgaccaatgattgccattgtagggtattccatgtcaacaatatcgaatacaacttgttcagaccttgtgctgttgatatatccgaaggttactggcattgcgatttttccgagtgctacaatctgccttcctccgaagccacaaaggggatgtgtggcatcatggatcttgtcttcgggctcttgcatctgtctgaaggccttagcacatatgatatcagctgcactgcctgtatcaaccaaaacattatggaccagaaatcctttgatcacacacgagataaccataacatcattgtgtgg

SEQ ID NO: 10565 - DNA, 305 bp, Zea mays
ctatctttttgtcggtcttctgcactagaagtctagaacggtcacaggtgacttcgatattccggatggtccgacctgtgtgaccaggcttcaccttcgagcattgtggtgggctccgtgtgacttcggactgtccggcataaggtgtcgaacggtccgatgaagggccaaacggtctgagatcgtgcgtagactgtctggtcgtgctcagagccgatccaccgtataatgaagaagacaactacagtttccccggatacaagttcatcgacatatcataatatagttgggactgagaaaacaca

SEQ ID NO: 10566 - DNA, 453 bp, Zea mays
  unsure (1)..(453): unsure at all n locations
gaacgtgatacgtccttcattggtgagactttcttgtatacataatattcaacttgaaagtacaagggttgacgtcgcttgtctgcataactcttctgtcgagcttgggcttctttcatattacgaattattcgcccgaaccttttattctgttcttttaccatatcangcctgaagaaacatctgtcacctagttcagaatagtttaacggagtacgacaccgtctcccatacaaagcttcatagggtgccactttgatgctctcttgatagatgttattatatgaaaactccgctaagggtaaacagtcatcccatttctgtgggaattcaaaacacatgcttgagcatatcttcagtatctgattaccctctcagctgccactgtttgngatggaggccaactgtgaacacttgtacccaggatgttgaaggcttcaaacttggtacaat

SEQ ID NO: 10567 - DNA, 465 bp, Zea mays
  unsure (1)..(465): unsure at all n locations
acctgcngcatgcaagcttgcctttgcctcagtatatttctcactattttatggcgtcgnggagcgcgccaacgacaagaatttcactaccatcaagaaaatgcttctcaacgacaagaagggaaaatgggccgacctgctacctgaagcagtctgggcactgaacacgaccgagtgccgggcgactggattcactccctttcgcctgctatacggatcgngggacatgaccccgcangaaataaaacatgggtcaccgcggaccagcgcttccgccatccccgacgtagacgaaccaacctccaaagacctcatcgacggagaccgtgtcttcgccctgcaggccctcaacaaataccaagctcaaacgaaggtctggcgcgaccacgcagtcgtcccaagagaattcgacgaaggggacttcgtactcgtccgaacaactcggacagagtcacggngcaagct

SEQ ID NO: 10568 - DNA, 348 bp, Zea mays
  unsure (1)..(348): unsure at all n locations
attctccaacacggtggtaagtggcaaccaatcacggtgattagaactntataatggggtgccactccactacatctccacctcacttcgctctcaatatagatacctgcgacgccctccaaactgtgatacgtaccttctatatcaccatggctagcactagcagagcctatcacgataccaccacaatctgatggactacttgggcgtcaaacaatcaaagtattataaaacgtctgacaacgtctctaatcctactctatatattctttatatctctctcaaaacttactctatatccatccatccaatgtctctcatctcgttctaacgaatatcgatatcata

SEQ ID NO: 10569 - DNA, 466 bp, Zea mays
  unsure (1)..(466): unsure at all n locations
agcttctccagganatggatgaatatatcagagctgacaatgattntcggcaaagaagggaagaggcttacatatactatgaaatggctaggggcttcggaggaagatttcaccctaggcatgtcaggtcaatccataataccaacctaagtgatgacaggggaagccaaacacaaaggcaacaacatacctcccaatcatccggggcgcaacanagttccttcatgccatcagctccaagaggcagaagcttcggaggaagatatggagatcagcccaggagactgttttgcttgttctgcggtgaagataaaggccacaccacaagaacgtgccaagtcacgattcagaagtagaaagagattgccgaagctgaagcacgacagaatcaactgaagcaggttctgcacactgcttcatgctattctccctacgtcccagagtacgtaggcaatcagcagcctac

SEQ ID NO: 10570 - DNA, 396 bp, Zea mays
  unsure (1)..(396): unsure at all n locations
ctcagctgactccttcgcttgaacaccggatgtcacttcaaggtcggagaggaggtcggaagccttccgtgtcttgactacgatgtcatcgacgtaggcctcgactgtgcgaccgatgtgttcgccgaacacatggttcatgcaccgctggtacgtcgcgcctgcattcctcaagccgaacggcatggtgacatagcagtacatgccgaacggcgtgatgaaagaagtcgcgagctggtcggactctttcatccggatctggtgataccccgagtaggcatcgaggaaggacagggtttcgcacccagcagtggaatccacgaattggtcgatgcgaggcagagggtagggaaccttcggacatgctntgttgagaccagtgtagtctacacacat

SEQ ID NO: 10571 - DNA, 433 bp, Zea mays
  unsure (1)..(433): unsure at all n locations
gcttctaagggagaacacgtgatatgtctgtctatcgttcaatncgaaagagatagaccttgtgcagcttgtcaagcacggaaacaggtgggaggagcacatcacagcaagaatgtgatgaccacttcaagacccctggagctgctgcatatggacctcttctgacccgtcgcctatctaagcatagggggaagtaagtatgggttagttattggtgatgatttttcccgcttcacttgggtgttctttntgcaggataagtctgaaacccaagggaccctcaagcgcttcctcaggagggctcataatgaagttgagctcacagtgaagaagataaggagcgacaacgggtccgaattcaagaaccttcaagtggaggagttccttgaagaagaanggatcaagcacgagttcttcgctccctacacaccac

SEQ ID NO: 10572 - DNA, 354 bp, Zea mays
  unsure (1)..(354): unsure at all n locations
cgatcagacagagcatcgctctcataatggcagtgcattgtatgagcaggcccgcagaataatggcgccgaggtgaccgtcctgcactttgcgtgccagccaaactaaggttntggtcgctggcacgtcgggctcctccggccgcagcggcggtcgtagccgtacgctgggtaccagattcnctcctcccttcccgctgtgcagtccacgatatacgtaacacgctcctctgccagtacacctgggttctcccggttggagcacgtagcctcgcacacgcactgtgcaatgcatgcccaccttccttgtcgcgtgtcgccagtcgtcacacaacacgacgccgcgccgcgccat

SEQ ID NO: 10573 - DNA, 425 bp, Zea mays
  unsure (1)..(425): unsure at all n locations
acaagatgattgaacagatgactttatctttgagtatctatcgaaggatccatatggagatttggtgtaatctcttgtacttggaggaatgatctatgttcaattaggcttgtgtatatatcatatattgacatttcattgttgttataataaagtagagatgtacaaactcctgtcatgagatatatgatactctccaaacctttgttgagtcatgtgagttgtgcggactcatagatatgagtcgccatactattgttgtaaagctggttctatattgngatgttgaataaaatgtttgtatagtatcaagttgcatcacaaattcttatttagaatgtctttatatatacatgcatcatgatgtcaactcaacgaagaatgaattatgtctttgtgacagtngctccacacactctattctt

SEQ ID NO: 10574 - DNA, 342 bp, Zea mays
agtcttagcaattaagcatgtgtcgagttcagctctatcagaatctactaagtatagctgaccctctaacacacctttaaatgctattgaatcatcacttcttctatagacagtgacacctacattacgtaagagacagttgtagcccattgtgcataattgagatacagaaagcatattgaattataagaatctacccgaaaacattggaatagaatggcaggagatatagcaatttacccatcctttgccaaccctggtccatcccaaagaatactgttgggatcggttttctgagaggagacatctttctcctgtctaggtggcaccgtgtcagatcac

SEQ ID NO: 10575 - DNA, 476 bp, Zea mays
  unsure (1)..(476): unsure at all n locations
agctngccaatacttgtcaaagcaacagcatatgccatcacaccaactgcagaccataccagtaacctggcctttcgcatgctggggactggatatgattggacctttcaagaaagctcaagggggatatactcatgtattggtggcgattgaaaaattcactaaatggatagagttcaagcccattgcttctttaacctctgctaaggttgtggaattcatacaagacataatattcagattcgggataccaaacagcatcatcaccgacttangatccaacttcaccagttcagaattcttcgacttctgcgagcaaaggagcattcagatcaagtacgcatccgtagcacatccaagagccaacgggcaggtcgagcgagccaacggaatgatattggaggcactcagganaagggtcttcgataagaatngaaaattcgcaggaaagtggataagagaatngccttatgttg

SEQ ID NO: 10576 - DNA, 414 bp, Zea mays
  unsure (1)..(414): unsure at all n locations
ttttcttcttaaggttcgtgctattctgtgattgtctgctaagtatacttgtgagaatggaagggtgaatatttattnttcaatcatgtttctatanttntttccttgacaaatatttctgtgtttatctttttgtatgatttttcactgcaaacctcttatttcatctttgacctttgtccgaggcgcatttttcttgtattgtattntcattntacatacttgtttcatgattactcggtgctgccttgtgtatntnttcctgctgactgctattatgtccggtgaggattacgtagtggcttgttatggaattgtacagtgcactcctagatgttagggcctcgattccttttanagaattatttctattatatctgctattgaacgaaatacttctattgtgaggataat

SEQ ID NO: 10577 - DNA, 444 bp, Zea mays
  unsure (1)..(444): unsure at all n locations
agcttgtcaacaatataaacacataagagagaatcctgcttcggcagatcagccgaagcctatgctcctatgtgaagatatagcagatcaaagggtactgctgggatctcagctatctgatgagcaagaaaaaactctgataaggtttttgttcaacaacaaagatgtttttgcttggatagctaatgatctttgtggtgtcaacagagatgtcatcgaacatacacttaatgtggatccatctttcagaccaaggaagcaaagacttcagaagatgtctgatgataaagctgaaggtgctcggaacgaagtaaagagacttctcagtgctggcgttatcagagaagtaacatatccagaatggctagctaacactattatggtgaagaaggctaatggcaaatggagaatgtgtattgatttcacagatctcaacanagcatg

SEQ ID NO: 10578 - DNA, 474 bp, Zea mays
  unsure (1)..(474): unsure at all n locations
ctcagctgtgccggcaggcatcgtgaccacatgagctgccataacctcatgatggcacggcacctgaggaatagccgcttctctgaactttcgataagaaaacaatntcagaaaagttccagttagtacaaaccattcggtcgtggtaaaagtaacatttgaaggaaacctcatcctctccccatttgagatattccctcgctcgctcagcagcaggaggcagcggctgctgtcaacaacaactggctgtncgacaccgcatttaagcttcaccctcccctcgggcctcctccactaaaactcggatagatctcagtgcagtgcttccctgttccctccatcaagaaacagcanagatccagtgcagagagagagagaagcgccatggcactctgaacaagataagaaagagctagagagatctcagtcagccagtctctcacaacacaatgccggcaaccaccaagccgatct

SEQ ID NO: 10579 - DNA, 345 bp, Zea mays
agcttgaggtagcttccatatgtgatgagatttttatgatgagctgcctaacctgcatgctgagttgaccgcaatacatggagtgctgagtttagacctccagctattgatgaatgtcttgactgatgcagctactacaggagaaggtgctattgagaacaatgatcacaacgatgagtgggctgaggatgatcaaaggcgtgacattgatgtcaagatactaatatgtgccaccgatcatcttgcaacaagggtgcatatgctcaacaaggggcgcctcctacaaaatgagccgtttacgaacactgttatgactaatgacaagagcgtgatcggatacaatgc

SEQ ID NO: 10580 - DNA, 472 bp, Zea mays
  unsure (1)..(472): unsure at all n locations
agctngcacccaggtacattggtcccttcactattcttgatcaatgtggaccagtggcatatcgactccaactacatgaaacattgtctgctgtgcataatgtgttccacgtgtcacaattgaagaagtgtcttcgggttcctgatcgaaccgttgaagtgacagatgttgtccttgaaccggacttgacatattttgagcaccctattcgagtcttggatcaaaaggacagggttacctggagaaaaactctcaagttttataagatacagtggaaccagcattccgaagatgaggctacatgggaaactcaagactttntagataagaatttcccaggctttttagcctcatgtaatttgtaaagtatagttagtctttgaataaagaagtgacccccacatcacccctgccttgtaccagaaataaggaaataaaagtatgtcgtgtttccttttccattactcaccct

SEQ ID NO: 10581 - DNA, 335 bp, Zea mays
  unsure (1)..(335): unsure at all n locations
ctcagctctacgtgagcagctagtgtaaagatgagctanatgaaactgaagtatgtcttgattagcaagtagatctctacatagacaataaagaggctccagttctagaaataagaattgtacatagacaataaagcagtgccagacccctacacgacagtgccaggcttaagagcgacactgccgctcaagggtttaacagtcccttgaactaaacatttgcacgtagcctattcacacccctctatgcgtaccagaaccttgcatataatatgtgtgtgcccttgggtacctactacattcttggaatataatgtataatggggattattgcg

SEQ ID NO: 10582 - DNA, 444 bp, Zea mays
  unsure (1)..(444): unsure at all n locations
catgcaagcttgngagattagtaatatgtattacangggttcatctatgttccatattnnaggtcacaataaaataagatgaactatgtttatatacttgtaagtaacacttagggaaatagtaatctattttcaaataaagttaatgtatgttatagtttatgatatatcttgaattcattatcccttatgtagtactgtgtcttttaagatgtgttccaatgtttgtacatgtttggtgtgatgttcatttgtactttccaaatgtattgaatgcatgctcgctttatttagacaacgagcagtccgaggttcctgagtgtgttgttggagacctccctgagcaacaacatggtgaaggtaagtgtcctctgacctattatgtcctacatactttatgattcactgtcccacattacattacttaaacctaagaattgacta

SEQ ID NO: 10583 - DNA, 405 bp, Zea mays
  unsure (1)..(405): unsure at all n locations
gaaagaaatacatgcanggctgtgtggatctcacatcggatctaggcccttgctgggtaaagattttcgtcaaggattntataggccaaaggcagcttctgatgcagcagaattagtccaaaaatgcgaaggttgtcaaaaatgtgcaagagatcagagacaaccttcgtctctaactcaattaatacagcccactttggcattgcaaggtggggccttgatttgctaggcccactttcaccagcacaagggaatntaagatatgttgtggtggcagtagaatatttttctaagtggatgtaggcgaagcccttagccacaataacttccgtcactgttcaaaagatttttttggcaaatattgtgtgtcgcttcggagtgtcgaaggctatcactgtggacaac

SEQ ID NO: 10584 - DNA, 418 bp, Zea mays
  unsure (1)..(418): unsure at all n locations
gcttcacgggctactggcggagcaagccgaagtactggctcttcttgatgatggctggagngggctggccacggtggccgaagctctggcggcaatggcgggcggaattaagctcgtcggagctaatgagagggggctggccggtgagggtgaatgccgtgcgaaatgaggtgcgcccggggaggctttatatgcgccggcgggcaccgcccaaggcgtgggcgcgcggcggactttaccggacgccggaacgagcgcgcgcgcgggttgggcgagctctggcgtgccgaccacggtcgaacacgtgtgcccgtgcgttctgcccaagttttggcgcgtgtggtcgctcatccgagcctgctctcgccttggtcagtgcacanaatctcttctcctccctacaagctaccattcttgt

SEQ ID NO: 10585 - DNA, 348 bp, Zea mays
  unsure (1)..(348): unsure at all n locations
tatctatattgatccctcaattccatcttacaagaaaacagaactggaaatcccgttacaggaggttctcaagtctagctttgcttgaactttatctagtccaaacgaattgagtgcaaaggtctaaatccatctgaatctatgaatgaatgaacataagtngtgcactgaggcaacatgttccagtaaaataatcttgcatttactccacaatatgctctttttgaaaaatgtttcatcaaaggtctttacttacttacttatgcacgacttatgatattcttaggtcttactttgaagatcagatgtctctggctggggagcattcctcacgggaaaactatatat

SEQ ID NO: 10586 - DNA, 462 bp, Zea mays
  unsure (1)..(462): unsure at all n locations
agtcacctgcngcatgcaagcttgtcaacaatataagcataagagagagaaggctgcttcttcatatcagccgaagcctatgctcctatgtgaagatatagcaaatcaaagggtactactgggatctcagctttccgatgagcaagaaaagactctgctaagatttttgttcaacaacaaagatgtctttgcttggacaaccaatgatctttgtggtgtcaacagagatgtcatcgagcattcacttaatgtggatccatcttttaggccaaggaagcaaagatgtangaagatgtctgatgataaagcagaaggtgctcggaacgaagtaaagagacttctcagtgctggtgttatcagagaagtaacatatccagaatggctagccaacactattatggtaaagaaggctaatgacanatggagaatgtgtattgatttcacagatctcaacanagcatg

SEQ ID NO: 10587 - DNA, 338 bp, Zea mays
  unsure (1)..(338): unsure at all n locations
ctaagcttgtgcttntagtattgaatttacaggatcacctattcacccccctctatgtgctctcaaaagcgtgctccattactttctgtacccctaggcaaaccaccatatattgatggtgaagattattgtatgtcgagtgataaaatgaggcaccatctaacctcactccatgaaaacatttgggatattgttgagtatggagcgcacgtacctaacgtgggggacaaagactacgactcggacgagggccgccaaatatgcactttactaccaagccatgttataatcctttcctcttgtgtcgagaggagtatacaaggtggaagggtaaagag

SEQ ID NO: 10588 - DNA, 413 bp, Zea mays
  unsure (1)..(413): unsure at all n locations
agctntatggtgaataagatggcttgcaagaagtcaaggttgttcagctgagaagagtcctgcagcattgaagaccgttgtaacacctcgtccactcttggaccgacgatacttccttctggcagccctctaggatcatatatcatccccacagttcaacacgagtattttgtacgcactttgtcctcattcatgcgcacctgagaagacttctaggtctgtcacccatcctaagattgctctatgctaatcacgcttaaccccaaggttcttacgagacaggcttctgaaaaagaagatgtacacttgtgatatgagtactctattaattctattaagccttgtgccaggatatcaccattcactgaggccacgatatcataatccacccccttagaagaccgacgtcctcg

SEQ ID NO: 10589 - DNA, 386 bp, Zea mays
  unsure (1)..(386): unsure at all n locations
aatcggctgcgtcatcggcaattgctcttctgtggtggaagaccaccgcgggaacgttcggcatcgtgggcaactccatctccgcctctacagttggtgagtgcctatntagtatgttcagattatccttctcgtcgcatagtgaggctcagattgattgatatcgcacccagatgccgattggctatacttcggccatggcgccgccgtgtcagtgcgtcgtggggggggggtatgacgtctctaacgtccatatcgggatgaaagacccagattatatagaagataccggttcgggtgggtacaacgagcgccatccgatttggatcggtgggatgagcatcaattgtaggatattttgaatcttgcacgttaatgatcgatcc

SEQ ID NO: 10590 - DNA, 429 bp, Zea mays
  unsure (1)..(429): unsure at all n locations
ccttgatactcagctntagagacatgagagatccanagataacaacaacatccattattctatatggatatgccatttagagataaaattgataaaacaagtgtcatgatcctcagagaaagagtatgagaatgatcagaaatgagagatctaggcaattcaacatccgatgcttgagaacgggctatagcagataaccagataacgaggcagaatcattaagggatccagagattcggatgataaagcanacatgagtcacaagagnaaggattatcagatccaggcgaaaggagaggtaggcacacaggatcagctaggatgaataacagaaatgctatgaagttttatgggcaaggatatatggaaagaaacgtggccttgtagggtttgtcaactagacaccacaaaatttttttgacacaggcc

SEQ ID NO: 10591 - DNA, 433 bp, Zea mays
  unsure (1)..(433): unsure at all n locations
agcttttctcatctcccgacgacagaaattttcttgctgtcggggaggcaatacaagaagtcttcttctccactaccattaaatattaacgccccctttggatatttcagttnttgggcatagtgctgggcctcttgttcttctttntctgataattttttccccgaagcatgacgaanaatataatcacgaattttgggggatgcttcggggacaacaacaccggttttttcaacaaaagttggctttgttattttttctgcctcactttccaagggttttacctttgcgggctctgagggcccagcttcggcttcagcctcttgctctggaactttagaaccaaaagtttcaactggtgtttcaggagtgacagcagccttcttcggaggtgtgcttgaagaattgatcgtttccagtacatctagcacat

SEQ ID NO: 10592 - DNA, 444 bp, Zea mays
  unsure (1)..(444): unsure at all n locations
tcactgcacctatanngtggtgctcgtggcctcacgggcggagctattccaataactccgggaattcctcaccagtgatcggngacatcgggaacccgtgccgaggcgtggagtgcttccccgccttcataaatcctggtaagcactcccttgaactgttagccatactcgtagttacgtaaagcgttacctggggtggtatttgggcactgatgggccgttcgcggggtcgctggcggngttgcctgcgccgggtgtcctgcgccaccgtggtccggtatcggnggaagaagaaacagccctggcctttggatcggtgggcaaaggctatgattagaatgtcgggctatcggatcgagactgtagattgatgatcggacaacttggattangagcatgggtaccggttcgtgtacattaccgcgccgtcgtggaataaaatcg

SEQ ID NO: 10593 - DNA, 446 bp, Zea mays
agcttaactcgggtcaaacctgacaagtcttattttttaagcttttagcacttaaattcttacttttcatgcaattattggttcttgaaatatgcatgaggtactgcacttagggggagtattcaaaactcaaatctttcttgaaaacccctagtgcaagccaaaatgcaaatttcaccatttgcctattttccctaaaaattatctagcctatggcaaaatattttgaaaagtatatgagggtgccaatacctgtcccaacaagtgttattttgtgtgattataagttgggatttggtttggttaggagatagatagaaaaattcaaaattttccaatctcccctctgtctgggctcaccggacagtccggtgtgaaccggacactgcactgtgcaatgtccggtgcaccggcagccgcgcgctaaaatccaattcttctgtgcg

SEQ ID NO: 10594 - DNA, 428 bp, Zea mays
  unsure (1)..(428): unsure at all n locations
ctcagctgatgctatagatatcgaacaagaatatagtactacagatatgtattgatgttggnttgggtaacattaacataagcaaatgataaaggcatcaaagcatttcttctattagaaaatatgttcccactgtaccttctttcctcggatgaccactctaggttcaccttggatcaccatgtantttgtacctccaacaaaaagacaagttggtgcaagagttctaggttcatcanagtccaacaacttcctcatcctttaacagcaacaagcaggagacataaacatgagaactcagccagtcagtctaagagtgcttcatattatatagatcatagaaactcttaacagaagttcttaaaacaaaanaatgtgtctaaacaaacaccangaactgaagattacaacaaaagtggcaccttttt

SEQ ID NO: 10595 - DNA, 473 bp, Zea mays
  unsure (1)..(473): unsure at all n locations
agctntagaacatgtacaatgtgaacaaaaccttatgttctaaagccaaagtttttggtgttgaaaggactccgagaagatatttaagaatcttctatgaagagaagacgtgtgtgacacgtctatgcagcgaaatgacattattgtactcccttaaatgtgaagagcaactacgtaacagggtgtgggcaaaagtgtaaattcacatgaagatgtaccagtgtttaaccctataaatcgatgaacagtacaaccactataggggttggctattctaaaacatcgtgcatgtagcattctcgcctctagagagcctccgaatgtgtaacaatgtcgaagcttgcacacaaaaagtaaactcctttaatgttattgtgtactttaagtcttggatggtttgtacatgaacacatgatcttcatgctgttgattaattttgtaatatcaagtttttgattgaatgatgaacttat

SEQ ID NO: 10596 - DNA, 407 bp, Zea mays
  unsure (1)..(407): unsure at all n locations
ctcagcttggcctcgcaattttatattttagctgtctttctgccagcgttgatctctcaggactatagtaccgttatcgtgtggctntggaggctggttgttgaccattacccgtcccagcaaccagtgtaccatatctagctgttcaacgcatctgactccgaggccgactacatcgggtcagctgaagtttaccctgaataccgctctattctgtagattgtattattcgcagaataacagttacatatagatatagatatagatatagatatggataagctactgaagatagtctgactataacattctagtactagttcttcgaagaacanagtattggctggttcttcggatagttggcgagtatcggatataacacgaaggtcaggaaccatggatgcacc

SEQ ID NO: 10597 - DNA, 477 bp, Zea mays
  unsure (1)..(477): unsure at all n locations
agcttatatagggagaacacattttgggactaaccaatgttcattttgagaaagacatggtatgtagcgcatgtcaagcaggaaagcaagttggtgttcatcatccacacaagaacatcattacgactgacaggccactctagctactccacatggacctattcggcctgatcgcttatataagcatcggcgggagtaagtactggctagttattgtggatgattattctcgcttcacttgggtgttctttctgcaggaaaaatctcaaacccaagagactctanaggggttcttgagacgggctcaaaatgagttcggcttaaggatcaaaaagattagaagcgacaacgggacggagttcaagaactcacaaatagaaggctttcttgaggaggagggcatcaagcatgaagttctcttctcctacacaccacaacanaatggtgtagtggagaggaagaatagaactctattgg

SEQ ID NO: 10598 - DNA, 369 bp, Zea mays
  unsure (1)..(369): unsure at all n locations
gtagcataggctaataatatacgaatggactctagcctatctacaggtgcataggtttcaccaaaatccanaccttcgacttgngagtatcccttggccacaagtcgggctttgttccttgtcaccacaccatgctcatcttgcttgttgcggaacacccacttggttcctacaacattntgattatgacgtggaaccaaatgccatacctcattcctagtgaagttgttgagctcctcttgcatcgccaccacccaacccgaatcttgtagtgcttcctctaccctgtgtggctcaatagaggaaacaaaagagtaatgctcacaaaaatgtgcaacacgagatctagtggttacccccttatgaatg

SEQ ID NO: 10599 - DNA, 449 bp, Zea mays
  unsure (1)..(449): unsure at all n locations
agctngagaaatacctggatacagttcgaaggcttgaagcttctttcgaagggttttctgtcaagaatattccacgaggagaaaatgagcacgctgatctgctagtcaagtcagtggcacaggggctgcccttaccttcagaagtattttttgagacaataagagcaccttcggtggaacttcttgaaagagcggtgctcaatatatctcctgttcatagtgaagattggaggactgagattatatcttttctccaaggcaactgcctttcagatgacgaagcttataataagagaatggaggcaagagcacgaccatatgtaataatagagggggagttatacaaacatggagtctgctccccattgctcaagtgtctatccagagctgaaggtatagaattgatgaaggaaatacacgcaggaatgtgtggatctcacattggatct

SEQ ID NO: 10600 - DNA, 411 bp, Zea mays
  unsure (1)..(411): unsure at all n locations
tactgcaagcaccccggtgcaagataatatatgcctcatccctcctcttgggtntcatcttgcatcaacccatctgggcagggacacgcggcacanaattcactagtcggttcggtagagggtcccccgggtccaaaacaccgacagttggcgcgccaggtaggggctcactgcgtgtaaacaacactttcccttgaggttccagatggagaatcttcagcagcctcttcatgagagggaaatgtgcccttgggccatttctaagtattttggtgattgagtgcanacacaacggcttaaatgtgaaaatatgctcatggatgaacaaagtgcanatcacaagtaaaggtatgtttctaagccttagtacattagttntgtgtactaacatcttgtctaagtggtagaaac

SEQ ID NO: 10601 - DNA, 177 bp, Zea mays
  unsure (1)..(177): unsure at all n locations
agcttgatgtagcaacctcatgtgatgantttgttcaagaagagcaaactagtctacatgctgaattgactgaaaaagatgaagtgctgactttagacaaccaaaaattgaagaattacttgactgatgcaactactagaggaaaagttgctttgagaacaatgatttccaccatga

SEQ ID NO: 10602 - DNA, 337 bp, Zea mays
atcttatctgagccgcaggcgagagaacaccttcccttcttttcgtacacagcgaagcatagaacataacatttccctttcttccgaagctcttcttttcgtacacgaagaagctcttctctctctttattttctttttgctgaagcaaccacttatgctatgatgatgattatcctacatatgcctggatgaatgttatgaatgcagatgctatgatgcaatgtgatgtgcaaatgaatgtccaaacacatatccgaagccgtaatcacagccattatgcccttagagacagtcgcatatcagcgctaactattcgctggaagctctgcattccct

SEQ ID NO: 10603 - DNA, 472 bp, Zea mays
  unsure (1)..(472): unsure at all n locations
atgcaagcttgtgaagactcttcatcccaacatgggctagttggcggtgccaaagccaaccaatgttggtcttagcaattaagcaagcgtagagtttagctctattgaaatcaactaagtatagctgaccctctaacactcccttaaatgctactgaatcatcacttcttctaaagacagtaacacctatatccataaaaagacagttgtagcccattttgcataattgaaaaacagaaagcaaattgtaatctaaagattctacaagaaaacattggagatagaatggtcaggtgatatagcaattttacccaatcctttgaccaaaccttgatttccatccccgaatgtgatggctcgttggggatcatntgttttctcgtaggaggagaacatcttctccccagtcatgtgggttgtgcacccgctatcgatgatccaacttgagccccccgatgcataaacctacaaa

SEQ ID NO: 10604 - DNA, 499 bp, Zea mays
  unsure (1)..(499): unsure at all n locations
tgccttcgcctcagtataccacccgcaatcncaacggagtgtggaacgctcatatggcataatgaaagggaagtaggcttacatctatttcctaattgattntggtggttgaattgcccaacacaactaattggactaactagtttgctctagtctataagttctacaggtgccaaaggttcacaataagccaataaaaagaccaagaaaagggttcaaacaaagagagcaagggacaaccgaagtgtgccctggtctggcacaccggactgtccggtgtgccaccggacagtgtccggtgcaccangggacttcaagctgaactcctcaccttctggaatattcagaggcgcttcgctataattcaccggactgtcctgtgtaccaccggacagtgtccggtgccccaagggagagcgactctgaactcgccagcttcgggaatcgctccngctaaattaccngactgcctgtacacaccgactgtctgatgtgacac

SEQ ID NO: 10605 - DNA, 288 bp, Zea mays
cttacgacggcgatacgcgaacagacagtgttcttgtattttcttcttccggcgacgcacgacggtgagcggtggtgctgctgaacgcgactttgacaatcgacgaacgacagacagagtttcctcggcgaggactgaggcgcaataagagcgagccccgcatggcttcgagagagacggtccgctcctatttataaagggaagaaaaggatagagaaggtcgctgaggaggaactgccgttgtttcaaccaccaataatggcttacatcaaaggacggaataatggg

SEQ ID NO: 10606 - DNA, 404 bp, Zea mays
  unsure (1)..(404): unsure at all n locations
actaagctcgctcttagtgcttcttcttctgagccctggcgttagttatatttgaatctgctagcgcctgngactgaatcgaagatctatgcatataatcaatgcagaactcattgagttccgcagcccactttccaatccttccagtagcttctctggttctcataatatccttcanaggctgtgatgaaggaacaattatatggtatacttgaaaataatgtcgaagcttcctggaggccattaaaacagcatacagcaccttctccaattctgtatagtttttctttgataaactgagaactctggaaacaaagtatactggagcctngcttttcaattgcccttcaagcttctnctgaacaagcgccgcacttactgcagagtgcgaagctgccacatac

SEQ ID NO: 10607 - DNA, 467 bp, Zea mays
  unsure (1)..(467): unsure at all n locations
agctntaccaaatggacgngaaaagggctttcctcaatggacctttcaaggaagaggtctatgttgagcaacctctcggctttgaagatagtgagtaccctaaccatgtttacaaactctctaaggcgctttatgggctcaagcaagccccaagagcatggtatgaatgcctaagagatttccttatcactaatggcttcaaagtcagcaaaaccgatcctactctctttactaaaactattgcaaatgacttgtttgtatgccaaatttatgttgatgatatcatatttgggtctactaacaaatctacttgtgaagagtttagtaggattatgattcaaaaatttgagatgtcaatgatgggggagttgaagtatttcttaagatttcaagtgaagcaactccaagaaggcaccttcatcagtcaaaccaagtatattcaagacatactcaccaagtttggaatg

SEQ ID NO: 10608 - DNA, 358 bp, Zea mays
  unsure (1)..(358): unsure at all n locations
cttcttcattacatgctttctgcttcgaagctgtagcttttctcttcttcgaagcatctgttttcggctcaagcttcaggcttttctttatcaattggtcttccatcgctctcatcgattattagcttctctattcanagcaccagccactctctctctcttctgccttcgggatccttgctagccgctcgagtcgggaactcaaagtcagagcatcatactcggtccaccttctttcggatggtgccgaacgctgagtcattnagtgatctctttttagagaatngccgagaattcattgcacatacttcatcgtgtcaccactcttgcaggcactttgaatgttcttgattatatg

SEQ ID NO: 10609 - DNA, 477 bp, Zea mays
  unsure (1)..(477): unsure at all n locations
catgcaagcttagcagacgaaccgaagctcaatagataatgatgaagctttaatatttagntgnggaagaaactctaagaactcttgtattaacctttgtaaagaatatagtaacttaagaattagattctactctgtacattttgtccataccttgtaatatatttttacctttccatcaatgtgtgaagtgcttcgatgtgaacgaaacttgtactttttgagccgaaggcgaaaaacaccttcccttcttttcgtacacaatgaagcattattctgttttcgaagctgctttcttagagccgaagcaactgtttgtatctgtatggtatgatgatgatgatgatcttatgtatgtctaaatgaatgtttatgtatgcaatgtatgatgtaatgtatcgtgcaaatgagtgcccaaacacacacatccgaagcttcatccacaaccttcattccctaaggaatgactgaaatctc

SEQ ID NO: 10610 - DNA, 347 bp, Zea mays
  unsure (1)..(347): unsure at all n locations
tagcttcggtctctgccagcaagccttctgttgattgaagttcgaagtctttcttttcgatgatggcttgatgctcttttantttgctctctaaatttccaattatagcttcgtgttttttggcctccaaatcctgctgcatcttcagagctttgctcagtagcatgctctgcacaaaaacaagtttcattagtaacattttcattatccacagcaataaggaacagagaaaagaatgttacctttganatggaataaaataagctgccgacgatatgctgtcgtcggtagcggctgatatctgtctctagctttcggaagaccgatactcttgacagagtaccgat

SEQ ID NO: 10611 - DNA, 262 bp, Zea mays
attgacacatgctagtacttcaatggatatatatatgaatgccatgcatactgtgctcaaatagcctaaaccaaacctatccaaactaaagtgacctcaaaagatcaggttaatgcttgcataattctagacagtaacacaacggttattggttttcctcataactcacaaaatatgcgttccatagacagtaactaggactttatggaaagcttacaaagtccactatagccttggtttatcatcaccacaagatttgcac

SEQ ID NO: 10612 - DNA, 332 bp, Zea mays
  unsure (1)..(332): unsure at all n locations
tctgactanaacgacgcgagcctcgttccctccggtacacggtggttaccgtgacacanacacggntgtcatggtctcgcaggactctcgccccactcagtacaattacaacagctcgcgcaagagcacgaggggtgtatggtttatctaaactcactcaactaactagggttcacctatagcaagcgctaaagcgatctaactaacctaaacacttcgcanagcacctacgctaatcatcgagtgattctattaagcacttgagtgtatgagcacttgggaatgtctactatatgccttggtatgttgcttgggctcccacaccttggaat

SEQ ID NO: 10613 - DNA, 467 bp, Zea mays
  unsure (1)..(467): unsure at all n locations
agcttgaagtcaaatcaaaaagtttgcccctatatactttgtatcagaagttcttagtttatcaaagaanaattacacagagttggagaaggtactgtatgctgttttaatggcctccaggaagcttcggcactattttcaggcatacaatatagttgttccttcttcacaaccgttgaaggatattatgagaaatagagaagccactggaagggttggaaaatgggtcacggagctcaatgaattatgtattgattatgtgcatagatcttcgattcaatctcaagcattggcagacttcattgctgactggatgccaggggctcaggaagaagaaacgaataaagatgctgaagttnggacagtattttgcgatggatcttgnggaaccttcggagcaggagcagctgctatgttggttgcaccttccaaatntaaaacttgctatgcaacaagacttgatttca

SEQ ID NO: 10614 - DNA, 379 bp, Zea mays
  unsure (1)..(379): unsure at all n locations
attgctcttatgctctatgcaaaggggtttctgtttgtagaagtgtgattatgggaaatagggagagctcttgacatctttgatcaatctcttttgaaatgactctctctatgcctcaacatgtgtgtttgacatagaaatagagatttgagtctgatttgcacaaacaaaccaagtggtggcaaaggatgatccatatatgccaaaattgagtcagaatcaatttcgaatttatttgaagtgatttcgcacttgttctagttgctatatgttgtgttggcataaatcaccanacaggtggagattgaaagggaaatgtgcccttggngccattctatatattatggtgattgagtgccaactcaagtgcttaaaatgt

SEQ ID NO: 10615 - DNA, 447 bp, Zea mays
  unsure (1)..(447): unsure at all n locations
agcttaacaagtgcgaaaaagactacaccaaactgtccgctcgaagaccgactacatgcgcaccagactaacataacaaatacaccagaccaagtacgtaacgccttcatgagcatagctgaatgtgcgaaggcacacaacctcatcatacaagctattacatatgtacaagcgagggcatcacactntacatcggctcaaccttcggaataattcccatctccctatagttaaatagcattatcctcagctcctcacccgcaaaaagacttcgcagctccccctcacctgcactcacagcggccggcaaggacaacagttcctgcctgccagccctactcacacgaagccgaccgtcgtncgcctcactcactctacgcttcgcaaccgccctttcgccgctacgcccagcactcggaccaggcacaacttcagcatccgcagcat

SEQ ID NO: 10616 - DNA, 445 bp, Zea mays
  unsure (1)..(445): unsure at all n locations
actgacctgtagaggggtggccatggcgaggtgttcactgtggtgtggaatacgannattgggganacgtgaaattgagaggctctggtggatgatcagaggtgagagttggtgtgctgggtgcgtaataacctagtggacctagttgatcacttaatttataacatcgatcggcggtggcgtccaattntgagagagcgcgctggcagccagagagaggggaagtcactagcgcaagcgctatcgtggctttcactgaagtaatgacttagacgatggactgactatctacggcggtctatggcgacgtggtgaaacggctgacggtgttgcagggccacgaggaacggcggcacgacagcgatggtcgcgtgggcacgttgctgcgcaactggacatggtgacagagcactacagtgtcccatcttcatctcttgccaagatc

SEQ ID NO: 10617 - DNA, 457 bp, Zea mays
  unsure (1)..(457): unsure at all n locations
ttcaacgccatgtgcctctatattatcacaagggatctagtccaagagcatttggcctttaaagtgtggatgtgggggatggatatcccccgggtccactcaaggacaaaaacttcgcttggggccacatggcagttgaccctctgtggcatcccgtcatgggccgggcgaatggaaacaatggaagcaggctgacccaggggcgtgagaggcccacgtccgagctagtcgcggtttaggcatgaatgtgtcaagcccgttcgcttttctcgcgctcgacatcctaaaacacaagggatatctcgacatggaggcaccggattttcctcggaacaatagaagttgtttgatactaattaggagataagtaggaagagtgcgatcaacatgcgtgcgggaagcaccccatggtcgtgtatataaggccanagggggatcccctcgattntcatctcat

SEQ ID NO: 10618 - DNA, 435 bp, Zea mays
  unsure (1)..(435): unsure at all n locations
tctanagggagaacacgtgatanggttgactaacgtgcaattctaatatatatagaccttgtgcagctggtcaagccagtaaacaagtgggaggagcacatcacagcaagaatgtgatgaccacttcaagacctctggagctgctgcatatggacctcttcngacccgtcgcctatctgagcataggaggaagtaagtatgggctagttattgttgatgacttttcccgcttcacttgcgtattctttttgcaggataagtctgaaacccaagggaccctcaaacgctttctcaggagagctcanaatgaagttgagctcaaggtgaagaagataaggagcgacaacgggtccgagttcaagaccttcaagtggaggagttccttgaggaggaagggataagcacgagttctctgctcctacacaccacagcaaa

SEQ ID NO: 10619 - DNA, 428 bp, Zea mays
  unsure (1)..(428): unsure at all n locations
agcttcaactgaagggtccttagtactgtcaacagagagaatggattctggctaggccgcgaccttgacatgttcacacccagccttttctaagaatgtcgtaatccctcgagcaccggaaaaagcacaaaagtcttcacgatcgctaaggatctcatcgaaagcttcggcttcttcacctatccattggataaccccttcaggatcgacgcgaataaatttttgttctgaggaatacacccccaccttcgcaaagctatcttttagcttctttgcgcagtccaagatttttcataacacctttccctggaatcatgaagctcttaaatattcttttctagccttgaacttgtccattcacttatctcttgctntgccttcgtaacttcaaaattttctttgatttcggaaagttttttcttcacatc

SEQ ID NO: 10620 - DNA, 409 bp, Zea mays
  unsure (1)..(409): unsure at all n locations
tctcctttccggaataatctacggtattccggacagtcgatttagtatagttgtagatgaacctttggcacctgtagagcatataatctagagcaaactagttagtccaattatttgtgttgggcaattcaaccaccaaaatcatttatgaaaaggtttgagcctatttccctttcaaaggattattttgatataaccacattgtttgaatatgcttgcaaagctgaacgtgaagtgcanggacgacgatcaaagacatatactaactcttttgctaggccgggttcgacacacagctcaactcctttcagccctgcaccttctacgcctagcactacaccgcgcacagggacggccaaggcagcggtgccctctgccaaaaggcgccgttctttcataggatgtacat

SEQ ID NO: 10621 - DNA, 447 bp, Zea mays
  unsure (1)..(447): unsure at all n locations
agcttcagcgccatgggctgccgcactgcagccactggacccaaatcaggagaccctttctcttcgagaggcccgaagccagaagaggaagtccactagtccaacactccaggaggaggagttggaccaagaaatcagaaacatggagataatccatcagcaagtacaaaagaagaaggagaagatggctcgactagctgatcttcaaaggaagatcgacgaagccactgaagaagtacgccatcttgctcaagacgaacaagatcgaaggccccaacacagggagcttcatcaagaaggcttgttcaacgacgatggatggtatgatgattntaatcatgatacatatacttttgatgatgcttctnccttgacagcagaactgtaggctattccatggccctcatcatataagtcacctcagcttcccatgtatgatggggcatt

SEQ ID NO: 10622 - DNA, 301 bp, Zea mays
  unsure (1)..(301): unsure at all n locations
ccttcgacttgtgagtatcccttggccacaagtcgagctttgttccttgtcaccacaccatgctcatcttgcttggtgcggaagacccactnggttcctacaacattttggttaggacgtggaactaaatgccatacctcgntcctagtgaaattgatgagctcctcttgcatcgccatcacccaatccgaatcttggagtgcttcctctaccctgtgtggctcaatagaggaaacanaagagtaatgctcacaaaaatgtgcaacacgagatctagtggttacccccttatgaatgtcac

SEQ ID NO: 10623 - DNA, 426 bp, Zea mays
  unsure (1)..(426): unsure at all n locations
agctngtccttngagtcggattcaaagaacactcacctgactaattgccatgttgaaatccagcattaagcgtacatttcccccttgtttgttatgattttctagggacctaatcatgttaaaatccccaataaatatgcatggtatacccgctagcaaagtaatgttggagaacaactctaagagcaactccaatagttctctaaacaactctctaaatcttaaatctaagaagtgaacagaaaaatgtttctccaatggttctctaaatagacttgctaaatttatttagttgctattcaactctatttactctccacatttagcaactcggtaaaaactccctaaatgcagttgacatcaatttcttcacactagcgtgattatttttccatttcccacacagtgaggtagccaggtatatca

SEQ ID NO: 10624 - DNA, 379 bp, Zea mays
  unsure (1)..(379): unsure at all n locations
gctggagcatacaagtacagaagggagaaggctgcttctgctgatcattcgaagcccatgcttttatgtgaagatatagcagagcagaaggtgctgctaggatcttaattgtccgangagtangagaaaaccctaataaggttcctgttcaacaacaaagatgtctttgcatggtcagctaatgatctctgtggtgtcaacagggatgttattgaacactcgctcaatgttgatcgattcttcagacccacaaagcagaggcttcgganaatgtctgatgacaaagccgaaggtgcttggaacgaagtataaaagacttcttagcgctggaatcattagagaggtataatacccagaatggctagctaacaccgtcatg

SEQ ID NO: 10625 - DNA, 445 bp, Zea mays
  unsure (1)..(445): unsure at all n locations
agctntgccggcctcagggatgggcgccaccatcagtgtttcatcaggagcggcatcagaagaatcctcagctaacatatccagcatggcacttatctctgcgtcacttggattcaaaggcacctcaaaatgaacctgcctctcgtcgtcaggaatttcttcgagtgaagcaaccaaagcactaacttcttcgggagagggtcgcactctaaggcccaaaccgctatcaccagcaggaggatttgacacaaaactggtaaaggccttggaaggaggcagattccaggccgagtatgaaataggagcgccgatgttcgacaccttgcctttgagtatcatctcgagctgactcaccaagtccacaacaggaattcttctgttggttacccgggttgaatcagccaggccccaatacagatatgtggggtatgctctgtctttcagt

SEQ ID NO: 10626 - DNA, 298 bp, Zea mays
  unsure (1)..(298): unsure at all n locations
gcctatagtgctagaagagagtacaatagacttaattcttggcatgaactgggtaaaaaagtcgaatggagtaatacattgtgctagaggaacaatagaactntctagtcctgatggggatagatttgaagtcacagttgcaccacccacttctaacacacctgttgtatacatgatcaacggtaaatttgtgggagatcacatcanaattgttagagagttcccagatgtctntccagtggagatactccgaatgccaccagatagggaagttgaatttgttattgatctcttacct

SEQ ID NO: 10627 - DNA, 468 bp, Zea mays
  unsure (1)..(468): unsure at all n locations
agcttaaggcgcctgtggaggagtggtacacggttgtttgtttgacacgttntattaaacttgctctctctattactacgagaaattgagaggttgaagggggttaacagagaggtatgcaacaagacaatagagctgatgaggctgattcagaattgggttcagagtctattcaagtaactgaagaagatctgncttccttgtgtttgtattggagtgaaggggtagaggtaaagattaaatgcatagcttanaagtttggggctcactctgtactgaagaatatccagttttgcaatgtttgaaggcagtgaacagggagactntatctgttagccttgggtggattgtgctgggcagcaaaggaactctatcggtttcacccctgagaaatatcacgcttttgatttgtaattgcatgtcctccgngtagagcttatctacctgtacaaggaggattattatgtg

SEQ ID NO: 10628 - DNA, 473 bp, Zea mays
  unsure (1)..(473): unsure at all n locations
tgctagtcctgcgtggttgtgtccagcttgtctggctgcaacttcgctntcctcttcgcgtcgctgttcgccgggtcaagccctatgttgccgtatccctgtttcagttagtcgtgtcgcgccatcattgctctgtcgcaagcttgctagccaccattatcttgaccgcgtcagcacgcgactgtggtcgtgttcatcgaattcgccaacgctatgttgccgattcgactgtcgtcgcttcccgtgttgtcgagcccgtcgtttccatatcttgtactccgtgtttcctgctcgcgggcgccctctggctcgctcggttaattccaatcgcgtcgcgattccgcggtaacgtcgtcgtcgcgcgtcggagacagctctattacgtaccctctgatcgcgcgaccgtgtgcattagagatccagaatatgtgagacataaacacgcaatttccaacctaacaatgttgatcgaa

SEQ ID NO: 10629 - DNA, 433 bp, Zea mays
  unsure (1)..(433): unsure at all n locations
gcttctaagggagaacacgtgataggattgactaacgtgcatttcgaanaagatagaccttgtgcagctggtcaagcaggtaaacaagtgggaggagcacatcacagcaagaacgtgatgaccacttcaagacccctggagctgctgcatatggacctcttcggacctgtcgcctatctgagcataagaggaagtaagtatgggttagttattgttgatgacttttcccgcttcacttgggtgttctttttgcaggaaaaatccgaaacccaagggactctcaaacgcttcctcaggagagctcaaaatgagtttgagctcacagtgaaaaagataagaagcgacaacgggtccgagttcaagaaccttcaagtggaggagttccttgaagaggaagggatcaagcacgagttctccgctccctacacaccac

SEQ ID NO: 10630 - DNA, 453 bp, Zea mays
  unsure (1)..(453): unsure at all n locations
ctaagctttatnntacttnctacatgctttaatgtcttccttttcggtgggtgatgcctaatggggagaagtttanggaccaaagcaatgaaaactatatcaaacaccaaacaccacacatntaaaattntatatctacaaatggtatttcaagtggttttggttatttggtcctaaaataggaagtaagtgaattatggagttagggggaggcttaagtccataatatcactaagtggggataaaacatgcatcctatcaagtagattgcatatnttcattcaaatgggttgtataattgcttgctttggttgtgttgtcatcaatcaccanaaagggggagattgtatggaaaatggaccccgggccatttggctaaatgaagtttggtgttngatgaataacacaacctgtgaactaatgtgtttgctagtgtttaaatgttatagtcac

SEQ ID NO: 10631 - DNA, 442 bp, Zea mays
  unsure (1)..(442): unsure at all n locations
gcttcngtcaatcacaacttcgttctcctaatggcatggacattgntgtttctgccagccctcacaatagacatatcccgaaagtaccttcctctcatgttctcaagatgactctgtttgatggtcgattttccgaagattgaatgacttggccgccagggccgatcctcagaatcttcatccccacttttcgcatcatagctatcgctgtcaccagtatcttcagacaagccttccagtatctctttagtaattntctctgtgtttgtttttgccattgattcaataaatccagcaacataaggatccacagacttcttctcctcaaacagcttcgcttcttcgatcatcttcgtttccgcaacaaccttcttttcctgagacatcttttctccagacatggtgagaacgctgtttttaaaccgcaagtcagagagcttga

SEQ ID NO: 10632 - DNA, 350 bp, Zea mays
  unsure (1)..(350): unsure at all n locations
ctaagcttcccagctctcaacccagcagatacttataggagaaccaagatcgttctcttcggacttctgtcgctcgcctgcacgcgtagaccgagcaatccgctgagccgatcttcaattcctcgcagacataccttccttgatccctggtgaagctctttgacctatntgattggtcaattgtgccgnggataggccggactcctcgtcgacgacaaactcccccgcctgcgcacgtggaccggncgactccgaccatacctgacggcgacccgcacatcgtcgtgacccttaagactctccctacactcttcggcacctcacaggagcagtctcaccggcagtaagcc

SEQ ID NO: 10633 - DNA, 472 bp, Zea mays
  unsure (1)..(472): unsure at all n locations
agctntccaaaaaagtcttgggatcacttttttggtagtctatataccaagttacagctggttgaactataaagtctgaacgttttttggtggtctagagaccaagttacagttgtttgaactatagagtctgaatctgtccaaatatggatagagaagtctgtttgtattaactgactttgatatgcattgaattgacctgatatgtttaccaatgaattgtagaaaattctattagctttctaaaaagtctaggatcacttgatttggacacctgagactccaattatggatttttgaagtgagtagtcgaattctgtccaaatctagacataatttatgtttacttctgtttgacctttctaaaggtcgaatcttgttgtgatggcaatacaaaagttatagaggacttcataagctttccagaaagtcctagtttatcattttaagatgaatatcttgtgagttatga

SEQ ID NO: 10634 - DNA, 430 bp, Zea mays
  unsure (1)..(430): unsure at all n locations
gggatattcttcatctgagcactatggacattggtgtgatacataataatttttcttcacgaagcatgaaaagaagggaaggtgttttttcgccgaaggctcataagcggtacgtatgtaaagtttcatgcatcgtanagaaatgaataatgaacagagactngtatattacattcaaatataccaaatattacataaatcacacttcaactgtttttcctaataacacctagtcttctcttaatactacttcggcagcctcatttagaagctggtcaacaactntatccacgatagtttcggccatttgttaatttcgtcatcccctttggtgagggcaacaaacgatccncacgttctgagggaaacaatattttgcatactatacataccgcgacaaagtngaataaaaatacaacacgatacaata

SEQ ID NO: 10635 - DNA, 455 bp, Zea mays
  unsure (1)..(455): unsure at all n locations
agcttcccatntgctnntgggacgatgactgggttggccagccacactgggtgatgaacctcttcaatgaagccagcgtctagtagcttcctgacctcctttcggatgaagtcctgccactcgatggactgtctgcgaggcttctgactcaccggcctggcatcggggttgatctttagatggtgctcgatcacctccctggggatcccaggcatctacgacggctcgcatgcgaacacgtcggcatttgcctggaggaaggcgacgagcgcgagttcctatttttcacctagatcacccacaatgcgagtggtgtgggtggaatccgcagtaagccggatggctttaacggngatgccgtctgcctcggatgngtgcacctttggcaccttanggagcgcctnggtaccggagggtgaaagggtcccccctncgtcgtccgggcgagcattctc

SEQ ID NO: 10636 - DNA, 321 bp, Zea mays
  unsure (1)..(321): unsure at all n locations
gatggcctacgactactacgcgtncggtgccgatgacgattttacgctgcangagaacagggaggccttctccacgatcttgtgagctctctctctctctctctatatccatatctcctcatacttcactcgctttgctatcctgtcttcttattcttcagctggtgtacgagcagcggctgatgagataaggcaactatgccagttagtaaaccaccatcactatgttctgtcattgatcagacgctctgcttctagcactctatcaaggtttcagtctctgtacagctctgctgctcatttatttagggagactggaat

SEQ ID NO: 10637 - DNA, 468 bp, Zea mays
  unsure (1)..(468): unsure at all n locations
gcttcctttaccccgaacgttatcactcttcttggtgagactctcatgtagacataatcttcaacttgaaagtacaagggcttgcgtcgnttgtctgtgtaactcttttggcgagcttgggcttctttcaaattatgtattattcgttgaaccttctcttctgtttcttttaccatatcaggcctgaaaaaccatcgctctcctggttcggaccagtttaacggagtacgacaccgtcgtccatacaaagcttcaaagggtgccattntgatgctctcttgatagctattattgtacgagaactccgccaatggtaagcaatcatcctatttctgcggaaactctagaacacatgctcgcaacatgtcttcaagtatctgatttaccctcttagtctacccactagtttgtggatgataggccaaactgtggagcaacttagtacccaagggattgtgaagttctttc

SEQ ID NO: 10638 - DNA, 448 bp, Zea mays
  unsure (1)..(448): unsure at all n locations
gagatggcgagagtatcgtgtatccacctggctagaggctagatggtggggtactaagctctcggttggcgaggacctgttctggtcttgagaaacccggtgcaacgtgacgtatgcaagggttaagtgctacatatgtcgtgtggttagagatccncagctgggtattaatagatacggatcgccgcaattctcggatatgaagacttgatcttcgaccctcttcgtagataacaagtgaaactaaagatgctataatgaagctagtgtaggacaagtgaatgctctagattatgcaaatcttgattatgaacagacttaactgggaagaaatattggcctaggatccctaatagtaaacttctacaaaatgagtccttgaattgaaggcttaccttgatcctacaacaagctacgcttgaagtctttcttatgcggtagtcttgtg

SEQ ID NO: 10639 - DNA, 435 bp, Zea mays
  unsure (1)..(435): unsure at all n locations
agctntntgagcttangtttcaagacgtgtttgcgccatgtctggggagaagatgactgaggaaatgaagatgactgaggagacgaaactgattgaggagacaaagttgtttgaggaaaagaaagctacggatccttttatcgccggattttttgagtctatggcaaaaacgaatacagagaagattactaaagagataatggagggtttatctgaagatactgatgacagtgatagttacgatgtggagagtggagatgaagattctgaagatcggccctggcgaccaagccatgccgtcttcagaaaatccactattaaacagagtcaaattgacaacatgagagtaaggtactttcgtgacatgtctatcatgagggttggtggagacaacatcgtccctcctcctgaggaaaatgaagttgttatttatcg

SEQ ID NO: 10640 - DNA, 349 bp, Zea mays
  unsure (1)..(349): unsure at all n locations
ctatgttatggatggcttttgagtcagtccaattaccttcggcctttcttgcagcttcctgacttccatggatagcgatgggtccctgatccgaaggtatcttcatgcanagataggcaggatgaagaattgcttcgaaagcattgagggtgccacgaccaataattgcattgtaagggtattccatgtcaacaatgtcaaacacaacttgctcagttctagtggttgtgatgaacccgaaggtcactaacatggtgatcttgcccaatgctacnaatctgtcttctccgaagccacagagaggatgtgtagcatcatgaatcttatcttctggctcttgcatttgtct

SEQ ID NO: 10641 - DNA, 468 bp, Zea mays
  unsure (1)..(468): unsure at all n locations
agctncgattaagntctttcaattactatgattttcttttgtttattaancaaagatgacaacacatgtgcgtaactcttaatgtatcacataagcaactcattaagctacccatgtactttgcagccaatatgaagtttgctagtaccaccaccaaggcagtgattgagcaattgggaaatatgttaaaaccgtgatgcagtcaaacacgtttgaccaggaaggtgatgtcaatcacatgtttctcagttaacgctaacttgcttatgacttagaatgaagtgatttgttttcttatcatatacatgttgtntggttgctcaatggaaacactattttcttaannaaaaattattactctctagcacttgtcaacatacatcatagttttgcttaacatgatanagagcagggtcatctatctatgtaaggaaaacgaaggccatatacaaaggggggcaattggat

SEQ ID NO: 10642 - DNA, 371 bp, Zea mays
  unsure (1)..(371): unsure at all n locations
gtgcagcttgtcaagcaggtaaacaagtgggaggagcacatcacagcaagaatgtgatgaccacttcaagacctctggagctgctgcatatggacctcttcggacccgtcgcctatctaagcataggagggagtaagtatgcgctagttattgttgatgactcttcccgcttcacttgggtgttctttttgcaggataagtctgaaacccaagggaccctcaagcgcttcctcaggagagctcanaatgagtttgagctcaaagtgaagaggataaggagcgacaacggatccgagttcaagaaccttcaagtggaggagttccttgaagaggaaaggatcaagcacgagttctccgttcctacacaccac

SEQ ID NO: 10643 - DNA, 464 bp, Zea mays
  unsure (1)..(464): unsure at all n locations
agcttgccttcgcctccgtgtaccacccncagtccaacggagtcgtggagcgcgccaacgacaaaattttcacagccgtcaagaaaatgctcctcgacgacaaaaaaggcaagtggcccgacctgttacccgaagtggtctgggcgctgaacacaactgagtgcagggcgactgggttcacccccttccgcctattatacggatcggaggccatgactccgcaagaaataaaacatgggtcgcttcagacagccgcgtcggccgtccccgacgtagacgagccgacttcgaaggacctcatcgacggagaccgcgtcttcgccctacaggctctagacaaataccaagcccagacaaaagcatggcgcgaccacgtagtcatcccaagggaattcagcgaaggggacctcgtactcgtccggacagctcggacagagtccaggggcaagctggagcccaagtgg

SEQ ID NO: 10644 - DNA, 387 bp, Zea mays
  unsure (1)..(387): unsure at all n locations
cttgtattgcatctatggcttgtctatacctagtgagataaccgccaacaaagcgagtgaaaaagcttaacttcggatcaaacttgantaagtcttagttttaagctnttagtacttaaattcctacttactatgcaattattggttcttgagatatgcatgaggcactacacttatggggagtattcaaaactcaaatctttcatgataaccctagtgcanagccaaaatgcanatctcaccatttgcctattttctctaaaaaattatctagcctatggctataatatttgaaaattgtgagagaatatatganggtgccaatacctatcccaacaaggggtattntgtgtgaatataagttgggaattggtttggttggaaact

SEQ ID NO: 10645 - DNA, 461 bp, Zea mays
  unsure (1)..(461): unsure at all n locations
agctnggtcattntattgctaactgtcccgacaatgatagtgatcaggatcaagggaacaagagggagaanaagaagaactataagaaggcaaagggcgaggctcatcttggcaaggagtgggattcggactgctcttcgtccgaatccgacaatgaaggactcgccgccaccgccttcaacaagtcatccctcttccccaacgagcgacacacttgcctcatggcaagggagaagaaagtaagcactcataatactagtacttatgcttcttcaagtgaggatgagtctagtgatgatgatgagatagattactcatgcctattcaagggattagatagaaccaaggtagacaaaattaatgaattgattgatgccttgaatgataggaatatacttttagaanagcaagaggattttgtgtatgaagaacatgataaatttgtagaagctcagaaatct

SEQ ID NO: 10646 - DNA, 424 bp, Zea mays
  unsure (1)..(424): unsure at all n locations
tcgaagttaactctaatattntagcctcagtttcagccatcatgccttctgtcgattggagctcgaagtctttctcttcaatgatggcagattgctcttttattttgctctccaagttntcaattatagcttcgtgctttttgtcctccaagtcttggtgcatcttcagagctttgctcagtagcatgctctgaacagaaacaacttatgttaagtaatattttcattgttcacggcaataaaaaccagagaataacgttgttaccntgaagttagaataaaacaagctgccgacgatatgctgtcgtcggtagcggctgatgtctgtctccaacttcggaaaaccgatactcttcgatagagtacagataaccttatgctcagtctggtctcgaatacagactagtttgtcatcatctacacc

SEQ ID NO: 10647 - DNA, 408 bp, Zea mays
  unsure (1)..(408): unsure at all n locations
agctntattccagtgtacccaggaccacgaagaatatctccaggcgtatgtccgaaggtttctgcatctgagggcacaagcaccaacagtgcccaatgaaattgtcattaaggccatgattaaggggcttcggccgggaccttcagcgcaatactttgctaagaagccaccacaaactttggagaagctgctccaaaagatggatgagtacatccgggccgacaacgacttccgccaaagaagggaggaagcatttaggttctctgaaatgaccaggggcttcggaggaagatttcatacgaggcatgtcaggtcaattcataactccactcagtgattatagagggagccaacagcaaaggccacaatactcttcgcaagcttcgggacaacaacaaagctctgttc

SEQ ID NO: 10648 - DNA, 346 bp, Zea mays
  unsure (1)..(346): unsure at all n locations
aaaagactgcttagtcctcgatagcttacctgttggctaacactaaatgtcagggacatgaatgtaatttcgcccaggctgtgtcctatgcctataaatagatgaacagtaacaccgtactgttcacgctgatttgtaatctcttgcgcgtcactcttgtcttttcaccttctatcaagccgaaggtacaaatgtaattcgaataccattgatgtttgttcctattcatttaatgaaggaaatatgaatagtctaatgatctgaaatgattattcatatttcctttgggttcatatgtcttagnttacatcctcgcttattgaaatgaagaaggtgcgtccttcat

SEQ ID NO: 10649 - DNA, 377 bp, Zea mays
  unsure (1)..(377): unsure at all n locations
ctatgctcctatgtgaagatatagcagatcacaaggtactgctaggatcttagctatctgatgagcacgaaaaaactttgatagcgttcttgttcatcaacaaagatgtcttcgcttggacagccaatgatctttgtggtgtcaacagagatgttatcaagcattcgcttaatgtggacccatctttcacgccaacgaagcaaagactttcanagacgtctgatgataaagctgaaggtgctcggaacgaagtaaagagacttctcagtgctggtgtcatcagagaagtaacatatccagaatggctatccaacactcgtatggtgaagaaggctaatgcgatatggagaatgtgtattgatatcactgatctcaac

SEQ ID NO: 10650 - DNA, 204 bp, Zea mays
aggccctggcctaaccctgaccacgggggcggggaataccgaacacaattacatgcgctccggggaaatgagcgcggccaagcaaagaggggggaacccgaagaatatcaagagcgtatatgggggctgaaacacgaataagaagagcaggagcagacgtgggagtggctggccaaggagcgcggaggaatttaactccctggg

SEQ ID NO: 10651 - DNA, 410 bp, Zea mays
actgtccgacatgattgtgatctgatcaacggaacacgagggagaagaagaagaactatcagaacgctgagggcgaggcacatctatgccacgagtgggattctgattgctcctcttccgactccgacaatgaaggactcgccgccaccgccttcaacaagtcatccctcttccccaacgagcgtcacacatgccttatggcaagggagaagaaagtaagctctcgaaacttcacttatgcttcttctagcgatgatgagtctagtgatgatgatgacatagactattcatgcttattcaagggcttagatagatctaagatagataagatacatgaattgattgatgccttcgatgatatgaataagctattagaaaagcaagacgacctcttatatgaagaacatgat

SEQ ID NO: 10652 - DNA, 220 bp, Zea mays
tgaagccatttttagtagcataggctaataatatacgaattgactcaagcctagctacgggtgcataggtttcaccaaaatccaaaccttcgacttgggagtatcccttggccacaagtcgagctttgttccttatcaccacaccatgctcatcttgtttgttgcggaagacccatttggttcctacaacattttgattaggacgtggaactaagtgcca

SEQ ID NO: 10653 - DNA, 437 bp, Zea mays
  unsure (1)..(437): unsure at all n locations
agtcacctgcggcatgcaagcttgtccacgaccgagatggcatggacagtgaatgctatctccagactcacctgtgaccggactgaggagccactgtatgccacatgaggattggacaaacagagaggccacaagagggctggtgggtggctggctggctggcgtangccttggagatgaacgcagaccttggagaacatgcgtcggacctgggcgaaaccctatccgactctctcggtcgtacaactagaggaggtatgatgtcnctggagggtcnggcgctgtgcaggttgggcgccgtggggtgtcgttgtttctttagtggcaattgcgggtaattttgggcanacattgagtgaacgttcatatctggttatttgaggagctgttntgagggagggtggagcatggtttttcagcttccacgtttctataca

SEQ ID NO: 10654 - DNA, 216 bp, Zea mays
ttgtatgggctactgtgtcttaccccgctaaattggtctgaacctggtgaaaggagtttcttcaggcaagacatggtaaaggagacagaagagaaagttcaatgaataattcgtaacttgaagaaagcccaagcttgacagaaaagttatgcagacaagcgacgacaacccttatactttttagttggggattatgtctatctaaaagtctcaccg

SEQ ID NO: 10655 - DNA, 366 bp, Zea mays
  unsure (1)..(366): unsure at all n locations
aacccatgctagtcttagcaattaagcatgcatctagactggcctcttcttctgcaaaatcaactaagtagagcttgtcagcttatacacccttacaggctagtgaaccatctctatttctcaagacagacacatgtacatttgtaaaaacacaacgatattccatattgcgttattgactaccagatatcaaagtattttcaagagactctactaaaaacacattagatatagagcgctcatttgagattgcaattntacctaacccttntaccttgcctagagtcccatcaccgaatattattgaatcttgtgaatccttattcttgacgtatgaagtgaacatcttcttcttccccagcatat

SEQ ID NO: 10656 - DNA, 216 bp, Zea mays
tttatatgactatggtgtaagaaacgactgccggtttctgaggcaacttttaatatctacagtagttgggcaaaattcaagagttaagatggttattcctttggatattccatgtggatcaccatgttgccttattaacctaacctaggaaagacatgttatctatcgaaggcctaccaacttaatccttgacctggtgatccctatgatgggcat

SEQ ID NO: 10657 - DNA, 407 bp, Zea mays
  unsure (1)..(407): unsure at all n locations
ctgcagcttcgcaccaatgatctagctcttcagctctactagatctaaaccctgtgctatcttgttggtgaaggcaagtgtcctctgacctattatgtgccatttattgtataattcatcaacccgcataccatgatcaacctaaggattgactagctttgtatttaccttgtgcttgattacctttngggttactatgggtagcttcatgctattgctttacttttatcaatgaacatgatgggaacacttatgaaacgatgtcgtcattatgatcatgatgttggactagtgatactttacggggctcgagcggtttctcgagtgcctctccgtaaagatctgttcgtgggatgaccgcctacgaaaacagtgcaaccatgacggtggaatgggacgcccttagc

SEQ ID NO: 10658 - DNA, 215 bp, Zea mays
tttgaacgttttattcacatgtcgggaaaaatggtaaccggtaaacctagtacctgagtgaagccgggcgcggactttatccctcatgcgacctgagactgggtctcccatgctagctatggtgggtacaagtgcggccactacacgacggcagtcggggtcagtggagcattgtatgccaaggcggtgaggcctggacgcgaacggggaatcga

SEQ ID NO: 10659 - DNA, 434 bp, Zea mays
  unsure (1)..(434): unsure at all n locations
gcgtaccgactccaactaccctaaacctngtctggtgtgcataatgtgttccacgtgtctcaattaaagaagagtcttctggttccagatcgaaccattgtagtcacagatgttgttcttaaaccagacttgacatattctgaacatcctattcgagtcttggatcggaaggacaggattacctcgagaaaaactctcaagttttacatgatacagtggaaccatcattccgaagatgacgctacttgggaaagctcagatttcttatataaaaatctctcaggcttttaacccacccctgccttgtaccaaaactcaggagatataaacgtgaagcatttcttttgcctacttccctaaggacttgatctcggacagattctttatggggaaggagtacaccctgggtactgtacaaactgatctacatataa

SEQ ID NO: 10660 - DNA, 426 bp, Zea mays
  unsure (1)..(426): unsure at all n locations
cttcatccccatatgtgctatacttgtatgccatagccagcccatgctagtcttagcaattaaacatagcgctagaccagnctcctactttgcaatatcaactaaataaaatttggtcgctagtacacccttaatagctaatgaaccatcacttcttctaaagacagacccatctacatttgtgaataaacagttatctcccatattacggagttgactcacagacaacaagttatattcaagcgacttaactaagaatacattatanatagagtgctcggatgagataagcaatttttctaaccctttcaccttggcttggttccnatcaccgaatatgagtgaatgttgggaatcctggtcttgacgtaggaagagaacatcctctttttccccggcatgtggtgtgtgcattcactgtcgata

SEQ ID NO: 10661 - DNA, 216 bp, Zea mays
tcatgtttgtttggcttcagttccctctagataaattgctggacgaagtcctaagaaccttcaaaatttaccttcatcagcttactcccgaagctatcatcaagggggggatctttatatgggccatgaggagccattggacttgagccaaatgcaaaatggttctgcaacatccatgagctgccttatgatatgaaagctaccggaaaagagcaa

SEQ ID NO: 10662 - DNA, 507 bp, Zea mays
  unsure (1)..(507): unsure at all n locations
agcttgactcgtggccaaaggatactcccatgtctaatgtttggatttcggtgaaacctatgcacccgtagctaggcttgagtcaattctcatattattagcctatgctacttaccatggctgtaagctttatcaaatggacgtgaaaagtgctatcctcactgggccaatcaaagaagaggtctatgttgagcaacctcccggcttttaagatagtgagtaccctaaccatgtctatatgctctctaaggcgctttatgggctcaagcaagccccaagagcatggtatgaatgccttagagattttcttattgccaatgggttcaaagtcggaaaagccgatcctacactctatactanaactctctgaaatgacttgtttgatgccaaatttatgtcgatgatattatatttgggtctactaacgagtctacatgtgaagagttaatatggatatgacaccgaaatctagatgttatgatggggagttgagtatttctatgattc

SEQ ID NO: 10663 - DNA, 213 bp, Zea mays
ttggattgaggtaggttccaggccgagtatgccacgggagcaccaacatttgaaactttacccctgaggatcatctcaagtcggcttaccaagtcaacagaaggaattctcctattggtaacccgagttgagtcggccagccctcgatacagatatgtcggataggccctgtctttcagtggctgaatgttcttgaaaacaaaatcagtgacc

SEQ ID NO: 10664 - DNA, 382 bp, Zea mays
  unsure (1)..(382): unsure at all n locations
cacagctcatgctctgttccaatgtacgcaagaccactaagaataccttcatgcctatgtacgaaggtttttgcgactaatggcacatgcacctacagtttccaatgagattgtcattgaggccatgattaagggccttcngccaggacctatggctcaatacttcacaaggaagcccccgcanactctggagaagctgcttcataagatggatgagtacatctgatctgacaacgactttcgccaaagaagggaggaagcttatatattctctaaaatgaccatgggcttctgaggaagaatccatccgaggcacgtcaggtcaatccataactccacttcaggtgatgacananngaatcagtctcagatgtcacaatat

SEQ ID NO: 10665 - DNA, 189 bp, Zea mays
gaaaaggctgcttcggcagatcaaccaaagcatatgcttttgtgtgaaaatataactgagcagaaagatgttgttgggatctcaactatctgatgaacaggagaagaccttgataagatttttgtttaacaacaaagatgtttttgcttggacagttaatgatctatgtggcgtcaacaaagacattat

SEQ ID NO: 10666 - DNA, 212 bp, Zea mays
tcaatttctttttgaattgaaattgatggtttcggaaattacaatttggaagtttccggggttgaagggacatccttggatgaaaaatcagtgctcaacctgtatttcctggacagcggcgactattccactgtgccgtcaatcaatggttatgggtggatcaaggcttcacagcaagtctggttccaacaaacatcttcaagtttacaggt

SEQ ID NO: 10667 - DNA, 392 bp, Zea mays
  unsure (1)..(392): unsure at all n locations
atgcaatggcgaagcatgagattagtgtgattgaaagattaagggtacatacgaatgttgaagagctccgcgactccaaaagaagatgctacgaattatccttggaatgcgccaagactctaaagaacagttttgcagaggtgggagcatactcttccgagcagaagttcatccgcggtgaccccgatggtgttgtccagtggatctgtggagaagtcgaagcctttgacgatattntaagtgaccgatgagacttctgcgcattcngtggcgcacgagtggtcgtggcgaccttatagaaagccggttttgaacatgttaatggtgcagctcagccggggtttgttttctcggcggatgacatcaaagacccatcgactgaagcttctact

SEQ ID NO: 10668 - DNA, 213 bp, Zea mays
cttttgttttcccaacttgggttaagttttaccccattaatccctatttagggttgaattccctatccagggtcctatttgcaaaacacttaaacaatacaacttgtttgaaatttttgcctagtgaatgcactctacgtgtgtcaaacatatgcaatgctaatgcttatgatgccatgctcaagttttagttacagtaacaccaggggtgtt

SEQ ID NO: 10669 - DNA, 208 bp, Zea mays
tatcaataattaatgactctttttgcagaaatgcttactaaaagtggatccttaaaaatccaattttaatttgttaggttaagtaagattacctgcaactagtgttctttctaccctagttcaaacacttgacctgcactagcaaatttcttaacaacccttcatctttactggatttctacgtataggtcagtgaccaagtcttcat

SEQ ID NO: 10670 - DNA, 202 bp, Zea mays
aaaaccctaagtaaccttagaggaacagagtcacaaaaaaagtcaccgcaaaaaacaaagtcagagaccacacaacatagcccccggagatacccaacaaatctaagataagaacacctgggaaaacacctaaatcccaagaacacactagggaccaaacggagcaaaaaaaagtcaactaatagggcataaagatgcaaaa

SEQ ID NO: 10671 - DNA, 438 bp, Zea mays
  unsure (1)..(438): unsure at all n locations
gcagcttccagagagttagcatgatacatcatattgttctataatgactcaactctatctagcctagtaccccaagggtgcaaaagctaagctagctgcgaggagtccgactatccaacttctaagccttttctgaacacctagtgagcgaacgaagcaacactcgactcggtggaaggtggtcttcccgagccagcagtgtccacactagaggcaggctcatctnctccctcgatgtcgacgtcctcgtttgcctcctggtcctggatctcctggtggtgcatgtccangtgctcgttagcctcancaagctgctgctgagtgttaaggagctgatcctctataacctcgatggtgttctccctggtgcccactagctcctccaattcttggatatccgtggatagctgcttcacctgcgagttcttctccaccatt

SEQ ID NO: 10672 - DNA, 220 bp, Zea mays
tgaagccatgttatttagcataggcaagtaaaatgcgaattgattctagcctagctacgggtgcataggtttcaccgaaatccaaacctttgacttgtgaatatcccttggccacaagtcgggctttgttccttgtcaccacaccatgctcatcttgcttgttgcggaagacccacttggttcctacaacattttggttaggacgtggaactaaatgcca

SEQ ID NO: 10673 - DNA, 442 bp, Zea mays
  unsure (1)..(442): unsure at all n locations
aagttcaccaanacccattccttctactggtgaatatgctttggccacaagccaggcgtttgttccttgtgaccacaccatgctcatcttgcttgatgcggaatacccacttggttcctacaacattttgggtaggacgtggaactaaacgccatacctcattccttatgaaggtgttgagctcctcttgcattgctagtacccaatccgaatctcttagtgcatcctctcacctgcatggctcaatagaggagacaatatagtattgttcacaagaatgagcaactcgagatctagtagatacccncttatgaatgcaccgaggatggagttgacgggatgatctctttgaatcgcttggtggactcttaagtgtggcagactttgccctgtatttcttgatcatatgtcttgtcttgagcaacttcatcttccccttgat

SEQ ID NO: 10674 - DNA, 215 bp, Zea mays
tcggcgatggttaaaaattttggcagcaaaacagtgcaaatagcaatgaatgctgtggtaacttcacacctactcgtctgtttatataatactgcaggtaagaaggcgaagcgccaggatttttacaccaggcggacacccgctcgcactcactgtgtggtggaccgcaaagaccaaacagtaactctgcaaggtgggaccgctacgcgctggga

SEQ ID NO: 10675 - DNA, 383 bp, Zea mays
  unsure (1)..(383): unsure at all n locations
aaagtgcctttctctatgtgccattctgcgaagatgtctatgccgagccacctctcggctttgaagacagtaagtatcctaaccatgtctataaactctctaaggcgctttatgggctcacgccagccccaacagcatggtatgaatgccttanagatttccctatcgctaatggcttcatagtcggaaaggccgatcctacactctttactaatactctttgaaaatgacttcgtttgtatgcccaaaatatgttgatgatattatatttgggtctactaacgagtctacatgtgaagagtntagtataatcatgacacaaaagttctagatgtctatgatgggggagttgaattatgtcttgggatattcagtgaagcaac

SEQ ID NO: 10676 - DNA, 215 bp, Zea mays
tatcagcagttttttcttttaagaaagaaggctgcttcagcagatcaaccgaagcctatgcttttgtgtgaagacataggagagcaaaaagtattgttgggatcctacctgtctgatgaacaggaaataactttgttaagattcttgtttaacaacaaagatgtttttgcttggacagccaatgatctctttggtgtcaatagagacgttattga

SEQ ID NO: 10677 - DNA, 422 bp, Zea mays
  unsure (1)..(422): unsure at all n locations
tgcagcttaagaatctggatgaatctgcgattatcctctctagtccaagaanactccggacttggtgaacagttggtgtgggtttccactccagaatatctctgactntgctaggatctagcgcaattcctttagctgataacacgtgccccaaaaattgaatttctttcagccagaacgcgcacttgctgaacttggcatatagctgatgttccctgaggcgcgtcaatacaatccgtaaatgctgagcatgggcttcttcattcttagaatatatcaagatatcatcgatgaagactaccacgaacttgtccaattcaggcatgaacaccgagttcattaagtaagtgaaatgggcaggagcatntgtgagcccgaaagacattacacaagattcaaacaattcatatcgcgtagtaaac

SEQ ID NO: 10678 - DNA, 217 bp, Zea mays
tacccttttttacatgctgccctagggactaaaatctagtctgcaaagttgtgtcctaaccgaagaaaggaaggtgacactgttcctgttactcaggccttccaacacattcttgactatctacttctgcagctaaggggtgttcaacatctgtgcatgaagtagatgtggcattgcataatctgcagctcctagaggaccctaatgtgggcttcat

SEQ ID NO: 10679 - DNA, 242 bp, Zea mays
gcaaggagagacactacacaaaacgcaagcgcgcgtgtctttacgctcggcaaggccaagacgaaaaggcggtcacgcacaaactggtagaaagagcgagagaggaaagcgaagctcggccaagggaagaagcacaggccaccagacagacgcaacacttggacgacacgaccagcgaacatgaggagctaaagagcacccaaggggatacggccccaagggaggaaacaactgcaactgag

SEQ ID NO: 10680 - DNA, 373 bp, Zea mays
gtcacctgccgcatcaagctcgtatagacagtccgatcatgcctcctgtctatccgcgtgaacgctacaaatcatcttaccaaatgcaacaccttggtgttggattgatcttcaacgggcagatggtctgcgcatgacgccggacggtccgcgcatagtgttggacgatactcgactttccttcggacaacctcgtatgaaggtgtgcatctggcatagttcctgtccgaagttcatcgaagtgttgcggatggtctgccacgagggccgggatggttcagaatacatgtggtattgtcaacaagttcctgtccgggatgatctacgttatcccacacagtccgtgctatagcctctaacgggctgcaatatg

SEQ ID NO: 10681 - DNA, 212 bp, Zea mays
ttagcttatttcaagttgagtgtgttatgtcaaattgcagttgggtgactttgttttaggcagggcttggaaaaacaatgatgtatatcattgaaaataagtaggtcaaactggtagattaattttttatatatagacagattaggcaatttatcatgactgtgtaagtcgctggtacatggctgagttggccgagttgatcgaagtcacca

SEQ ID NO: 10682 - DNA, 378 bp, Zea mays
  unsure (1)..(378): unsure at all n locations
tttctttgtaaaagcgatgctcaattctcttgctgaatccactgggctacatgttaactaccacaaatctaacatttatcccatcaatgtcacggaccagacaatggaaatcctttgcaatacatttcactgcanaattggatcaatgcctttcacttttttagggtttcccttgggccttcaaagacccaacctgggtgcttttcttcctcttatccataaaattgaaataagactggtgtcaacctctatcttcttatcacaagctggcaggcttcaaataggtaatgcagacttctcctcactttcaacatactacatgtgcacactcaagctccccaaaagggtgatcaaacatattgacanacttagacgata

SEQ ID NO: 10683 - DNA, 212 bp, Zea mays
tgcgaagatttttcatcccaacatgggctttgcggcggtgccagagccaacccatgttggtcttagcaattaagcatgtgtcgagatcaggtgtatcaaaatctaccaagtatagatgaccctgtaacacacccttgaatgctattgaatcatcacttcttctaaagacagtgacacctacatcagtgaatagacagttgtagcccattttg

SEQ ID NO: 10684 - DNA, 67 bp, Zea mays
cttactgagactaacgggcactccaggttttggttcaaaagggacacgaaaaactctccacaaacca

SEQ ID NO: 10685 - DNA, 213 bp, Zea mays
ttttttttatgagctggaggccgcacatctcgctatcaagacctaggagaataaatgtgtcgctttgaaggctcagcgcgacagggccatggataaggccgttcacgctgggcagatccagatgaggagacccagtgtcgaggtgcctgatgatatcgtcgctgatgtaaggggcatgacgccgcaagccgtccatcttcctctgttgcccct

SEQ ID NO: 10686 - DNA, 210 bp, Zea mays
tgtcatacacattaaaatcttacccttgaaaaaacgagaagaatacatcacaaaggttgctccaaacattgcaagtacaaagaaaatgtgtgtgttgcacattgatatcatgattttccatgttcttttgcaaatctagggctaacagacgactcatcttaacaatataacacacatttgtacataagttatcatagtattatatatttc

SEQ ID NO: 10687 - DNA, 231 bp, Zea mays
aatactctagcttatgaagatttttttttcttacatgggctagtcggtggtgccagagccaacccatgttagtcttagcaattaagcaagtctcgagctcagctttatcaaaatctaccaagtatacttgaccctctaacactcccttaaatgctattgaatcatcacttcttctaaagacagagacacctacattagtgaatagacagttgtagcccatttgacataatt

SEQ ID NO: 10688 - DNA, 512 bp, Zea mays
  unsure (1)..(512): unsure at all n locations
aagtcacctcggctgcagctngacatgagganatggcgctcgtcatcaagagcttcctgtatatcctcaagcanaggaggtgaaggattacaagtcccgctccaagaagggttgctacaagtgtggtaagcccggtcattttattgctaaatgtcctatatctagtgacagtgaccgaggcgacgacaagaatgggaggcgaaaggagaagaagaggtactacaagaagaagggcggtgatgcccatgtttgtcgggagtgggactccgactaaagctcaagcgactcctccgacgacgaggacgccgccaacatcgccgtcaccaagggactcctcttccccaacgtcggccataagtgcctcatggcanaggacggcgaaaagaagaaggttaaatccaacttctccactaaatatgagtcttccagtgatgataatgctagtggtgaggaagataatttgcgtactctttttgccaacctttacatggaacagaagggagaaataaatg

SEQ ID NO: 10689 - DNA, 218 bp, Zea mays
tcagctccatttattttatggattacttttgaatctgtccagtttccttcggcctttctggcagcttcttgacttccatgaatagcaataggcccttgatccgaaggtatcttcatgcaaagatatgctgggtgaagaatttcttcaaaagcattgagtgtcccacgaccaatgactgcgttgtaagggtattccatgtcaacaatatcaaacacaac

SEQ ID NO: 10690 - DNA, 359 bp, Zea mays
  unsure (1)..(359): unsure at all n locations
taagtcacctgcggcatgcaagcttcagcgatggttaaaatcttggcagcataacagtgtcatttgcagtaaatgttgtgcgaactacacacctactcgtctgtntatatagagccgcacgttagaaggtgaggcgccacgagttttacacctggcggacactctctcacactcgctgtacggtggaccgaactgactcgaacagtagctctgtaacgtggtgccgctgcgcgcanggaaatcgaatcgtttctcgacaactaactcaaggaatggtgtgtttgagaccttcagcgctctgaagcttaagagactctattttcacggatctagctcggtacaataaacgatctagcacc

SEQ ID NO: 10691 - DNA, 214 bp, Zea mays
tgcgggctattacacgcttaacagctagtgcaccgtcccatcttatagagacagacacatttgcatgagtgaacaaacagtgatctaccatattgaggaactgtctcactgatagcgaattatatccaagacactctgctctaaacacattggagatagagtgctcatttgaaattgcaattttacctaacccttataccttgccttgattacc

SEQ ID NO: 10692 - DNA, 197 bp, Zea mays
cttacaagatcacctattcaccacctcgtctatgtgttctcaacacggccagcccaagtaccagagtactcatccacaatggttgaccaccgccactcggggcataaggagaacatgatcacaattgaagcattctactccttttgaatgacaaggggcgttgctcttattacaggcgcagcatataccctcattga

SEQ ID NO: 10693 - DNA, 457 bp, Zea mays
taactctggagggtgcaaccaacacaacagcgtctcctgcctcgaagttccccaagaaccgtcacaaactaccgtgcatacttcagtatctttagtatgttcttctccttgagcccctagcgtccaatatgcaatgaagtctgctaacacctgtgattgtattgatgacctgtgcacaataatcaatgcttgaattcattgagctccgcaacccactttccaattcttccagaagcttctcttgccctcatgacatccttcagaggttgtgacgaaagaacaattatatgatatgcttgaatataatggcgaacttcctgatgccataagacggatataaaccatcccgatctataatatcttattatacactaagactcggagacaagatattgggcttgttttgatatgcctcaagtttcttgacaatgcgaccactgtgatgcaactgcctaca

SEQ ID NO: 10694 - DNA, 217 bp, Zea mays
  unsure (1)..(217): unsure at all n locations
taagctcgntttaatagctatgcagacaaacggcatgcccttatttttttttgagggagactatgtctacctaaaagtttcaccaataaaagggcgtatcgcgtttcgggattaaagggaaacttgcaccacgatatattggtcctttcctcattcttgaaagatatggaccagtggcataccgactccaactacccgaaacattgtctgctgtgca

SEQ ID NO: 10695 - DNA, 304 bp, Zea mays
acatgtgttctactgttatgccacagccagcccatgctaggtctagcaattaagcatgcatctagatcggcctactcttttgcaaaatcaactaaatagagttcgtcgtctagtacacccttaaaagctagtgaaccatcacttcttctgaagacagacacatctacatttgtgaatagacatttatatcccatattacataattgacttatggataacaaattacatccaagcgactctactaataatactgtcagcgtttcgagaccagggggtccccaagccgactagtgagtgcgctgcg

SEQ ID NO: 10696 - DNA, 217 bp, Zea mays
tacttttttattcattgacacgtagcaagctgtgacgaaaatcataagcactggtgggtccggtgcagtcatctgaacctttgacgacatacgtgttatctgagcttgttccttttttttcttataactgaatttcaaagttgattcagcgaatttcaaatttcaatgaatttttccaatattttatgagttttagttagaggatgagaccttgtct

SEQ ID NO: 10697 - DNA, 511 bp, Zea mays
  unsure (1)..(511): unsure at all n locations
cttctntcttactcctcatcctcattcgtttctctctatcatnttcattagccacacaacacatgtgggaatcgaaatgggaagacaaacctcttggagaggtggattcatcgattggtctccatcgctcattctcttcttcttccttgcgaggggtagtatcacaaataccaaacgaagtatagacacgaaatgaactatcatgtctggactcatcaaatttgcttctaattctactccaaaaatgatgcgcgtcatggacggattcatcatagtttgatatgaaagcatgataatcttctttgctaagagaattatttaagatgtcaaaagctatgtagtttaagcgataacatctctgattctcctcggaactaatatttccattagaactagaggtgaaaatactctcgtcaataattcgttctaatcgaggatgtatggttctaaaggcatttatcacactagcagaccatgaatcataattagaacaatcatgcaatatatctca

SEQ ID NO: 10698 - DNA, 213 bp, Zea mays
tagccttttattaaccaaacgactaatattcagactagttcgcaatgtccactagcgaaaacagggctggtgggtacgttgtagagattcgaagactacttggcaatgtccagttgtccactagcgaaaacaggtctcgtgggtacgctgtagcgattcgttttctattctctatgattaaaattatgatcgatatcatgtttgttaattgat

SEQ ID NO: 10699 - DNA, 422 bp, Zea mays
  unsure (1)..(422): unsure at all n locations
tgccacagccagcccatgctagtcttaggagataagcatgcatctagaccggcctactctttngcagaatcaactaaatagagattgccgtctaatacacccttaaaagctaatgaaccatcacttcttctaaagacagacacatctacatttgtgaatagacaattatatcccatattacataattgacttacggataacacaatatatccaagtgactctactaagaatacattaganatagagtgctctgaagaaatagcaatttttcctaaccctntcaacttgtcttggttccatcaccgaatatgattgaatcttggggatcctcgttcttgacgtaagaagagaacatactctctctccccgcatgtgggttgtgcatacgctgttgataatacagctggagcccccggatgcat

SEQ ID NO: 10700 - DNA, 212 bp, Zea mays
tgaagatgatttaaatcacctgcattaccaattataccatgcaaggaatgaaaggtttcttgcggaaaataagccaggatacttgctacctacaagatcagattgtcaaccctccacagcttgcaattgtacatgggaagaagtaagttatcttcaaagtctaatatctctttaaagttaccctttttaatgtgaaattagtgattgtttct

SEQ ID NO: 10701 - DNA, 203 bp, Zea mays
gaaagaagcaaaagcacgcaaaaggccaatttactcaagccgagctaccggtgcaaacgaaacaccaaaacccaaaccagccacaggcgaaaaaccgaaagcaacaagacgggccccgggccatggcaccacaccatgcccaactcgccaggaggggaaaacccaatagggacctacaacaccctgaacaggacgcgcaacca

SEQ ID NO: 10702 - DNA, 360 bp, Zea mays
  unsure (1)..(360): unsure at all n locations
acacagaacaccananagcgggcagtataatggttaatactcaaattgantaatgcatggagagatctatgactctgaggatcacaatctgccattaagaagtatgtccctttctcgtccttcttgcaaaatataaagtaatgcagcagcagaattgctatatgtgaaatcaagcagaggtacaaagccctacactgcttacctgtggacctgaaagatgacctctttgctgttcattgtaatatcccgactagctttcacaagcctttctctcttgtcattctacagtaaacagagagaagatattacaaacattgataatttacacaataatagcgaacatactatgtgataatgatt

SEQ ID NO: 10703 - DNA, 215 bp, Zea mays
gctttttatctttacttgcttcttccttctgagcccctggcgtccagtcagcgatgaagtctgctagcgcctgggactgaatcgaagatctatgcacataatcaatgttgaactcattgagttccgcagcccactttccaatccttccagtagcttctctgtttctcataatatccttcaaaggctgtgatgaaggaacaattatatggtatgct

SEQ ID NO: 10704 - DNA, 281 bp, Zea mays
gacacccttgaaagcgtctgaaccatcacttcttcttaagacagacacctctacatttgtgaatagacaattatatcccatattacataattgactgacggataacacaatatgtacaggcgactctactaggaatacattagatatagagcgctctgaagatatagcaatttctgctaaccctctcaccttgtcttggttgccatgaccgaatatgattgagtcttggggatcctagatcttgacgtaagaagagaacatgctcttctgccccgacatgt

SEQ ID NO: 10705 - DNA, 219 bp, Zea mays
tctgtgcctttttttcataaagctaagggatggttatttagttgagattctccaaagtttaatgccaaaaggcactttccactaccttgttatttgaaaaatgtcaaacagcaaatttcatattttttctatgttcttcataacaaaagattaactatcctacaggttggggtgttttcaccttggggtgatttttgaagggcttttctaaggttttct

SEQ ID NO: 10706 - DNA, 218 bp, Zea mays
taggaatgatttaaacatcctagattctcggaactttgagtgaaacattgcacacattgcttatttatatacctttgatcacatctctttcatttggtacaaatgcatatatcttattcttcttgtgccaaggctaagactaatgtgcttccaagtgtatttctatcctttgtcttatattgaaagggaaatggagtattcggcaaaggcaaggcttc

SEQ ID NO: 10707 - DNA, 215 bp, Zea mays
tctaaagggttaacatgtgataggtttgactaacgtgcaattcgaaaaagatagaccttgtgcagcttgtcaagcaggtaaacaagtgggaggagcgcatcacagcaagaatgtgatgaccacttcaagacccctggagctgctgcatatggacctcttcggacccgtcgcctatctgagcataggagggagtaagtatggtctagttattgttg

SEQ ID NO: 10708 - DNA, 216 bp, Zea mays
tcggcgactgtttaaattttggcagcaaaacagtgcaaatagcagtaaatactgtggtaacttcacacctacttgtctgtttatatagtgccgcaggtaagaaggcgaagcgccagaagttttacaccaggcggacacccgctcgcactcgctgtacggtggaccgcagagaccgaacagtaactctgcaaggtggggccgctacgcgcagggaga

SEQ ID NO: 10709 - DNA, 240 bp, Zea mays
acactacacaatacaacaccttacgaatgatttttttgtggaaaattattggagccttgaggaaccaaaggctggcgccggatgccaagagactctacaacacttatgaattatcctaccatacagaaacatatggaaaggaacatgatcacaagaacttagggagctacaacttagtgcaccactctgatgcgaggtaacccgtgccgacattccgaaagaaggggccaggctcttgga

SEQ ID NO: 10710 - DNA, 337 bp, Zea mays
  unsure (1)..(337): unsure at all n locations
ctctggaagatgctccagcgntgntaaggccaaatgtcatggaggtatagcagaaggctctgaatggngtgatgaaatgctatttttcctcgtcttcctttgccaagctgatctgatgatatccgaaatagcaatctaagaaagacaacatagaacatccggcagttgagtctaccacctggtctattctatgaagtccgaanggatccttcggacaatgtttngtgagatccgtatagtcgacgcacatgcgccaatccactntattctttttgagtataagaacaggactngccaaccactcaggatgtaacacttctataatgaatctggtcgc

SEQ ID NO: 10711 - DNA, 212 bp, Zea mays
tgagtcaattattttgcaaaggataattgatgctcaaaaagataatctgggtatgaagcacattcgagagaagataaaggctggagtagccaagtgtttcaaggaagacgatcaaggtgtgatatggtttaaaaaccgcatagtagtgccaaagaacgaagaactccgccagcagattcttgatgaagcacatcttagtcgctattctattc

SEQ ID NO: 10712 - DNA, 375 bp, Zea mays
  unsure (1)..(375): unsure at all n locations
atcaagtatattgaactcattcctcaacatgcagaagcggcgtctatcaagtggcttactgaaaatatccgtctaatgatcttctgacctcactccttctaaactgatgtcttctttagcaacatgatctctaaggaagtgatgacagataacaatgtgctctgtgcgagagtattgacaagattattggcaattctaaatcactctcattgcacacaacanaggtacctgctctagaactacgccatagtctagaagagtgtgtttcatatataaaatttgtgtgcaacangcacctgctgcaatgtattccgctatggtggttgacaaagcaacactatctngcttttnggatgtccatgatactcgagagca

SEQ ID NO: 10713 - DNA, 344 bp, Zea mays
agctatgaagattcttattccacatgtgtctttttcgttgccagagccagcccatgctaggcttagcacataagcaagtgtcgagttcacctctatcaaaagctactaagtatagctgaccctctaacacttccttaaatgctattgaatcatcacttcttctaaagaaagtatcacctacatctgcgaaaagatagtagtcggcgattcgaccccgtggggtccctggaccgacaagtaaactgacgtcgcgtgcccatcttatatggtcggcgcgagacagagcgtaagggggaaacgggagacggcgtaaagggaactgtcgcttctgttgtccgccccag

SEQ ID NO: 10714 - DNA, 212 bp, Zea mays
ttagattttttttttaagccttgggtaaagtttgacatgatttggacaatgtttgatgcctaaacctcaaaaccctagtcttctagtaacgtctgccctatgaacttcactattgactccaaaaaccctagtttcctggagtcccgtaaaggaaaattgtatttaagaccttagataatatactttaattatctttgcattttcatgagcat

SEQ ID NO: 10715 - DNA, 399 bp, Zea mays
  unsure (1)..(399): unsure at all n locations
gcttcttgtagctgctgtcaatattataagaaactgtgttcctcggtctgacactatcttcttcggcacaccatgaaggtagactattcgagacatgtataactcagctaacactgctccggtgtacgttgtcttcacaagtataaaatgggccacctttgttaagcggtccaccaccacccagatggaatcatagccggcccgcgtacgaggtaggccaactatgaaatccatcccgatctcataccacttccactgagggatctgcaatggctgcaacagtccggcgggccttagatgctctgctntggttctctgacagctatcacaaacggcgacatattctgcgattctctttcatgcctaccaccaagatctccttttaaatcctgtacatct

SEQ ID NO: 10716 - DNA, 216 bp, Zea mays
actttttctcccatctgcaggctctcatcctcgcctgaggtgggcccgggggccactgtcggtaccctgaaactatggtaccccttactacagtatgaaaacacagtacccacacggatatctttagtcgcgtggtaagggagctgtgcgtggggccaggccgtgactcgccccagcctcgggtgactactctaaggcaacaacagcatctgaccc

SEQ ID NO: 10717 - DNA, 221 bp, Zea mays
catgtgtagcttagcgattaagcaagtggcgaagtcagctctatcaaaatctactaagtatagctgaccctctaacactcccctaaatgctactgaatcatcacttcttctaaagacagtaacacctatatcttgtaaaagacaggtggagctcattctgcataaatgagaaacagaaagcaaagtgtatctaaagaatctacaacaaaacattgaaatag

SEQ ID NO: 10718 - DNA, 209 bp, Zea mays
tattcttcatatctcaatacgtgcagaccagatagtaaaaaagatgctaaactgcatacgcgcatgtagaacggtgggcgaaggcacaggcaaccgaacacgcgcttgcgcatggtcaatgcatgacgcgagcctccacgcgtgagacactgcaaccaaccagtccgatcaacgtcgaattgatgcagaacacaaatcagtaatggcct

SEQ ID NO: 10719 - DNA, 475 bp, Zea mays
  unsure (1)..(475): unsure at all n locations
agcttatcggttacaaggatgcctttctgccgagtgttactctctgcanagtgactagaaaccctatcttatttgttcttattattccatccaaagtaacaaaacatatatcacatatatatccatcacatacatcatagagaccacatatgacatatctcacaaaaaccacaatctcacaaattgttcacaaacatgtctatgtttagaccaagttgcaccattatgagtattaccaactcacaaacataagttcttcacaaacatgagtttagaccaagtttctcacataagtctcacaatcaccactaagagaagatcatcaaggtgggcgggtggactggttntggcaaagggttagacgaactatgatggttgtttgatgttgccgattgattctgcacagagaagagattgcatgtgtgagaccaaatgaatacatcatataggactaannatttgatactcataggag

SEQ ID NO: 10720 - DNA, 247 bp, Zea mays
aaagacgtgacactatagacatctcctgcgcaggccacctttatgccatgagatgcgctctaatctgtccagtttacttcgagcttatggtgtcaccaatggctgacatgaattgctaatgcaccttcatccttaagattatctatacataactccgctgaggtacaatatagacacaacacatattgtgcgctatgacatatgattaggtccaagaggtactacttatgtgcacaagggcacacaa

SEQ ID NO: 10721 - DNA, 351 bp, Zea mays
caagcactgagctgagcttggggggcattcagcgaaacctttgttccacttgccctgcttaggaattcagcgtcgcagctgaaggatctttgaggaaccctactgagtcagtaggcctcctcggaaaaccggaatgtctatcttgacggacgagttttggaaaaatgtttttcgagcagcggcagaccctcttcttattttgcaccttaagcagcatagaacctgcctcggctacctcctgatctatgggggactcggccagcttggggtgcgaacatccggctggcttatcgaccgagggggagagaagttccataattctcaactatgaaccactgcaagcgccatccc

SEQ ID NO: 10722 - DNA, 218 bp, Zea mays
tcaactccatttattttatggattgccttggaatcagtccagcttccttcggcccttctggcagcttcctgactcccatgaatagcaataggcccttggtccgaaggtatcttcatgcagagataagctgggtgaagaattgcttcaaaagcatttagggtaccacgaccaatgatggcgttgtaggggtattccatgtcaacaatatcaaacacaat

SEQ ID NO: 10723 - DNA, 323 bp, Zea mays
  unsure (1)..(323): unsure at all n locations
gccctcggacccgaccggacttcaccgtatgcttcttatcatcctcaccggacttcggtcttccgccgccgcgcgtggaccgagctatccagcgagtctccgcccgattcctttcgctcatgtgttctctggcataccgtggacctncctgacctaattgattgaactatctcgccgtggccaggccggtctcctcgcacgcgacgagcattcccgtctgcgcgcgtggaccgaccacctccggtcacctccgacggcgttccgcacaccgttgtgatccccgcgacctccccttcgccctcgaccacttcaccggaacagtc

SEQ ID NO: 10724 - DNA, 216 bp, Zea mays
tgaagtacatttttttcctattcagagctgaatatgaggcagaggagatggcttgagctgattaaggattatgaattggaaattcactatcacccaggtaaggctaatgtagtggcacatgcactaagccgcaaggcttcctgtcattgtcttacgatgaagacttctgacattacattatgctaagaaatggagaagttgaacctaggaatgatt

SEQ ID NO: 10725 - DNA, 493 bp, Zea mays
  unsure (1)..(493): unsure at all n locations
cggaacccatgttattcatcatttctcggcttatgtttatttattgctattggaaggaagtatacganatcatcatcttcatcaccttcgtacactagggatcctcgaggatacttcaaatccttacggtaatgccgagcttcaacaatttgctcttgtgtcaattgttttcccgaagcgtggcagatgatgaattcagaatcctcggataacactgcttcaagtatcgacgatgatactttctctgataagcgtttactcacttgctctgttggcctactttccgaagatccagcttcggcgcagacaagagtagtactntttctagcctttntcaattcttaagatttatctttgaaaaatttgtagcagaaggcgtaccactgtcgagggttaaaacagcttaagcacatatatttcttttcttcttagcgttctcgtgaacgaggcattgtggttcctgcccttcgactctgacttcgctattacagtc

SEQ ID NO: 10726 - DNA, 216 bp, Zea mays
tctaaagggataactcattttaggactaacaaatgttcattttgagaaagacagggtttgtagcgcatgccaagcaggaaagcaagttggtgcccatcatccacacaaaaacatcatgacgaccgacatgccgcttgagctactacacatggatctattcggcccgattgcttacataagcatcagcgggagtaagtattggcttgtaatagtgga

SEQ ID NO: 10727 - DNA, 456 bp, Zea mays
  unsure (1)..(456): unsure at all n locations
agcttcagcttcatctatattatggattggctttgagtctgtcttatttccttcggcccttctggcagcttcctgacttccatgaatagcaatgggcccttggtccgaaggtatcttcatgcanagataagctggatgaagaattgcttcgaaggcattgagagtaccatgaccaatgattgcattgtaagggtattccatgtcaacaatatcaaatacaacttgttcagtccttgtgtttgtaatgaatccgaaggttactggcattgtgatttttccaagtgctacgatctgccttcctccgaagccataaaggggatgtgtggcatcatggattttgtcctcgagctcttgcatatgtctgaaggccttagcaaatatgatatcagctacgctgcctgtatcaaccaaaacattatggaccagaaatccttngatcacacaagagataaccat

SEQ ID NO: 10728 - DNA, 215 bp, Zea mays
tagcaaaaattttttttgcctatgttgtgcagcttcaggttatgagagaaattggtcagattttgcagcagtaagtattgttgttcttgttcacttgtttgagtggttgtatgggtcagccctttatttgctgaatctgatgtcttgcaattgtgcattttcagatccatacaaaaaagaggaaccgactagaacaccagaggcttaataaattg

SEQ ID NO: 10729 - DNA, 398 bp, Zea mays
aatctagctatgacaaaactctagaagaactcttgtattatcctttgtaaagaatattgtaatttgagaatcagatactactttgtaaatttgtccataccttgtaatatatttctacctttctgtcaatgtatgaactgcttttatgtggacgaaacatgtattttttgagccgaatgcgaaatacaccttcccttcttttcgtacaccacgaagcataaatctgcttccgaagctgtattcttagagccgaagcaattgtgtgtatctgtatgatatgatgatgatgatcctatgtatgtctaaatgaatgtttatgaatgcgatgtatcatgccaatgaatgccccaacgcacacatacgaagcttcatgcataaccttcattctcttatgaatg

SEQ ID NO: 10730 - DNA, 216 bp, Zea mays
tggcttttcttaccgcatacaccgtagccccattaacggcacgacggctaagcgaactacaccccggatcctctaattattgagctaagggcacctcattccagcctcatggttgcactgttttcccgggcggtcatccaacgaacaggtccttacggagaggcacttgagaaaccgctcgagcccccttgaaggccacaagtatgacatcataat

SEQ ID NO: 10731 - DNA, 464 bp, Zea mays
  unsure (1)..(464): unsure at all n locations
agcttccatgcagcagacgccagttgatctgtttattttgtcgctcaactgggttggaaagtgatggcgccacaaaggatggcatatgctgccagagttacctgtactaaagcttggttttttagggatacaaagactccatatgatgatcacgattattattattctaatccacgatcaattgtacttcgacatggattgtactaccttccctgnggtggggaattgtactgccttcctgaaacatgcatcagtaaacactttctaacaccgtctatcgatgatggatgccttcctgaaatngtactgccttcccgcaattntcaagctttcaccaatccactgctagtattgtaaattctggagagaaggaaaaaaaaacatgaggatagcagccaggaatagacatattggatgacctgaatgctggtaggcccattggactcagtggctccgagatctag

SEQ ID NO: 10732 - DNA, 216 bp, Zea mays
tgcgattgttttttatccccacatgtgctaagcggcgatgccacagccagcccatgctaggcttagcgtattaagcatgcatctagaccggcctcttcttttgcaaaatcaactaaataaagtttgacgtctaatacacccttaaaagctaatgaaccatcgcttcttctaaagacagacacatctacatttgtaaatagacagttatatcccata

SEQ ID NO: 10733 - DNA, 278 bp, Zea mays
gacaggatatgttgcgcatgccacagcaggaaacaagttggtgccctacatccacacaagaacattatgactactgacaggccagtggagctcctacacatggacctattcggaccgaagcattacatacgcatcagcgggagaagtactgtctagatattgtggatgattattctcgcttgacttgggtattctgtttgcaggagaaagtccatacgccagagaccttatacggattattgagactggctcatcacgagttcggcttaatgatcatt

SEQ ID NO: 10734 - DNA, 212 bp, Zea mays
tacatttactaacaacgagaacagatgcaaaatatcataggggttatgcaaaacgattgtaggagactagtacgtgcatttgataaatctagtgtagcaaattttccttcacacgaggttgaattaggagataatatacgtaatacatcggttagaggttgtcacgaccagtcacaaccctcttatgggatgccgatggacacgtaccctga

SEQ ID NO: 10735 - DNA, 211 bp, Zea mays
tgacaatgattttatggcgctcgtcatcaagagcttccgcccaatcctcagacaaaggagggggaaagactacaagtcccgctccaagaaggtttgctacaagtgtggtaagcccggtcactttattgctaaatgtccattatcaagtgatagtgacaggggcgacgacaagaaggggagaacaaaggagaagaataggttctacaagaag

SEQ ID NO: 10736 - DNA, 293 bp, Zea mays
  unsure (1)..(293): unsure at all n locations
gctcatgcgagggcaatcgaagctagtacaggcccgataaaagaaccggaatcagataaggcagttgattatccaaaggtgttgagccctccagttgtaacagggctgtcgaagccattgagcattacaacggcgactccaaagaaagaaaaatgtctagtgttntagatgttgttntggaatacgtgaaaacgctagtttctgcttttgccgaagcatctattgagaaatctgaaaatgcatgagaagcgattactgccagcacgactactgttcttgtcgaagccgaaact

SEQ ID NO: 10737 - DNA, 211 bp, Zea mays
tcttcctttttttggtggaagtcattgtcagcccggatgtactcatccattttctgaagcagcttctccagagtcttgggggggtttcctggtgaagtattgagccataggccctggcctaagacctttgatcatggcctcaacaatgatttcattaggtactgtgggcacttgttctcttagacgcaataaccttcggacatatgcctga

SEQ ID NO: 10738 - DNA, 173 bp, Zea mays
  unsure (1)..(173): unsure at all n locations
catacaagctggccaacgatcaaagcgaggtctacatcaacacgttggaacatacaacagcaatgtcgatctaccctaatatgtctaagtcattatgtcctcctatcttacagcatanaaaagtctaacctcaggaagatcagcttgctcgcaagctcaccctcctcagggct

SEQ ID NO: 10739 - DNA, 211 bp, Zea mays
tatgatggttccatttctactaagtgcatgtcagatagcatacctgtcctaggactgtccaaggcttaacatctggtacaagacgtacacgaataaattctgcatccttaactatattatctgccctgaaatgcttcaggtactccacctgatttgcaggagatttaatttgcgaaagagatgatggagtcaacggtgtggataatcctgt

SEQ ID NO: 10740 - DNA, 208 bp, Zea mays
tggaaaaatctggaatgaatcggtggtagttaccagccagtccaaggaaacttcagacttgatgtacagtggttgggggtttccactccaaaatatccttgactttgctaggatccaccacaatccccttggcagataatacatgtcccagaaattggatctcctccagccagaatgcgcacttagtgaacttagcatataattggtg

SEQ ID NO: 10741 - DNA, 447 bp, Zea mays
  unsure (1)..(447): unsure at all n locations
gcaagcttctaaagggagaacatgtgataagcttgactattgtgcatttctaanaagatagaccttgtgcagcttgtctagcaggttagcaagtgggaggagagcatcacaacatgaatgtgatgaccacttcaagacccctggagctgctgcatatggatctcttcagacccgtcgcctatctgagcataggaggcaagaagtatggtatagatattggtgatgactgtctccgcttcactagggtgggcctttngcacgagaaggatgagactcaagggaccctcaagcgcttcctcatgagagcccataatgatgttgagctcacagtgaacaagataaggagcgacaacgggtccgagttcaagaaccttcaagaggaggagttccttgaggacgaagggatcaagcacgagttcttcgctctctacacaccacacgcaaatg

SEQ ID NO: 10742 - DNA, 218 bp, Zea mays
tctcctcttttgttagcttcctctcagcaactggcttcttgtcttgagacatcttatcttcggaactgacgaaaatatgtccttaaacccgaagctcaaaaaatttaagaaactaagcaactgttggaaagcaagagctaagaaatcaagcaaaacaaagcaggcgaaccaaatgtgctcggggtgagtttttatttatacgcccagcgcgctccaag

SEQ ID NO: 10743 - DNA, 464 bp, Zea mays
  unsure (1)..(464): unsure at all n locations
taagcaccgcggctgcagcttgagagagtttactagattcccattaattaattatgctcatcgataagataactagataatatctatgggttccatgatcccaaaacccttttatatatgtgtttatatattatatcatttgttcttatacatatcttagggctgtacaaatcctaccccccttaacagaaatctcgtcctcgagatttgtaaggaaaggaatacataaggattggtttgtaattcagctgtttagattgattcataatccagagtctcatttttttttttctttatagtcaatagcgggtgattaggagaacatatgtatccaactacttattatataagatatangttggacaggttgaggccagaacggttatggcaaagaagagactttgttcgaaatggttaagtctagaattatctcgagattcgctttgactggtatgtcctccctt

SEQ ID NO: 10744 - DNA, 218 bp, Zea mays
tcggctccatttattttatgaattgctttggagtcaatccagttaccttcagcccttcttgcggcttcctgacttccatggatagcaatgggtccctgttccgaaggtatcttcatgcaaagataagcaggataaaggattgcttctaaggcattaagagtaccacgaccaacaattgcattgtaaggatattccatgtcaacaatgtcaaacacaac

SEQ ID NO: 10745 - DNA, 354 bp, Zea mays
gctttcctctttggtagcttcgtctcagcaactgtcttcttgtctcgagacatcttatcttcggaactgacgaaaacgtgtccttcaacccgaagctaaaaagcttgaataactagcaagcgttagtgagcaagagctatgagaatgagaaaataaagcaaatggcacaagcagcataccaaatgtggctggtgtgagttcttatttatacgctcagcacgctccaaattatagggtcccgtctgtcattgactgttgctattctagcacagggaaggtgttgtttcggaccttcggcttagggccttcatccatatcacaatctaaattcgttattctaaacagattaatatt

SEQ ID NO: 10746 - DNA, 218 bp, Zea mays
tgacttacgtttgcgttataccatcaggagcgcatgcacccagaggaacgaattttttgcgttttagccctttttccgaaaaaaatcatgtttggaccccaataattctcactgtaactttgtgaccccctataggccactggaactcctacacatggatctaatcggcccgattgcttacataagcgtccgtgggagaaagtactgtctagtaattg

SEQ ID NO: 10747 - DNA, 299 bp, Zea mays
cttcactgtctctctttcttataaaaataaaataaaaaagagatctcactcacattctgatctgggactcactctgtactctatacacaaggtggcatctatagactgttactatgatagatactttctgctagccttgtctgtaaataaataggaagaagggcatctttggtgctacattactaggatctctttgctcgcaaatcgaataaatactcttactctatctttggacctcactctgacgttgagtaaaaatggatgtacacagaatactacacagtgggagtatgtagtgc

SEQ ID NO: 10748 - DNA, 216 bp, Zea mays
tccggcgaagtggtttcgttggtaacgacacaagtccgcttccagcttcggcaagccaatgcttttggaaagggttctgacaattttggcctcggtgcggttccgaaggcatcttagtttcccttcgttgaccccaccaaaaagcatagcccctgatttgtatccgcaagatatgacatattttttcaactcctctttttcggcgtctgataattc

SEQ ID NO: 10749 - DNA, 354 bp, Zea mays
tccttgagaagtcatatttcttatcagcttaagtaggtacctgcatctagatttctttctattctagatcaagcacttggcctataccagccatctttttatcatcccttcaattcacttgttgctacgtgtaggtcagggaccaagtcttcatgttcgagaaagaatggggatctgaatcgatattacccagctggggatctccatccacacgacataaggagcacttaacacttgcatatgtcaactcgcacccggttgtctcatgaccagaatgggttcacggcaacctatagcaccgatactccacgggctgagctcttgccatggagaggacatgctactctcaccatc

SEQ ID NO: 10750 - DNA, 217 bp, Zea mays
tacatattctttgttatgaccaggggcttcggaggaagaatccacccgaggcatgtcaggtcaatccacaattccagccagaatgacgacaaaggaagccagcttcagaggccacagtacacctcacaatcttcggggaaacaacaaagctctttcaggccgccagctccaaggggcagaggcaccaggggcttcggaggaagatatggggatcaac

SEQ ID NO: 10751 - DNA, 274 bp, Zea mays
ctatacttagtgggatggaccataatatacgctaatttacttgcaatataaaatgttcaatagtgcatataactctgtcatcaactatatgtgtgcactaatttaaaggaatttagtctatccttttgcgtttcacaaatgatgaggcatttgtcatccacatataaggatcatcatctgtgacaccctctcttgtgttctaatgctctctatttaagtgtacaacgaggtcttcaagagctttaagatggattcagatctacaatataagagc

SEQ ID NO: 10752 - DNA, 216 bp, Zea mays
tctattttttttaacacgtgataggtttaactaatgtgcaattcgaaaaagatagaccttgtgcagcttgtcaagcaggcaaataggtgggaagctctcatcacaccaaaaatgtgatgaccacatcaagacctttggagatgcttcacatggacctcttcggacccgtcgcctatctaagtataggaggaagtaagtatggtcttgttatacttg

SEQ ID NO: 10753 - DNA, 481 bp, Zea mays
  unsure (1)..(481): unsure at all n locations
agcttctaaagggagaacacgtgataggtctatctaacgtgcatttcgattaagatagaccttgtgtagcttgtcaagcacggaaacaggtgggaagctctcatcacaccaaaaatgtgatgaccacatcaagacctttggagatgcttcatatggacctcttcggacccgtcgcctatctaagcatcggaggaagtaagtatggtcttggtatagtcaatgagttttcccgcttcacttgggtattccttntacaggataaatctgaaacccaagggaccctcaagcgcttcctaaggagagctcanaatgagtttgagctcaagatgaagaagataaggagcgacaacgggtccgagttcaagaaccttcaagtggaggagttccttgaggaggaagggatcaagcacgaattctccgctccctacacaccacagcanaatggtgcggtagagaggaagaacaggacgctcatcgatat

SEQ ID NO: 10754 - DNA, 214 bp, Zea mays
tggctcgtggaatcaatctcttgccaagcagaatcggcttggtaagattcaaattgagcctgctgctgttgtatcaagggtctctgtcctaatcttgctcgtcggtgctggtgtcaggctctcccatggatgagctcatggtatgtgagaaggggcagagagaggagaacccagcaaaggaactaaacagacaagcaaatctcatcttcctttg

SEQ ID NO: 10755 - DNA, 356 bp, Zea mays
  unsure (1)..(356): unsure at all n locations
aagtcacctgacgcatgaagctntcccagctgtcaccacgtcagcacctactgttttgttcggctctccaccaacgccgcactggcgaacgcgggccgctccatagcgcaccggtaggtcctcgctcccgtcctttccacgaaagcgaggatgatgacagaatgttgcatcctagctgggtagcaacagctcgccttacccggcatggctggaggacgcctcctccgcatagctggaggattgattgcaccaccagaagctacaagaggaggtggccagccgacccgtgcgggaggtagagctccggcccagcccggcctccgccccagcaaggatgatgaagatccttgaagctg

SEQ ID NO: 10756 - DNA, 214 bp, Zea mays
tctaaatggtttaacacattttaggattaacaaatgttcattttgagaaagacaggatatgtagcgcatgccaagcaggaaagcaagttggtgcccatcatccacacaaaaacataatgacaaccgacaggccactggagctcctacacatggatctagtcggcccgattgcttacataagcatcggtgggagtaagtactgtctagtaattgt

SEQ ID NO: 10757 - DNA, 51 bp, Zea mays
acgcgacactatacaatactccttgctgggaatttgtttttttttcgccca

SEQ ID NO: 10758 - DNA, 340 bp, Zea mays
  unsure (1)..(340): unsure at all n locations
cttcatccncacatgtgctatacgtcgatgccacaaccagcccatgctagtcttatcgattaagcatgcatctagatcggcctcctccttcgaaaaatcaactaaatagagatttccgtctagtacacccttataagctaatgaacagtcactccttctaaagacagacacatctacatttgtaaataagcaattgtgacccatattacataattgactcacggacagcaagttatacccgagcgattcaactaanaacacattagatatgaatgctcagatgaaatagctatctttcctagtcctttaaccttgccttgattcccgtcaccgaatatga

SEQ ID NO: 10759 - DNA, 214 bp, Zea mays
tctaattgtgataacacgtaataggtttgactaacgttcaattcgaaaaagatagaccttgtgcagcttgtcaagcaggtaaacaagtgggaggaacacatcacagcaagaatgtgatgaccacctcaagaccactggagctgctgcatatggacctcttcggacccgtcgcctatctgagcataggaggaagtaagtatggtctagttattgt

SEQ ID NO: 10760 - DNA, 213 bp, Zea mays
ctatttttggtttcgtgcccgggcctcaattttcggcccgtgcgccatgggcgaacccctcattttcggcccaaacgcaaggccgaacagccatgccgcccgtcgccttgcgcctccgtgccgttttccctccgctccgccatgcccttcgcccaagacatacatattaccttcggagtctttccacacgcttggacttagcttatttccggg

SEQ ID NO: 10761 - DNA, 210 bp, Zea mays
tgcctatgggtcacctaggtacagggaagttgtcactaacacgacttcgatcaagattcaagaatgataattgggaatagccatgttgtatcatatgaagaacaaacagatatggacgacatgtttcacctgattagttgtagttttagtagttttaactgaaagcttttttgcctctttatccaaagctaaccacttcagagaagcatg

SEQ ID NO: 10762 - DNA, 511 bp, Zea mays
  unsure (1)..(511): unsure at all n locations
agcttatcttatttctaacatctgcaatcttatagccttgactctatcaacatgacccccaatgagtagctaanaggggcttgagccttcaagaatttccatgtcttagtagacttaacaaaaatggtatatatacgttgtatgactccatttttttcttaaccgcaactcttggacatatcacatagtgttaaattaatactatggaaacaacaaccaggataaatggccctagtattaatatccacaagtgttctttatactctttgatttttccattccatattntatctgttagcatatcctcggcctctcatattatctatttcaatcccaagcttctttagttcatattacaaaacatcaaacaatcctgaccctgctgtatcatntataccaagagaacctaataatgcttcctcaatgcaatacgaagaagtatcaacatatctaatgatcaaagaacatttgtcttattgacttataccangagtatagtcaagtatacctg

SEQ ID NO: 10763 - DNA, 217 bp, Zea mays
tgccttcgctttattctatcatccgcagtccaacggggtcatggaacgcgccaacgggaaaattttcacagctgtcaagaagatgctccttgatgaaaaaaagggcagatggaccgaattgttacctgaggcagtctgggcactaaacacgactgagtgcagagcgactgggttcactcccttccgccttctatacggatcggaggccatgaccccg

SEQ ID NO: 10764 - DNA, 425 bp, Zea mays
  unsure (1)..(425): unsure at all n locations
gcttaacctaaanggataaaggggaagacattatccttattgataaaacttaaaggctntagggaaatagtcacaaaatgttcccaagaatgaacttgaatcacttttatacccctgggataccaaaaatccccatgtgaaccctggaaaaccctaagtctaaaacctagggacttatgtgcaaaattgatgcacctttggactaaagtgtaaaaactactatgtttaaagatataaagtcacatggttcacatttaggatgatttgcagccacaccctgagttntggacttatttgcaaaagagccacatttgaactctcttgactaagtctgaatttcagtgtattgggctcatctttgtgaccttgtaactcttaaacaaaagagagtttgccctatgtcaccacatcacacttgtagtaac

SEQ ID NO: 10765 - DNA, 217 bp, Zea mays
tctaaagggataattcgtgataggtttgactaacgtacaattcgaaaaagatagaccttgtgcagcttgtcaagcaggtaaacaggtgggaggagcgcatcacagcaagaatgtgatgaccacttcaagacccctggagctgctgcatatggacctcttcggacccgtcgcctatctgagcatagggggaagtaagtatggtctagttattgtcgat

SEQ ID NO: 10766 - DNA, 318 bp, Zea mays
cgcagctgcagcttgacttacctaacatgtcttgctaggcgattgtcacttctgtttagtgcgtgtgcttatgtactcaccgttaatccgccctcggtcacgccaactgccatatttgtcctcgcgactgacagtaccacagtcccacatgtggcggttcaatctggccgcgcgcagggcgcttcgttgtcgtcgacgtagataaaaaaatatctctctgcagaggcccctatacggcgcgtgatcatgcggggcgggtcgctccccgcgtgggcggatcgctttttcacacacggataccagcacaccagctgcttg

SEQ ID NO: 10767 - DNA, 216 bp, Zea mays
tgaacttgatttatttattgagaagcaaaagctagaccttgaaagagatcagcatgacaaaaaggtgatggaaactgacacaagtgggatggatgatgaggccaaacagtatttcaagttactgaaacaggagattttagctcgacgttttgggagtccacaaccatagatgttttttggttatgctctgattactggtttattttggatttcttt

SEQ ID NO: 10768 - DNA, 392 bp, Zea mays
  unsure (1)..(392): unsure at all n locations
acctacccctagttaagaagtgtagtgcaaagtggcccacttgtccaacttttgttatttttgtccaaggcatagtctttttattctgaacctcaaattcctagaatagactatagtaaccaatggcaacccactgtaattttgatagaatatttggaaaaagttaaactactgttgtagttcaaacccacactagatatcataaatagaaaataaagaaggcgaaaatgatggaaattagtgtcaccctataaccctctatgaattgtccactgaattatataagggaaatacaaatccactatgctcatccttaccaaaacctaaacctagaatgataagcataaactactnaaagccacgtatgaccaagaaaaccctaagttactaac

SEQ ID NO: 10769 - DNA, 216 bp, Zea mays
ttagacaagtttatttatttcaaggctgaagtagaaaatcaacacaatttgaagataaagattgttacatcagatcgtggggggtactatgggcgccatactgagtatggataggtaccagggccttttgcgaggttcctaagtgaaaatggtattgttgctcagtattcaacacctagtgaaccgcaacagaatggagttgccgaaaggtgtaac

SEQ ID NO: 10770 - DNA, 409 bp, Zea mays
  unsure (1)..(409): unsure at all n locations
gcttagcagatcacagtgcacaagagctcataaatatttgtctttgagtggtggccacaaagcgtgcanaataagtttgcgagatggcccgatatatacgctctatgcgttgaaagatgaaagaccccacttgtcattgaatgttgctattctagcaaagggaaggtgtttttttcggaccttccgcataaagccttcgttcatatcgcaatctgaatttattatttctaacaaattaatattgcgagagggctactgtggggaccttctgcgtccgaaggtcctcaaaaacatgatttaatagtgtttctggagtataatgtgcaaacaggtatcttctgactctaatcggtatcacagagggagaagctcanagcatactaaggtngatacagcaccgaaactgtga

SEQ ID NO: 10771 - DNA, 216 bp, Zea mays
tgaaggggcttttctggagtcggatctacagccctgggagatttgaggagcgacggccggcacaaggaggctcgagccagggacaagaaagatctgaggctcaaggagtgaactaggcaggggtagcggcggacgtgcgacacgcgtggctggccacgcgcgactgccccatagcgacgcttgcccgctcgctcgcgtggcgggtagcgacgatcg

SEQ ID NO: 10772 - DNA, 414 bp, Zea mays
tgaccccgaaagagtagctgacaggggcttgagccttcaagaatttccatgtcttagtagacttaacaaaaatggtatatatacgttgtatgactccatttttttcttaaccgcaactctcggacatattacatagtgttaaattaatactatggaaacaacaaccaggataaatggcgctagtattaataaccaaaaggtccttatatactctgtgattttttccataacatattttatcttgtagcatatgcttggcctctcatattatctatttcaatctcaagctgctgtagatcattttacaaacatcaaacaatcctgaccctgctgtatcatttataccaagagaacctaataatgcttcctcaatgtcattacaacaggtatcaacatatctaatgatcgaagaca

SEQ ID NO: 10773 - DNA, 180 bp, Zea mays
gatgtagaagctttaggagaaaccttcttttgagcagctttagataacatcaaaattttgggagaacctcttgtgaacttcataatctattatagagaatcaccagcaaaaagaaactatgaacatcatttttacttttatttttgtgacacaaggaatgaactgtgacccacccccaac

SEQ ID NO: 10774 - DNA, 370 bp, Zea mays
  unsure (1)..(370): unsure at all n locations
gctgcagcttaactganaggtctaatatatatttgtcttgaagtgaaactttggctagtttagaccaatcctaccatgcaatgagaatctgattacaaatggctattatttattttccctatagggcaattcagaactgtcctgcggggcattcttctgctgagatgggtcacgcaccgaacggaacctcacgtgcctgctggcctgaggcgctgtgggggggggccagactttaaacggttcccggtaggatacgtttctgccacttcctgtttcacgatggggaggctcaaagggtcaatgtgaatggaaccgggagtctacgctattgtggctgtacgcctccgaccccaaaagagtacatttgtat

SEQ ID NO: 10775 - DNA, 213 bp, Zea mays
tgaaatatatttggatgcagtccgaagattggaagcttcttttgagggattttctgtaaaaaatatcccaaggggggaaatgagcatgcagattcgctagctaagtcagcggcacaggggctccctttgccttcagaagtattttttgaaacaataaaagcaccctcagtcgaactcatggagagaacattgctcacaatatcacctgtacat

SEQ ID NO: 10776 - DNA, 409 bp, Zea mays
  unsure (1)..(409): unsure at all n locations
tgacgcatcaagcttcactgaaaatcttcaaaactntttattatctataagcctnaccattggtcgccattgactgtcatttggtatctttgagactacatttaatatcatttacatgtcttctccaatatttgattagactatatttcataacttatacttcccatgttgctataaatgcacatattgttgactcatatnttgtacctatgcataaggaagttagtctattcaaatcatgtcttgcacctttatttctcacatgctttttcctaagtagaagatctctatcacgggagtctattcttcgtctctaaagggggagaaaattctgtctaaaggataacactcatttatgaggagtaacaattnggtgcttcaaccggtattaattgacanatnctttatg

SEQ ID NO: 10777 - DNA, 212 bp, Zea mays
tctttgttttttgttctagcctcccttgagtcccctgctactcaaagacccatttaattgaactagactgccctggatcgccaagaacacatcggattattcttggtttttgtcgtcgtcgtggacagagagattccgacccggattagtgcaattagttgagggattaaggtcgccgggggtggaattaggtgtcagccaagctagagcgt

SEQ ID NO: 10778 - DNA, 367 bp, Zea mays
  unsure (1)..(367): unsure at all n locations
gattcttcatcccacatgggctagtctgcggtgccagagccaacccatgttagtcttagcaattaagcatgtgtcgagttcagctntatcaaaatctactaagtatagctgaccctctaacacacccttaaatgctatggaatcatcacttcttctaaagacagntacacctatatcagtgaaaagacagttgtagcccattntgcataattgagatacagaaagcanaatgtaatctaatgaatctacaagaaaaacattgganatagaatggtcaggagatatagcaattntaccaagacctttgaccaaaccttggattccatccccgaatgtgatagctcgttggggatcttgggttttctcg

SEQ ID NO: 10779 - DNA, 211 bp, Zea mays
tgtgaaggttcttcatccccacatgtgctaagcggcgatgccacagccaacccatgctagtcttagctattaagcatgcatctagaccggcctcttcttttgcaaaatcaactaaataaagtttgccgtctaatacacccttaaaagctagtgaaccatcacttcttcttgccttgattcccatcaccgaatataattgaatcctgggaat

SEQ ID NO: 10780 - DNA, 211 bp, Zea mays
ttatatgcgatagcttcggcactgctttcttgaggatctgccgaaggtatttctttctttaggatctttggctatgaagcatacccccaacaccaactttaccacttcatggatcagagcaaggcggtgagaatcttggccatagtgactctgttgcttcactatgtgtcttgctgtccaacatgcaacaaaaggagaagtaaagctttct

SEQ ID NO: 10781 - DNA, 218 bp, Zea mays
tactcaagctttgtcagatctgttctgatgtgtggttgcgttctgcagatgtcacagaataggcgtagaggaggaaggcgtgctcagcaggagcgagccgctccgcaggatgaggtgccccagcagcagcacctgccgcccccgcccccgatgtcgattgagcagatgtttctgatgcagactcaggcagttcaagccatcggtcagactctggccgc

SEQ ID NO: 10782 - DNA, 503 bp, Zea mays
  unsure (1)..(503): unsure at all n locations
gcaagctngacaacatcatgtgacatcttanataaagattgtgagatcgagtatatgtaattcattcctcaacatgcagaagcgggttntatcaagtggcttagcgaaaatatccgctaattgatcttccgtcctcactcctgctaaaatgatatctcctttcgcaacatgatctctaaggaagtgatgacagatatcaatgtgcttggtgcgagagtgttgaacagggttattagcaatttcaacagcactctaattgcacacaacanaggtacctttttctagaactacgccatagtctagaagagattgtttcatatataaaattcgtgtgcaacaggcacccacgacaatgtattctgcttcggcggttgacaaggcaacactagtttgctattnggatgtccatgatactagtgatctcccaggcaaatgacacccncagaagtactttntctatcaattttgcagcggcataatccgataggaataccaataagtca

SEQ ID NO: 10783 - DNA, 217 bp, Zea mays
tacaatcatttattgcatttaaataatatatagaactggttatgcataaaccggggcttgccttccaaggctgaggcaggtagatcctgtggggcaagctctggtgctggatccggggctacctcctgagcaactacttgctccggcacgaggacgtattctccgtcaacgaagttgcaatctatcgaatgcaatgaataagaaatatgtatgctat

SEQ ID NO: 10784 - DNA, 444 bp, Zea mays
  unsure (1)..(444): unsure at all n locations
ctatgtatcatgatagcaatttccattatnaataatcgcaaccatgcaccaagatagactgtccatatatagatgggccaaattaaaaaaatgtcctttatagaatcctaaagtaacctacatttgaaattggagggaggatatttgttacggttaatacaaataattttgtgcttgataggttaggccaccatgttccatgttgatccagtatatccatccctatatttcatttgaatgtaggattgaaacatctttntatctattcattcgtgatctgcagggatataactcacttaatgagtattgtcctgcaatggaaatgaggccaaatccacaatgctcgaatccagcatgtgttctcagacaggtgtatggctttgccacaaaatatcgctatgtctaaatatgaacgctgatgaaggatttcttacaccatcattt

SEQ ID NO: 10785 - DNA, 215 bp, Zea mays
tgaggagctttttttaaaaactacgccatgggtgcatctgcacattggtgagccgtgctaccccttggccgaggctactggcgattgcattggatctttttcttggaaacctgtggctcggctctcgagctcttcctgtccacacaacctctagccaattctatccaacccatactttcctgctccctgcccatgctcatcactcgtgccatctg

SEQ ID NO: 10786 - DNA, 405 bp, Zea mays
  unsure (1)..(405): unsure at all n locations
ctgcagcttagttccggaaaatgacctgcgtnctnccaattccatctctcaggcatccaattctgtgtgccatcactggcttcgttcgacgtgggagtactaaacaagctgcaataattcatcgcgcctttattcttgcaataattctacgacctggctgaatgctgcgtgcgaggtcagtcgcgcgcctataaaacacctcgttccgtgcctccatcaggcatccaagctcatagcaagcagatctaagctccaggcagcgtcctacagagtgagctagtgagtagcacgacaacaacaatggcttccctgaatgccgcgaagcccagcggagttgcggcgcatggcaaggagccggcgcccaagctcagcgagacggcgacgaagccgtcagccgcgaagagc

SEQ ID NO: 10787 - DNA, 215 bp, Zea mays
tgaaggactgtttctgctggagagcttccgagcgtgaagacttgttcggtccgcggagtcgctttatccgagcgtgagttacttatcgcagaaggtgatgagtgaggtatccgtatcccggaggcgtaggagtccctcggctcggtcagccttggctgcttacgtgtactccgtcgtttccaggatccgcttttcgaagtagtcaagaagcacga

SEQ ID NO: 10788 - DNA, 332 bp, Zea mays
tgttacaaatcctcacccccttaaaaagaatctcgtcccgagatttgtaagaaatgggatatataaagtcaaaggcttaggttgcagtttagcttcgaatttttttctaagtggctttaagcacaaatgttttcataataatcttttttataaggaattgattacacatgggtatatttatgtatatccactctactatgtagggtaaaaaaaatgtctctaaagcatagataggtctgggtaagataaagtggggtaaggaaagactccatccaagaatgtggatcttgactcttttgaagatctggcttgaatcttatccttccttgatt

SEQ ID NO: 10789 - DNA, 216 bp, Zea mays
ttatgtaacttatttactgtctgtggtgcaacttaagataacaaaaaaaagtcagatgaaagtatgttgcaacataagtatgaattgtttatacacattatgtgttacataaagcttgtttgcttcttcagatgatatactcaatgtgttgcaacataaacaaggatggacaaaaggatgggcacaagtgatggcatttggcacgcaccactcaaa

SEQ ID NO: 10790 - DNA, 356 bp, Zea mays
  unsure (1)..(356): unsure at all n locations
ctcttcacttaattgctcttccaagatatgaatttactaagagcaatatcacaagtgagaaaagagaacttatgaagaaagaatatcgcaagacagtatagcagacaggtgagacaacaatnttatctagtggttcggcaaaagcctacctccacgtttgtgtgtccttctttggacanggggtggaatcaacccctgtcaagtgatcacgtagatcanacttgcgtgccacagttcttcctaatatctcaagtattcccgtttgcaatgaatctccacagcttggagtctctcgtggncttacaaaagatcanaattatcacttatagtnagggtgggagagagagagagtctct

SEQ ID NO: 10791 - DNA, 224 bp, Zea mays
  unsure (1)..(224): unsure at all n locations
aatactccaagacttttgtgaaccattttaatnccctctccacaaactccctgtgaagattgagcaaactctaggcatttttccttgaccggcactgttgctcgggagcacggccctgtcgctcttccttttttgtaattttggatctgatatctgcagatagttgggcagttccctatgtagcagtttggtatataactatgtttcgcagttcaatcatcctg

SEQ ID NO: 10792 - DNA, 340 bp, Zea mays
gtgattatggacgagaacatacgagatgaggtatatgggcttatgaacagaggatacaagtaccatacaggatggagattgacaggacctgcctatggaaaaggagagggtacttccaacggccacttatgtgaattgccactctcaaattgaggtgaaagagacgagattgttaaagagctataataaagatgagtatcatggcatgatcgatggatgatatggtgatggtgatataaaattacaacacagcctaggatggaattaatactatacttgttaggcgaccaggagtgaaaagaaatcaagggagagagaggtgactcacaactctcaaact

SEQ ID NO: 10793 - DNA, 452 bp, Zea mays
  unsure (1)..(452): unsure at all n locations
atcttaagtcacctgcggcatgaagcttctaagggagaacacattgtaggactattcaatggttcatttgagaaagacaagacttgtagcacatgctagacaggaaagcaagttggagtccatcatccacacaagaacatcatgacgactgacaggccgctcgagttactccacatggacctattcggccgatcgcttacataagcatcggtgggagtaaggactgcctagttattgtggatgattattctcgcttcactcgggtgttctttttgcaggaaaaatcacagacccaagagacattgaaaggattcttgagacaggctcanaatgagttcggattgagaatcaaaaagattagaagcgacaatgggacggggttcaagaattcacaaatagaagtatttcttgaggaagagggcatcaagcctgagttctcttctccctacaca

SEQ ID NO: 10794 - DNA, 200 bp, Zea mays
caaattcagaagggagaaagcagcttcagcagatcagccgaagcccatgctcttatgtgaggacatagcagagcagagggtgctgttgggctctcaattatccgaagaacaggagaaaaccttgatgaggtttttgttcaacaacaaagatatttttgcatggtcagccaatgatctttgcggagttaacagggatgtta

SEQ ID NO: 10795 - DNA, 344 bp, Zea mays
  unsure (1)..(344): unsure at all n locations
tcaatgaatattgtattgaatatgttcatagatcttcaattcagtcgcatgcactggcagactttattgctgattggacaccatgggctcatgaggaggaaacaaataaagacaacgaagcctggataagtgtttgtcatggatcttggngaacctttcgacangagcggctgctgttgtggtttcaccttccaaagtcaaaacctgttatgcggcaaaacttgatttatatgcaccataacatagctgagtacgaacattgatttatgtcttcanagttaaagcaatgggaatataaaggcatactaaaactgattccagngntgttcggtcatattgacaaa

SEQ ID NO: 10796 - DNA, 211 bp, Zea mays
tacttattctgggagatgacgctagaacaaaattttaattcccatcttgttcctgagcagcatagggttagacaagccactagtgaatttagagagtttgctatcatttggtggaatgaacttgttaacacacgtgctgcaccacaaacatggaatgcgttaaaagaggagatgcgagctcgctttgttcccccttcttatagacgtgatc

SEQ ID NO: 10797 - DNA, 463 bp, Zea mays
  unsure (1)..(463): unsure at all n locations
tgcaagcttggagccctggatatctgatgttatatctcggtctatnntttatgntgaaagctgtacatgtagcaccaatgtgtctcttacggtctcaccatgtcaatgatatatcttaatttgtgggtggacaatggttatagattactgtgtttgaagtcaccttgtttttgaatacaaggattcactgcagtaaaaatagcctccatgttttntaaatattggtcaacatgtatattcttgtacaaactctccagagaagcattttatattgatattagaaaccatacccatacctttatcattttatgaatntgatctctgacttaactttggatgataattccaaatggttgcaccccatggacaatntagttgctgcatttatggaatctgaatacctcttatgaataatttagtggtaatagtcaaatattnttggatgttggtccacatctcattg

SEQ ID NO: 10798 - DNA, 209 bp, Zea mays
cgcgttttttttcttttgccaaccgggggagcgagcgtttacccgttcttggggacaacatttctggtgtacatgaccttcttgaggaacccgctgcacagctcctcaagggtgcactactccctccgctacaaatggggcgctttgtgcatcacgtagctggtgaacccggcgagcgcccgctggcccttgccaccgcctactctgct

SEQ ID NO: 10799 - DNA, 373 bp, Zea mays
  unsure (1)..(373): unsure at all n locations
gagctcttgatgattagggtcatctcctcatagtcgatctttgacgcgacaattggntgtctacttggcgtagactccttcttcttctcctccgttgccttaaggccaccggttgcgcctcggatgtggaaggctcgtcaagctcgctgatcttgctggagcccttaatcatgcattcagaactaacaaaattcccgatgacttgctcggaggacattagtggatatcttggattaccacgaactaattgaacttgtgtggcgtaaggaagataaaactcttataataaccttaaccacttcgtggtcatcccattttgtactcccgaggttgcgcacttgggtcaccaaggtcttgagacggttgacatgtc

SEQ ID NO: 10800 - DNA, 210 bp, Zea mays
ttttcctagttttaaactcagctcgaccctcaaaactaaccttggcatacatctgagcaaatgagaacctgccgcagttcagacatctcatgatctaaacaagtaattcttgtagaagagagtccaatcagagtcatccaatgtgacaagctcgaatccttctgcattcatggacttcgcaactgaaacaggatttggagaggccttgat

SEQ ID NO: 10801 - DNA, 210 bp, Zea mays
ttttaagggttagcacattttaggattaacaaatgttcattttgagaaagacaggatttgtagcgcatgccaagcatggaagcaagttggtgctcatcatccacacaagaacatcatgacgaccgacaggccactaaagctcctacacatggatctattcggcccgatcgcttacataagcataggcgggagtaagtactggctaattat

SEQ ID NO: 10802 - DNA, 475 bp, Zea mays
tggaaagaacccaatgagctatattactatatatcatatcttcaagataggtgagtatatgtccactgaggcttgaacacagatacggcagaggcgcaaacaacaccgagataaataaacaaatgcacaaggctgttctacttctaaatgcattggccagttaccacttaatatactgacagtaataaaacattatattagcgagaaggcacaaatttatagtacaaaaaattcacacagatgtagatataataagaaagcctaagaagaaacatgatgagcatttaactgacatgatcactactcatattttaaatcacggggatccctattattggtgcaagtgatcttaccttcctgctcctcttttcagccctcatccatatctgtacacctctgacgctgctcacttttctgtcattgctctaccttcttgaaaaaaaataaactttttatctctttgcctatatttata

SEQ ID NO: 10803 - DNA, 361 bp, Zea mays
  unsure (1)..(361): unsure at all n locations
atggacgtgaagagtgccttcctcaatggaccaatttaggattatgtctatgtngagcaacctcccggctgtgaagatagtgagtatcctaaccatgtctataagctctctaaggcgctttatgggctcaagcaagccccaagagcatggtatgaatgccttagagatttccttatcgctaatggcttcaaagtcggaaaggccgatcctacactctntactaaaactcttgaaaatgacttgttcgtatgccaaatctatgttgatgatattatatttgggtctactaacgagtctacatgtgaagaatttattatgatcatgacacacaaattcgagatatctatgatgggggaagtta

SEQ ID NO: 10804 - DNA, 392 bp, Zea mays
ataggcaagtaatatgcgaattgtcttattcttatctacgggtgcataggtttcaccaaaatccaaaccttcgacatgtgaataatccctaggccacaagcctggcttagctcctagtcaccacaatgctcatcttgcttgttgcggaatacccacttggttcctacaacattatggttaagacgtgggactaaatgtcatacctcattcctagcgaaagtgttgagctctctttgcattgtcaacacccaatctgaaaatcttaatgcatccttcaccctgtatgactcaatagaagacacgaaaagagcaatgttcacattaataagcgacacgagatcgagttgttacccccttgtgaaaatctgcaaggatggagttcacagtgtgat

SEQ ID NO: 10805 - DNA, 399 bp, Zea mays
  unsure (1)..(399): unsure at all n locations
ctaagcgtggggaggttcttcatcctcacatgtgctaagcggcgatgcttcagtttcctatgccagtcttagcgatgaagcatgcatctagaccggcctcttctttcgcaaaatcaaccaaataaagtgtgtcgtctagtacacccttaaaagctagtgaaccatcacatcttctaaagacagacacatctacatttgttaatagacaattatatcccatgttgcataattgattaacagataacaaattatatcctagcgactcaactgagaacacattataaatagagtgctcagatgaaatagcacatttacctaacccttttaccttgccttggttcccatcatcgaatattattgaatcttgaggatccttgttcttgacgtangaagagaaca

SEQ ID NO: 10806 - DNA, 428 bp, Zea mays
  unsure (1)..(428): unsure at all n locations
ctcaagcttgatcaattaacgaanagattgagttcaccaccagtgttggtttgctttatctcagaanggatttgacatttattgtgatgcatgtggccaaggattgggatgtgtgctcatgcatgaatgacatgtgatcgtctatgcgtctcgtcagctgcagaaacatgagtngaactaccccactcatgacttagaactggcagccgttgtgcatgcacttaagatatggagacattacattatgggaaccaagtgccgagtatacactgatcataagagtttgaagttatattcactcagaaagatcntcaccttatgcaacgccgctgggtggagcttattaaagattatgacttggagattcactatcacccatgcaaggcaaatattgtgcagatgccttgagttcaaaagagcacgtctat

SEQ ID NO: 10807 - DNA, 310 bp, Zea mays
tatcctgaccatgctgagagccgacgggaggtcgtatccatttttttatgtcggagcttatcctgcattgaagtgttagacgagacgttttacggcgtctagtcggtgctaacaaaatagtgtttggcacgcgaaaaaaatatgcggcggtcttgatccgagcgtcactggatggtgtagtaaatggatttgacaccggtcttgtcgcactgtagttatcctatccttggcagggtttgcagatgattaagcagctccctaattatcctgtgtgggacagacgatccgaggctggctcggtcgggacaaa

SEQ ID NO: 10808 - DNA, 405 bp, Zea mays
  unsure (1)..(405): unsure at all n locations
tgttcgcaacatgagagcanagagcgacccatggtttgcattttatttgtcgcgtgncggngggggaactgaggaagtgaacaacgatggtgatgttcgtcttccacatgaagtatgtgtgccatataccggtgatgaccgcgaccttgacaattgatagatgacatttaccccagtctaaacgaaaacatgtctaatacaagctacatcacttcaagagcaatattgactactcggaacgactgggtggatatgataaatatgaggatgatcgatcgttttcaacgggagcagatgatgtaccatatctttgacaccgcggtggacgatcctaataactattatccatcggaattcctaaacacgctgagtgctaatggactacccccgcacgttctgaagctc

SEQ ID NO: 10809 - DNA, 471 bp, Zea mays
  unsure (1)..(471): unsure at all n locations
atagatactaagctgtgaaattcttgacccacatgggctttccgtatgtcttaccaacccatgttagcttagcaatgaagaagtgtcgagttcagctctattaaaatcaactaagtatagctgaccctgtaacactgccttaaatgctactgaatcatcacttcgtctagagacaggaacacctaaatctgaaaaaagacagttgtagcccattttgcataattgagaaacagaaagcaaactgtaatctaatgaatctacaagaaaaatattggaaatagaatggtcaggtgatatagcaattttacacaaacctttgaccaaaccttaatttccatcctcgaatgtgatagctcgttggggaatcttggttttctcataggaggagaacatacttttctccccagcatgtgggttgtgcacccgtatcgatgatccaacttgagcccncggatgcataacctacaaata

SEQ ID NO: 10810 - DNA, 441 bp, Zea mays
ggtgggaagcacgcagcacctcgaggatataatctttggtttacttcagctcgccaagtcaggacactggagattgggatgccctcagatcgccgcggtgatggtccaagtctgaccatggtaaacggtgactcctctccacaatggtcaaggaagtgctggcgtcacagtatagcctatccaaattgtcatgagaagcaattcagtgctcgttttcctcctgcaagcaagaacaacactaagcatcgaagcaagggaagcaagacagaagcagccaagagagtttacctcatatatgccatcttctcggagtcaagttgtgcattcagagaagagtttaaggagcgagcactgtccaagaaggcagaggtttggctcaagtcagcctaactctatgtatacttctcttcactatcagagcatcatctagccaaagctgat

SEQ ID NO: 10811 - DNA, 353 bp, Zea mays
  unsure (1)..(353): unsure at all n locations
aacactaagctgggccatgggaacaaaatcctgaagcttggtgtttactgttgtctgtgcactggagttcgcggactccgaacggcaacaatgtttgccaaaaattctgtgcagcttgatgttactgtggaacagccctcgctcgatccattggtaagtactcaagccacaacggaacttacgttccctgacctgggcatggccgacatgtcagccccacctggaaggcatggtggggatcgtttgaaattgcagggtgctgacacgaaaaatttggangcttccagactttgaccgatgtaccagtattggggcataaaccagggtactttcgtaggcctggctgctaaccg

SEQ ID NO: 10812 - DNA, 214 bp, Zea mays
  unsure (1)..(214): unsure at all n locations
aactaagctggctctgcaggcgtcattggcgcactaagantttttatttgtatgngcccctttgttgggacaacgttttctactgttgggaaatctgctgggtttttgagctatgacnttgcaggttctgtgacagaaaatcatcttgtaaattctgtgctttgacggaaacacaaaggtggggtgaattgattttagggatctcttctctctc

SEQ ID NO: 10813 - DNA, 307 bp, Zea mays
atgttgatgatatcatagcgataaacacgaatcaaaacaatcacattgctgatttgcaagagacatttgccaattccaagcaagccgacctaaaattaaatccacaaaagtgtgtttttggtgtgaagaaaggcaaatatcttggttgtttggtatcacataatggaatcgaagcccacccaagaaagattgaagctatccttcagatggagccaccaagcacaaagaagggggcccaacgactaacaggaagactggctcattaaatagattcatatctagatcagcagaaagaaatctgccattc

SEQ ID NO: 10814 - DNA, 494 bp, Zea mays
  unsure (1)..(494): unsure at all n locations
gctgagccttcanatttctggatattgagatgcaagacactcctcactatttgagcctcttggccagtattacgatcaagaacacagagaacaaaagcaataacacaatccagaaacacaacaccacaaacacagatcacaaaagcacatagccttatcttctctatagaaagactagctccacacaacaccacagacacagatcataaaaggcacttgaatctctcgaaatggcttggagaacagaagtgtttggggctaaaagtacgacacttgtattatttggtgtttaatagaggttgtttgggtatttatagctcanaaccacttaaacagtgttggctaaaatctacataatctactgtcctctgatgcaccactagacctccaacggtcacctcaatcaatgggatatgccctctatgtgtgtcatgtggcactggaccagtccagagtggcacctgaccctggcacgagtnctaccacatcaacta

SEQ ID NO: 10815 - DNA, 472 bp, Zea mays
  unsure (1)..(472): unsure at all n locations
tcgtcagttgtggcccgagtggactcagctcgacaggcaaatttcagtctttacctataagattacttctacttcgatagcagagggtgttgcaacacattcttctgcctcatcaattgctttctgcttcggagttgtagctttcttcttcttcttcttcanaatacctgttattggctcaggctctaacttgctcttcttcgggtgctcttcatcgnctttatatatagcaccagctactcttttcctcttttgaccttcngcatccttgtctagccactcgtagtcggggtattcaaaatccatagcatccattacatgnattaacctccgcttctgacgggtgccgaaggccgcaatcatcaattgatcttcttttttagaataattcgtcgagcatttcattgcacattacttcaattgtgttcagccactcttcgcaaagcacatttgaatgttcttgaattgtaat

SEQ ID NO: 10816 - DNA, 268 bp, Zea mays
gcgccctctccgctctgacagcagatggcacacccagcgtgcatgggcacctaaacccgcgcgcgaacatattcaccttgagagccgggaccaactctcacgcatatgatgaatcatgggtcatgatcgacatgctcaacgttactatctattgggaggagtgtcccaaggtaataactgtgtacattataaggagacggctgtcgagcaaccctaagatgactgggagacgacgatctatgactctatcactaactacccatacaca

SEQ ID NO: 10817 - DNA, 393 bp, Zea mays
acacatgaactaagctgtaaagcttctttagagggaggtaggtttatttcttggagagctttttgaacccgatcttataagagcctgctgtactctatatattgttcttaactatattaagatagaaagcttagattatatctgtactctttcgtcacaatgttatcgttggattatgctgcccactttttaagttatctaaattatatatatatacacatttgttttcaaataactacataaaaagatcagatctattatgatctatatggttgtttaacatttattaaatagcaagtaaccctgatttaaagtaaacacacattgtgacaagaatactttcttatcaactattgaccatctaggtaaagaatagtatattagtccctatca

SEQ ID NO: 10818 - DNA, 436 bp, Zea mays
  unsure (1)..(436): unsure at all n locations
tntgtggattaagtttcaagtatttacaggatcacctattctcttctactctaggngctctcactgacacgtatccatccattgggtcctcaacatcagaagggttggcgtggtcttcaacatctgaagggggatgatgaaggtcccaaccaggacatttattctctagatcttcttcacacacaattgaagtcttctcgaggctcttgcagacatccttcaaatggccagcaagctttccaacattacccccttcaacttctgggatactacaacacaacccattaatggtatgtaacagtgaagattgcctcctcatctcttgaatggcatatcgaagtgagttcttgatgctaacgtgatacttacaatcaacatgttcctgtacaaataatactagttcanatacttgtgaagaacagaccctattccacat

SEQ ID NO: 10819 - DNA, 406 bp, Zea mays
  unsure (1)..(406): unsure at all n locations
tatgaaaantttcatccaacatgagctactctgatatgtcttattcttcccacgtnaggcttaacaattaagcaagtgtccagttcagctctatcaaaatccactaagtataactgaccctctaacactcccttaaatgctattgaatcatcacttcgtttaaagacagtgacacctacatcagtgaataaacaattgtagcccattgtacataattgagatacagaaagcacagtgtggtctaatgaatctacacgacaaacattgtaaatagaatggacaggagatatanctattctaccaagacctttgaccaaaccttgtttacatccctgtatagaatagctacgtggggatcttgcgtcttctcatatgaagagaacatctttctctcccagtcatgtgg

SEQ ID NO: 10820 - DNA, 480 bp, Zea mays
  unsure (1)..(480): unsure at all n locations
tcgcacctctgaactaactcggctgcatcactctttgctgtttgtcaatagaatcctgacctgaagaccttcccgactagtgtcctggatgctgcatgtattccattgcccagcatggacctcctccagaattcgcttcctagtagatgggagaatgcacttcatgaggacgcctgatgcaccccttctgtacaatgtctccccaatgagtgtgtagtgagccgactgtctggcaatgcgctcggctgcattnntgtcatctggttcctcttcattctttatatacctgttgattggccttctctagtcatcagagtctgactcgggttgacctataatattacactcttctgcttgatccattgagatgctcggctgtagtatttcttgcacaaagactccaggtggaacctgagttcgactggatcctatcttggacaatacatcggctgccgtgttccgatctctttctacatgatg

SEQ ID NO: 10821 - DNA, 456 bp, Zea mays
  unsure (1)..(456): unsure at all n locations
tgcttntgaaataaatgtaagactatgtaattgcttccgcatttctgtatctccgacgctctgtaatgtctgcaagacaggtgagacgttcctggtgaggtaaggaataataccgagcttgtcaagtgacttaggaacatctacagggtgtctgatgtctgttggacaacgacaactatatgtgggcctaattacttgggaggtttcgtcacagctggtatcggagcgtagcccttctttgcagatattatgaggcatcttcaaaaggaatttccaaagtcttacctaaaaactctcttctcttcttacgtaagtattctgaagagtctatcttaaaagaccacatatgaagagtgcaatgtatataaggttgaatcgactaagggtgattctgtacttacacatgcatcatgctaagcactatatttaaaaaattaccccttagagaaatgttgt

SEQ ID NO: 10822 - DNA, 468 bp, Zea mays
  unsure (1)..(468): unsure at all n locations
tatgaagattcttcatcccaacatgggctagtcggcggtgcctgagccaacccatgttagtcttagcaattaagcaagtgtcgagttcagctcaatcaaaatataccaagtatagctaaccctctaacactcccttaaatgctattgaatcatcacttcttctaaagacagtgacacctacatcagtaaaaagacagttgtaacccatttgacataattgagaaacggaaatcaaatngtaatctaaagaatctacaagaaaaacattggaaatgaaatggtcaagtgatatagcaattttacccaatcctttgaccaaaccttggtttccatccccgaatgtgatagctcgttggggatcttggtttttctcgtaggaggagaacatcttcttctcccctgtcatgtggtttgtgcacccgctgtcgatgatccaacttgagctcccggatgcataaacctacaaaa

SEQ ID NO: 10823 - DNA, 464 bp, Zea mays
actaagctggggccatggaaagcaacatctcgaagtctaggttatttaactgtctgccgttgacaactgtcagtgcgaacggttctccgaagcggcaaacaatgttctgccagaagaatatttgggcggtctttgatgttattgtagagacagcccgcgcctcgatccatttggtgaagtactccacagcgacgaaggcgaacttaacggttccttgagcggtgggcaagggcccgacgatgtccaggccccagcgctggagaggccatgtgtgggcgatcagctttgtatactgcgaggggctgcccgaccgaagagaaaacttctggcaggcttctcaggaccaggtgacccaatttgtggcgcagatcattgcgggccagtgataaccctcgcggatcaccttatcagctatggcccttgggcctgcatgagagccgcacgtgccactgtggacttcacgt

SEQ ID NO: 10824 - DNA, 400 bp, Zea mays
aagcacgttagcgttcatcaaccacacgagaacatcatgacgaccgacaagccactatatgctctacacacggacctatgcggcccgatcgctacataaacgtcggcggtagtaagaactgactacttattgcggatgactattaccgcttcactagcgtattctttttgcgggaaagtctcatacccaatagaccttaaaaggattcttgagacggactcaatatgagttctgcttgaggatcaaaaagattagaagcgacaacggtacggagttcaagaactcacaaatcctatgctgtcttaatgaggagggcgtcaagcatgagttctcttctcctacgcgccacacaaaatggttattggagagaagaaagaactctttgacatgcagaacatgc

SEQ ID NO: 10825 - DNA, 481 bp, Zea mays
  unsure (1)..(481): unsure at all n locations
atgacttgatgtaccatggtcatgaccattctcttcttcattactttggtgattntggtgaaattcctcatttaaagttgaagaggaatcacgctatcatcatcttcttcttttggtttaatttcaccaatagccatagtcttaataacattcctcgattgtattccactaacatcattaagattgtcaacctcatcttgtgacccatttgtttcatcaaactcaacatcacatgattcctcaataattccataagtcttgttgaaaaccctataagccttgctatttcaagaatatcctagtagaaaaccctcatcacacttcttaaatttagagagtcggctacctttcctcaaaatacatgcattgcaaccaaatactctaaaatatgaaatggttggctttctaccaataagcaattcatagggggtcttctttagagcttatgccatataactattagagcatgacagcggtatta

SEQ ID NO: 10826 - DNA, 392 bp, Zea mays
tgctacaggccttcttctttttctccatagcaggaacctttcttgtacactaccccacttataatgaatgatggtagaactcttgaatcttgtggatctgaactccttgaagtacctcataacaagggtgttacggtgcctccttctgctgttgctgcttgaccaggctgcggagagatgactggcacagggttgattctgggagaaccttcttcttatcttctcttcactatcttagtttctcttctcacttttcactgttcactgcctctttctttctctttgctattcccactagaggattctatcgatgagtattaccatcatacagaggaggaaaccatagactatgaaccatgtgcaacagtcttctacccaagaattaccataca

SEQ ID NO: 10827 - DNA, 328 bp, Zea mays
atccacactagaacatcatgaggactgacaggccacttgagctactccacatggacctatacggccgcgaatgcttacataagcatcgacggcagtgagtactgtctaattattgtggatgagtatgctcgcttcacttgcgtcgtctttttgcaggataaaactcaaacccaagagaccttataaggattcttgagatggcgctcaaatgagtaccgcttaatgatcaacaatattaaaagcgacgacaggacggagtgcaagaactctcaaattgaaggctttctcgaggacgacggcatcaagcatgagatctcttctccctaca

SEQ ID NO: 10828 - DNA, 496 bp, Zea mays
  unsure (1)..(496): unsure at all n locations
tacggacctataaaactcagcttgtcaacagctacagnttctctatcctagtagtttgactgtgtcttctcaatcttttgatcctggtcactcttatgtatgggtcctgctacctctcgtttgaaagagggatggcacgaaagaagctggaattcacaagcaaactcatcacaggagttgctaaatatgtgtttaacagagagcttttggatggacgtccatcgacagacgtattatgtaattaaatcattgggacgttgttgcgttgttcgggttagccttgttcggacatcatgctgctatttcgcctcttttcatatttctagactctatctggtattgggagctaaattgctggctcatggtcctattgggcatggttcacctgtatgtgggtgatggaatgtaattcttttctttcttgtctggatgatgagagtagagttgtgacaaccatgcctgtatgtatacaaaatgtggcagtctgattgactat

SEQ ID NO: 10829 - DNA, 468 bp, Zea mays
gtgatcaccaaatctattcgtactgggtaggtggctactctttattaacaccgttctctgtgggtgatgcattatgtcattgctctcctcatccggcaataaaaacgctctattgtgatggctcggatatataatactattagtataatgcctcaggtttgcgacattatacaatcatatttaatacttataaaaaaataaatttaataccaagttatataggatccacatatatcatatattaagttgataaagacaaatattatactttatcttagctagaagttcgagaaaggtataaatttaaaaacagctcgaaccttttttctccttcagctagtgagcaaaagcatggtacaatcatatttgatgtgctcataacgaataaatctaataccaaaatacatatatcagccacatataagatatattatattgagtataataaatattacactttatcttaac

SEQ ID NO: 10830 - DNA, 481 bp, Zea mays
gcttctaagggagagcacagttcaagagtaacaaatgttcactttgtgaaagacaggaatagaagcgcatgccatgcggagaaacatggtggagtccatcatccacacaagaacatcatgacgaccgacaggccgcttgagctactccacatggatccattcgggccgatggtcttggcatagaggatgattattctcgctccactcgggtattctctttacaggaaaaatctcaacacaacagactgtaaagggattctcgagacgggctcaaaatgacgtcggcttaaggatcaagaaaataagaagcgacactgggacggagtgcaagaactctcacattgaaggctgtcttgatgaggagggaatcaagcatgagttctctcatcatacacttgagagcacctagaggggggggtgaataggtgatcctgtaaacctcaaaacttacgcacacaacctggtattggtagcacaagat

SEQ ID NO: 10831 - DNA, 470 bp, Zea mays
  unsure (1)..(470): unsure at all n locations
tataacangaggatagaagcaagagctcgaccatattgtattatataacgngagtgatacaagcgtggggtctgctccccattactcaagtgcttatccacatccgaaggtatataattaatgaaggacatacatgcatgtctgtgtggatctcacattggatctaggcccttgcttgggaaagattttcgccaaggatattattggccaaaggcagcttctgatgcagcggatctagttcaaaagtgcgaaggttgtcataaatgtgcaagagatcacaaacaaccttcgtctttaactcaattaatacaacccacttggccgttgcagagatggcgtctagatttgctaggtccattaccaccagcacagcggaacttaagatatgtggtggtggagtggaatatattccaaatggattgatgcgaagaccttagccacaataacttcatttactattcaaaagattt

SEQ ID NO: 10832 - DNA, 468 bp, Zea mays
tcaactcttcgaaccatatccagatatttttcaagcttctgatccttagccttgcaactgttgtcaacatgacccgaaacaacctgcgaatcagttttaagtatggctcttctgattcccattgcttttaactttcgaagacctagaatcaatgcttcgtactcagcaatgttgtttgtgcaattaaaatcaagctttgctgcataacaagttttgactttggaaggtgaaaccaacacagcagccgctcctgctccgaaggttccccaagatccatcacaaaacactgtccaggcttcgttgtctttatttgtttcctcctcctgagcccctggcgtccaatcatcaataaagtctgccagtgcctgtgactgaatcgaagatctatgaacatattcaatacataattcattgagctctgcaggccattttccaatccttccagtagcttctcggtttctcataata

SEQ ID NO: 10833 - DNA, 459 bp, Zea mays
tatgaagattattcatcccaacatgagcttgttgcttatcttgtaccaacccatgttagtcttagcaattaagcaagtgtcgagttcagctctatcaaaaactaccaagtatagctgaccctctaacactcccttaaatgctattgaatcatcacttcttctaaagacagtgacacctacatcagtaaaaagacaagtgtaacccatctgacataattgagagactgaaagcaaattgtgatctaatgaatctacaagacaaacattggaaatagaatggtcagaagatatatgcaatttacccaatcctttgaccaaacccttgatttcatccccgaatgtgataagctcgtggggatcttgggtttctcgaagaggagaacattttttctgccctgcatgtggtagtgacccgctgcgatgaccacttgagcccccgatctaaacctacaaacatgt

SEQ ID NO: 10834 - DNA, 460 bp, Zea mays
taagactatcaatcacaaactgtgaatcaaacacattgtgttaccgtcttcaatttcagtcacgagaattcaagatatattattcactcctaagaaagcaaaacctattcttatcgatggggtaagtgaacatatctgctagttgactttccgtgctcatatgaaacaatacgatatcttctttggcttcctggtctctcaagatatggtgtctgatcgcaatatgcttagttctagagtgttgcactgggttgtcgcaagtctatggcactctcattgtccacaaaagtgcaatttgttaactcacaaccaagtctcttatggtttgcttctccatacaactgtcacaacatgcccactgcttgtctcaattctgagcggaagtgcacacactctgttctggactcatgatactatgaccgccacgaatggaagtccatagtcttttctattacttgca

SEQ ID NO: 10835 - DNA, 435 bp, Zea mays
  unsure (1)..(435): unsure at all n locations
tatgatgcttggagtcagccatttactctttgcccttctagcggcttcctgacttacatggatagcaatgggtccctgttccgaaggtatctncatgcaaagataagcaggatgaagaattgcttccaaagcattatgagtaccacgaccaacaattgcattataaggatattccatgtcaacaatgtcaaacacaacttgctcagttctagtgttgctgatgaatccgaaggtcactgacatggtgatcttgcccaatgctacaatctgtcttccttcgaagccacagagagggtgtgtagcatcatgaatcttatcttctggctcttgcatttgtctgaaggctttaccanatatgatgtcagctgcactgtcttgtgcaaccaagacattgtggaccagacatcctttgttacacaagagataccatggcat

SEQ ID NO: 10836 - DNA, 263 bp, Zea mays
ataatagcgaattctttagctctgtggccaatatccaatactttcagtagctattatctttctcatgacatccatcaggggctggaagaatgaaccctatttgaatgctcgaaaatatagccgaactttctggacccagttagacaacatacacacctctctcaagaccgatatttgtcgttaaaaacacacacttctcagcgaagcatactggacttgcttataactagtcttcaacctctcttgtcaagcgcacactcact

SEQ ID NO: 10837 - DNA, 405 bp, Zea mays
  unsure (1)..(405): unsure at all n locations
ngngcagagaccgcttgaactaatattctgagaaacccgacctcagtgctttatgacaccagaaggtccaacccaaatagcgttggctgaattcacaattattgcatagcacactggcactacggatttagtgcacgaatttattgccttcaaagtatttccaactatgaaagagtggactatgccgaagcctacatgggagaagaaagaaagggagcttgtccggctaccctaccattataagttcaagaaatattttaaggctccttgccaagaatggctcgatacaatcgaaataatgagtactgaaattcttggaaattactctacacaggaggaccaattgatgacagtagccttcggcacccgcgcgatacgaaagctaaacagagtacttgatgctat

SEQ ID NO: 10838 - DNA, 456 bp, Zea mays
  unsure (1)..(456): unsure at all n locations
tattggctttctccacagactccatattccttcatatgatacttctacatataatagactcgaaaacagtattagtctcaaggacttatattatagagatacctccccctgatagtgtgcatacaagatttgaatacttgtaggagacatgcactttgattntgatattaagaggggcaaattatctataatccgagctttggcacatataacttaaatgatatcaattgaagtatggaggatatcaaatgtgaaatatgtcatataccaacaccaattgtaatatcatctacttagaatgtttaataagctatgtgccatacttaactaatcttgttaaaccatgtaagctngctcaagaatatgaattgaaagtgagcattcctaccatatgattgacctattatgcatgccgtttacatagaaagaacatataacatgcaatactatgcattt

SEQ ID NO: 10839 - DNA, 394 bp, Zea mays
  unsure (1)..(394): unsure at all n locations
acatgcgagcaggaagcaagtgggttcatcatccacaatacacatgagactgacggcgcttgactactcagaggatcattctcccgatagctacataacatcgccggagtaagattgtctctgaattgtggatgactattctcgctttacttgggtattctacttgcaggagagatcttatacccaatagaccttatagggattcttaagacgagctcgaaatgagctcggcttaaggatcaaaaagactagaagcgacaatgggacgaagttcaagaactcacanaatgaaggcttccttgacgaggatggcatcaagcatgagttttcttctctctacacaccacaactaaatgtcgtagtggagaggaagaatattactctaattacatgg

SEQ ID NO: 10840 - DNA, 447 bp, Zea mays
actcagcttctaagggagatcacgtgataggtttatctaatgtgcaattcataaaagatagaccttgtgcagctagtcaagcaagcaaacaggtgggaagctctcatcacaccaaaaatgtgatgaccacatcaagacctttggagatgcttcacatggacctcttcggacccgtcgcctatctaagtataggaggaagtaagtatggtcttgttatagatgatgactattcccgcttcacttgagtattctttttgcaggataaatctgaaacccaagggaccctcaagcgcttcctaaggagagctcataacgagtttgagctcaaggtgaaaaagataaggagcgacaatgggtccgagttcatgaaccttcaagtggaggaataccttgaggaggaagggatcaagcacaagttcttcgctctctacacaccacagcaaaatg

SEQ ID NO: 10841 - DNA, 393 bp, Zea mays
  unsure (1)..(393): unsure at all n locations
tggtgccgatggagaagcaganatccttgaagtcttggctgttcaatngcttgccattgtcaactgtgagctcggacgggactccgaagcggcaaacaatggtttgccagaagaatatctcggcagtcttcgatgttattgtggatacagccctcgcctcgatctatttggtaaaatactcgacagcgacgaaggtgaacttgaggttcccctgtgccgtgggcaggggcccgacaatgtccaggccccagcgctgaagaggccatgtgtgggcgattagctntgtgaattgcgaagggcttcccgagcgtggagaaaatttctggcaggcttcgcanggccttgtgacccgatttgcggcgcagatcatggcgggccagtagaaaccttgac

SEQ ID NO: 10842 - DNA, 493 bp, Zea mays
actcatttattctgaccagcttgcctctcagctttgtgctcttaatgtgtattggtggcacaaatcctcaccgaaacaactatctaaccctaaacccttcactgacagagatcggagttgctcgttagcggaaatgacagaccagaacttgttgctgtatttggtgtgcaccccatgcacagcaagcttacgtagctgagttagctcttcaagatctatcatagcggtcttgctccgagaaacatcgacaactcctagtgtgtgcagggctttcagatgtctgaatcctctacgagctctaacgcccccaaatagaatcatatttaaggtggatatcatgttgaagatgaatacatctcgcctgatgagaactgcacccatagcttgtgggcttcatcagatatagcaaattgacaagcccaagatgaacccgtatagacccattctgatgtggttatacaagatgtcgcgtattattcttctcatgggacat

SEQ ID NO: 10843 - DNA, 390 bp, Zea mays
  unsure (1)..(390): unsure at all n locations
acacataaaacncagctgatcaatatctgcaaaaatattgagccaanagataatttggtttaacaattcgacagaagaaaagctgagtaccaaagcttcaggaaacgatcatgtgtgataggctcaaaaccgcatagagtaccaagaacaagagctcgcagcaagttctgatgaacacatctaatagtattctattcttccggaacactaagatgattaagaccataaaacgttctggggacaagatgaaatcaaattgccctatgggctaatcacacttgcaacggtcaagcatcacataaactgcggccattatatctgccatcccacatggaaagggaaacatcattggcttattgggactaccagacagcaaaggatgatctattt

SEQ ID NO: 10844 - DNA, 517 bp, Zea mays
  unsure (1)..(517): unsure at all n locations
aactaagcttcggacagcaacaaagctatcctcggcccccagctccaatgtgcatatgcgccaggggcttcgatggaagggttggtgatcagcccaggaaaatttattatctattctgcggtgaggacaagggccatactacaaggatgtgccatgtcaccatccagaaaaagaaggagatagcagaagctgctgcccaacagaaccagccgaagcaagttatgcatactgcttcgtatcattcatcgtacatcccagagtatgtgggtaaccatcctgcagcttctgttgcttcggcaagtcaacctcaggcatcttggcaacagcctccacctccaccaccaatgcaacgaagccagcagccagaagggagccagcacactcaccagcaacgagacttcagagaggagtccgaagctcgcacagtcaacagcactgtgccagaatcgaagaaaatctactagaagatatcctacctcttcaacnagttttgcattcgcatcattttctttttaat

SEQ ID NO: 10845 - DNA, 309 bp, Zea mays
  unsure (1)..(309): unsure at all n locations
acataaacctaagctgcacttacaccaaaccgcacccgcatacatatgttattctttggttcttttatagngggaaggtctaagtaaccaagctggtacgaattaattatgctattggttcatatcgagatgttgctgactgtgatgttgtgcctatggatgcttgttatattgtgctagtagaccatggcaatctgattcacattgtctgcatcatggtagatcaaatcagtattatctcatattccatgataagagaattatgttgcttcccatgtcccctgaagctattgtgcgtgatgatgttgc

SEQ ID NO: 10846 - DNA, 369 bp, Zea mays
  unsure (1)..(369): unsure at all n locations
gcataggctaataatatactaattgtctcaagcctagctacgggtgcataggtttcaccgaaatccaaacctttgactcgggagtatcccttggccacaagtcgggctttgttccttgtcaccacaccatgctcatcttgcttgttgaggaacacccactnggttcctacaacattttgattangacgtggaaccaaatgtcatacctcattcctagtgaagttgttgagctcctcttgcatcgccaccacccaatccgaatcttgaagtgcttcctctaccttgtgtggctcaatagaggaaacaaaagagtaatgctcacaaaaatgtgcaacacgagatctagtggttacccccttatggatgtcg

SEQ ID NO: 10847 - DNA, 495 bp, Zea mays
  unsure (1)..(495): unsure at all n locations
ctcacataaatgaacaacaacggacacttgtataatgaaatttttattcagatgggncagattcaagtgatagacatcaatgagaccacagaagagaggagaaatgggaagagcatggccgcggatgataaaatgaacgtacatgacggattcgtgggtgtcttctgtcggaacaatgaccccacgacagatccgccacgaacagagctctttcaagggaagaactccgatggatacaagatggagaatgtcggattcacaaacaacagacacgtggttacctgcgaaaggcaactggttgttgggatcgataggaggaatgactgcgacggacgaactctgggctgtactcttgggcgccatctcaaccttgctggcaagcggagcggacgcaatattgcaagagagcagagaacgcctggatgtataacagcataactatggcacagaatgcataggcgtgcgacagtgcagtacatattcgctttttccggc

SEQ ID NO: 10848 - DNA, 358 bp, Zea mays
ctcaagacaaaaacattgctgctaagacgaagctgagcgaggaggagaagctccttgaggagaagactgctagatctattgagtccattgcgaaaacaaacacagagaagataactaaagagatattataaggctcgtctgaagatactgatgatagcgacagctatgatgtggagagtggaggcgaagactctgaagatcgttcttggcaaccaagtcatgcagtcttctggaagtcaactatcaaacagagtcatcttgataatatgagaggaaggtacttttgagatatgtctattgtgagggctgacgtagacagagccgttcctgctccggaagaagacaaagttgtaatcta

SEQ ID NO: 10849 - DNA, 464 bp, Zea mays
  unsure (1)..(464): unsure at all n locations
cactcaagctttttttcgacagcaataacttatatccattatcatcccattgtatgtgtgatgttcctcccataagaggctcatatattagagcgctaggtttcaccataagagatgaggcagaatttgaaccagtttgacgaatagtacacatcaatcgacatccagacacagaccatacagttagtcccctaaatttccacccaactggcagagcacaattgtcaggcgtccaagatatacaggcaacaggaccggtatcttccactgaatacctacagttttacccaaaaaagaagaaaagtgagtagttaaagctcagcttcaaatagaataaccaaaagtagagtggtgcgaattggcacgggtacaccttaaccacaggttcacaagatgctaaacaattgataactctangtgaaaggaaatggntgagcctcaacacgagataacaacataattct

SEQ ID NO: 10850 - DNA, 378 bp, Zea mays
  unsure (1)..(378): unsure at all n locations
tgacataaagtgttgtcagaggtcttcaccgtaagacagtgacaggaaaccttacggcttagtgcatctgccacaacattggctttgcctgtgtgataatgaatattcagttcatagtccttaataagctcaaaccatcgcctttgtctcatattcaattcttactgggtgaagatatacttcaagctcttatgatctgtataaatgtgacagataatttccagcagatagtgacgccaaattttcatggcatgaaccacaacagctagctccatatcatgagttgggtaatgctcctcatgtccgcataactgctntgaagcatatgcaattactcggccttcttgcattaacacacagccgagtccacttgctgag

SEQ ID NO: 10851 - DNA, 414 bp, Zea mays
  unsure (1)..(414): unsure at all n locations
agtgggagcgctgtcgtatttcttatcttgtatgtggatgacatattattgattgggaatgacattcctatgctggagtccgccaaggcttcactgataaagagttnttctatgaaggacttatgggaagcagcatatattctgggcataacgatctatatagataggtcgaaaaggcttatacgattaagtcaagatacgtacattgacaacgttttgnacggttcaacatggaacagtccaagaaagggttcatacctatgtcacatggtaaacaccttagccagatgcaatgtcctgcaacggctaatgagcgggagcgcatgagtaaggtaccatacgcctcancaattggttcaatcatgtatgccatgataagtacacgcccagatgtttcatacgctataagtgcta

SEQ ID NO: 10852 - DNA, 455 bp, Zea mays
  unsure (1)..(455): unsure at all n locations
tcttcaccatgtgatcacggatatcttgagaagggtgagctttgctctttcctttaagnangtgaagcacatctttagcctctcacttttcttctttgagctcttgataagtatcatctgttgattctgcaagatctaactcaaatgaagatttgcttgtcgacagacaatatgcattagcacatggtgacgcagtctcaatgtgaatacatgtgcatgactgatgttgttgagactttaagttttctatcacatacctcatgagcaacatttaatatgacatgatcatccataagattgttatgagaacataggagcatatcatatttgtcttgaagagcgatattttcatattctagctnttctacttgcgctttaagcaacgcattcctacttactaattgagcgatacaatgaaaagcgttatcttgctcattgaatagattcataccttg

SEQ ID NO: 10853 - DNA, 378 bp, Zea mays
  unsure (1)..(378): unsure at all n locations
actcangctcgaatacgctatgcttcgatatcatgaataaattatatgtgttgtggatatcgtggcggtacattggacttctaactcaataacctcatcggttgtctgttgactcatctcagaatgtacaccatggtgcgatacatatatatgtagcaaatcataacctactaagagatattctatgaggaaaagatttacgacaagaatcctacatttatgcaacaaactacatccttagacggtcatagctcttcatatatcaatatatgttcatattcaatatatatatgtatatatattaggacgaggatatggaagccctgggcttccattagtatgggaagccccaggcaggtatatccacacacgcctgat

SEQ ID NO: 10854 - DNA, 371 bp, Zea mays
  unsure (1)..(371): unsure at all n locations
actcagcttattcaggccccggatcacaaaaacctttggcttattttcgaanggtttgcggctgagggcacacgcaccaacagtgcccaatgaaattgtcattgacgccatgatcaaggtgcttcgtncaggacctacggcccaatacttctccaggaaaccccctcagaccctggaaaagctgctccaaaagatggatgaatacatccgtgctgataatgaattttgtcanagaagagaggaagcttacaggttctccgaaatgaccagcggcttcggagggagaatccacccaagacatgtaagatcaatccattccactcaaaatgatgatagaggaagtcagcaacagcggccataatactcctctt

SEQ ID NO: 10855 - DNA, 473 bp, Zea mays
tcgagcacgccacaacccaacggcgcgcgggcggcgggcccgtgagcgtgcagtgctgagtacacacgccgagcggcgccactccgggttagcagcaacaatactgtgggattatatgagatgagaaggagactactagactagcagccgtatcactcactactcgctgcccgcgcccgatcgggcgcactgccctgtggtgtactggtgtgtcacgcccctcgtcactcaccccgtcacccgcaaccccatcttctattcttcccgacggcgctcctggcagcaggtactcaatgacctaccccccgatgcgctcccgccccttttctttatcggtggattgatgcgtgccctgggtcgatcgatcgcccttcactgtccaaatgctagcgattggaatggggtcgtgtggaattgggttatgggtgggacgtgcggctgtagatccattcatggcccgttccgcatcatga

SEQ ID NO: 10856 - DNA, 279 bp, Zea mays
tgagtgcaaagagatggggctctatcgtggaagtgagttcttgctccatattagcaaagtgtttggagtctttgaccataagttcaaagctcacaaacttaccaatcacctctcccggagacatcttctcgtacctacggctttcacggattaattgcacttgagtaggattactaaagacaagtgactctaggatgagcatgacgacttcgtggtccgcccactcggtgctcccaatgttgcggacttggttcaccatcgtcttgagccggttgtaca

SEQ ID NO: 10857 - DNA, 355 bp, Zea mays
gcttcatacacctcatgatcgggtgcatgcgcgcgtctatccagtctctttgcgtgccttgaccaagaagcgctccctgtatggttgcgtgcatacgccacgccagggatacatccgtatgtgcaacacgggctaagataatcatattctaactgcatgcgagatttgcactacgcatcccgtttccaggggggctagctgacccgaccaatcataccatagtttgcggaaaacataaatatccgtcacaacgggaggcctatgtgtgtggttgtcttcaaggcttcaatggatggtcagggtgataccaaccatgttcaccttgaaacgtgccttgtggagctgtggtcatata

SEQ ID NO: 10858 - DNA, 496 bp, Zea mays
  unsure (1)..(496): unsure at all n locations
acacatgaaactaagctngctangtctggatgtattacgagtaagagtgccgtgtcttttcttgttggggtctgggaataatgcatgacaacaatgcaccattcttgtgggtaaatctagacttcgactctatcttcacgaaacacattgaatctcacatacacctaatacgatctatgaacacatacattaatcccaacataacggaggtggggtcacgtaacactgactggacagaacgaggtgtatttgactgtcgatcagactatatatttagttgttaccatgcaaggattcaaccagagaccacgtgtgatggcgaatctcagaatatatatggcagcatcgcctctagcgacgcattcgaatattctgtgataagaagcacgtatcggcgtacactgtacactgatcgaatcgagcgggtcaaaagcatacggataggaattgtgccccgcctgcccttatatgacctgtgatcagttttcaacccaac

SEQ ID NO: 10859 - DNA, 276 bp, Zea mays
ccatcatccacactataatattatgacgactgataggccactcaagctactttacatggatttattcctgtccgattgcttacataagcatcggcgggagtaaagacttgtcttgttattatggatgattatactcgcttcacttgggtattcttcttgcaggataaattacatacccatgatacattaaagggattcttaagatgggctcaacatgagtttggttcaagattaataatataagacgtgacaatgggacggagttcaagaactcac

SEQ ID NO: 10860 - DNA, 441 bp, Zea mays
  unsure (1)..(441): unsure at all n locations
acatgtgctaagcggcgatgccacagcctgcccatgcaagtcttagccattaagcatgcatctagaccggcctcttcttttgcaaagtcaactaaataaagtttgccgtctaatacacccttaaaagctagggaaccatcacttcttctaaagacagacacatctatatttgtaaacagacagttatatcccatattgcacaattgactaacagatagtaaattgtaaccaagagactctactaaaaacacattggaaatagaatgctcattggaaattgcaattttacctaaccctnttaccttgccttgattcccatcaccgaatatgattgaatcttgngaatcgttattcttgacgtaggaggtgaacatattcttctctcccgcatatggtttgtgcatccgctgtcgataatccagcttgaacccccggatgcat

SEQ ID NO: 10861 - DNA, 201 bp, Zea mays
agtgatgaaagctgattttcttctcttcttttgccaagctaatctgatgatatcccgagtagcaatccatgaaagacagcatagaacattcatcggtggaatctaccacctgatctatcctaagatgcccgaatggatcctttggacagcgtctgttgagatctgtatattgacgcacatgcgccaatccactttattctt

SEQ ID NO: 10862 - DNA, 387 bp, Zea mays
  unsure (1)..(387): unsure at all n locations
ctctcgcgagacctttccncggctctttctaaccattgttaattcattattgnatgcgatatcttatgcatgtttaatctacttggtctcttgtatggtgtattgttggtttcctaattccaatggatggatgtatgtatgtgtgcactcgcatagagaacgatccggttgaagagccccatgaactcgcaggagaaagccctgagcagcagtccgttggtggaggcaagtgtcctttgacctatatctgtcctattcattatttaattcaccttccgctttacacatttatgcctaaggattgactagcttttgttatccatgtgcttgattacctatctgggttggattattatcgtttagcgctatgctattgctcacactcta

SEQ ID NO: 10863 - DNA, 353 bp, Zea mays
cctcactacattccttctaggatgggccgttatattttctgttatgcaaccacgctcgaatgatccttaatcaagctatacggaacattacctgttcctagcccaagtctcgatttaagtactttcatacttaggactacttgtgttccttaagatgaatagaatatcaaagggaatgctataataagatcacatcatgtgttggtgaagatattcttgtatgtagaagccatccttccttgaatattataggacatcctctattcacacgatctatgcacggctaagtcgattatcaaataatacttgatactcaaaagaagttctttaaagggatggattcaaggagttat

SEQ ID NO: 10864 - DNA, 194 bp, Zea mays
gtctaaagggagaacacattatgggactatcttaagtttcatttgcgaaagacagggtttgttacgcatgtcatacaagacagcaagctggctcccatcatattcataacaacgtgccgaaaccggagcggccattggaactactccacatggatcgattaatcccgatcgcgtacataggcatcagcaggagt

SEQ ID NO: 10865 - DNA, 401 bp, Zea mays
cgcacacatagctcatttgaatacccttgatcatatctcttttatatgctatgactaatgtgtattcaagtctatatctaaccaagtcataggtatattgaaagggaattggagacttccgcgaagacaaaggctttcactccgtaactcatgcttcgacatcactccgagcaactctctattccttgggagaaatgagcatcaaaaaaaaggactctatccttggcggagagagtaaaagctcaaaagcaaaaggaccggacctcgtctttggtataatcttaactcatttacttatgaccaaaggggaggaacttacttcgagggctctaatgatatcgtgtttggcgattcatgccaaaaaggtggagaaatgagcccaaagcaaaaagaccgcacca

SEQ ID NO: 10866 - DNA, 354 bp, Zea mays
  unsure (1)..(354): unsure at all n locations
atgcagcgcaccatttgtcaccagaacaccgcaccgatggtagtttattctgcctgatgntaggtcagctggatgatccaacggttcttcactccagtcactggtcggaccacgccatgtacacgtcatcgcgcaacgggatggaccacattgagccctcaacgacgtggtatgtcctcaccgtggcctgctgcacatggacagttaggaacgaccattctttaaagatactgtagatgctcttaatactcctctctctgcccacggagaaagcatcaccgcgcacccctcgcaagcgaatcgtggcctgacaaaacgtcgctcactattactacctctcgccgaatataaccc

SEQ ID NO: 10867 - DNA, 441 bp, Zea mays
  unsure (1)..(441): unsure at all n locations
ctaagcttgagaatggcttgccgaancaacagatgtcagaggctggtgattgcctacattctctgcgacatacggagagcatcatgaagcgttatgtagaacctgctatcgctgattctgccgcgcttccgcttcggtaatctcttattgcttaaggattgtaacctggcacgtccttgtggtatgcccttttgccttcgcgcagaacaaacaataaagatttctaaccgatctccatgtctatcccgaagttcggcccctctgctcttgagctggtggctgaagaactttgtggcccctgagatgagattgtctgttgcttggattgattccctgcgcacttgaaggactatgttacctacatgctaagggaactcctcaagccctgactttagagatcgggctcttcctctcgcaaatcttgcgcttgagtgatccctt

SEQ ID NO: 10868 - DNA, 485 bp, Zea mays
  unsure (1)..(485): unsure at all n locations
actcagcttctaagggagaancacatttatgattaacacatgttcattttgagaaagacaggatttgtagtgcatgtcaagcggngaagcaagttggagtccatcatccacacaagaacattatgacgaccgacaggccgcttgagctactccacatggatctattcggcccgattgcttacataagcatcggcgggagtaagtattgtcttgttattgtggatgattattctcgcttcacttgggtattctttntacaggaaaaatctcaaacccaagagaccttatagggattcttgagacgagctcanaatgagttcggcttaaggatcaagaaaataagaagcgacaacgggacggagttcaagaactctcaaattgaaggcttccttgaggaggagggcatcaagcatgaggtctcctctccctacacgccacaacaaaatggtgtagtggagaggaagaatcgaactctattggacatg

SEQ ID NO: 10869 - DNA, 374 bp, Zea mays
  unsure (1)..(374): unsure at all n locations
tncaaggctttcagacgaagccaatcacatctcangctttgtttcaatgcacgccagatcatgaggagtatctccaaccatacctcccaaagatcttgcgtctaacagcacaaacgtctacagtgcccaatgatattgccatagaggccacgatcaaagggcttcatctangacctactgcccagcattttgctagaaagccttcacatactttggataatctgcttcaatagatagatgaatacatctgggctgattatgacacctcgtcgccaaagggaggaagcctacacgttccctgagaagaccaacggctctggagggagaatacacgcaaggcacgtcagatcaagccgcctcactccgaatgacga

SEQ ID NO: 10870 - DNA, 399 bp, Zea mays
tagcataccatcctctaacagatggccagacagatatggtatatttattctggaagacatgttgatggcatgtgtgctacactatgggaacgattgggacaagtgcctttccttggcagaattatcttataataacagctaccaatccagatcgaagatggcacatttgatgccttgtatgggagaacgtgtaagacaccgctaaattggtctcatgcatgagagagggaaatatttggaccagactcggtacttgaagcagaggaaaaggtcagagttattaacaacaacttataagcttctcatgccaggctaaagagctatcatgacaagagaacgaagcatctacagttttgagtgggagatcatgtttatcttaacgtgcacccaccaaaggtg

SEQ ID NO: 10871 - DNA, 491 bp, Zea mays
ctatgatgaccatatcctctttcgggcgcttatatatgtgtatgaattcaagagaccatgccaggcagtattgaattgatgtgttcatgataaaaccatactaattagcatggatcagcttagtgattaccccttgaagcatgtttgctatcaatttatttaacaaacttacatttgagttcagcaatgagatgggcctatagtcacctacagttgttggagtatctttttgtggcatagggaaatgtgagacccattgatactctacatataaattggtccttattgagatacaattctaaaggataaacgatgttctctagcctttctagtcacctactgcctcagaatgaaactacttcaacgatcgactcaacgcatctccacactattctaaaggaagaccattgctatatgagatactatggaatttgtgttttcctataagaaatacctacggacaataacaactgctctattatggatttaca

SEQ ID NO: 10872 - DNA, 450 bp, Zea mays
  unsure (1)..(450): unsure at all n locations
aactaagagtcatgacatcataccaagagatctagcatgacctatatatattgataagaaactcgatccacaattcaaagaataaatgatatcactgctacaagcatgtagattgtttctcatgggaataccatgagatgctgtgactcatccgatcaatcgtggagcattagtgttgatggcccattattccatgagtttgaccattaactatccataggattagagagagttcatgaacaaaataactaactntgcttctagatgagttctgagtggcgtttgaaatatttgagtgcgtgttatgaacacatgtcaaagagggagtgataatggcccactcccggagaaggaatagtggtcgatctacatacatggcctggcatgcacccccatatgctgaccgaccataccgttggtgctggtgacttctctatctatccgaacacc

SEQ ID NO: 10873 - DNA, 457 bp, Zea mays
  unsure (1)..(457): unsure at all n locations
gatactgttacacagtatctcaacaagttcaatcatttgtcctagtacgcaattgaccaggtcaacactgacctcgaaaagaggagactgtttatgaggggccttaatgaccggctacaacggaagatggctacctgcctcgacctctcctacggtagggctatcagcacagcactgtcangtgaagctaaatatgtatgcccaagaaaagcaaaggggctttggaggtgacagggtccacccagggccttgaaaaccaacaaaggttggtgatccgaccttttaatcaaaaccattcttcacctcgtccatcctcctacccctttaaacaacctgtattcatccgccctgctactgcccncacttccacaactcagccgagtgcccctagtgctcatttccccgcactcccgagctcatcaactagttgtttcaattgtgggaagtctggacattt

SEQ ID NO: 10874 - DNA, 391 bp, Zea mays
ttggtttaagggctcccaaatatttccaaagcacaattgtatatagaagcatggaaaacggatgaaggtcaaatctgagataatctttgttttcccaaacataaagaagaacataatctccttgaattaaggtaaaacatattcagtgcacattgacctttgaactactgagagaacatacctagagcgaacaaatgatgttaaaactgttacagattgcaaacaaactgctacaatttatatgaattactttgctgacggctataatataaggacaagatgaatctgattacaacaaagcactaagactacaaaacagtcctggcacaaagtgcaaaattttagacatctttgttttcccataaaaacacaagagaactaagtctctttg

SEQ ID NO: 10875 - DNA, 332 bp, Zea mays
acataacatagtatcagaagtcttcatcgtaagacagtgacaggaagtcttacggctaagtgcatctgtcaccacattggctttgccttggtgagtaatgaattccaattcatagtccttaataagcttgagccaccgcctcagtctcatgttcaactctgactgggtgaagatatacctcaggctcttatgatctgtatagacgtgacagatattccctagcagataacgtacgccatatttaggggatgaaccactgcagctaactccagatcatgagtgggatagtgttcctcatgccggcgcaactgccttgaagcataagctattac

SEQ ID NO: 10876 - DNA, 128 bp, Zea mays
tatcagaattttcacttatgttcaaaggagtatagtttgcaattcttagacctggcacgactcaaaaatagttatgagtgacaataattaatgttgaaaattgtttaattggaggatcaacccccaat

SEQ ID NO: 10877 - DNA, 404 bp, Zea mays
  unsure (1)..(404): unsure at all n locations
gcttcgtatattccgctcgtggtcttcgntcgatgttcattanattcttggcgagataatgcttcagcggacggagggcatcgatatttaacattttatgttgccttgttcttaatttatagcatttaagaacaagtcccaacaggagtattacttagttttatcagctctctgtgtagccgctagaattattttttgtcaacagctttgttgttgccaaggccaacggaagttgctttagcgcccgttcggttactttagttcagggacctaaagttagttatgagaactaaaattagtccctatcatgtttggttctacggactaaaagtattcacaacgcattacatagattataagaggatcacaatatcctttagcattcttagtgcaactaanataaa

SEQ ID NO: 10878 - DNA, 428 bp, Zea mays
  unsure (1)..(428): unsure at all n locations
tctgtgaatgtatgttatctacatgttctgtgggagccattgggttattgacagtggatgcacacaacatatgacaggcaacccacggatgttcacctcattagatgagaatgctgatggtcaagataaaatcacatttggagacaattcaaaaggaatagtgcaaggtcttggcaaggtggcaatctcaaatgatttatcaatatcaaatgttcttttagttgcacccttgagcttcacattattatcagtgcgacaactctgtgatcttggtcttcaatgcttattcactccatcagaggttattgtaacacaaatggatgatgaatcaatggtattcaagggatctagatacaacaacctctacttagtggatgtcacttcagaagatgcagactngagaacttgtctctttaccaaagcttctc

SEQ ID NO: 10879 - DNA, 481 bp, Zea mays
  unsure (1)..(481): unsure at all n locations
agctggtccagcgattcctctcggctatctggtgtgctttgttcggggtaggccctcgccctcggggagccgtattccaggtcagtgggcaagatagcttcagccccgtagaccaggaaaaacggcgtgaagcccgtggcacgactcggcgtcgtccttaggctccagaccaccgaggggagttccttcatccatcgctcgccgaatttngtgaggtcgttgtagatccgaggcttgagcccttgtagaatcatgcccgtggcacgctctacttgcccattcgacatgggatgagccacggcggcccagtccacccggatatggtgatcctcgcanaaatacaagaaatttttgccggtgaactgggtgccgttgttggtgatgatggagttcgggaccccgaagcgatggatgatgttggtgaagaacgccaccgcctgctcggatctgatgctgttcagaggtcggacctcgatccact

SEQ ID NO: 10880 - DNA, 383 bp, Zea mays
  unsure (1)..(383): unsure at all n locations
tcgaggtgctaacttgcccttgatcccagatctctggacacccttggtgggtgataccttaagataaacatggtctcccacctcanactgtagaggcttccgcctcttgtcatgatagctcttttgcctggcctgagtagcttctaggttcttcttgatgatcctgacctttgcctctgcttcaagtaccaaaatctgcccacaaaattccctctctcccgcttgagaccaattcagtgnggtcctacaccttctcccatataatgcctcanagggtgccatcttcagactggactaatagctgttattataagaaaattcggccaaggaaagacacttgtcccaatccctttcgtagagtagtgcacatgcccgcaacatgt

SEQ ID NO: 10881 - DNA, 461 bp, Zea mays
  unsure (1)..(461): unsure at all n locations
tgcatgcttaataaatgaacagaatggttctcttccctatataagtcctcttacagngcgngtgactcagcccatcgtcatattcgcataccgcaaagagaatgctgaattgtagatggttgacaaacaatcctatgcacattgatggtccctccttgcaatggtctttaagagttaatatgctatgaaaagaagtctggactgccatcatgtagacttctcccttaattttcccccatttgcaagtgcaaccatattgtgccttgaatatactatggacacccatcttggaatatcactaccaaaatgcctctccttgattaacccactgcacaaaatccttagataatcctcgaacctggatctcagcagcttgatcatcctgaaagatccaaatgaattgattttgcttattcgctgtgtgaaactgtactactaatggtcaccacagcgataatcat

SEQ ID NO: 10882 - DNA, 389 bp, Zea mays
  unsure (1)..(389): unsure at all n locations
gcagcttctaccagcatgaagggaatgtgttctcnggttatgcactngggcaccctcgttagagaggtgatgatggtcanctatgatgtgcacatttatggatgagaatggttgacctgtccccggccttggatccggccccatggccatgggtaataaggagtacatggtgttggccaatttaccagaagactatggtctcattaacccaatgggtaatacgggccgacccaaatatccttttgctactatagaccataattactatcaaaagtttaacactcctatatagagatgaagaacaagattttagttggtcacttcggaattcagatgtgtcatcgagtttcagctcatgcatcctgttcacccttttcacagttaacata

SEQ ID NO: 10883 - DNA, 371 bp, Zea mays
  unsure (1)..(371): unsure at all n locations
tgcagcttacctatgtgttaaaccttagactcttgtttagagtcatagaatattccttataacatagtggaggcacatttatacccctgagatgccagaaacccttattggaaccctggaactaaaccctatgggtctatgtgcaaaantagttcacttttgggctaaagtgccaaaaccaagctaaataagtatcttaaatcatttgggtcacatatttgtgaggtctgaagttaaaccctaagttttggactcatttgccaaaaggaccccaattttgtattctatgcttagtctgaaatcacggttatatgcccaactttgtggctgtgtagctttctaaataatgaaaattatattaggacaccaca

SEQ ID NO: 10884 - DNA, 443 bp, Zea mays
  unsure (1)..(443): unsure at all n locations
gcttattggaaatactcaagagagagatgttaatattataatggagtatatgacgatgaatgatttcctcttacatagggaatataaacaattcatcattcacaagttgcacagacatgaagtanaatcctaaacattagtgcacattacttggaaagaggaatatgcaccttttagatatttgatcaatcatgggaattgtacttcttcatattgaattcattatcataactctaaaagaatatcaatatgagaacagatatatcaaaggcatgaattacattctaatggacaagtgtatttatgaaagagatatgagttcatatctagctaatttatgtccaataaagaatctattctttacatacgtagaatatgatacgttagagtagacaactattgatgggaactatacttgatttagaggatgagttcccatacct

SEQ ID NO: 10885 - DNA, 316 bp, Zea mays
gctaacaagtgcgaataagactacaccaaactgttctcgcaaagatttactacatgcgcaccagaccaacataacatatacaccagaccaagtacgcaacaccttcgtgagcatagccgaatgtgcgaaggcacacaacctcatcatacaagctattacatatgtgcaagcgagggcatcacactctacatctgctcaaccttcggaatatattccatcttcctatagttaaatagcattatcctcagctcctcacccgcaaaaagactacgcagctccccctcacctgcactcacagtggccggcaaggacaaca

SEQ ID NO: 10886 - DNA, 294 bp, Zea mays
cgcctgatatattagcggattcactcatggagtcgcaggatatcactttctttgagaacatattctcgatgacagaaacttattctttggctagtgttgcaagtgaatttattgctaatcccacacttaccattgagtgaattgaaaattcacttgaagacatagaaagtgatatctgagtaactcctcaaacggtaagatatcaaatattgcgaagaccttcagcgaagatttcactgtgtaccttgtctaggataccccacaaccatagcagaggcatatgcatcgcccgat

SEQ ID NO: 10887 - DNA, 373 bp, Zea mays
ccatcagaatgaagcttcttcatgcgaatctcacttatatgacccacacgacagtgccacatgtaggtaagacttaaatcattatgccgaggcctcttagcactaatattacagataggtgcatcatcaagatttaaaatgaataacccattcataatggatgcaaaagccacaaacatgctcattctagagaacacacaaccattgttttcactcgcaaatgaataaccattcttcatcaaacatgaaggagacataatgtttcgactcatactacgaactaaataacaattatttaactccaaaataaatcctgatgggaggtggagatgcatctgtccgacggtcaacgcaacaactcttgcatattgct

SEQ ID NO: 10888 - DNA, 410 bp, Zea mays
  unsure (1)..(410): unsure at all n locations
agcttatgaagattcttcatcccaacatgtgctagtttgcggtgccagagccaacccatgttagtcttagcaattaaacaagtgtcgagttcagctctatcaaaatctaccaagtatagctgaccctctaacactcccttaaatgctattgaatcatcacttcttctaaagacagtgacacctacatcagtgaatagacagttggtagcccattgacataattgagatacagaaagcaaattgtaatctatagaatctacaagaaaaacattgganatagaatggtcaggaggtatagcaattntacccaatcctttgaccaaaccttgatttccatccccgaatgtgatagctcgttggggatcttggtttttctcataggaggagaacatctttntctcccctgtcat

SEQ ID NO: 10889 - DNA, 394 bp, Zea mays
  unsure (1)..(394): unsure at all n locations
tttttagcatctccgaagatgtccgaagataataagactgctgctgagacgaagctgagcctctacaaagagaaaaatttgtggtttcttatagcgatgtcaaagaccaacacagataaaatcaccaaggagattctggaaggtttgtctgatgatactggtgacagtgacagctatgatgtggacagtggtggtgaagacttcgaagatcgtccctggcgaccaagccattcagtttatggtaaatcaactatcaaagaaaatcatcttgtcaatatgagaggaaggtatttccgggatctgttcattgtgagggcggacgaaggngaataaacttgcccacattccgaagagaatgaagtcgtagtgtaccgaagctttttgaaactggact

SEQ ID NO: 10890 - DNA, 404 bp, Zea mays
aatctggtgcacttcattaaatctcacgagagcctcggtcccgacctcatgctgacatacacctcgcccgagcccgatactgccttgatgtctgtgacagagaatgccccaacgtcctaaaatatagtggagcagacacattccttataaggctgttgccatactcagcactgtgtcaagcactacagtatgggcaaccactcaccacagggtttgtggacgtgatcgagccctctgtctctgtctctgctctcagcaggaaacacgtgggcgcatgtcttgaacacatcacaataccataccgtctataagatatgaaagacaacctcttacagtatgcagcagactctcatcctccaggaagcacctctcgatcctatgaatagattacactaccgcttctc

SEQ ID NO: 10891 - DNA, 404 bp, Zea mays
  unsure (1)..(404): unsure at all n locations
gctngccaatacttgtanagcaacttcatatgccttacagcaactgcaaaccataccagtaacctggcctttcgcatgtctgggactggatatgaatggacctttcaagaaagctcaagggggatatactcatgtactggtggcgattgacaaattcactatatggatagagttcaagcccattgcttctttaacctctgctaaggccgtggaattcatacaggatataatattcagattcgggataccaaacagcatcatcactgacttcggatccaacttcaccagctcagaattctttgacttctgcgagcaaaaaagcattcagatcaagtacgcatctgtagcacatccaagagccaacgggcaggttgagcgagccaacngaatgatactggaggcac

SEQ ID NO: 10892 - DNA, 429 bp, Zea mays
  unsure (1)..(429): unsure at all n locations
tggacgtgaagagtgccttcctcaatggaccaatcaatgaagaggtctatgttgagcaacctcccggctttgaagatagtgagtatcctaaccatgtctataggctctctaaggcgctntatgggctcaagcaagccccaagagcatggtatgaatgcctaagagatttccttattgctaatggcttcaaagtcggtaaggccgatcctactttatttactaaaactcttgacaatgatttgtttgatgccaaatttatgttgatgatattatatttgggtctactaacgaatctacatgtgaggaatntagtaggatcatgacacanaaattcnagatgtcgatgatggnnggagtgaagtattntctatgattccaagtcaagcaactccaagaaggcaccttcattagccaaacanagtatactca

SEQ ID NO: 10893 - DNA, 363 bp, Zea mays
  unsure (1)..(363): unsure at all n locations
ctgcagctggacttgcctaacatgacctgatcgggattggcgctttttagcgcgttactgacgcgcccgctgtaatccgtcttcagnacgtcaactggcatattgtcctcgtgctgactgacccgcgcccccacgcctggaggtttcgtcaggccacgcgcggagcgccttgttgccgctgcaagcctgcatttggtttaaaaaattaccttttgtcttctgcagccgcgtcaatgaggcgcactacaagcgcgtgcggcggttcgctctttccgcacccgaaatccgacacacgaactgtatgacttgtggacccgggcctccgtgtcatatactgagctgcccaggtcctatgtacccgtc

SEQ ID NO: 10894 - DNA, 311 bp, Zea mays
  unsure (1)..(311): unsure at all n locations
tgcacgcatgacagctngaagggactgcttngcgggagagcttccgattgtatgactctttcgtgccacggagtcgctttatcctagcgcaagttacttatcacagaacgagacgagtgaggtattcgtatcccggaggcgtatgagtccctcggctcggtcaacctaggctgcttacgagtacctcgtcgcttccaggatccgctttcctaagtagtcaagaagcacggaagaaactcttgttaaaagaggtcctttttccaggaataaactctacgcagagggggtctctcttctttagcccccgagga

SEQ ID NO: 10895 - DNA, 410 bp, Zea mays
  unsure (1)..(410): unsure at all n locations
atcaagagatcacgagattggaggctatccaccaacaggtgcacaggaagagggaaaagatgcttcagctcgccgacctttanaagaagatcgatgaagctgctgaataaatgcgtcacctcacttaggatgaccaagaccgaaggccccaacatatggagcttcgctaagaaaactcattcaatgatgatgaatggtatggtgactntcatcatgcgcaagtttgctttgatgatgcttctcccttggtagcagaattgcaggttacctcgtggccgccgtcatacaagccatctcagctccccatgtatgacggacactcagacccaaagcaattcctgatgagctacgaagcaaccatatcatcatatggtggcaatactgcagtcatggtgaagtccttcgtcatg

SEQ ID NO: 10896 - DNA, 172 bp, Zea mays
gcatgtcaagcaggaaagcaagtgggtattcatcatccacacaagaacattatgacgaccgacaggccgcttgagctacttcacatggacttatatggcccgatcgcttacataagcatcggcgggagtaagtactgtctagttattgtggatgattattctcgctccactt

SEQ ID NO: 10897 - DNA, 359 bp, Zea mays
gcagctctcctgtcgcataaccttgtcataaattctccgacttcacctgctgcccatttcttcggtagctgatcacaggaaatatgtagctttctgataagcaaaattatagcaaccaaaattgtcatgtaatccattctttctagccttcgtctgatagtgcagctcgtgaactctgcaaaagctgtctgcaaacggctccaccgcttggcttcggagtgctcagatataaacactatgcctaacgatagcgttaggggtcagctggtgaaagtagataccgaacctcttcagtacctctgcaataatcccatgtagggggaatcttaatccagcctttagaaagcttttgaaataac

SEQ ID NO: 10898 - DNA, 455 bp, Zea mays
gcttatgaagattcttcatcccaacatgggctagtctgtggtgccatatccaacccatgatagtcttagcaattaagcaagtgtcgagttcagctctatcaaaatctactaagtatagttgaccctccaacactcccttaaatgctattgaatcatcacttcttctaaagacagtgacacctacatcagtaaagagacagttgtagctcattttgcataattgagatacagaaagcagattgtaatctacagaatctactacaaaaacattggagatagaataggcaggtgatatagcaatattacccaatcctttaaccaaaccttgatttccatccccgaatgtgatagctctgttggggatcgtgagttttctcgtatgatgagaacatctttttctctcctgtatatggcttggcacacgctgcgataatcaactgagccccagagcataa

SEQ ID NO: 10899 - DNA, 539 bp, Zea mays
  unsure (1)..(539): unsure at all n locations
tgcaagctntaatacacanattctccctcttttgacatcatctaccaaaaccatactcaagcaagaacataggatgatatcgagggacagcagggtgtcaaggaggaaaaacgactatcaaaactcccccttacttattgaacatatgcactatcaacatcttggtaagatacatatatgcaaaaagattaatacttccttttgtacctttaccatgttgtagtgtacttcccatcttgaaagtatataatttctcgagagcttctccacacttgtgcctgattctttctcctaactntntcttgttgctaaaacaccaaacttagaacaagttatagtattgtgcacaagaagaaacttctattccaatgattgtcaaaagatgtcaattgaagcacactatcacatctatcaattgaaagataccaattccaaagttcatttattatcatagctccatgatatntaagaataagcatctattatcaccagaatattatagagcatgagcaatctaacaatatgcacttactcatgac

SEQ ID NO: 10900 - DNA, 380 bp, Zea mays
  unsure (1)..(380): unsure at all n locations
tgcagcttggaagattcttcattccaatatgggctagttggcgatgccagagccaacccatattagtcttagcaattaagcaagtatcgagttcagctctattaaaatcaactaagtatagctgaccctctaatactcccttaaatgctactgaatcatcacttcttctaaagacagtaacacctgtacccgtaaaaagacagttgtatcccatattgcataattgagaaatagaaagcaaattgtaatataaagaatctacaagaaanacattggaaatggaatggtcagatgatatagcaattttaccaagtcctttgaccaaaccttgatttccatccccgaatgtgatagctcgttggggatcatcgtttttctcg

SEQ ID NO: 10901 - DNA, 272 bp, Zea mays
  unsure (1)..(272): unsure at all n locations
gatgtacagtggttggtggtttccactccaaaatatccttgactttgctaggatcaaccgcaatccccttggcagacaatacgtgtcccaaaaatgggatctcctccagccaaaacgtgccatttactaaattggcatatagctgatgctcccttaggcgcgttaatatgatccgcanatgccgagcatgctcctcttcattcttggaatataacaagatatcatcaatgaagactaccacacatttatccaactctggcatgaatatcgag

SEQ ID NO: 10902 - DNA, 443 bp, Zea mays
  unsure (1)..(443): unsure at all n locations
agctntgtcttgctcgctctctctnttgagcacttgtgtnggttgttgtggtctatatcttgcgtataggatggatcaatgaatagaggtggttgggagggcttggatatgtcaactatatgacttggaatgttgcttggactcccaccccttgaagtggccggttggggtggtatttatagccaccaaccacattgtatccgttggagaaggctgctggcgatgggcacaccgtacagtgtccggtgcgccaccggacagtgtccggtgtgccgccacgtcaccttgtcgttagggcttggagctagttgaccgttggaggctttgtcctcatgcagcaccggacagtccgatgccacactggacagtccggtgccacaccggacagttcggtgcccctctgaccttctgctctgacttctgctgcgttactgtgatgcact

SEQ ID NO: 10903 - DNA, 432 bp, Zea mays
  unsure (1)..(432): unsure at all n locations
acctgaggcatgcaagcttcggattcccgacattagaagacgggctgtcattgctgtcaatttatgaatnggccgacacgctagcatataatagtataaaggtgtgaaaatcaattctctgtacttaaaaacgagatatttcatttgcttatactcaatactgtacttcttttgcagggcatgatccttagcaatgccctcagggcgcagaataataccgaagacgaaggatgcactatagctctgaacaaccttctgtcagaagtaactgaactattgaacgaagatattgaaaaagataaaatattaatttcattggtgagcataataaaagaagacgaagctacttccaaagcccaagctgaagcccagatatgtgaaattgaagaccttctgaaacagctgggtgaagacctaataaaatgctgttgt

SEQ ID NO: 10904 - DNA, 409 bp, Zea mays
gcaatcaagcatgtgtcgagttcacctctatcaaaatctactaagtataactgaccctctaacacacccttaaatgctatagagtcatcacttcctttatagacagcgacacctatatcagtgaatagacagttgtctcccatcttgcataactgtgagactcaacgcagaagaaatctaaaaatctccagaataacttgtaaaagtatggtcagtgatattcctatttaccatgacctttaccaatccttgtatgcatacccgatgtgaaccttagtggagatactgaatttctcgaagaagagaaatattcttatccctgcatgtggttgtgcaccccgtgcacgattcacttgagctcacaacataaacctacaacaatatagtctttacttaggaccaatggtat

SEQ ID NO: 10905 - DNA, 446 bp, Zea mays
ctgcagcttcaaagggagaacacatgataggtctaactattgtatacttcttataaatagaccttgtgcagcttgtcaagcaggtaaacaggtgggaagctctcatcatgccaaaaatgtgatgacaacatcaagacccctggagttacttcatatggacctcttcggacccgtcgcctatctaagtataggaggaagtaagtatggtcttgttatagttgatgatctttcccgcttcacttgggtattttatttgcaggataaatctgaaacccataggaccctcaagcgctttcttatgagagcccataacgagattgagctcacagtgaagaagataatgagcgacaatgggtccaagttcaagaaccatcaagtggaggagtatcttgaggaggaaggaatcaagcacgagttcttcgctccctatacaccacagcaaaatg

SEQ ID NO: 10906 - DNA, 319 bp, Zea mays
  unsure (1)..(319): unsure at all n locations
gcttgtctcaaactagcttctatacagnncttttggttnntaaaaatatagatagtagaaattggtggcaaaatatgtgtctggacaggatgtgctcctaaatgacaattagtaggggactggaggggctacattcttggcaagactcttgaagtttcataagttactttaggcactacccaatgctcatccatgatcacatgctcatgaaaccatctgaaaacaacaccgcatgaagtagaatctgtataacgtgaaacatggttcagtgcgtgtattcataggcctcattgaagatcttcagttgttggaacatata

SEQ ID NO: 10907 - DNA, 423 bp, Zea mays
  unsure (1)..(423): unsure at all n locations
ttaagcacctgngctgcaagctgctaaaaagttgggaatttttgattactaattactntctataactctagaagtatggattgtggctattntaaatatcccacaattccctattggaactaanaaccatgaaactcattttattaaatactataggaaattagaagcctagcaaaattggtctggtatttttagcatttntctataattttctaggaattccctaagtccacaagaaaaagaaaaaggaaatgatgctacaggattgggctcattccagcccgagacggcccagcgaagacagaattcgcccgcgcgcgcgcccgcgcggtcagttttgcgcagggaaccctggcggtttgagttntttataaagaatccttcccactattcctctgtctcgctgacacttgcagaaacacc

SEQ ID NO: 10908 - DNA, 373 bp, Zea mays
ttcttttgatcctgcagcttgatgctcattcaaaaatttgctctcttttgagcaacaggggttagcacatggtgatatattatctaaatgtgcacatgtgcaagaatgaggttcacattgaattaagtttgctattaccaacctcatgaacaacatcaagcatgatatggtcatcaactaattcattatgagaataagatagcatatcatatttttcacttagagcaagtttttctaaatttatcatttctacttgactcttaagcatagaattctcacgtttaagttgagcaacatcagataatacatcatgattatttctttgctcaaataaatagattcataccgttggagcagattattatgagagcac

SEQ ID NO: 10909 - DNA, 292 bp, Zea mays
  unsure (1)..(292): unsure at all n locations
ttatgaagctagctgttggagaaactacaaacagggcctaaatcatcatcctaacttccaagtcaatttcttgagcgatttcatatcccagctaatagatggaagaggcaacaaaagattagtatacttgctgggtgccttggatgattatattgcttgctcagctaatagcatccaattccaagctaaattaattaacattcttgtagctaggccacgcagaagagctagccctganaagctcgtccatccgaagcttcttaagggtttgtcggttctccccaatccatat

SEQ ID NO: 10910 - DNA, 310 bp, Zea mays
  unsure (1)..(310): unsure at all n locations
gctggattcaggaagcagcgtttcctaaaagccgactttctcgtagtgcaaatctgaaagcacccctggacctgctcttagtggcttttcggatggaactatganaacatatatcaaagaaattttaacgacatttagtggtttccaccacatgggttttatgcttttaacagcttacagcctacatcagcttttttcacagctcacagcccacaacaacttttttttacagcacagcccaaccaaacagaccataagggctctaatttcaacattaggagggaacatatatcttatgctcataatatct

SEQ ID NO: 10911 - DNA, 380 bp, Zea mays
  unsure (1)..(380): unsure at all n locations
ttagttacaacagactttggaacccagatgcaagttttgtctctcttgcacttaggtcccaaacttctagcaactactttatcattatttcatgttagaacaaatgaagcatcacatgtttgataaagcatagctgcgctagctgatgctntcctaggtgcatgagaagtagcatgatggtgcctacgcctatttctttcatgagcatatgaagagctacatgcagacatggtatgagaactaaatgcagcatcatgacatacaggaaaacaacatgatttctctcatgagcatatgaagagcttcatgatgagcaatactagtaattcttgcgtcataaagataggcatggttcgttttagagctactagccatgggag

SEQ ID NO: 10912 - DNA, 339 bp, Zea mays
  unsure (1)..(339): unsure at all n locations
tgtgttnctctcatcgtgctaccgcatgaattcattattcttattcaacgacgtccgcctacccanaagcactgggagggtaaccccggcgtgtgccgtctggtaacaaacaccgacagatgttgcgccacgtaggggtgcgtcgtcgatcaacgccgactctatggccatcgttttcaagagcatgatctaccttcagcacangagcagncttctgcttaaaaccatcttctgcgtccacatacggacgggatacttcatcgcatagcgactccacccaagaggaaatctctcttgtgatcgccacaggaagtcacgacaagaccacataccacacca

SEQ ID NO: 10913 - DNA, 193 bp, Zea mays
tcatcctaagcagacattttagaagcccttatagaacataccttgacaagaacgaaatgataagtacaaactgaaggaggcggatcataccattgaaccggtccccagtagctggatgttttaagaaattttccgaggaggacggcatcataaccacaaccaaatattgtagaccggtggcctgtaaaaattt

SEQ ID NO: 10914 - DNA, 406 bp, Zea mays
  unsure (1)..(406): unsure at all n locations
gagttcagctctatcagaatctactaagtatagctgaccctctaacactcccttagaagctattgaatcatcacttcttctaaagacagcaacacctatatcagtaaaaagacagttgtagcccatttgaaataattgggaaacagatagccaagtgaaatctacagaatcaacaacataaacattggatatagaatggtcaggagatatagcaatnttaccaagtcctttgaccaaaccttgagtttcatcctcgaatgtgatagctctgtggggatcttggcttattcatatgaggagaacatcctctactcccctgtcatgtggtttgtgaaccgctgtcgatatcaacttgatccctcgatgctagacctacaaacaaantagtcttgacttatgtaccaat

SEQ ID NO: 10915 - DNA, 360 bp, Zea mays
  unsure (1)..(360): unsure at all n locations
tgaagtcatgctgancattttctgcttagtttctcctntcttgcataaagtaatgtcagaggtctctatctgctaacaatggcaagaagccttgcgacttaacgcatctgccaccacattagtcttgcccaggcgataacgaatctataagtcataatccttgatcagctcaagccatctgctgtgtctcatattaagctctgactgggtaaagatgcacttcatacttttatgatctgtataaatgtgacagacattccccagcagcaaatgacgccatattgttagggcatgaaccacagcagctaactacaggtcatgagttggataatagttctcatgccgatgcatctgccttga

SEQ ID NO: 10916 - DNA, 73 bp, Zea mays
cgcttgcgatatattgccatgggaaacggggcgaaaattgtcatttggcacgttaataaactgtgaacttacc

SEQ ID NO: 10917 - DNA, 351 bp, Zea mays
gcagctctaagggaacatgaaatgtctactttgttaatcttaaaagaagacctggcagctgcagcaggaacaaggggagcctatccacccaaatggatgacacatcagaccttggagatgctgctatggacctcttcgacccgccctattgacatatagggagaagatggctattattgagagattttccccttacttggggtcttttgcaggaaagttaaacccaggaccctaagccttctcagaggctaaatagttgagctcaaggaaaagataagacgcacggtccaattataaacttagtggagagtctgaaagaaggacagccagtctcgtcctaccccacacaat

SEQ ID NO: 10918 - DNA, 263 bp, Zea mays
tgtgtgatcgattgagatatgacaagggttgaaatatactttggctttgtggcctcctccaccgggactaggttctttgtaacctaaccttggtaaacaaatcaccgcgtacacttggggaactcactcgattgattcccctctattctttctttagaagatcccttgctaataatgtacgagtttgctcccaaacgatattcgtattgattgagcaactctagcatagagaactatctttcgtctccatattaattctaaca

SEQ ID NO: 10919 - DNA, 435 bp, Zea mays
  unsure (1)..(435): unsure at all n locations
acctgacgctgcagcttcggaagccgatgtccnataacacctttcttgactcgttgtcgagaaacgtatcagtttccgagcgcgtagcggacccaccttgcagagctactgtttggtctctgcggtccaccgcgcagcgagtgcaagcggctgtccgcctggtgtaaaaatcctggcgattcaccttcttacatgcatcactatatatacagacgagtaggtgtgaagttaccacagcattcattgctatttgcactgttttgctgccaaaatntttaaccatagccgaagcttgactctcagaatcagacgaagctccagtntgaagcctacttcgtcagaagatacagcttcagaagagaaaacatttagttcccaaaatatacagagataaatggccagagtgcgttctaccgctacggttgagcgtgaggg

SEQ ID NO: 10920 - DNA, 186 bp, Zea mays
gtccactcaacacacagaggtagctaagatgacaatactattatgccacgtttgtaattcaattagataagaaaattgcgattattagttcatgtgcctgagtacctcagagaaaacaaatcagggagaagcacatagcagtctcaactaactgaaacattatattaatccatacatcatggatct

SEQ ID NO: 10921 - DNA, 397 bp, Zea mays
catgcaagctggcttcttggcaagactgtgcctcgggcgattttaggtgtgtctcgtgcttgaggaggccctcgggcgagacgtgaatccttctgtgtcggctgcccttgctcgaggctgggctcgggcgaggcgagatcgtgtcccttgagtggaccgagccttgacttaatcgcacccatcacgcctttgcagctttgtgctgatggcggctaccagctgagattatgagtctctggggtacccctatatatggcacccgacagtagccctcgagcctcaaagggagaggtaatactcgcttggaggcttttgtcgcactctatttgcaaggagaccggcctctcatggttgcgtttcagtccggtgggtgcgcgcgagcgcactcagccggtgt

SEQ ID NO: 10922 - DNA, 398 bp, Zea mays
cactatattcacatcatatgtttcagatggagcgatacctgcgagtattaaaaggttatgtgcgaaatcgcgctcacccacagggttcaatcatggatggatacactacagaacacgtgattgagagcttgttagattacatacgtgacgtgacaattgataggtgtgcgtgtacctaaacatgacggtaaactatgtgggagagggagaatgggcatgacaactattcgcgttgaggattacaagctatacattgtgctcatggtagtggactacaacatctcacgatagccgagccttaatagaggaacacctgatgaacttcgtaataaatcagacccgccaatgactgatatgatgaacacaatcattttcacgattgtttatggaaaaacatc

SEQ ID NO: 10923 - DNA, 264 bp, Zea mays
  unsure (1)..(264): unsure at all n locations
ctttgtctttaatgtctggatcgcgtcccttgagcggagacgcgaacgagagccttcctgtggccgcgtccgtactgagaccatagctgctgctgcanaggtcgctggtgagtcgcccggagcttgtcgccccgcaggctccccggggtggaggttgttcatacccgcggtgacggaaccggagtttcgtttgaatggcaccttgaatggccggtgtttggtcattgcggctgtcgggcctgaacatgtatgtatattcggcac

SEQ ID NO: 10924 - DNA, 357 bp, Zea mays
  unsure (1)..(357): unsure at all n locations
gcttctanagggataacatgngttatgactaactgttgtctnngttgagaaagacagaccttgtgcagcatgccagacatgaaagtaggtgggaacaagtcatccaagcaagaacattaagactagaatcaccctcatcatcagaactcagagaaacatagcatttgttgccctatccaccaccgaggccgagtatgttgctgcaggtcagtgttgcgcacaacaatctttggatgatgcagaccctccgggacttcagctacaatttgagcanagaccaactcctatgtgataatgagggtgcaatccgctgggcggataatctcggtgaacacagtcgcactaagcacatagaca

SEQ ID NO: 10925 - DNA, 367 bp, Zea mays
  unsure (1)..(367): unsure at all n locations
tcggagacgcgcgcgaagactttattgtctccaaaacatccagcacattaaccatactcttccttttggggtcattgctggacccttttggctctatggtgcttcaattntagctgaaggacataaaatttcatatgtccttgattaagtagccttcggctcttctattatctatattatctggcattatgaatgggctcttcaacattcggtaggggagtcggctccttggttctatggccgaagaggttcaccggcttattacgcactgggccggttaataatcatggccgggagtaaaaccttatcttcttctctcggcgctggctactggaacggtgaacaacttctttgctgacagcatttt

SEQ ID NO: 10926 - DNA, 203 bp, Zea mays
acgccgcacgagcccacgcaacagtttccgtattaattaacggcgaggcttttgccagcgtcttgcaccacctggaaaaggagcaggacacgacagaccaccgcgaagaaaatcaacaccacgcctacattaccaacatctccgaagttactcagcgctacactactcccttgtccttattacaatactgggagcgtggaaaa

SEQ ID NO: 10927 - DNA, 332 bp, Zea mays
  unsure (1)..(332): unsure at all n locations
atctntggggtggattatctccaaattcttcatcacaactatgcttaccttcttaagcagagttgttctcctttgataggtctataatattgatgtggcgacctagggcacataccttataatttgaaagttacaaagctccaaagttgagcccataccactgaagtttagacttagctcaataacacaaatgatgttctcttttgaaataggtccaaatattagggattagcttgcaaattcacatatttgtgaatcattatgacttaagaccccatactttactagttgttatgcagcttagtccannagtgcactaattntacacttaa

SEQ ID NO: 10928 - DNA, 476 bp, Zea mays
  unsure (1)..(476): unsure at all n locations
agcttatctatgctatacatgnagttatcatgaagtttctctcactataacaggcacacagagattgggtggtgacctccttccctatgaaggccattctccacaactctaacaccacaggcaacatcaccaagtgggcctgagagcttgctgagatccaactggacttctagcctctccatgctgttaagagccaggacctggctgacttcatcgtgtgatagaccacttcctcaagcactccttggggtacagatccagatcagaccccacacttgcgaagcctagggctccagtcttcaccgagcctcactggatgctcttctttcgacggatcaagtgaagtggttttcatcgacccatgcggagtcaagtgaattcatggtgcacctgagttcaagtcccaaaacatggcaaagatactcactgattttggctgtctacggcctatcccttggatcaacaatctctataaa

SEQ ID NO: 10929 - DNA, 367 bp, Zea mays
  unsure (1)..(367): unsure at all n locations
ctaactgtatgccttgttcgtttaaatggcgacaagatctacataagtgtcccttcttggagcatttaaaacacaaattatcatccttgctaataatcaagtcattttgtatatagggacatgatctaatcgagtgtccctttttaaagcattcactacacttcttacctctcttagtataaagtggggctcgattattaccttggatgttacctattgtggaggcaaggttgaggtttttcgaagagatattgattttcttcttttgttccttcctcttggcaaacctcaagtactgacattntcttcaagggagttagtgcatgccacgtgtgttcccgtcttatgcttctttacgatgtgatca

SEQ ID NO: 10930 - DNA, 242 bp, Zea mays
  unsure (1)..(242): unsure at all n locations
tatcttatatattctactagaagccccgcgcgactaagacaaccctaagttacttcttaacttagtttctttagcttaatgttctgaaatattgcataatcatgacatacatgttcattgcatttcgatagactgtaatcttgttgaccgagagtacattctcttgccggagcaaggagctgcttangaggtagccccagattcagcccccgagcctgcaccagatgacctgcctgtcactg

SEQ ID NO: 10931 - DNA, 441 bp, Zea mays
  unsure (1)..(441): unsure at all n locations
agcttaggacatgctggcactagtttcaagggttcatatgaagccancactgctcggccttgttcagtgcactcaagaccanaggagataccttcggcatatgtccgaagttcctgcgtctgaagcacaagcgcctacgcgcccaatgaaatcatcattgaggccttgatcaagggtcttctgccaagacctacggtccaatacttcaccaggagaccccctcagaccctagagaagctgcttagaaaatggatgagtacatccgggctgataatgacttccggcanagaagggaggaagcttacatnatttctgagatgactagggtgcttcgagggagaattcacccacgcatgtagatcattcacagctccagcagatgatgacaaggaagccgcttagaggcacagcacacctacagcttcggacagtacaagctct

SEQ ID NO: 10932 - DNA, 237 bp, Zea mays
tgtaattatcaaactgctcgtcttagactttgtggctgtccatgaaatcgtgatacctcaaaaggaattccttgctgactggaataaacaataaagatgccatcttctgtaaccgtgagccccttcttgtgttggggctcttcaagatactcattattgatactcatcctttgtgaaccaacaacaggattacctcttactcagaccattttaaacagttaaatgtttctaaatacg

SEQ ID NO: 10933 - DNA, 433 bp, Zea mays
  unsure (1)..(433): unsure at all n locations
ccgcatgcaactaacatgtctcgtatgagtcagaagtcaacgattattatagcctatcagaacgatgctccatcatgcgaacaccactgatatgacccaaacgacagngccacatgatggtaggacttaaatcattaagccgtggccctttagcactaatattacaagactggcgcctcatcaagaattataacgaataacccattcataatggatgcaaatgccacatacatgccattcctagatatcacacaaccattgttatcactcgcaaatgacaaaccatccttcatcaaacatgacggagacataatgctactactcacactaggaactacataacaatatattaaatccaaaataaaacctgatgggaggtggagttgcatccgtccgaccgtcaacgcaacaactctagcattattgcctaccc

SEQ ID NO: 10934 - DNA, 280 bp, Zea mays
  unsure (1)..(280): unsure at all n locations
aaccacgagagcacnagaaagaaaaaccaattttgattttaaccgaaatcaaacctttgcctaaaacctattaaccagggccaggcaattggcatgactaggtaacctagtaacttaagcatgcacatgaaatacacacctaatgatgatgaaatgaccattaaaactagcgaataatgggctaacttgacgactcaaacaggttgcctagtcataataaacacaagaacattttaatgaccatttaaaatgaaataaaaatgtgagtgtcattaataat

SEQ ID NO: 10935 - DNA, 311 bp, Zea mays
tcgagcagccgcgacaagcagcgcaaccaagcgggaggagcacatcacatcaagaatgtgatgaccacctcaagacccctggtgctgctacatatggacctcttctgacccgtcgcctatctaagcatatgatgaagcaagtaccgactacatattgttgatgactattcccgcttcacttgggtagactttttgcaggataagtctcgaaacccacgggaccctcaagcgcttcctattgagagcacataatgagtctgagctcatagtgataaatataagattcgacatcgggtccgagttcaagaacc

SEQ ID NO: 10936 - DNA, 335 bp, Zea mays
gcggtgatgctcctccgatccagaagctgtgattcagccatcgacggagagggcgcatagcagagaagcagggacgcgcggctaccatagctggaggaagcagaggcgtttgcaagaacatgagcaaccagcgcaggggagataaatacacagaacagcggcaggattttatcgcaggctatagcggcgcagggataacgccggcgagctggagaaacgcgcggcagaacgagcgcgcaaggtagctgggtgagcggtcggcacgggcaagagctggagccacggcgttgttgcagcttgtgcgaccaggtttcagagaaatcaacaagaagata

SEQ ID NO: 10937 - DNA, 134 bp, Zea mays
aacagaaagatgttgctcgtcgatataactccttgtcaatatcattcttgatgtcatacagaaactctgtaaacatgttgcataattaaatatcaactctaaattactgagtgtggaaccatcttatgctgcta

SEQ ID NO: 10938 - DNA, 359 bp, Zea mays
  unsure (1)..(359): unsure at all n locations
acataaaattgttaatattaatggccttcgtccggtgaaacattatctccctaaggatttaatgaacttcggacgaagaccatgagtagaatatcacgaaggccacaccttcgtgatcagacttacaaaataatatgaaataaaatatgaaacattagagaaagatgtaccaaaaatagataacattattcacatattntattatatgaacctaaatatcaaaacatagtgtttangtacatttataccttcgccttggcagaaaataataattcccgagtaatggcgttgcaattacaggattgcgtgaacagtaaaggaatactgttcactatttataggcacaggacacagcctgt

SEQ ID NO: 10939 - DNA, 437 bp, Zea mays
agcttgccttcgcctccgtgtaccagccacagtttaatggagtcttttatcgcaccaacgacaaaattttcacagctgtcaagaaaatgctcctcgacgacaaagaaggcaagtggccccacctgttacccgaagtggtctgggcactgaatacaactgagtgcagggcgactgggtttacccgcttacgcctattatacggatcggaggccatgactccgcaagaaataaagcatatgtcgcctcggacagccgcgtcggccgtcccagacgtagatgagccgacttcgaatgatctcatcgacggagaccgcgtcttcggcctacaggctatggacaaataccaagcccagacaaaagcatggcgtgaccaggcagtcatcccaagggaattcatcgaaagggagctcgttctcgtccggacagctcgaacggag

SEQ ID NO: 10940 - DNA, 421 bp, Zea mays
  unsure (1)..(421): unsure at all n locations
agctttgtaatttgatcatatctaaatttttgcattttccctcatgacttcttctaattaccctntatgcttaacttggcttacttagcgtttattagggtttgagggtctttctctctcaaagttcataacaagattaaggagagtttaagaagattcattataaacctttattctgaattttcttttgatgttcacccttttactgaatttacatgtgataataggttggattagcttaaggaagaaccctatgtgacactggggtgtcacagccttccccccttaaaagaatctcgtcccgagatttgggccagagtcctcccggggtgaagcgaagggtgagacttaaaggaaatgggtgattattgttattattaaggtaaaactgctcttcgaatgtcattctctttgcaacttc

SEQ ID NO: 10941 - DNA, 385 bp, Zea mays
  unsure (1)..(385): unsure at all n locations
tttctctattgggtcttgtgttacccttcagattcttgttcacggttaagtaccctacaccagggttctatttgcaaaatgtcataacaatacaacttngttgaaatttttgcctagtgaatgcactctaagtgtgtcaaacatatgaaatgctaatgctgatgatgttatgctcacgttttagtaacagtaacaccaggggttgtacatccttactcccataaaagaatctcttcccgagattgaaacagtaacaccaggggttcccatggttntagtaacagtaacaccaagggtgttacaggggggcgcgacgaacgacaccacaacgagagttgtgggcgagctgacggagctcggcaaggtgagagatagagagcagcgc

SEQ ID NO: 10942 - DNA, 441 bp, Zea mays
  unsure (1)..(441): unsure at all n locations
agcttctaaagggagagcacattntaggactaacaaatgttcattttgagaaagataggatttgtagcgcatgtcaagcaggaaagcaggttggagtccgtcatccacaaaagaacatcatgacgactgacaggccgcttgaactactccacatggatctatttggtctgatcgcttatataagcatcggcaggagtaagtactgtctagntattggggataattattcttgcttcacttgggtattctttttgcaggaaaaatctcaaacccaagagaccctaaagagattcttaagacgggctcaaaatgagttcggattaaggataaaaaagataagaagcgataatgggacggagttcaagaactctcaaattgaaggatttcttgcggaggagggcatcaagcatgagttctcttctccctacacacctcaacaaa

SEQ ID NO: 10943 - DNA, 475 bp, Zea mays
catacacataccttcatagacgatggctcaaacataatatgtctataatgggattcgtacaagctaggtcctatgggtatgtttggatgcctcggcccaggcacaaccaggcccatttgaaacaacgtctcaatgtttggttgcttggcccagcgcacgagcctgtcttaagcgagcgcacaaccaggcccatttcgaacgcgaaaaagttgcttcgcaagttagcctggccactcgcagccgccgcggctctagggttctctcctctcaccactctcctctcgctctcgtgttcagacccctcgcagccgccgcggctctagggatctctcctctcgccactctcctctcgctctcgtcttcagatttctacatctgtctgtgtaatctgtgaaaactgtgtgtaatctgtgtgtaatctgtgtgaaatctgtgaaatctgattgcagcttatgggttcatatttcatatgtct

SEQ ID NO: 10944 - DNA, 439 bp, Zea mays
  unsure (1)..(439): unsure at all n locations
agcttctaaagggggagcacattntaggactatcttatgttcattttgagaaagacaggatttgtagcgcatgtcaagcaggaaagcaggttggagttcattatccacacaagaatatcatgacgaccgagaggccgcttgagctactccacatggatctattctgcccgattgcgtacataagcatatgcgggagtaagtattgtcttgtaattgtggatgattattctcgcttcacttaggtgttctttctgtaggaaaaatctcaaacccaagagaccttgaagagattcttgagacgggctcaaaatgagttcggattgagaatcaagaagattagaagtgacaatggaacggtgttcaagaattctcatattgaaggatttcttgaggaggagggcatcaagcatgagttctcttctccctacatagctcaata

SEQ ID NO: 10945 - DNA, 454 bp, Zea mays
  unsure (1)..(454): unsure at all n locations
gctttagctgatttagagtcccttggtggatgattcccacgtttatcttttccatttcctgacacaaagtgttctcggaggtcttcgccataagacagtggcangaagtcttacgactcaatgcatctgccaccacattggctttgcctgggtgataatggatctccaattcataatctttaatgagctcaagccatcgtctttgcctcatatttaactctgactgggtgaagatgtacttcanacttttatgatctgtatatatgtgacagatattacccagcagatagtgacgccaaatctttatggcatgaaccacagtagctagctccagatcatgagttggatagtgctcctcatgtcggcgcaactgccttgaagcatacgcaatcactcggtcctcttgcatcagtacacagtcgagtccactggcagatgcatcacaatatacgtc

SEQ ID NO: 10946 - DNA, 349 bp, Zea mays
  unsure (1)..(349): unsure at all n locations
gttggtggtcatcatccacacaagaacatcatgacgactgatagaccagtcgagctcctacacatggacctattcggctcgatagcttacataaacatcggcgggagtaagtactggctagttattgtggatgactattctcgcttcacttgggtgttctttttacaggaaaaatctcatacccaagagaccttaaagggattcttgagacgggctcaaaatgagttcggcttaaggatcaaaaagattagaagagataacgggacggagttcaagaattctcanatcgaaggctttcttgaggaggagggcatcaagcatgatttctcttcccctacacgccacaaca

SEQ ID NO: 10947 - DNA, 401 bp, Zea mays
ctcatgccttattctgggtaaaagaatgttcattaaatggcttggtaaagataatcgcttattgatccttaatattaatgtaagaaatctcgatatcccccttttgttggtgatccctaagaaaatgataccgaatggctatgtgcttaatgcggctatgctcgaccggattgtccgccattttaattgcactctcattatcacatagcaaagggactttggttaatttgtaaccgtaatcccgcacggtttgcctcatccaaagcaattgcgcgcaacaatgtcctgcggcaatgtactctgcttctgcggtggaaagagcgaccgaattttgcttctttgaagccaagacaccaagatctttccagaacatgcaagtcccgatgtgctttctattgatt

SEQ ID NO: 10948 - DNA, 430 bp, Zea mays
  unsure (1)..(430): unsure at all n locations
agctnggacagntatttgcgatggctcctggggaaccttcngggcaggtgcagctgccgttttaattgcaccttcaaaaatcagaacatgctacgcagtgaaacttgattttagttgtacaaataatagtgctgaatatgaagctttgctcttgggtcttcggaagctgaaggcaatggggataagaagggtgattctcaaaactgattctcaagtcatttctggccatgttgacaaaagttgcaaagcaagagatccgaagcttgagaaatatttggatacagttcgaagacttgaagcttccttcgaagggttctctgtcaagaatattccacgaggagaaaatgagcacgctgatctactagccaagtcagcggcacaggggctgcccttaccttcggaagtattctttgaaacaataaaagcacct

SEQ ID NO: 10949 - DNA, 307 bp, Zea mays
  unsure (1)..(307): unsure at all n locations
tgataacgagggctatattatatatcctgtcggntatcccgagcacaaaattatgagaattcatgctatgaaacctcataatgtttcacatcatgcttttatgtataagagtgaggcatctagttctaggcaatccactcatgttaaattgcctaaaaagaaaacttctactgcatcaaatgagcctattgtttcatttaagacttttgatgcttcatatgttttaactaacaaatcaggcaaagtagttgccaaatatgttggggccaaacacaacggctcaaagacttgtgttagggtacccaag

SEQ ID NO: 10950 - DNA, 432 bp, Zea mays
  unsure (1)..(432): unsure at all n locations
agcttgagggtctcggcgtatatgatgttgagtcagctgccccccgccatcaggaccttggtgagcctgacattgccgacaacggggtcgacgacgagcgggtatttccccgggctcggcacatggtcggggtggtcggcccggtcgaaagtgatgggcttgtcggaccaaactatgtagactggcgccgccaccttcaccgagcagacctcccggcgctcttgcttgcggtgccgagccgaggtattcgccgcatgccctccatagatcatgaagcagtcacggaccttggggaacccccctgctgggtgatcttcgttcttgtcgtcgtcgtgggccctgccaccctcggcgggtggcccggccctgtggaaatgacgccgaagcataacgcactcctcgagggtgtgcttgacnggcccctgatggtag

SEQ ID NO: 10951 - DNA, 356 bp, Zea mays
tgaactgcttgaagcattagtgtagctttggtgcttttgtgactgatcagctctggagcagctagagtgatgtatttgtgggcttctgaactgcttcaagctggagtgatatgaaacattagtgatgtagttgtgggctattgaactgcttcaagctggagtgatgtcgctgtggtgcttttgtgacttatcatctctggagctgttgtgaatgatctagctagctatctgtaaatgatctagttgtgaatgaaattataattgtgatgcttttgtgaatatataatcgtggtgcttattgcgttatgtgatggatctatgactgtagatactgattaactgcgcatgctttatga

SEQ ID NO: 10952 - DNA, 416 bp, Zea mays
  unsure (1)..(416): unsure at all n locations
agcttgagagcatcggtagcaccccaggagcatatttaattgaaattcctaaaattatttagaaaggttcttctacttcttgatttgatttaattgatgattctaatccctgcaatcaagttcatgttaagaatgttgttatagaaacatgttcggatgagattgcaatggagaaagagcaattaaagcaagaggtggctcgccttggcaaggtcttgtatgacaagaaaggcaaagccaaacaaatccaacctcctcaggaaaacaccactgggggagtgaacaagcctatggagcgagaaaccgtgatttgtaggttgtgccacatggaaggccacaagtcttaccaatgcaaggcaaagaccggngataaggaaaagaaaaatcttgagcaaagcccaacaagcaaatctaca

SEQ ID NO: 10953 - DNA, 373 bp, Zea mays
  unsure (1)..(373): unsure at all n locations
ctgcttatagtatgtcataacacatcggaatatattaaatgtgatttcagtgccatggggtatgaagatggcgatgttagtcttgatgggcaagtggtacccaaaaaagacactattcgttacttatgatcaatgcttcagaaggatggagacatcgatgaggatgtcagtcatagaattaaagctggatggntgaagtggccgaaacggcgggtgtcttatgcgacccccgggtgccacacaaactaaaaagcaaattctacacgacagcaattcggtcggctattgtgtatggagcaaaatggtggcccactaaaagacgacatgtccaacaactatgtgtggcagagatgcgtatgttgcgctggatatg

SEQ ID NO: 10954 - DNA, 414 bp, Zea mays
agcttaagttatgaatgttttttatgtgaagtttcaatctgtccaaatctggacagcaaagccttcctagtgtgttttaaccatgatacactttaaatcaacctcagttgtttataattgatttgtagacaatttaattatatttccagaaagtttaagatcaaatgatttgaatgtctgagtctctagttatgaaattttgaaggcataagtctgaatctgcccaaacctgaataaagatgtcgtttatcattatttaaccttattaagtgtctaatcaccttgagatgataataccaaagttgtagagaacttcttagactttccaaaagtatttgatcactatttctagatgaatatcttgtgagttacgactgaaacaagtaaatggtgtgatgttgtcctaaatatggt

SEQ ID NO: 10955 - DNA, 484 bp, Zea mays
  unsure (1)..(484): unsure at all n locations
ngagaagatatatgcacccggcttcttcaatccaatgcaacatttgtttcttcatctacnctatgaggcacgaatggtgggccccgtgcacggacgttggcgctatccaatctagagatgtctaaagactattcgaaagaaatgtagaaataaatgcgaaatcgaggcttacattgcagaggcatacattctagacgaggtctcaaacttcacaacaacttattatggtgacaaactgccgagcgtgcataatccaccccctcgttacaatgatggcgacaatgaatcgaaccttagcatatttcgaggctaactcggaagcgcacgtggctcgaacaccaagaccctgacacatgaagagtggcggcatatcatgctatacgtattgaccaaccttgtagaggtgacgccatacatcgaacaaattctttatgaattctggcgtcgatcaagagacccactccacacgaatatgacgctcttc

SEQ ID NO: 10956 - DNA, 411 bp, Zea mays
  unsure (1)..(411): unsure at all n locations
agcttgggaaggttcttcatcctcacatgtgctaaacggcgatgccacagccagcccatgctagtcttagcaattaagcatgcatctagaccggcctcctcttttgcaaaatcaactaaataaagtttgtcgtctagtacacccttaaaagctaatgaaccatcacttcttctaaagacagacacatctacatttgtgaataaacagttatatcccatattacaaagttgactcacagacaacaagttatatccaagcgactcaactaagaacacattagaaatagagtgctcggatgaaatagcaatttttcctaaccctttcaccttgccttggttcccatcaccgaatatgattgaatcttggggatccttgttcttgacgtangaagagaacatcctcttttccccc

SEQ ID NO: 10957 - DNA, 293 bp, Zea mays
ctcactaagaaaggctctttctcgcactcaaaaggtctcttctgctctcaaaatgaacaacaagacttcaaatagacaaagtataagagtatatatagctccagtgcgagaaactagatgttgtcccttcactcagctctcatggggtaccaggcatgtcccatgcacaccaacttatgcatcggacatgttcgctgcaactccaagagaaactagatgttactatactggtatctagtgctttgttcagtgcatcaccacatatatacaatgggtataccactcaaaagtat

SEQ ID NO: 10958 - DNA, 420 bp, Zea mays
agcttttgctcatctcctggcagacagaaatctccttgctgtctgggagacaatacaagaagtcttcttctccgctgccgttgaatatcaacgccccttttggatatttcagtctctaggcataatattgagcttctcgcttttcttctgaagataacctttttcccgaagcatgtcgtacaatataatcgagagcttcggaagatgcttcgggaataggaatggcggttttttcagatagaatttgttctgcaacttctttttctgtttcttcttctccaatttccaaggatttctccttggcgggctctgaaggcccagcttcggtctcggcctggctcttggcagcttcggcttcggatagttttgcctcaatttgtgtttttgaagcttcggtagtcttcttcggagtagagcttg

SEQ ID NO: 10959 - DNA, 441 bp, Zea mays
tggcgactgctagttcgacctctggaagcagtcctacgtggctgcatgctccgctgtgtacggcaagctccggcgcagccgtctcttggacgcggtccacagtggctgcaccccgctgtccatcgtcaaacagggggacctcatggtcgttgccaatgccgatgactctcgggttgttctgggcaccacaaccgacgacggcgccatcacgccgtccagctcatcatccacctgaagcccgacctgccatgtaagccgctactgaccggccatgaattcttgtgcgctgggatgacggtcattgctgctgttgtgtgagtgtcctccaacaagatgtatgtagaggagtagcacatccggtggtgcaacgaccaggtgtacttgaaagtcgcctagaggcgggtgaaaacaaatcaacacagaaatatagcggatgacatg

SEQ ID NO: 10960 - DNA, 414 bp, Zea mays
atgaagctcgtcgtgatcgtgagatcaccggaggtgggcgctaatgctgagtaattcattttaatccctgcatgcgctgaaaataagacaacacaagttaaaaatggggaccttcgtccgaagtttaacacttctttagagtggtaatatgaaggacaaaggtcttcacatataaatgttaatgaaaatcatacgtaatggaataacaaagtacaatgatgtatgagaacttatctcatttgccttagcattttcattacatctcccattacaatatataaatttacaagcataccttcggctccttgatagagggaggtacgaagtttcttcaaaggctaagcggcacgaagctatgcgccttcaaaaagtactttatgcacggcactggtcatcacattataggggagatga

SEQ ID NO: 10961 - DNA, 442 bp, Zea mays
  unsure (1)..(442): unsure at all n locations
agcttatgaagattcttcatcccaacatgggctagtcggcgatgttcataccaacccatgttagtcttagcaattaagcaagtgtcgagttcagctctattaatcacaactaagtatagctgaccctctaacactcccttaaatgctactgaatcatcacttcttctaaagacagtaacacctatattcgtaaaaagacagttgtaacccattntacataattgagaaacagaaagcaagttgtaatctaaagaatctacaagaaaaacattggaaatagaatggtcaggtgatattgaaattttaccaagtcctttgatcaaaccttgatttccatccccgaaagtgatagctcgttggggatcttgttttttctcataggaggagaacatccttttctcccctgtcatgtggtttgtgcacccgctatcgatgatccaac

SEQ ID NO: 10962 - DNA, 401 bp, Zea mays
actcagcttatgggttgccccattctattatgtcggatcgtgacagaattttcacaagcttgttttggcaagaaatgtttcggctctcgggtacaactctcaagatgagctccttctatcaccctcaaacagactggcagacggagcgtgttaatcaatgtttagagaccttccttcacagttgtgtgcatgcctgcccatccaaatggtctgcttggctatcagtggctgaatattggtataacacaagtttccattcatctctgggcaaatcaccctttgaggtattgtatggcaggtcgccacgccacttgggtattttcatgtctgattctgcttctcagctggacttaacatcctggttgcaacaccgcgagctcatggtaaaattgatcagacag

SEQ ID NO: 10963 - DNA, 395 bp, Zea mays
  unsure (1)..(395): unsure at all n locations
cttaagtcacctgcggcatgcaagctttaagggagagcacattntaagaataaccaatgttcattttgaaaaagacagggtttgtagcgcatgccaagcaagaaagcaagttggtgtgcatcatccacacaagaacatcatgacgactgacaggccactggagctcctacacatggatctattcggcccgattgcttacataagcatcggcgggagtaagtactgtctagttattgtggatgattattctcgcttcacttgggtgttctttttgcaagaaaaatctcacacccaagagaccttaaagggattcttgagacgggctcaaaacgggttcggcataaggatcaagaaaattagaagcgacaacgggacggagttcaagaactctcaaa

SEQ ID NO: 10964 - DNA, 416 bp, Zea mays
tatatatatttacatgctattttcttctatgtgctaagtataacacactcttatacttgcttccttataacacgaacgctttatataactatctctatcatatgaattacgataatatacaaatatatttcatatataaatgtatgaactcactggtctttgtttcaactatattgattgaaatggaaatcattcccagataaacaaactgcgccttagagattactttcactaccataatagactagttagattcaaccaatgaagcgtgaaaccacaatgtttatatcttcatacaacacaataatcgcattcatatgatatctgcgttggcgcaatatttttgtacgatatccacactgatcgatgttcataccgcaagcccacacattgtacattgtatccttccctattca

SEQ ID NO: 10965 - DNA, 441 bp, Zea mays
  unsure (1)..(441): unsure at all n locations
agcttctaaaaaccaccacctcatcagcttcgttaagaggaacattattctcccctcgggccctcacaattgagatatcacgaaagtacctccccctcattgcatcgatttgcccttgtttaatagttgattttacaaagacaacatgactcggtctccatggccgatcttcggaatcttcatttctgctttcactatcgctagaattttcagatatcccagctaacatctcattggcaatcttctccatgttggttttttccatggcttcgtaatatccggccagcgctgggtcaatgatcttcttctcgtcaaccatttggataatggtttctagaatgccgaagctcaaaatccaatcaaactcgacgaagtaagtaaggttaaaatggcaaacacaatgcgagcaactcanatagcacgaaaaatactcacaacata

SEQ ID NO: 10966 - DNA, 380 bp, Zea mays
ttttgtgtcatccgccggactgatgcatttggtcttatgtgcgacccttgctgagaggtccgtacttggctgcttcctcggggaaaacctgagatgaacggagatttatttgaagtgcccctaaaccctagtgatgccacataaatgacatgcttgactgctagctgggattcattgatgctgctctgatggacgttggcatgggccccttcagaggttgatcaaccttggatgcccgaacctgtcagtactcgcccgaggcgccctagtcaactagcatcctgaccttctgctgatgagcagaaaagaaagaagatgctcggcgagatcatcttgacaggacgccgtccttactctgctgtgaagaatactgaactggc

SEQ ID NO: 10967 - DNA, 440 bp, Zea mays
agcttcggggagccgaaggtccaaaaaacaccttccctgagctcgttgtcgagaaacgattcaatttcccagcgcatagcggtcccaccttgcagagttactgtttggtctctgcggtccaccgcacagcgagtgcaagcgggtgtccgcctggtgaaaaaatcctggcgcttcgccttcttacctgcagtactatataaacagacgagtaggtgtgaagttaccacaacattcattgctatttgcactgttctgctgccaaaatttttaaccatcgccgaagcttgttcatcggaatcaaacgaagctccagtttgaagcctgcttcgtcagaaaaaacttcggaagaagaaaatattaaatttccacacatccataattaaatggccagagtgcgttctaccgccagggttgagcgtgaggggggcgaaactgaagct

SEQ ID NO: 10968 - DNA, 464 bp, Zea mays
  unsure (1)..(464): unsure at all n locations
ctcagcttcggtcanggagtcgccttagaggccagcgctcctgatgacagtagtttgacttctgctgatgacactgacttggtccccactagtgcattacgggttgttccggttggtgatccttcatcgagccatcaattgacttcccacgacttgggaattccttcattattctccaacctccaggtaatttggtttcttctggtctgactttactccaggtagactactgttcttgtactcatctgtttttaatgtcatgcattggttgacgagatggctggtcagctgagattgcagggtgcctctgtcccagaaggagctttgtctctgacatgttggaatccagtgctgcttcggcagcgggtatctgatttggagatggcgaatgctggttagtgctctntgcttcttctatggctgcttgactgatctgctctatggctgaacacccttgcctgact

SEQ ID NO: 10969 - DNA, 413 bp, Zea mays
agcttcagcttcggcgacagtttcggcgacatttcttatgcatcattttcaccttcgtcatcctacataaatcaaggaatcgtgagtaaaaatcaagtgcaaagaaaaaggtaagtacgaagtattatttcttactggttcaagatgacttcgggcttcgtctccagctttctctcgaccgccctttgtccataccatttttataaatctattggagatacttcgggcgaggtcgggcatatcatccaggattgatgaagataaggtgaaattgggcctgttgacaacctttccatgttcgcaaccggctttcagaaatgcagcagcggtaccctgagaagctacccaggcacagaagtcgccgtgcccggctataacttcgtcaagctcttcgattcagcttcaatatgatc

SEQ ID NO: 10970 - DNA, 378 bp, Zea mays
caactcagcttacggctctgggggctgccaaaactgtgtgccatagatggtgggtggctggcaccaggccaactctggggcatggcggggaattgactcccggactaaggaaaatggtggccgtgaaggtagtgctggctaaaggggcgcgcctgcgaggctttattgcgcgagcggtgcacggcggtcgggaccggcagtgcgccgggcgacactgggaggcgcgtgcgcaacaggcgtaaccggggtgtagcaacggtcgaacaatgtttccgttgctctgccctgttaagcgccgatgtgagaaatcttccgaattggcaagacgctggaacgattgttacctgccagctttgttttgtgttggacgcccggttt

SEQ ID NO: 10971 - DNA, 436 bp, Zea mays
  unsure (1)..(436): unsure at all n locations
agcttatgaagattcttcatcccaacatgggctagtcggcgatgctagagccaacacatgttagtcttagcaattaagcaagtgtcgagttcagctctatcaaaatctaccaagtatagttgaccctctaacactcccttaaatgctactgaatcatcattgcttctaaagacagtaacacctaaatctataaaaagatagttgtagcccattttacataattaagaaacggaaagcaaattgtaatttaaagaatctataagaaaaagattggaaatagaatggtcaggtgatatagcaattttacccaatcctttgaccaaaccttgatttccatccccgaatgtgatagctctttcgggatcatggttntttcgtaggaggagaacatcttcttctcccctgtcatgtgngttgtgcacccgctatcgatgat

SEQ ID NO: 10972 - DNA, 359 bp, Zea mays
gatgactgggttgtctatccacactgagtgatgtacctcttcgatgaagccgacgtttatcagctttcggacctcctttcggatgaagtcctgtcgctcgatggactgtctgcgaggcttctgactcaccggcctggcgtcagggttgatcttcagatggtgctcgatcaccttcctggggatcctaggcatctgctacggctcccaagcaaacacgtctgcatttgcctggaggaaggcgacgagcgtgagttcctatttttcctttagagcaccctcaatgtgagtggtctgggaggaacccgcgctgagctggacagacatgacagggacgtcgtccgctactgatggtcgcacct

SEQ ID NO: 10973 - DNA, 432 bp, Zea mays
agcttatatctcccatagctctgggtgtgcattttattcatgcatgtccgaaccattgtattctgtatcgtggcgattttgagaacgcagcaaggtgcccagtttgcaatgtcagtcgatacaagaaaagctacaatcaagactgtgtaaaaagattcccgaagaaaaataaaaacaagaaatccactattggacctgaaagtggcgatgacacttttgatgacatggatgggaaaaagaagtcaaagatcctagctttggtgatgtggtatcttccagtaattgatcgtttaaaacgtttgttctcaaatcctagggaggctgagcttatgcgttggcatgctaaaaatcgtaagcagaataacaaacagattcgacaccctgctgatgcatcacaaatggaaaaatttgatcttatgtatcctgagtttg

SEQ ID NO: 10974 - DNA, 236 bp, Zea mays
gctactcttgtttcttatatacccactccttgtgctctgcattccacttcttaagattctccatcccttttttatctttctcagagatttatgtgtaggtccactgctctaaaatacaaagcgatggaggagtctacaaaacattccatggttagtagaaataacttgtatgaaaaccgttacatgtttaaacaattattctcaccgctgaattgatctgacgttgagcaatcgtc

SEQ ID NO: 10975 - DNA, 429 bp, Zea mays
agcttctttagagcacgacttcagttccctctatatgatataataggagaggttttgaagaactttgaaatatacctacatcaactgacacctaatgcaattgttagacttagtgtctatatttgggccctcaaaagccatggtatgagtcctaatgccgaagctttctgccgggtgcacgaactgcacttccaaatgaaggccagagcagatggtcttcatgagaactttggttgctacaactttgcgtatcgaaaggatacaaaaacttcggttctcagctaccgtattaagtggtcgactggttggaaaagtgaatggttttatatgaacgcagacgagaaaagaagggagaagctaatgactgtggtcatgagtccactaaaattgagcttcgggatgacaaggcctttgtgccacatgtagcgt

SEQ ID NO: 10976 - DNA, 427 bp, Zea mays
agcttgtaacccctactgcatgcaccctggtgtctgataatatatgcctcattcctcctcttgtgttccatcttgcatcaacccatctgggcaggggcacgcgacacaaaattcactagtcggtccggttgagggccccccccgggtccgaaacgccgacatcaattgttacgtaaatgatatgtatatagttttgtttttctgaaatatgatagatcgtttaactcgcgagctagctagttaacggaccgggctagaatgtcaactcagctcgtgaaaaaattcaaacatattgtagaatcgtcgtcgaatataaacatgttgtagaatcgttgtcgaatatgatgtattgccttttcttcgttgcagaaagttgtgacatgaaccccatgtatgtggaatggaaaaaaaagaccatgctaccttt

SEQ ID NO: 10977 - DNA, 360 bp, Zea mays
  unsure (1)..(360): unsure at all n locations
tattaataaaaagtggctactgctgtgaaaatactactactttacntntaatgaaccacacaatacatgaactgcacaaagataagatggttgtgcaaaatggcttgtgaaaacaattcaaacaaattgatatatcatcccaatttccaagtacatacaggaggtactcaaagactaagttattccattgcaacaaatctagagagggaacaaacctgtctggaaaagcggctgtattgaaagggcacatatgattaacctctttcaaattgacattgctgtagagaagcttcttattgctgctatagatgacagttggcctatctgacgaagcgaacacgtgggtggtaccctttgatg

SEQ ID NO: 10978 - DNA, 390 bp, Zea mays
  unsure (1)..(390): unsure at all n locations
agctngactcatgtatccacacatgaatccttaattcattnttcccgtctcatggacaaggcatcctccctagatccaagtccataaaccaacatatcccattatcaagatgaatacaatcaattactgacctcgcgcgagtgctagaaaaatcactcgacttctaccgagatcctgattagcaagcagctactcgacctagcatactagtattcatctcaaaaaggaatcctaagttcatgcaactagaggtttcaagcaactcctacacttaagtgcacattgcaatcctacaagcattaagtgtagtaaaatagcataattaacaagttatgcaaaaaatcggggcttgccttcaattggtggggctgcggggagatcctcgatagc

SEQ ID NO: 10979 - DNA, 229 bp, Zea mays
cgcatgccacgcagggacaagttggagtccatcattccacaataacattatgaccaccgacaggccggttgagctactccacatggatctatttggcccgaatgcttacataagcatcggcgggaggaagtattggcttgtgataatggatgaatattctcgcttcacttgggtattctttttacaggaaaaatctcaaacccaagagacttttaagggattcttgaga

SEQ ID NO: 10980 - DNA, 413 bp, Zea mays
agcttatgagtagtttcatgctttacaagacttattggcaaatcttccgcaacatgatcagagagacaaatggctctgcaatggttcctctatcctgttttcctctcaaaaggtctatactcatatgtctggtaaccagtggacccgccccatcttctcctggctgtggaaaacaaaatgacagcctaaacacaaggttttttttctggttactgcttaaagatagattaaatactcgttcattccttaagcagcaaactatgccactggactcctacacttgcgacaactgtatcctccaactcgaagagacatttcttcatctttttttcagatgcaactctgctagaagatgatggctcctaataggcatcacaccgccaagaacaactgatctaatcaataccctcctg

SEQ ID NO: 10981 - DNA, 423 bp, Zea mays
taacaagtgcgaaaacgactacaccacatggttcgcgcaaagaccgactacatgcgcaccagaccaacatagcaaatacaccagaccaagtacgttacgccttcgtgagcatagccgaaagcacacaactccatcatacaagccattacatatgtgcaagcgagggcatcacactttacatcggctcaaccttcggaataattgccatctccctatagttaaatagcattatcctcagctcctcacccgcaaaaagacatcgcagctccccctcacctgaacacacagcgggcggcaaggacaacagtttctgtctgcagccctactcactctaagccgaacaccgtacgcctgactcactctacgcttcgcgaccgcccttcgtcgtctacgcccagcaatcgaaccatgcacaacttcagc

SEQ ID NO: 10982 - DNA, 400 bp, Zea mays
  unsure (1)..(400): unsure at all n locations
agcttcacgaagaggaaccttcggctatcttatacaaacagcttcagctgaggaccacttcttcccataagaccttcggcgacgaagcataatcccaacagtagcccctttcgcggtgctagatcgtttttcgtaacgagcttgatccgtgaaaaaagtctcttaagcttcggagcgccgaaggtctaaaaaacaccttccctgagctcgttgtcgagaaacgatttaatctctcaacgcgtagcggccccaccttgcagagttactgttcggtctctgcggtccaccacacagcgagtgcgagcgggtgtccgcctggtgtaaaaattctggcgcttggccttctttcctgcagcactatataaacaaacgagtaggtgtgaagntacccacacattca

SEQ ID NO: 10983 - DNA, 472 bp, Zea mays
gagttatgtcaaatgggccactttacactacatctcttatttggggtgggtacatgcctaaaggatatatgtgctggcatccaatagtaataatacgcttctgtgctaataatcacagaaaactaaggggtggttatatagttatgaatttcttaagtttagtgtcaaaaatgcactttctactacattattatgtaaaaaatgtcaaacagcagatatcatatttttcctaagttctcattaataaaacattagttatcccaagggtggggtgtttttaccttggggttatttatgtcgagatattctaagttttacttgttttattaaaacaaaacggatcctacttattttatactaaaacacggtatgatatatttttccagtgaactaccccgaataagtatcctaacaaaaatacgggcaccttctggatcattatgtatacccctatttctatatatcttattct

SEQ ID NO: 10984 - DNA, 444 bp, Zea mays
  unsure (1)..(444): unsure at all n locations
agcttctaaagggagagcacattntaggactaaccaatgttcattttgagaaagacaggatttgtagcgcatgccaagcagggaagcaagttggcactcatcatccacacaagaacataatgacgactgacaggccactggagctcctacacatggatctattcggcccgatcgcttacataagcatcggcaggagtaagtactgtctagttattgtggatgattattctcgcttcacttgggtattctttttacaggaaaaatctcaaacccaagagactttaaaaggattcttgagacgggctcaaaatgagttcggcttaaggatcaagaaaataagaagcgacaatgggacggagttcaagaactctcaaattgaaagcttccttgaggaggagggcatcaagcatgagttctcttctccctacacgccacaacaaaatg

SEQ ID NO: 10985 - DNA, 166 bp, Zea mays
agcttgctgtacagcacattaggactttgccgagtttattctagtgttggcgggctattaaacttgccgacgttgctgctggacatactcggcaaagtacatgtgtattgttgcattcatgaatcgaaactgatatattacattggtacgaccaagtgactgatgc

SEQ ID NO: 10986 - DNA, 439 bp, Zea mays
  unsure (1)..(439): unsure at all n locations
agctntntaaaaagggcaaataattttntattgaaataaagtaactaactattatatattaacctcaactaaattaaataataaggagtgaatatacttgtaaattagacatacattcatgaataataaagattctataataaagattctaaaataaaaaatacaagtttgcataatgctgggatttagattgtgcatctaaattntagtttaaaacttaataccaaatacgaatttgaattaagtttggataaagaaaataggaaatcaaaatttgaaaagaaaaaaaagaaatcagaaaaggaaaaaagaactcacctactacctgggccgtaatccaggaataaaagaaaatgtgcaattaaaagttgaaaggaaatttcattaattcatgatcccaaaaactatggttaaggtcggttaacatagaagtaaaaca

SEQ ID NO: 10987 - DNA, 427 bp, Zea mays
gcttctcttcttcatgtgagggaaggtccatgctgatagcgactgtctgcttgggcatggcctgatcgaggtggacagtcttggtcccgtcttggctctgcaactgtgccttgtcatgcagcttatcggttgggctggcgggcgcagggacctctcgctgggacatgagacagtgcacgttcctctgaccaggcacgaagtgccgctctatgttgcgcgccgtctgctggttgccgtagatcgtaattgcgcctagcggacctggtatcttcatgcataggcacagaccgtgaatggcagcttctaacttattgatggagccccggcccatgatggcgttgtatggatataccatgtcgacaatgttgaaggttacttgctcacttctggcattgggtgctacaccgcaagagaggggcaactatat

SEQ ID NO: 10988 - DNA, 428 bp, Zea mays
  unsure (1)..(428): unsure at all n locations
agcttacccatgatgaggcatgtgaccagntattaagtcctcgatcatcaagcctacatcggtacggtccttaatcgactcaaacggagaccctacactgagactcccttctcatgcaattcacccgcccggtcttagttttatcatttaaaaaccctaagtttggtacctggcagagatacatcttgtccaatggtgaacccatcacggccatgatggatccaccatcaagttttatttttgaaaacatcccatccactgtgaagcatcacgttttgttttaaaacaaaacatttgtttttctaaagcaggactaagcatcagaaaaccttttaataaaactagtaatcaaggaatggtaaacaatgtcaaggaaggaaatgcagcaatcggtttagcacacaactcctatcacataatgcatcata

SEQ ID NO: 10989 - DNA, 425 bp, Zea mays
  unsure (1)..(425): unsure at all n locations
gtcgacaatgatattcgtcaaagatatgaagaagcatacatgttntctgagatgaccagtggcttctgaggaagaattcaccccaggcacgtcaggtcgatccacaatttcaaccctagtgatgatagaggaagtcatcctcaaaggcagcaacacaacttccattcttatgggccacaacaaagctcctttaagccaccagcctcaagaggcagaggcggcagaggctttagaggaaggtacggagatcatcccaaaagactgttttgcttgttttgtggcgaagataaaggctacaccataagaacatgccaagtcacaattcagaaacaaaatgagattgcccgagttgatgcacggcagaatcagtcaaagcaggtcctacatacttgttcgttctattctccctacatcccagagtacat

SEQ ID NO: 10990 - DNA, 441 bp, Zea mays
  unsure (1)..(441): unsure at all n locations
agcttcatgaatggcatccttcggcatcacgtttctacagcttcttccgaagctgttacttcctgcagggccttcggcgacgaagcatggtcccaacaatatcgatctcctcttgacggatgatcttctggtggcgatccaccgtgaagtgtgacaagtactattctgccgcctccttgcgccgttcggagagtntatgcagcagttccgcctcttccttgtcgcgttggtcattccattgccgcatcacctccttctcatcgtgcatcacgaggtcttcaaagggtctttgctcatcatccgggagcgcctccatggccggcttgatgatgttggtggtggagatcttggtgtgatccctataaccggccatctatgggctgatttttagcaggtctagacacctaatccccagcggagtcgccaaaaagtatgttgaca

SEQ ID NO: 10991 - DNA, 483 bp, Zea mays
  unsure (1)..(483): unsure at all n locations
gcttgatgtagcaacctcatgtgatgatatgattcaagaagagcatactagtctacatgctgaattgactgaaaaagttgaagtcctgactttagacaaccaaaaattgaagaattacttgactgatgcaactactagaggaaaagttgctattgagaacaatgatttcaacaatgagttggcagtggataatcaaaggcttaagaatgaggtcaagaaactaaaaagtgaaaatgaacatcttgcaacaagtgtgcaaaaattcaacaagggtcaatacctccaaaatgagctgcttatgaacactgttatgaaaaataacaagagtggtattggatacaatgcttttgtgcaaaagaaagctatcactcaatacaagccaaagcagactcacaagcctatcanatgctntgagtgtggaaatgaaggtcattntgcccacaactgcaaagctaaaccaccaactcccttttctaagcactc

SEQ ID NO: 10992 - DNA, 403 bp, Zea mays
  unsure (1)..(403): unsure at all n locations
agacttggcgaccaagngatttaactcttcaatttctacgaggctgaagaccctaagcatctatttggtgaaggcaagtgtcctttgacccattatgtcccattcacttttaatgcactgtcccgcattacttaattgaaacctaaggattgactagctttccatttaccttatccttgtttaccttttgggttatcatggttagcattatgctattgctttacttgaatcaatgaacatgatgtgaatacttatgatactatgatgttatcccgatgatgttcctgtgatactttaaggggctcaggctgattcctgagtgcctctccgtaaggacctgtttggggagtgacaacccgggataacagtgcaaccatgagggtgaaatggggcgcccttagct

SEQ ID NO: 10993 - DNA, 285 bp, Zea mays
tgcagctgggcttcaacagactgaggcgagatccgtggaagctcaatccagaaaaatgtgtcttttgagtgccagcacggaaagtgctcggattcattgtcagccaccgaggaaatgaagcttacccggcaaagaacaacgctatcatgaagatggaagcgccacggtcacagaagaaagtgcataggcttactggatgcatggcagctttaagcacgttcatatcaaggttaggagaagaaagcctaccattctacaaattgctcaagaaggtggacaagttct

SEQ ID NO: 10994 - DNA, 435 bp, Zea mays
  unsure (1)..(435): unsure at all n locations
agcttctaaagggggaacatgtgttaggtctaacaaatgtatctttcgaanaagatagaccttgtgtagcttgtcaagcaggtaaacaggtgggaagtactcatcatagcaaaaatgtgatgaccacatcaagacctttggagctacttcatatggatctcttcgaacccgtcgcctacctcagcatcgggggaagtaagtatggtcttgttatagttgatgattttcccctcttcacttgggtattcttcttgcaggataaaacaaaaactcaagggacccttaaacgcttcctaaggagagctcaaaatgaatttgagctcaaggtgaagaagataaggagcgacaacgggtccgagtttaagaaccttcaagtggaggagtaccttgaggaggaaggaatcaagcacgagttctccgctccctacacaccac

SEQ ID NO: 10995 - DNA, 335 bp, Zea mays
  unsure (1)..(335): unsure at all n locations
gctaactcgactcatgtggcttctctcttatcangtgttaagcggngcaatatctgtcagatatgtattgcttgcagatacacctttcgtttgtgctcggttagatccttgggaacttcgggcatgtctgcggacagccatgcaaacacgtctcgattgttctgcaggaaccggatgagcgtgtcttcctatttggcggtgaagctagagctaatgaacgctgtcttgcgtgcatcaaggagccaagggtggccttcttggtttcttcaactgaccgtatggaagtggctgatgtttcttctttcaccgagatcatgaggtcatcccctaatgat

SEQ ID NO: 10996 - DNA, 428 bp, Zea mays
  unsure (1)..(428): unsure at all n locations
agcttaatctaatgaaatgttgttttcagcatttgttggactttagatagtgtagcaattctttntcctactgatggtgtattgtccttgtcatttccttgtagtgttatatacttctagagcatgaaaaggaatctaaattaagtattagctatacacagcctctatcctgaaaagagagagagagagaaaaaagcgaggctgtggtatatcgtctgtgatcgtgtttattgcaagtctttttcatatgcacctttattgcaatgctttgtgtgaaatgattgctccaatcatgaattaggaagcatacttccccatccttataaaattacatatatatacctttatcaaaagttgcttagagtatctccagcagctccctaatcatgaattaggagagatgctgcagcagatagcccacaatcttc

SEQ ID NO: 10997 - DNA, 305 bp, Zea mays
  unsure (1)..(305): unsure at all n locations
tcatttgaatacctttgatcatatctcttttatatgctatgactaacgtgttntcaagtgtatttcatacaaagtcataaggatattgaaagggaattggagtctttggcgaagacaaaggctttcactccgtaactcatacttcgccaccactccgagcaactctctcttctttgggggagaaatgagcatcaaggaaaaggacttcatccttgggggagagagtaaaagctcaaacgcaaaaggactctcgctttggtataatcttaactcacttatttatgaccaaaggggaagattgcact

SEQ ID NO: 10998 - DNA, 411 bp, Zea mays
  unsure (1)..(411): unsure at all n locations
agctnntgaagaaattntatgtagtcgaggagacatatgcgccttttcgggtgccagggggattgctaccattttggagaggaaaggctgtgaccacgtgagattcttggcacaatccgaagccgccttatcctccgaagatataaaagaccccacggccgaagcgagcctggtcggtggaaaatttttcaccgacatctgggacaatgatggccgggaaatggcccaagaaattacacgaaaaagcgaaaaaggcattcatgacgctagaaaagtagcagaggccgctgagaaaagtgcagagcccgaagtgcaaataggtattgactagtggtttttgactctgttgtaattntttgatttcgaacttggtcacggtttggtatagtaatatagccgtatattctcccc

SEQ ID NO: 10999 - DNA, 366 bp, Zea mays
  unsure (1)..(366): unsure at all n locations
gccttagccaacctatattagtcttagtaaataagcaagtatcgagttcagctctattaaaatcaaccaagtatagcttaccctctaatactcccttaaatgctactgaatcatcacttcttctagagacagtaacacctatattcgtaaaataacagctgtaacccattttgcataattgagaaactgaaagcaaaatgtcatttaaagtctacaagaaaaacattggaaatggaatggtcagatgagatagcgaatntaccaagatctttgaccaaaccttgatttccatacccgaatgtgatagctctttgcggatcatcgcatttctcgtaggaggagaacatctatttctaccctatcatg

SEQ ID NO: 11000 - DNA, 430 bp, Zea mays
  unsure (1)..(430): unsure at all n locations
agctntgtgaccaggggtcgtcttatagggctgtgtccccgctgaccaagttgtgggctctgttgatggcactgagttggttccggctggttcgttgcgagctgcttcgggtggcggccttacgcccgatcatccattgatctctcatgatttgggggtcccttcgttcttttccaacctctaggtactatggtatacttcagcttgatttttacaccgcatgaactgttgtcattacactcatctgctccccttatcaggctntggtggacgggatggctagccagctgaggttacagggtgctcctgttccagaagtagcttcgtctcttgcacgttggaatccagtgttacttcaacatcgtgtctctgacttggaggcgaccaacgctggttagtgcttttttgcttttctttgtcttcactatta

SEQ ID NO: 11001 - DNA, 394 bp, Zea mays
  unsure (1)..(394): unsure at all n locations
acatgtgctaagtggcgatgccttattcagcccatgcgagtcttagcaattaagcatgcatctagaccggcctcctctttngcaaaatcaactaaatagagtttgctgtctaatacacccttataagctaatgaaccatcacttcttctaaagacagacacatctacatttgtgaatagacaattatatcccatattggataattgacttacagatagcagattatatccaagcgactctactaataatacattataaatagagtgctcatttgaaattgcaatcttgcctaagcctttaaccttgccttgatttccgtcaccgaatatgaatgagtcttgcgaatccttattcttgacgcagtaggtgaacatcttcttctctctcgacatat

SEQ ID NO: 11002 - DNA, 142 bp, Zea mays
  unsure (1)..(142): unsure at all n locations
agctnggtgtactcctccatgcgcctaggggttccttttatcgccccaaggcagctaggagccgttggaggctaacttgccttctgtcgggtggtgcannnnanannncngtgcaccatcagacaatcatatgatctgtacg

SEQ ID NO: 11003 - DNA, 417 bp, Zea mays
agcttagtgcctcatagagcatcaagtagttgtatttgcatgaggactaacagcgcttcaaatttcgtgagttaaaagttctttcaaaagtaagtttgaaaattgcaaagtgttggatgcgtggaccgtccgggccttgagggcggaccgtccgcgatccaccagaggggtccgaagtctaaccacttacgcagccactttgttcttttgcattgcggaccgtccgggcctttgggccggaccgtccgcagtcatgaccagagaaggatggtttcgggccagtccctgaattatagcgcggaccgtccggctgtgatgggcggaccgttcgcaagtgtcaaacatgttttggacagggactgtgtgaattttgagatttgtacttcggactgtccgggggactagtccggacagtac

SEQ ID NO: 11004 - DNA, 431 bp, Zea mays
  unsure (1)..(431): unsure at all n locations
ttctctatcttgtttatgcccttgctttacacaaacaaaggggtactaaaataaaaactagtgcatgtgttactaatatcacatcttgtgttgagctcattcatagaaaatcaataaaaagagggtgtgctttgtttaattggctaaattacaagcttaaaggtcactcttcacataaattaagataaggttgctagaggccaacgtataaaaactttatttctttcaattggtttagtattctatcttttagaggatataccatagtacatgttaaattcctctgcgacttaaaatatccaatactatgtgcattagtttggacgaaattaattctatcatatgacgatgatgaaccaacgaacaatanaaataaatactatatcaaaactaaggatcaaaactattaaataatcctagatacttactta

SEQ ID NO: 11005 - DNA, 413 bp, Zea mays
ctgcagcttagcaggctgtctctagtatgtatgtatatgagcatataaaatattctttcgtgttggttatagcatgggttatagaatgatgttttaaataaaacatatgataacagatagagtggataagctgctgtagacagcctaagtccattgccatgtcagacgatgttgagaaaaatacttttttcaaaaccagagtttacaggagacaactataattgtttctagacaatattttagttgcagcacataaaaagagaagagtgagactccagccacgcgccagccaaaaactttgatccaaatcaaagtgtttagacccaaaaatattgtattattggtgaaattatagcttaaattaccgactttctggatatattctaaacatcttttaacctaaaatactattt

SEQ ID NO: 11006 - DNA, 464 bp, Zea mays
  unsure (1)..(464): unsure at all n locations
acgagagcatncccacccttatcacattcaatggtttaacaacagcggtatgttcaaggtaacaaaaaccagcagggtgcattnttctattggctcttaccatgactttgctgatttcgatgtggtgattatggatgcttgctctcttttattaggacgtccttgggagtttgatactgatgctattcaccatggtagatctaataaatatactttcatgcataagggaaagaaaattgtgttgcttcctatgactcccactgagattatccactttgaacattagaaaaagactaatgctaagcaaaaaggtgttttgaactctgaaaatcagcaacaaattaagttaaaaactcctactttgctagccactaaatctgatcttgatgagttacatccctctcttggactttgctatgccttagtgtgcaaaaatgctttctattccattgatgatacatcta

SEQ ID NO: 11007 - DNA, 447 bp, Zea mays
  unsure (1)..(447): unsure at all n locations
agcttctaaagggagaacacgtgataggtttgactaacgtgcaattcgaaaaggatagaccttgtgcagcttgtcaagcaggtaaacaagtgggaggagcacatcacagcaagaatgtgatgaccacttcaagacctctggagctgctacatatggacctcttcggacccgtcgcctatctgagcataggaggaagtaagtatggtctagttattgttgatgacttttcccgcttcacttgggtgttctttttgcaggataagtctgaaacccaagggaccctcaagcgcttcctcaggagagctcaaaatgagtttgagctcaaagtgaagaagataaggagcgacaatgggtccgagttcaagaaccttcaagtggaggagttccttgaagaggaagggatcaagcacgagttctccgctccctacacaccacagcanaatggtg

SEQ ID NO: 11008 - DNA, 483 bp, Zea mays
  unsure (1)..(483): unsure at all n locations
gtacatctttacccagtcagagctgaatatgaggcagactagatggcttgagctgattaaagattatgaattggagattcactatcacccaagcaaggccaatgtagtggcaaatgcactcagtcacaaggcttcctgtcattgtcttatgatgacgacttcttacattacattatgccaagaaatggagaangtgaacctgggaatgattcaacatggaactttaaatcacttgaagcttgagtcggttcttctgcaaagaataattgatgcacaaagaaatgatgagggtatgaaacacattcatgagaaaataaaagtcggtaaggcaaattgttttatagaagatgatcaaggcgttgtatggtttaacaaccgcatagttgtgcccaagaatgatgagatccgccagcacaatttatatgaagcacatcttagtcgctattctattcatctcggaagcactaagatgtatcatgatct

SEQ ID NO: 11009 - DNA, 412 bp, Zea mays
ttcagtcacctgcggcatgcaagcttctcctttcggagccttatctcgatcccgattgcctccagcctcggatcgtaatgtgtcgctgctgcctccaacgcctccttgtagaagggcctccttttcttccattggggaggcttcaccgcctcctccttcaacgtagtcttcctcgaatccgtaaccctccgccggtccaccaaatgcagtcccgtccccgcctccacatccatggccaccgtgagaccccgcgccttgccgatccagcaacagaggagcccccgcccgtcatcactgggccaaccgaaggcactggacatgtgatttcccatgtcggaagcgaaggaccgcgccttcggtggtagcggcaagaagaaccggcggcggtggcgctggcttatgcgggtttggc

SEQ ID NO: 11010 - DNA, 461 bp, Zea mays
  unsure (1)..(461): unsure at all n locations
gcttcgcgctactcctgaaggatctgtcgaaggtgttatctctctttatgatcttcggctgcgaagcatacccccaatagaaacaaaactcggtagctctatccaccgccaaagccgagtatattgctgtatgacactattgtgcacaattactttggaagtggcaaacccttatggactatggctacaagttgagcaaagtccctctccaatgtgataatgagagtgcaatctgcatggtgtataatcccgttgaacacagtcgcactaagcacatagacacccggtatcactctttgagagatcaccaacaaaaggggatatcaaaattgcttatgttagcacccacaaccaattagccgatatctttaccaagcccctagatgaaaagacttttaacaaacataggaatgagctaaatattcttgaatctcggaactttgattgaaacatngcacata

SEQ ID NO: 11011 - DNA, 413 bp, Zea mays
  unsure (1)..(413): unsure at all n locations
agctngagcatatcatcataagcattggcattttatatgtttgacacacctagagtgcattcaccaggcaaaatttcaaataagttgtattgatatgaccttttgcaaatagaaccctagagtggggaacttaaccctagattgggtgtaatagaaccaacactagtaagaatgtgatcatcagtgacgattttctagtgacgctggtgacttcagtcatagattgatacatttctatgaccaaatttacatcttcatcaacaattacaagggacgaagattgtaatactcaaatttgtatacaaaggatatagtggatttccacgttttgtgtgccttaattgcatcatgaaaagagcatacccaaaaaaatttatggtttaattcaaacaaatgaataaaaaatgcatcat

SEQ ID NO: 11012 - DNA, 489 bp, Zea mays
tagcccgaagcatcggaaatagatttatgacccaaatatgtgtaaatggcgggcgaaaaatcgttggtgacgaagctcgaaaccaccttaagccagtgagaaacttatatttgttacttttaccttctccttgacatttgcacctttcttattatgttctttaatatgtgcaggatgacgaagctgaagtatgacgaagatgaagcttaatagttgctataatagactttcctgtaaaaaattctggagagattattgtaatataattgtggaaaaaacttatgtaaatttgtacataccttgcaatgtatcttgtctcttttacccgtgtacaatctgctttgctgtggacgaaacttctcctttgagccaaaggcgaaaaacaccttcccttcttttctacacaacgaagcatgaaaatttcctctttcttcgaagttttcctcattccggagcatctgtctttttgtgtggatgatgatgatgatt

SEQ ID NO: 11013 - DNA, 444 bp, Zea mays
  unsure (1)..(444): unsure at all n locations
agctcactagataattntccacattnttctacttctatagcataagcattcttaaccttaacatgcttcttgttttctttaataagaaagtcctcttgggagtccaagagatcatcgttctcatgaatagcactaattaattcatttaattttgctttttgttgcatgttaaggttggcaaaaagggtgcgcaagttatcctcctcatcactacaattatcctcatcactagaggtttcatatttagtggaggatcttgattttaccttcttcttttttccatcctttgccatgaggcatttgtggctgacgttggggaagagaagacccttggtgacggcgatgtttgcggcatcctcgtcggaggaggagtcggtggagctctcgtcggagtcccatttccggcaaacatgggcatcgccgcccttcttcttgtagtatctc

SEQ ID NO: 11014 - DNA, 470 bp, Zea mays
  unsure (1)..(470): unsure at all n locations
gtgacagtcgtcgtctcgtgtcggcttcttgttgccgacggngtcgccttgggcgcttccgcgggcaccaccctcagcatgttctcacgcaccggcctaggctcctccgcgtgcctttcacggctagccacgtttgtggccacatgtcgaggactccccttcttgtcaccccgacaggcctctcactgctcccgcgtgagatgtagcttctcgttgatgggtgacaggcctcccactgttgttcgtcgccgtcgacgaccttgagacgaccttagcacaacttcgatcgtcatcgtggagaggtctagcagagacttgatcgagcgagcgatctgcttatacttcttatggatgcaacggaagatagcttctcgacagctccctcatcgtaggtgtcgtcgccgaactgcaccatcttctacaacatagtggtggcagagagcaaagtcatcaacatcctcacctgactt

SEQ ID NO: 11015 - DNA, 436 bp, Zea mays
  unsure (1)..(436): unsure at all n locations
agcttgtgtttacaagaaggttagtgggagcgctgttgtatttctgatcttgtatgtggatgacatattattgattgggaatgacattcctatgctggagtccgtcaaggcttcactgaaaaagagtttttctatgaaggacttaggggaagcagcatatattttgggcataaggatctatagagataggtcgaagaggcttataggattaagtcaagatacatacattgacaaggttttgaaacggttcaacatggaacagtccaagaaaggtttcatacctatgtcacatggtaaacaccttagccagatgcaatgtcctgcgacggctaatgagcgggagcgcatgagtaaggtaccatacgcctcatcgattggatcaatcatgtatgccatgataagtacacgcccagatgtntcatacgctataagtgct

SEQ ID NO: 11016 - DNA, 451 bp, Zea mays
  unsure (1)..(451): unsure at all n locations
cttgaaactaagcttatgtccattatggttantgtttacaacttatgaaatgtattgcagcattataggtaaatggggtgatagtttcatttgtcttggagcacaattttctttctagctatcacatcagagatgccttttctcccaactttttatgaactaatagatgtgctagtacccagtaatacagaatataaagcatcagtgcaattnttcagttagaatataacgtgcttgtatagcaggctacggccataatagatcagggtcaacacgggtgttctataatagaggaagatcttaaccgactctaattaaagataggatagaattaggtttgatctatctcagagataatagaattagaataggagttggttaaggtagttgtactcgagatggactccctgtcatgttttaatcttgatggcagtattntgtcctacataca

SEQ ID NO: 11017 - DNA, 395 bp, Zea mays
  unsure (1)..(395): unsure at all n locations
agctggtctggtgaacaaatcccttgcagtgatcttgcccaaattcgcgaagntttgctcccaatcggcgcttgaacaggggcagaggcaacgagaacacgtgttcgaacgcggctgacacccctggttcacgcccgttcgcgcaccgtgccttnccagtgcacgcccgcgcgcactcgccggtccacgaccggccgtgcaccccgccgtgcctataaagccttcccaggcgcgccccacttcgccccgcactcaccctcaccggccagcccctttcccttagctccggcgagctcaattccgctcgccattgccgccagagcttcggccaccgtggccagcccaccccagccatcctccgggcaagccagtgcttcggctagctccgccagtag

SEQ ID NO: 11018 - DNA, 469 bp, Zea mays
  unsure (1)..(469): unsure at all n locations
actaagcttaacactctttaggatacttcggatattgttatgataaatggtnattcttcttcacgaagcatgaaaagaagggaaggtgttttatcgccaaagactcaaaaacggtacgtgtgtaaagtttcatgcatcgtaaagaattgagtagcaaaaatagatatattacattcggggttacaaaatgttacactatattacatttcagaaatttttacaaaaatgtttaatcctctctcagaacgacttctgcagcctcattcatgagccgattgacgacttcgtccataatatcttcggccatctttataatttcgtcgtcccccttcggatgggggtccgaaggcgctttagtcggatctgaagcangacacggcttcattgctattacaaatcgcanacagatcttaaaagcctatagaatacaacacgataaanactattatttagtacctaattgaccttc

SEQ ID NO: 11019 - DNA, 414 bp, Zea mays
agcttgtgtgagaggatcgatctcctctagctagtgggaggtgtggatggcagcagcatctgggttgcttgtccacgtcaacgtggggcttgagaaaattctaacctagaaacatgatcccagatataatataggaaccacactgggcctaatatagtatgcgcaaagaacacaaagattagtgccaattcagcattagtttattggcggcggtatgctaaagaaagagcctttcaagcgttgggcatctcttggcttgaacctaattatcaggttgtcggcgtttcgaccccgggggtctctggaccgacgagtaaattgtcgtcgcgtgtcccagcccacatgggtcggcgcgagacggagcacgaaggggggagaagagaggagggaggcatgctaaaaaggggaaactcg

SEQ ID NO: 11020 - DNA, 78 bp, Zea mays
tcttcgaggcgcgtagatccctgatggtggaattcttggtggtcaaaaactagccaagtcgagaaacttcattccgag

SEQ ID NO: 11021 - DNA, 405 bp, Zea mays
agcttaacagagaaagagattaaggatataattcttgcttaattgattgtcaagtgattacaagcatatatatagccaatggcccatccgacatggagaaggctctccttgattctagggatttccaaaactttctaatctaaaccctatggcgcctgcccagcgcgctcagccgcgcggcgcatgtcgcgggcgcatccgcgcctggcatatgtgtccgcacatgacagtatcagtgccaggcatgatggaggacgtggtgttcatgtgcgaggcatttgccgtgaatacaattggatgggatgcaggagctactagctgtgaatttgggtggtggctgccaatggtgatacgatacgaaccatacggaggggttgtccataaccaccaaaaacattaacaaac

SEQ ID NO: 11022 - DNA, 469 bp, Zea mays
gcacaaccgccaccttgagatgatgagctaccaacgcctctatattggccatagactgtgtatccacacttgactccataagactgcaaatatgacaaaaagatgcataaggtcatactcatatggcggaaacaagatacatactgtaaacaagcaagattttttgggggaaggacaaagttcctgatgggcaaacaacatcctcactatcaaggaattgctcatttccagaaaaatgcttcctctacacatccatggacactaacaagtacaaatctatcttcctcgatctttttctgcaccaataacattccacaaatttatattacaaagtttatccaattatcccatttcagaaaaagctacttctctgccatccatcatataaattaagaccacaactctacagggctaaaggcttaattaacaagtttcaagaggcacacggacaacataaggtacatgagat

SEQ ID NO: 11023 - DNA, 378 bp, Zea mays
  unsure (1)..(378): unsure at all n locations
agctctttcctcagctntttattcttttgtgatgaagcaaaaatattctgatgaagactattttgtacagagtatgctaataagcaaagcactgaggatgcagcaagatcttgaggataaaaagaatgagattataatggagggttaaaaaaagaaaatcaaagatcatgaagcttctttggagaaaaaggacttccttcttcagacaatggagggttcattggtagaagcccaaactgaagttgctagattaaatgatgaactcctccgtaaatcagaaagcttcgaacaagaaaggaagaattttgatgcgaggcttgaagccgaagtcgagaaaagctcaaatctacaaaaatccttaaaagaacttcagaatat

SEQ ID NO: 11024 - DNA, 479 bp, Zea mays
tcgcacctccgaactaactcggctgcatcacttttcgctggttgtcattagaataccgacctaaagactttcccgactagtgtcttggacgctgcgtgtattccacattgtccagcatggacctcatttagaagtcgctttccagtagacgatataatgcatttcataaagatgcctgatgcgccccttctgtatagtgtctccccaatgagtgtgtagtgagctgactgtctagcgatgcgctcggctgcatttatatcgtctggatcctcttcattcttgatatatctgatgatcggccttctccagtcatcagagcctgactctggttgattcacgatattacactcttctacctgatccattgagatgcttggttgtggtatttcaggtacaaagactccgggcgggacctgagttcgactggatcctagctgggacaatacatcggctgccgtgttcgatctcttctacatgat

SEQ ID NO: 11025 - DNA, 417 bp, Zea mays
  unsure (1)..(417): unsure at all n locations
agctttctcttaagatagctataaattataacttaaacaccactctgaagccattnttgcataaatattcaaaccatcggcagctaaagacaacttctgggacctaaagtactgtaaaactaataattgctgagcggaatgtgctagaaaaaaaatcacaacactaagcgtctaaatctcatagttcacatagcaaattaagagcaacattagcaaccctagtttgaattggagctaaacgctgagaatataaaaggtaccagattgctcttcgaccactccgcttctacgctaaaagataaatcttgcttgaataaatcgatgacatccatttaaaatacggagtatcattttgttctagaaaatggaatgtaaaattcgaagacataaaccttcctagaaatggatgaaaaattc

SEQ ID NO: 11026 - DNA, 434 bp, Zea mays
  unsure (1)..(434): unsure at all n locations
tggaggcgtcgaatggaatactacttggtganaatccttctttttttattttgtcgccttaaatgcgaggggttgcacctcgggtgtggaggtggcgccttgctccaagatgataatttgtttggagcctttgatcataagttcaaagctcacaaactttcctataacttcctcgggagacattagcttgtatctaagttctccacgtattaattgaacttgagtaggattacgaaatacgagtgatctaagaataaccttgaccatttcatggtcatcccattttgtgctcccgaggttgcgcacttgattcaccaaagtcttgagccggttgtacatggtgtgtggctcctcatcttggttgaggacgaatcgaccgagctctccctcgatcgtctcccgtttggtgatcttggtcacctcgtacacttcgt

SEQ ID NO: 11027 - DNA, 424 bp, Zea mays
  unsure (1)..(424): unsure at all n locations
agcttagtcngttcactattacttangcacattttggtatcatattgagagcacctagaggggggtgaataggtgatcctgtaaaacttaaaacttaatgccgcacaacctgattataagttagcacaccaatgccatgtggctagagaagagtctttgcatgacacgatgaccacacgaagatcaatcacagatagacatagtgtgttatcccgtgcttcggccaaggtcaacacttgcctagtccacgttgtggcgtcccaacggacgagggttgcaatcaacccctctcaatgcggccaaagacccacttgaataccacggtgttttgctttgctttactaatatccagttgcgaggaatctccacaacttggagtctctcgcccttacacttgatgtgtacaaagaatcacggagtaagg

SEQ ID NO: 11028 - DNA, 458 bp, Zea mays
  unsure (1)..(458): unsure at all n locations
cgacctgcggcatgcaagctntattctacgtgtatgatatatatgaaatgattaggnttaatattgagtttattatatacatgtatgattaggttaatatgtagtcttgttgtgttaaatttatgtacgtgtatgattaggttaatatgtagtattgttgattgccggccatcgtgccgttgaattatgtgtggatgttagccatcgtgctgatagttttatttgcaggatttcgaaacctccccgtgcaggggagtttctgccaaaattttctgttgctaagcttctgttaaaggatggaggaccgtgagtggatgtacacgggccgtaaaggaaggaacaatgtcaccactgaatggaatagaaagaccggtgatttcgtggaacgggcatatggcgaggctgctaaaggagcgagtctagtcccatgcccgtgcagcatatgtgccaaccggaaa

SEQ ID NO: 11029 - DNA, 453 bp, Zea mays
ctggtggatataatgtcctgtgcatctatatcggcacattggatctagtccaagagcttttgttcttcagagtatggcaacttgcaaattaatgggaaatgtcaaaggcaaaagaaggtatcccatctatgcaagaggcagacaatggggtatggtgtatctaaaatatacatacccatacaaaagccaatttggtgagccggatgacgatagcctatacgccattgagtcggcatgcaatgaaattttgggtaaccacactaaaaaggaagacagagccttgacggttcctttcagggccaaaggtaaaagaagattaaatcgagtatttgacacgattcacttcgtttacccaaattactcttgggtaaaaaaaggtggtgataagaaaaggaaaagtgcaatgcaatcaccatcagctacctcgaacataagacggtgaaaattttacaa

SEQ ID NO: 11030 - DNA, 438 bp, Zea mays
  unsure (1)..(438): unsure at all n locations
agcttcagcagtttgtagctgatggagagctttctaggaggaattggaagctctgatggcattccaagtgcgtctntgcatccctcaagaaactgtggacgctgcacatactgagatttgtggacaactgttcgaacaggtgactctaaatctttttgattgaactcctttgtagtggtttaaattttgttccatatcttgatcacgcaaagctgacggcgtgttctgtataagtgctcttacatttgttaggacattgcaggttgtcaagttctttaaccagtatttgtgggcaactgttcgaaaaggtgactctaaatctgtataagtgctcttatagttgcgtgttccatatcttgatcacgttctttaaccagnttctagtcttcaattctgtgggaaggactatactgctacaacccacaagaacaacatatg

SEQ ID NO: 11031 - DNA, 213 bp, Zea mays
tggactgagattattagagtctgtactccgtattcataattaatccatttctttgattgttattgcgaattacaaaaatgttcatcccaaaagtcgctttagttcaaacatgttatattttgtcaaaacctactgctagaactgtgtgtatgtaatagactacgtcttgtctagatcccgaaattctgaacagatggggtttatctgttatca

SEQ ID NO: 11032 - DNA, 352 bp, Zea mays
agcttcaactccatctatattatggattgccttgtaatcagtccatgcttccttctgcccttctggcagcttcctgactcccatgaatagcaataggcccttggtccgaaggtatcttcatgcagagataagctgggtgaagaattgcttcaaaagcatttagagtaccacgaccaatgatggcgttgtaggggtattccatgtcaacaatatcaaacacaatttgctcagtccttgtgttattaacaaatccgaaggttaccggcatggtaatctttccgagtgccacaatctgccgccctccgaagccacaaagagggtgcgtagcatcatgaatcttgtcttcaggctc

SEQ ID NO: 11033 - DNA, 417 bp, Zea mays
  unsure (1)..(417): unsure at all n locations
tactttctacatgcttntaatgacttccttttcggttgtgaagccataagggggatgtttaaggaccacagcattgaaaactatatcatacaccaaacaccacacatttataagtttatatctaccaatggtatttcaagtggctttggttatttggtcctaaaataagaagtaagtgaattatggagttaggcggaggcttaagtccataatatcacattgtggcgacaatcatgcatcttagcaagtaaaatgcatatgttcattcaaatacttgtattatttgcttgctctggttgtgatgtcatcaatcaccaaaaatggggagattgtaagaaaatggaccccgggacatgttgctaattgagttatggcgtttgatgaacaacacacatccgggaactaataatgtttcta

SEQ ID NO: 11034 - DNA, 425 bp, Zea mays
  unsure (1)..(425): unsure at all n locations
agcttttgaatgtactaagcacatgccgggaatattggtaaccgtgtaacctagtacctgagtgaagccgggcgcggactttatccctcatgcgacctgagacagggtctcccatgctagctatggtgggtacaagtgcggtcactgcacggcggcagccggggtcagtggagcattgtatgccaaggcggtgaggcctggacgcgaacggngaatcgatggggacggttgtcatgtgtggggtcggagtaccctgacatgccgtgtgtttaggtttaccttgcaaggttaaaactcgattcgattcgtctgcttctcgcagctaatgagactgcttgattccttgtactgcatcgagtaagaagtgaaatgtggattacatgagaataactngtgatttgagctaatgcttgtaccatgtatgc

SEQ ID NO: 11035 - DNA, 473 bp, Zea mays
  unsure (1)..(473): unsure at all n locations
gcttatcgctattctttgttaccaaatcanaactatatgtacccttgtcgaatgttgatctgtagatcttctcgaagggtgggcccatcgagaaggaggcggtgtcaagcgacctctccgacagagagtcaacgcttgctagtttgctaagcacgccgtctgtcggcgatgggtcgcatcttcttgacgagcgatatcatgcatgctggacgggccgatgtcgcaacaaggacgagcatggtggtgacgtcaaggaggggtcagagtcggacaacaacacacatcgggaaggtgacaacagcaggcagcgttgggaatggggcatcaagacagattacttcgggtgacgttgagaagaatgagatcgaacattcgaatagatgcaagaattggatcaataaagagaacgacagttaggatgattggacccgatccgactagaaggctaggacantaatggtttggtctaccta

SEQ ID NO: 11036 - DNA, 435 bp, Zea mays
agcttctaaagggagatcatgtgttaggactaaccgatgtctgttttgagaaagacagaccctgtgtagcatgtcaggcagggaaacaggtgggaagctcacatcacggcgcgaatgtgatgacaacatcaagaccactagagctccttcacatcgatcttttcggactcgttgcctatctaagcatctggggaaagaaggatggtcttgtaattgatgatgagtgttctcgcttcacttgggtgctctttttacaggataaggcgaagacccaagggaccctatagcgcttcttaaggagagctcaaaatgagtttgaacttaaagtgaaaaagataaggagcgacaatgggtccgagttcaagaatctacaagttgaagagtttgttgatgagaaaggcatcaagcacgagttctgcgctccctacacaccac

SEQ ID NO: 11037 - DNA, 463 bp, Zea mays
tataagatcttctcccacatgggctagtcggcggtgccatagccaacctatgttattcttagcaattaagcaagtgtcgagttcagctctatcaaaatctactaagtatagctgaccctctaacactcccttaaatgctactcaatcatcacttcttctaaagacagtaacacctatatccgtaaaaagacaattgtagcccatgttgcataattgagaaacagagagcaaattgtaatataaagaatctacaagaaaaacattggaaatagaatggtcaggtgatatagcaattttaccaagtcctttgaccaaaccttgatttccatccccgaatgtgatagctctttggggatcatgttatttctcgtaggaggagaacatccttttctccctagtcatgtggtttgtgcatctgctatcaatgatccaacttgagccacccgatgcataaacctataaa

SEQ ID NO: 11038 - DNA, 403 bp, Zea mays
  unsure (1)..(403): unsure at all n locations
agctntattccagtgcacctatgaccacgaataataccttcaggcgtatgtccgaaggttcctacgtctgagggcacaggcaccaatagtgcccaatgaaatcgtcattgaggccatgatcaaggggcttcggccgggacctttagctcagtactttgccagaaagcctcctcaaactttggagaagctgctctagaagagggacgagtatattcgagctgacaatgattttcgccaaagaagggaggaagcattcaggttctctgaaatgaccagaggcttcggaggaagattccatccgaggcacgtcaggtcaattcacaactctactcanagtgatgacagaggaagtcaacagcaaaggtcacagtattcctcgcaagcttcggggcagcagcaaagc

SEQ ID NO: 11039 - DNA, 201 bp, Zea mays
ctatctatgtcccatacattcattaatttaccttccgcatttcacaattatacctaagggttgagtagctcttgtgaaccatgagcctgatcacctaaatgtgggtgagaattactggttagctttatgctattgctcaactattatcaatgaccatgatgagaatatctttgatacgctgttttcacttcttttattatg

SEQ ID NO: 11040 - DNA, 365 bp, Zea mays
  unsure (1)..(365): unsure at all n locations
agctntaccaaatggacgttatgagtgccttcctcaatggaccaatcaaggaagaggtctatgttgagcaacctcccggctttgaagacagtgagtatcctaaccatgtctataagctctctaaggcgctntatgggctcaaacaagccccaagagcatggtatgaatgccttaaagacttccttattacaaatggcttcaaagtcggcaaggccgatcctactttattcactaaaactcttgacaatgatttgtttgtatgccaaatttatgttgatgatattatatttgggtctactaacgaatctacatgtgaagaatttagtaggatcatgacacaaaaattcgagatgtctatgatgggg

SEQ ID NO: 11041 - DNA, 346 bp, Zea mays
taaggacacgctagtgaccaattttcaaggctttcagacgaatttagtcacagctcaggccctgttccaatgcacgcacgaccatgaggaatacctccaggcgtatgtccgaaggatcttgcgaatgagggcacaagcgcccacaatgcccaatgaatttgtcattgaggccatggttaagggccttcggccaggacctacagctcagtacttcgccagagagcccccacaaactctatagaagctgctccacaaaatggatgagtacattcgtgctgacaacgacttccgccaaagaagggaggaagcttatatattctcggatatgaccaggggcttctgagga

SEQ ID NO: 11042 - DNA, 392 bp, Zea mays
agcttttgtcattaacatttcttagctaacctatgtttccaatgttttaggtgctcctactcctccaattaaccacatgtgataacaagtcatcagtgcaaatatgaagcaagtgtcttgctaaaacctgaggtgttacacgtgtcgcggagggcgccgccgtaccttggagccagtcggtgaggaagggctgctggtcgttgatcctgcagcgaacggttgcgattaaatcttagcgtaccccttcggctaaatgaatcgcggccattcgttttgatgtacgcatcagattaaatctgcgatcataaaatcgcagccgtagatcggtgatctgacgtccgttatagcataccagttcggattgaagacagctttaatctgaaccctctatt

SEQ ID NO: 11043 - DNA, 336 bp, Zea mays
gcattgattttatatggataaactcaacactagagaactatggataaactccacacaagagatggcattattagcacaagcactagtttcttatttaggaccctttatgtggaagcagcgagttgcttaaatagagaaacctcataatatggactaaatttcccttgagccctcatgcacaatatattttgaaggacatggataatatgcatgggtgttcaatgaagtctaaagggctgacttaatccatattatggtgagtgtctgataaagaagaatccaattccaatttactagatagagaatacgtcacataattctattttataatcaaca

SEQ ID NO: 11044 - DNA, 434 bp, Zea mays
agctttatcaaatggacgtgaagagtgccttcctcaatggaccaatcaaggaggaggtctatgttgagcaacctcccggctttgaagatagtgagtaccctaaccatgtctataaactctctaaggcgctttatgggctcaagcaagccccaagagcatggtatgaatgcctaagagattttcttatcgctaatggcttcaaagtcagaaaagtcgatcctactctattcactaaaactattgcaaatgatttgtttgtatgccaaatttatgttgatgatattatatttggatctactaacaaatctacttgtgaagagtttagtaggataatggtacaaaaattcgagatgtctatgatgggggagttgaagtattttctaggctttcaagtcaagcaactccaagagggcaccttcattagccaaacaaag

SEQ ID NO: 11045 - DNA, 485 bp, Zea mays
tatcaaccgcgcctgtagccatgcgatgtggtcttaccgcctgtgttaccgtggtactccggagacctcaattatgccatgtcgcagctctttaccgtgtagtagtaaccatggcacgccttggctcaccattttcgcaccgttgcaccgacgaacgccacgactgagccaccagtgacctcccctctgtctggccgccagcacgctattccaaaattgggagccaccgctctgggatactataagttgagcatatctctagctccgttaggtaatcacgaagccagagcactcgctcctgcctccgattagccaccatagctctctaatttctcttttcccccaaatcggttttctgcacccgtgaacacctcgccgtggccagacgttttcaggatagctcatgctcttctgcgtgatgttctagcctctctcaagtcccctggtactcatagactcattgaattgaactagaccgctctgga

SEQ ID NO: 11046 - DNA, 416 bp, Zea mays
  unsure (1)..(416): unsure at all n locations
agcttatgtgtatgacatggtgatcaagacagtaaactcagaanacttcattgaagatttgcagctggtcttcaacagtctgtggcgatatcgtgggaagcttaatccagaaaaatgtgtctttggagtactagcaagaaaattgctcggattcatagttagccaccgaggaattgaagctaacccacaaaagatcgaggctatcatgatgatggaagcactgcggtcacagaagatagtgcaaagacttactggatgcatggcagctttaagcaggttcatatcaaggttaggagaaaaaggcttaccattctacaaattgctcaagaaggtggataagttccagtggacctcataagcccgtaagccgttgatgcactgaaaatgttcctgacaacatcgccagtgttgaagcc

SEQ ID NO: 11047 - DNA, 408 bp, Zea mays
  unsure (1)..(408): unsure at all n locations
acaaatgttcattttgagaaagacaggatttgtagcgcatgccacgcaggaaagcaagttggagcctatcattcacacaagaacatcatgacgaccgataggccgcttgagctactccacatggatctattcggcccgattgcttacataagcatcggcgggagtaagtattgtcttgtaatagtggatgagtattctcgcttcacttgggtattctttttacaggagaaatctcaaacccaagagaccttatagggattcttgagacgggctcaaaatgagttcgacttaaggatcaagaaaattaaaagcgacaacgggacggagttcaagaactctcaaattgaaggctttcttgatgagganggcatcaagcatgagttctcttctcctacacgccaaacaaaa

SEQ ID NO: 11048 - DNA, 406 bp, Zea mays
  unsure (1)..(406): unsure at all n locations
agctntacgaagaggaaccttcggctatctttacaaacagcttcatccgaggatcacttataagaccttcggcgacgaagcatagacccaacagtagcccctttcgcggtgctagatcgtttttcgtaacgagcttgatccgtgaaaaaagtttcttaagcttcggagcgccgaaggtctcaaaaacaccttccctgagctcngtgtcgagaaacgattcaatctccctgcgcgtagcggtcccaccttgcagagttactgttcggtctctgcggtccaccgtacagcgagtgcgagcgggtgtccgcctggtgtaaaacttctggcgcttcgccttcttacctgcggcactatataaacagacgagtaggtgtgaagttaccacagcatttactgctatttgcac

SEQ ID NO: 11049 - DNA, 373 bp, Zea mays
tatgaacaatatttggagcttaatgaagcttgtgtaccaaataccataaataactcgcaggacagatggagatatatatggggctcatatatctattcaacgagaaagacctacagacatctaatgggacattcaaatgtgcatactgtttataagtggctatggaaaaacaaatgccaaccaaagcacaaagtcttctactggttgtggctaaaaacagacttaacacaacgaatatgttgagaagaaagaacatgacacttgagtcatattcgtgtgaaaactgcatctggcaaaaggaggaaagtctttaccacctgtttcttagaatgtaacttgcaaaggcctgttggaattccattggtatgtgaaa

SEQ ID NO: 11050 - DNA, 448 bp, Zea mays
  unsure (1)..(448): unsure at all n locations
agctngccaacagtcaaggcgaggtctacagcatcgcttggaacatccgacagctacgtcgcttctacccttaagatgctttcaagtcgttcgtacaacctcgttcacacacaaagtctaaccatcaaggaagggtcagccttgcctcggcaaagcccgacccttcctcgggggctagaaggggggaaccccctctgcgtcaaaatttttctcgaaaaagatcttttctgccagaacgtctttcgtgctttttgactacttcgaaagtgggatcctgaaaacgatggagtacacgtaagcagccaaggctgaccaagccgagggactcctacgcctncgggatacggatacctcactcatcaccttctgcgataagtaactcacgctcggataagcgattccgcggaccgaacaagtcttcacgctcgaaaactcttctgccgaaatg

SEQ ID NO: 11051 - DNA, 174 bp, Zea mays
ttgatatttctgcatatgaagcatatgttacagcagcagaatgtcctgactcagatcttgggagtcagctgacatatccatgtccccacaaaagttatgaacacaattgagacagataatgcactaacattgctttcttacagcattcagtatcaactcttataatcaacgcgg

SEQ ID NO: 11052 - DNA, 426 bp, Zea mays
  unsure (1)..(426): unsure at all n locations
agctntatgcacctcctaagaatntgtctaactttgttaagggcattgctcccatgcctcaggataacgagggttacattttatatcctgtcggctatcctgagagcaaaattagaaaaattcactctaggaagtctcactctggccctaaccatgcttttatgtataagggtgagacatctagctctaggcaaccaacccgtgctaagttgcctaagaagaaaactcctagtgcatcaaatgagcatgacatctcttttaaaacttttgatgcatcatatgttttaactaacaaatccggcaaggtagttgccaagtttgttgggggcaaacacaaggggtcaaagacttgtgtttgggtacccaaagttcttgtttctaatgccaaaggacccaaaaccgtttgggtacctaaaatcaagaact

SEQ ID NO: 11053 - DNA, 472 bp, Zea mays
  unsure (1)..(472): unsure at all n locations
tcttagtccccgcgacatgagcttttctcacgcggttaatcgttagaacgaggattaggctccgataccaattgaaagttacctagaggggggtgaataggcaagttaaaactttttcaacaaaaactagaagcaaactgggtaaaactgaattgatctcgaaattcacccagttaactctggaaatgagatgttctcacngatccacagggttcaaaatagtatatctgagaagggcacttctcaaaatccacacaccaaatatatataaacaaatcttccacgcaatggtgagagaacgaagaacacatacaaacacaatgagcacgaacacaagagacacaagatttatcccgaggttcggtcacaccaccaaggtgccctactttcttgttgaggcgcgcacaaagagcacggtctctttcaaccctaatcctccctttgccaaccacagaggtcaagcccacacaat

SEQ ID NO: 11054 - DNA, 320 bp, Zea mays
agcttctccttttggagccttatctcgatccctattgcctccagcctcggatcgtaatgtgtcgctgctgcctccaacgcctccttgtagaagggcctccttttcttccattggggaggcttcaccgcctcctccttcaacgtagtcttcctcgaatccgtaaccctccgccggtccaccaaatgcagtcccgtccccgcctccacattcatggccaccgtgagaccccgcgccttgccgatccagcaacagaggagcccccgcccgtcatcactgggccaaccgaaggcactggacatgtgatttcccatgtcggaagc

SEQ ID NO: 11055 - DNA, 405 bp, Zea mays
ctttctttatgatcttcggctgcgaagcatacccgcaatataaacaaagctcggtagctctatccaccgccaaagccgagtatattgctgtaggacactattgtgcacaattactttggaagtggcgaacccttagggactatggcctcaagttgagcaaagtccctcttcaatgtgataatgagagtgcaatctgcatggtgtataatctccgtgaacacagtcgcactaagcacatagacacccggtatcacttgttgagagatcaccaacaaaaggggatatcataaatgcttatgttagcacccacaaccaattagccgatatctttaccaagcccctagatgaatagacttttaacaaacataggaatgagctatatattcttgattctcggaactttga

SEQ ID NO: 11056 - DNA, 430 bp, Zea mays
  unsure (1)..(430): unsure at all n locations
agcttctaaagggagaacacgtgataggtttgactaacgtgcaattcgaaaaagatagaccttgtgcagcttgtcaagcaggtaaacaagtgggaggagcacatcacagcaagaatgtgatgaccacttcaagacctctggagctattgcatatggacctcttcggacctgtcgcctatctgagcataggaggaagtaagtatggcctagttattgttgatgacttttcccgcttcacttgggtgttctttttgcaggataagtctgaaacccaagggaccctcaagcgcttcctcaagagagctcaaaatgagtttgagctcaaggtgaagaagataaggagcgacaacgggtccgaattcaagaatctccaagtggaggagtttcttgaggaggaggggatcaagcacgagttctncgctcctacaca

SEQ ID NO: 11057 - DNA, 458 bp, Zea mays
gcttcggcatcttcatttgcttcttcttcctgagcccctggcgttcagtcagcaatgaagtctgctagcgcctgcgactgaatcgaggatctatgcacataatcaatgctgaattcgttgagttccgcagcccactttccaatccttccagtagcttctctgttcctcatgatatcctacagaggctgtgacgaaggaacaattatatgaaatgcttgaaaataatgtggaagcttccttgaggccattaaaacagcatacaacaccttctccaattctgtataatttttctttgataagcttagaacttctgagacaaagtatattgcggcttgctttttgatatgcctttcaatttctcctgcacaagcgtcgcactcactgcagagtgcgaagctgccacatataatagtaacggagccactggcgcacgtggagttaatgttgttagatcaatc

SEQ ID NO: 11058 - DNA, 440 bp, Zea mays
  unsure (1)..(440): unsure at all n locations
agctngggatatctccttatacctgacacaaaaccattctggtgttgcaccaaaatggcagagggaagagaggagaagagatcatataagcagattttgcccaaatcactcacatctgtgacctatatgcattttaaagcgactaaacctagctggcccatctatttgtccacaggcctgagccgcagagcgctctattggccgctccgcgcgcgccaacccgcgcttgtgcccgtgtcgtgcgccacgacccaacaccatagcatagctcacgcgcccacacttataaaggccaccccgccctcggaccattctccctgacctttggcaagtaagccctcaccggacttcaaaacatatatctgcaaaattatttaacttaaaatccaaagtaaatcatgtaacttcaactcanagtatcaaacattaagcaaaattga

SEQ ID NO: 11059 - DNA, 506 bp, Zea mays
  unsure (1)..(506): unsure at all n locations
ctcaagcttcagctccatctatgttatggattgcgtttgagtctggccatttttcttctttctttctagtagcttcctgacttccatgaatggcaataggtccttgatccgaaggtatcttcatgcaaaggtatgctggatgaagaattgcttcaaaggcattgagagtaccacgaccaatgattgcattgtaagggtattccatgtcaacaatatctaacacaacttgttcagtccttttgttgctgataaatccgaaggttactggcattgtgatttttccaagtgctacaatctgccttcctacgaagccacaaaggggatgtgtggcatcatggatcttatattcgggctcttgcatctgtctgaaggccatagcaaatatgatatcagctgcactgcctgtatcaaccanaacattatggaccataaatcctttgatcacacaagagatgaccatagcatcattgtgtgggtaatcattgagctgaagaccctcttgagag

SEQ ID NO: 11060 - DNA, 397 bp, Zea mays
agcttgctgtactgcgggatctccgcgtacacttcgcgggacacaccgactacgagcgcaatgatgttgataccgatcactgccaacggtgggatgaagagcgacgtccacttcaccaggtacagctccgcgaaggggtcatcgtcgtcctccgcagcagccttggccgtcagcgtgaaggagatctcgatgcccgcgatcaccttcagcaagccctggagcacggccgccaggtgggccgacgtgccgccgatcacccagaactgctcgttgcgccaccactcctccagcccgataccggaccacttcacctccagcaggcacagcagcatgagcgtgatggtgatgagcaggaggtagcacagaaatgttgggtccagcgtcgctacgatgaact

SEQ ID NO: 11061 - DNA, 404 bp, Zea mays
  unsure (1)..(404): unsure at all n locations
tcacacctctggactaactcggcggcatcactctttgctggtggtcaataaaaaccagatctgagaactttccctacaagagttctggatgttgcatgtactccgcactgtccggcgtggatatcatacaatagctgcttcccagtagttgaggaaatgcacttcatgaggactctagtcgcaccccttctgtacagtgcgccccctatgagggtgtagtgggccgactgccttgcgatgcgttctgccgcagccttatcatctggttcttcattctatatgtacctgacgataggctctctctagtcattgnggtccaaccctggttagctcaaggtgttgcattcttctgcctgatatgagagaatactcaggcgtaacgctttccggatgaagatcccggg

SEQ ID NO: 11062 - DNA, 412 bp, Zea mays
  unsure (1)..(412): unsure at all n locations
agcttncttgaggaggagggcatcaagcatgagttctcttcttcctacacgccacaacaaaacggtgtagtggagaggaagaatcgaactctattggacatggcaagaaccatgcttgatgagtacaagacaccggaccggttttgggccgaagcggtcaacaccgcctgctacgccatcaaccggttatatcttcaccgaatcctcaagaagacatcgtatgaactcctaaccggtaaaaagcccaacatttcatattttagagtttttggtagcaaatgctntattcttattaaaagaggtagaaaatctaaatttgctcctaaaactgtagaaggctttttacttggttatgactcanacacaagggcatatagggtctttaacaagtccactggactagttgaagtct

SEQ ID NO: 11063 - DNA, 348 bp, Zea mays
ctcgctaaatcgggacagggcctcatggaccggtgaaattactcgtaagcggcaaggccgaccgagccgagggatttccacgcctctgggatacggatacctcactcgtacctttcgcgaaaagcaactctcgctcacacaaacatccctattaccgacagagtccagatgctcgaaacaagaggaaaaaaggacgcaacttctcaagcgcggcgagggcgtgttcttctggcctcggcggccgcagaaagcgcacgctacaagatgatctgatcctgcaggctcgggtcttcacgccgaggggagccgtagcaccctcggcatcgacgacgtctacaacaaagcccg

SEQ ID NO: 11064 - DNA, 402 bp, Zea mays
  unsure (1)..(402): unsure at all n locations
agctntgcctcgggcagactattgccagaatatgataacacgcaatgggcgtggagcggtggcgagagtancgtgtaccctccgtggcaagaggctggacggtggtgtatctgtgctctcagttgacgtgaacctgatctggtcttaagaaccccggtggcgggttgacatatgcaagggttaagtgctacatatgtcgtgtgattggagatcctcagctgagtatagtcgattcggatcgccgtaccttcgcgattatgaagacttggtcactgacttatacgtagaactccagtaaagatgaagggtttgttaagaaattggctagtgcaggtcaagtgtttgaactatggtagaaagaactctagatgcaggtaattttacctaacctgaaaataaact

SEQ ID NO: 11065 - DNA, 447 bp, Zea mays
ttgaagaactcaagaaaaggttaaccatttgtccaatattggtaatgccagacattcacaagggatttgatgtgtattgcgatgcatcacaccttggacttggatgtgtgctaatgcaagaaggaaaagtgatagcttatgcctcaaggcagttgaggaagcatgagaagaattatcctacgcatgatttggaactagctgtcgtagtgcatgctttgaagatttggaggcactatatgattggaaacaagtgcaaaatcttcacggatcacaaaatcttgaaatatatattcactcagaagagttgattaaggactatgatttggaaatacaatatcacccacgaaaagcaaatgtagtagctgatgctatgagccataagggtcaagtgaacaacatcactacgcatttgatgtcacacgaattgtgctatgaaatggaacaact

SEQ ID NO: 11066 - DNA, 389 bp, Zea mays
  unsure (1)..(389): unsure at all n locations
naagcttggaccagggggtcgttttagagggcatcgtccctgctgaccaagttgtggactctgttgatggcactgagttggttcctgctggttcgttgcaagctgcttcgggtggcggccttacgcccagtcatcaattgatctctcatgatttggggtcccttcgttcttttccaacctctaggtactgtgatatactttagcttgatttttataccgcatgaattgccgtcattacccgaagcacgcatgaacatctgttctccttatcaggctttggtggacgggatggctagccagctgaggttacaaggtacttctgttccagaaggagctttgtctcttgcgcgttggaatccaatgttacttcaacatcgtgtctctgactt

SEQ ID NO: 11067 - DNA, 354 bp, Zea mays
  unsure (1)..(354): unsure at all n locations
ctacacatattaaaaaaacattctgagtgcaaaatactcccttgtgtcagatttatanatacattgaatttcttatcctaaggttaactggcacatcttattccaaatattcataaataattggaatcttttgggtgatatgtttagcatataatatatttcaaatatgactttggaatttcatttcttctancaaagttgaacaaagacgagtccctcaaacatattgtaatttacaacgaaaccaatagtcttctacaccgttatttcacagtattatataccgcccgattaactattattctcattgccgaagcaggataaactagcaggacatgtcatgccactgtcttg

SEQ ID NO: 11068 - DNA, 421 bp, Zea mays
agcttgccaagccctcggactcgaccggactttttcggaggttctagatcaacctcaccggacttcggtcttccgccgccgcgcgtggaccgagctattcagtgagtctccgcccaattcctttcgctcatgtcttctctggcatcccgtggacctccctggcctatttgattgaactatctcgccgtgaccaggccggtctcctcgccgccgacgagcatccccgcctgcgcgcgtggaccgaccgactccggccatctccgacggcgttccgcacaccgttgtgatccccgcgacctccccttcaccctcgaccacttcaccggaacagtctcgccgccggtaagcccctccgcccttttcttcgccgcggctacttgttaaggtagaagaaagacctcgggttatgttctgtagaacc

SEQ ID NO: 11069 - DNA, 350 bp, Zea mays
ctcaatctatcttgttgcttatcacatatactttaacttatattatcggctccactcacacatttaaactgttcattcccctctgcttattatcttgaatcttgttcatggggttcacttatagatcttaattagggttgcacattcttatcttttcaaggactcaattgttttgatcatgacacttctaaacatatacttggtgaatactttatcacttaagttattttgatgctcacgcttactttggttcacaagaagtaatggctcttggtgtggctttataagagaaaccctaggtgacactggggtgtcacagccttccccccttaaaggaatctcgtcccgag

SEQ ID NO: 11070 - DNA, 425 bp, Zea mays
agcttcggcacatagacaaatcttaagatgaatggtcgaaccgacttaaagatgaattaacttaaagatccatgatgttttgtgtcattattgtagtcgattgtaaaggacataaatatatatttgcgcaggttgcatcctgtgcctataaataggtgaacagtatcccagcactgttcacgcgatccggtaatcactgacacgtcacgcttgaattattgctttccgccaaggcgaaggtataaatgtgcctaaatattatgttttaatacttgtatattcatataataaaacatgtgaatatattttatactttatatttcatttttcattgtttgttgtcttacaaatatgatcacgaaagtgaaatcttcgtgatactttacttatgaccttcgtccgaagctcattaaatccttggggag

SEQ ID NO: 11071 - DNA, 444 bp, Zea mays
  unsure (1)..(444): unsure at all n locations
acctatacatactcagcttacatctctggacaacatcgctgcgtcactctatgctgttggncaatagaaaccacacctcgaaacattcctgaccacagatctggatgttgcgtgtattccacactgtccggagtggatctcatctaatagctgcttcccagttaccgagaagacatacttcatgaggactcctgtcgcaccccttctatacagtgcacctcatatgagggtgtagtgggccgactgtctcgcgatgcgttctgctgcagccttatcatctgattcttcttcattccttatgtacctgatgataggccctctccagtcattagggtccgattctggctggctcagggcgttgcattcttttgcctgatctgagaaaatacttgggcgtggcacttcctggacgaaaactcaggtggacctgtgccgactggatct

SEQ ID NO: 11072 - DNA, 419 bp, Zea mays
  unsure (1)..(419): unsure at all n locations
agctntggcttcttgttggtgatttcaatttattccggcggccagaagataggaataaagctgggggctatattaatttaatattgaagttcaatgaagcaataagtaatctagatttggttgaaattccccttcacggtttatcgtacaactagtcgaataggcagcgggaaccccttctttagcgattagattggtttttcatctcgcaagaatggtcgatcatttatccggatacatgtgcagaaacgatgtcgcgtgacatctctgaccatgtgccttatatggtttcttttaagtccaagattcctaaacctaagatttttaggtttgaaaatttttggctggaatttgaaggattcatgaatatctttcatagcacgtggctcggccttccatgtctgcctgataaagcaaaa

SEQ ID NO: 11073 - DNA, 475 bp, Zea mays
  unsure (1)..(475): unsure at all n locations
tgtggcgcccttgngcgtcttgtcgtaaccgaagtaccaagtctcccacttggaagcctcggggctgaacccttctggcgtggtaacgtcgcacagactgctgataccgcgtcgagtgtagtaaggccacgtcccgagcctctttcagctggtccaatgaatcctcttggctggtctagttgctttggtcatcgtaagcctttgtcctcggggaaccctattccaactccatgggtaagattgcctcggccccatagactangaagaacgacgagaaacccgtggcccagctcggcatcgttctcagactccaaaccaccgagggtagttcttttatccaccgcttgccgaacttgntaaggtcgttgtagatccttggctttagtccctgcaaaatcataccgttggcgcgctccacctgcccaattgtcattgggtgagctacggcggcccaatccacacggatgtggtggtc

SEQ ID NO: 11074 - DNA, 456 bp, Zea mays
ttcagtcacctgcggcatgcaagcttgtgggggttacaatgacaacccttttaaccattggcttatcatcaaattcttgacaaagaagggtatatagtaaagttgtcgaatgtaaagtcttccccaatctgggcatgtacaacaaaggtttacaaacagtttttattatcatgcaccagataaaagattatgaagtaattgaagtgaaatttaaatgctcggtgcagaacttacttggcccttgttagagccacgttagtcctctgtaagtttgatagaaacccaactgtaccagctccattactcctgactgttgatatgataattatatcttcctccgcgccttggaaaccatccacagattttactttcactgagaaataatcattcctcatgcaggccttcccaaccttttcctgtattgctctaacttgagcattgtatggacacacaaca

SEQ ID NO: 11075 - DNA, 426 bp, Zea mays
  unsure (1)..(426): unsure at all n locations
cgacccgctagcgtgcacgcttgtcagacgttgaggagatgtccctggctatccttaacgttcttctcagggaatttggggacaccttagaaagggagttcggaagcaccttataaaacgctcgcgcgtagtgtgatctgtggtaactgtatgcttgttatgaacttgtgtgatgaataaaataacatgtttgaaaaaaaatggcatgtgcatagtagtaatcctttccccctggcagatggcttcggataaaaccacgcctaccgcctcaaggattggagcaaggtctctcctangtgatgaaggagaagtcggtaaagaagggaatgaaacccacctccccgcaccttcggagctgccattagacttagcccaagttctggccaaccaaacccgactcattgaggtcctcaccagaagccttga

SEQ ID NO: 11076 - DNA, 410 bp, Zea mays
agcttatgaagattattcatcccaacatgggcttgtctgcggtgccagagccaacccatgttagtcttagcaatcaagcaggtgtcgagttcagctctatcaaaatccaccaagtatagctgaccctctaacactcccttgaatgctattgaatcatcacttcttctaaagacagtaacacctacatcagtaaatagacagttgtagcccatttggcataattgagatacggaaagcaaattgtaatctaatgaatcaacaagaaaaacattggaaatggaatggtcaggtgatatagcaattttacccagtcctttgaccaaaccttgatttccatccccgaatgtaatagctcgttggggatcttggtttttctcatatgaggagaacatctttttctcccctgtcat

SEQ ID NO: 11077 - DNA, 492 bp, Zea mays
  unsure (1)..(492): unsure at all n locations
tgtctcactgtgggaagccaatgtcatccttaatggcttggcgtcttccactataatgcatacttcgagcaaatttaacattttcattttcaagttcatgctcggcaattttagcatctaatntgactatatgatcattctgttgcttaattcaaagacatggtgagtcatgagatagcattatacatcgacactctctacattctagtatcaaatagtatttgtgctcaacggtagatgtagatggtttgcgagattttaattctacaaccttagcatacaatatatcattcttagttctaacgttggaaatagtagcattgctaatatcacaatctttagccgtagcaattaatttctcattttcaatcctaatgctaacgagagagatgtttaattcttcaaccctagcacgcaaatcatcattattatttctaggatggcgaattgaaacatcacagacatgagaataaccttagcattagactagca

SEQ ID NO: 11078 - DNA, 419 bp, Zea mays
agcttgtgaaggttcttcatccccacatgtgctatgcggcgatgttacagccagcccatgctagtcttagctattaagcatgcatctagaccggcctcttcttttgcaaaatctactaaataaagtttgccgtctaatacacccttaaaagctagtgaaccatcacttcttctaaagacagacacatctacattagtgaatagacaattataccccatgctgcacaattgactaacagatagtaaattgtaaccaagagactttactaaaaacacattggaaatagaatgctcattggaaattgcaattttacctaacccttttaccttgccttgattcccatcaccgaatatgattgaatcttgggaatctttattcttgacgtaggaggtgaacattttcttctcccccgtcatatg

SEQ ID NO: 11079 - DNA, 414 bp, Zea mays
gcacggacaaggccgctgctcggcgggacaagtcgcggttacacgcctctctccttcgaggcaccaagcgtcgatgcctcagccatctcagcatcggcggcgacaggtcgctccccgaccgggacggcagcggcttaagcagcagccggcgccagcgccagcggcatgtatggtgggcccgaggtcacgttcacaccagccgcctcccacagcgcgacggccacctcaacagaagagccggactcgggaactcgctccacggcgactagtgccgcctgagcccaccactgtggggcaccttgcgagaaggtcagctgaacggcgagccccgatgcggcaccggctgtggaagccgacgccgtcttaaaggctttctggggagccagatcggtcaggccatggcttcgcttgctg

SEQ ID NO: 11080 - DNA, 445 bp, Zea mays
agcttcttgaaggctggactgcgatctcccttgtgcaattttgttgtggaagtactaaaggtatttgaagtctaccttcaccaacttactctcgaatcaatcataagaatgggcatcttcgtctgggccgtgaggagccaaggtttagaaccaaatgcaaaaagtttctgcaatatacatgagttattgtacgagacgaaaccttggggtaaagagcagtatcacaacaattttggctgctatagcttcggcgcccgatctgggtcaagttgtctcgtgccaacctttcggaaaagatggcccgacaactggatgtcagaatggttttatgtgaagaatgatttaaaaactcgggaagatattaaaggtatcagtatgcgccctatttggcaacgcttctgccttcggaggccgaaggtggagatggatgaaacagccaaagaat

SEQ ID NO: 11081 - DNA, 504 bp, Zea mays
  unsure (1)..(504): unsure at all n locations
ctcagcttatcacactctgtagaccaattgaatttaatatcattcttattatacttgttattggcttcacaagcttagaaaaatctggtatgaatcggcggtaatatccagccagtccaaggaaacttaggacctgatgaacagtggtcggggctttccattccaaaatgtccttgactttgttgagatctaccgcaatccccctggcagatagtacatgtgccagaaactgaatttcctccggccaaaacgcgcatttgctgaacttggcatataactgatgttctctcaagcgcgttaacacgatcacgaaatgttgggcgtgctcctcttcattcttggaatatattaaaagatcatcaatgaagaccaccacaaacttgtccaactcgggcatgaataccgagttcatcaaatacgtgaagtaggcaggagcattngtcaatccgaaagacattaccagatattcaaataatccataccgcgtagtgaatgcggtctttg

SEQ ID NO: 11082 - DNA, 429 bp, Zea mays
  unsure (1)..(429): unsure at all n locations
agcttgcattgcatgtttaaatttcttgtattgcatctagggctgggctaacctagttgagataaccgccaacaaagcgagtgaaaaagcttaactcggatcaaacttgacaagtcttagttttaagcttttagcacttaaattcttacttcttatgcaattgttggttcttgaaatatgcatgaggtactgcacttaggggtagtattcaaaactcanatcactcatgaaaacccctagtgcaaggccaaaatgcaaatttcaccatttgcctattttctctaaaaaatatctagcatatggcaaaatattttgaaaattatgagaaaatatatgagggtgccaatacctgtcccaacaagtgttattttgcgtgattataagttgggatttggtttggttgggaactagatagaanaattcaaaaaa

SEQ ID NO: 11083 - DNA, 434 bp, Zea mays
  unsure (1)..(434): unsure at all n locations
agcttattcaaaggtttaaatagaactaaaatattataaatcaatgaattgattgatgctttaaatgaaaagaatagacttttagaaaataaagaggatattttatatgaagagcatgataagtttgtaagtttgcaaaagtctcttgctttataggttaaaaggaatgaaatgctttcttcaaaattatctacttgtcatgaaactatgtctagcttaaagagtattaatgatgatttaaatgctaagctagaagtagttaataaatcaggttcttgtgtagagcatgttgtcatttgtaataggtgtaaggattntgatgttgatgcatgtgttgagcaccttacttctattacaaaattaaatggtgaagtggcaagtcttaatgcccaacttaagacttgcaaaaatgactttgataagttaaaaattgc

SEQ ID NO: 11084 - DNA, 465 bp, Zea mays
  unsure (1)..(465): unsure at all n locations
acacattttacgattaacacatgttcattttgtgaaagacatgatatgtagcacatgccaagcagggaagcaagctggagcccatcatccacacatgaacatcatgacgaccgacaggccgcttgagctactccacatggatctattcggcccgattacttacataagcatcggcgggagtaagtattgtcttgtaatagtggatgaatattctcgcttcacttgggtattctttttacaggaaaaatctcacacccaagagaccttatagggattcttgagacgagctcaaaatgagttcggcttaaggatcaagaagataagaagcgacaacgggacggagttcaagaactctcanatcgaaggcttccttgaggaggagggcatcaagcatgagttctcctcttcctacacgccacaacataatggtgtagtggagaggaagaatcgaactctattggacat

SEQ ID NO: 11085 - DNA, 381 bp, Zea mays
  unsure (1)..(381): unsure at all n locations
agctntaccaaatggacgtgtagagtgccttcttcaatggaccaatcaaggaagaggtctatgttgagcaacctcccggctttgaagacagtgagtatcctaaccatgtctataagctctctaaggcgctttatgggctcaaacaagccccaagagcatggtatgaatgccttagagacttccttattacaaatggcttcaaagtcggcaaggccgatcctactttattcactaaaactcttgacaatgatttgtttgtatgccaaatttatgttgatgatattatatttgggtctactaacgaatctacatgtgaagaatttagtaggatcatgacacaaaaattcgagatgtctatgatgggggagttgaagtattttc

SEQ ID NO: 11086 - DNA, 429 bp, Zea mays
tgctagtgaccaatttccaaggctttcagacgaagtcagtcacagctcaagccctgttccaatgcacgcaagaccatgaggaatacctccaggcgtatgtccgaaggttcttgcgattgagggcacaagcgcccacaatgcccaatgaatatgtcattgaggccatggttaagggccttctgccaggacctacagctcagtacttcgccagaaagcccccacaaactctagagaagctgctccagaaaatggatgagtacatccgggctgacaacgacttccgccaaagaagggaggaagcttatagattctcggaaatgaccaacggcttctgaggaagaattcacccaaggcatgtcaggtcaatccataattctactcatagtgacgacaaaggaagtcaacctcagaggtcgcaatacaccttac

SEQ ID NO: 11087 - DNA, 420 bp, Zea mays
agcttgaacacaggatggttcttgaatcgatactacagcatcacaagagccttcgtattaagcacctttttcgccttcggcattccccaaccagacaacgttgggaacactagattgacaaggatctcttgcaccaagtcgcgggtgctaacatgttccaccactatagttaagacactctaggctacctgcgctggtgagcccaaaaccatgttgcagatcggtcttatcaagcggaagttctcctttagaggaccacgacccccttcaactcatctctacccttgctatcagccttcgcatagaaccactacttcatccacccagtttgtcatttagtatgataccttagcactagagctttcatatacttttgataaacaaagttatagcacccaaatttattatgcaacttatcta

SEQ ID NO: 11088 - DNA, 326 bp, Zea mays
tatcagaacgctagtgtggcccatctcttcgtgcgaggatacactccacgcaaaacctctataagctgctttgccagaaccaatggttcaccacaataagacatggcatacgttaagtgttccatcgccgaatgatcccaatgggtcttgccctgggaccagctcctaagcactaccatctagagtagaacggtctcttccacgctattcttcggaacaaaacagccttcaacttgctgagccatgcttggagggcttcaatctatgttgttgttgtacagtagaaaagacgcgaatctcttttgaaccctagtccgacattcatc

SEQ ID NO: 11089 - DNA, 418 bp, Zea mays
  unsure (1)..(418): unsure at all n locations
agctggggatttatccaatttaataataagcactatctctcaacatagattntctatggataaactcaacataagagatggcattagtagcacaagcactagtttcttatttagcaaccctttatatgtgaaaggcaaacaagttgctaaaatagagaaacctcataatatggactaaatttcccttgagccctcatgcacaatatattttgaatgacatggataatatgcatggttgttcaatgaagtctaaagggctgacttaatccacattatggtgagtgtctaatatagaagaatcaaatccaaattaactagagagagagtacatcacatagttttggatttggtgaccatatgataatattcatttatcttccaattagacctttatttcataatcaatgactgatgtata

SEQ ID NO: 11090 - DNA, 473 bp, Zea mays
tagtccatcattatctgaatatgttggtactttattcttgcattaacgctgtgcctgccatattatcaatttgttagtaaaacgtggcttgaaaagactgaagccttaccttgattcatctagaactgcatatgtcttcttgaatgcttctaatcagcgcattgctgcatttaaagattattgtgttgctatgaatgtacgaccttgctaatatggcattgacatgccagtgagatggaattctacatatcttatgcttaagcatttagttccttacaagggaacctttggtgtgttcatggacactaactatcctataaaactaggtgaacctaatctgttgacaaactcacattgtgatgtggctgaaaagatgcttgagtttcttgaactgtgtcatgatgctactgtgaccctttctatggattactatcctacatcgtcacttataatgcataacactcttgacatta

SEQ ID NO: 11091 - DNA, 426 bp, Zea mays
  unsure (1)..(426): unsure at all n locations
agcttaacacagtatgctaaaagcctcgntaatccccctgtgcctgggcacagtacggnggtatttataggtactcgaggggccacttgcccctgtcaaagacatttagatcctcgagtgcctggtttatccccagaatattttcacgaggggaggttacagacagtaattacggtaaactttattacagacacgaccctaatcacacatgtccacgcggggcccaactctatgggccgaatcgctcatgggcctccctcggtggtgagggagcgggaggtccgtaaacttcggcagggccttcgtcttgtctcgtgtgagcgaagggggtcgaacaggcctccgtccggttgacgcccctggcctgttctagcnnggtctgtggattcngtcttcngctgcgcaaggcgaggacgaagtcaatga

SEQ ID NO: 11092 - DNA, 319 bp, Zea mays
  unsure (1)..(319): unsure at all n locations
tgtggatagngatgatgatcaatgtatatgtattctgtatggctatatagtactcaattaaactgtcggcgtttccagaccggggggtcccgaggccgacgagtgaaatgtcgccgcgtgcctcagcccaaatgggtctgcgccaggccgaacccgaaggggggaagaaaagcaaccggatacgggcgtgagagaggtggaaataccgcggccttcgtgttcgtcccgcgcccaggtcgggtgcgcttgcagtagggggttacaagcgttcacgcgggagggggagcagcggcctcacgctagcgcctgtcccgtactc

SEQ ID NO: 11093 - DNA, 420 bp, Zea mays
  unsure (1)..(420): unsure at all n locations
agcttgacaacgatgaaatggctcttatcatttagagcttttggtaaatcctcaagcaaaggaaggggaaggagtacaaaccccgctccaagagggtttgctaccggtgtggtaggtccggtcactatattgctaaatgtccatgtgcaagtgatagtgacaaggacaacgacaagaaatggaagaagatggagaagaagaagtactacaataggaagaagggtggcaaggcacacatgggaagggagtgagactccgatgagagctccaccgactcctccgacgaggacgccgccaatatcgccatcaacaagggtcttctcttccccaatgtcgaccacaagtgtctcatggctaaggagggcaaaacgaagaaggtatactctagagacacccncaaatatactacttccgatgatg

SEQ ID NO: 11094 - DNA, 363 bp, Zea mays
  unsure (1)..(363): unsure at all n locations
caaacatagttttgcataacaagatgatttctaaccaaaacattgtcgactacaaagtttcataactcttcaatacctacaactttcatgttggtggttttttcttacgaagtcgttttccaaaatcaaattttaaatnttttaaattcagacgtagttttcgttgacaatatgacttctaatgaagaagttgtcaactagaaacttttataacttctgaagatctacaaagattattttgtgtgtttgggcatttggttatctcacatgatggctataacaatatgcacaaattctatacgtatctctcgtagntcataaactacgagagagaatatgttttatgaacaaacttatatttat

SEQ ID NO: 11095 - DNA, 408 bp, Zea mays
agtcacctgcggcatgcaagcttaacacctgtggaagagcaaagatcccaatattgggaatcgaaggcaactcggcgcaatataggagaaagagcggatacttactatggaaacgtacccatggtcagggagcatcgcaggctgggtaaaggtgtcggcctccagcctctctaccgtacccactacccacttgcggaggtcgtcatcagggagggaggccgaggacatctgcgagccctccagatcggcccccggtctcatctccgagagctgcaaccgccgctctgccaaagggagcaccctccggcgatggatggcggcaacaacccccgcagcggtaaggcccccatctcgtaacctctacaaagcctgcagaataggctggagcttctcctgtctctcgcgcgt

SEQ ID NO: 11096 - DNA, 460 bp, Zea mays
  unsure (1)..(460): unsure at all n locations
gatcttatgctactgagatttagtgcagtggtttaagataaatatttttcttgaattattggaatgatttttcagtactattaaactacacatgtttcttatcacctgtatattatgtattctatgatcttcccaaaaaactatgctcagattgttactggtcaagctttatgggtgcaaatatccagcctttttcagtttgatctaatgttactaggattcagtacagcagtttaagatagatatttttttctaatttgttggaatgattttttagtactattaaactacacgtgtttcttatcacctggctattctgtattccatgaatcccaagaaactatgctcaaattgttactagccaagctttctgggtgcaaatatcttgcccttttcagtttgatctcgtgttactaggaatcagcgcacatgttatttttcttatcancttgctattctg

SEQ ID NO: 11097 - DNA, 421 bp, Zea mays
tgcaagcttctgtgccaaacatcacaaagagctagtttatggttatttatcggcgaatttccaaagattaatgccaaaaaggcactctctattgccttgttatttgaaaaacactctacgacagatttcatattttttctatgttcttcataacaaaacattaattaccccaaatgggtgggtgtttttaccttggggttatttatgtagggtttttctaagttttccttgttttcttacaataaaacgtatcctatttattctatactacaccagggtataataaatttttctagtgaactacactgaataagtagactaacaaaaataggggtgctctctggttctttattctaatcaccttttctattttattaagtagtttacattatttaagatctcgcaaaaatggtttgacttg

SEQ ID NO: 11098 - DNA, 461 bp, Zea mays
ttgatgcacaaagaaatgatgagggtatgaaacacattcatgagaaaataaaggctggtaaggcaaactgtttaagagaagatgatcaaggcattgtatggttcaacaaccgcatagttgtgcccaagaatgatgaggtccgctagcaaattttagatgaagcacatcttagtcgctattctattcgtcccgaaagcactaagatgtatcatgatctatagcagcattattggtggacgaagatgaagattgaaattgcacactatgtggcaaaatgcgacacttgcagacgtgtcaaggccatacatatgaaaaatgctggcccattgcaatctttacctatcccaacatggaaatgggaggatattagtatggacttcaatgtgggattacccaggacagcataacggtatgataccatctgggttattgttgatcgacttacaaagatcgccactttc

SEQ ID NO: 11099 - DNA, 396 bp, Zea mays
  unsure (1)..(396): unsure at all n locations
agcttcggctcggtcgaggggtagctctcctctgtggagatattgcaggtacggngtctgccagtttcgattaggcgtgaccccgcttcgctcctcctcgacgcgcagtgcctcaccctcgggggccgagggtgcctcgggccgaaaaccgagggtgcctcgggccgaaccgagggtgcctcgggtcgagccgagggtgcctcgagttgagccgagggtacctcgagctgggccgagggtgcctcgggctcgggcgtgtcgtcgatcttgacggagggttgatgcaagtctcgggagaagacatccgggggaacctgtgtcgccccgaggctattttacccagctcgtccacagtctcgttgtaacgccgggcgatgtggntgaactcgagcccgt

SEQ ID NO: 11100 - DNA, 434 bp, Zea mays
tctcagcttggtttaaaaagccgacgtgctacatcaacttcaaaacctatgctaccattgttactttcaatgttgtttgcacgcatgttggaatgagtcatcttgttcacaaatatttagcttttaagacctggccactagcggtcaagtgggaaatgccaaagatgtctgaaaaagacgcattggacaccgagcctgtgctggttaggcttcgttatatgtataaatttgaagatgaatttagagaacctagtgacgggttgttagattatattgaagtgaaatgtaacacgatacttggtaattatagcgaacctaaagccaaagctttacaacaggctttcacggtccaaaagaggcgtccattgaaccgtgtcttctatgctatcggcttcttctctcctgactatgccatcatggtttaggattcaaat

SEQ ID NO: 11101 - DNA, 411 bp, Zea mays
  unsure (1)..(411): unsure at all n locations
agcttgccggtgcccaccacctctcgccccctttcccgccccgggcgcctataaaaggaccgtcgagctccctcttttccacaccggccttggccactccttcttcccttccccgagctcgattgagccagcgccgtcgtgcccttcctccgctccggtgagtcccgccctcccctctctattgagttctagcccaattgttgtagctcttaagcttcaccgtgccctcgcgagcacaacacacccaccccctttccctattacacccggtagcctcaccggcgatcccaccaccgcgggcgcccgccacctcgccgtggaccggccattccaagcgccctctggcccaattggccctaccaccgtgatcccctacccncgcccgtgccttaccaccactccgtcgtcaca

SEQ ID NO: 11102 - DNA, 435 bp, Zea mays
tctaagggggagcacactttatgattaacaaatgttcattttgagaaagacaggatttgtagcgcatgcccagcacggaagcaagttggtgctcatcatccacacaagaacatcatgacgactgacaggccactcgagctcctacacatggacctattctgcgcgatagcttacataaacatcggcaggagtaagtactgtctagatattgcggatgattattctcgcttcacttgggtgttcgttctacaggaaaaatcttatacccaagagacattaaagggattcttgagacaggctcaaaatgagttcgacttaaggatcaagaaaattataagcgacaacgggacggagttcaagagctcacaaattgaaggctttcttgaagaagagggcatcaagcatgagttctcttcttctacacccacaacaaat

SEQ ID NO: 11103 - DNA, 420 bp, Zea mays
agcttctcctcgggtctgtgatgcttactgaatcgtccaactgggctagaagtcccctgaccgtcgggaacgcatggatctttggtccatccgtgcgctctccgtggccagaccaaagtaatccaccaattgtgcaattaacttaagggaatcgttggctggggtgtgaattcggtttcgactgaagaaggacgtcagtccttgccccaatcggccggcacagacagctcgccggagctcggccgtgctccacgccgccggggaccgtgaaacgtaaaggaatagaactcgagggactttcttgcaaagtgtcagtgactctgttaaatagtgagagaacccgttcgcagttagttaaaaccccaagggcctctgtgcaattctgccatcacgcgcggacgcgggcgcgcgcttcctgcg

SEQ ID NO: 11104 - DNA, 430 bp, Zea mays
  unsure (1)..(430): unsure at all n locations
agcttgccgcggcgcgacacgcgcaaaaggtatattaatctctctgcgaggcaaaatcgctttgcccggagccccccccccgacgggcgacggcgccgggagggaggacggacgtgaactgctcctcccggtggctggctggcgcgacgccattacttggtcttgtacacatcatgtccgtagtcgagctgtcgatcttacttgcaataccatgctgggcctacggtgcggtgtggtgcagctaagcttaggggatcgttagtggattctcgagtgctgcgtatcacggcgaacaacatgtgatgcgatcagaccagagtttcgtacgtcgtgtggtgtcagtacatggaggatggaatcacggaaatggctgtactatatatcctcagaatctgcgttntttgttacaccattgtcttatgtatacagc

SEQ ID NO: 11105 - DNA, 449 bp, Zea mays
tctccgtcagtctgagcagtccgaacgagaaaaacaagatcttaatgccaaacttgtagccgaagctcaacaaaattcagatttgagaaaactactgacaagtcttcaagaaatatgcttggaatttagcaacaaatgcattcaacgattaagaaagattttttactcagttggagccagcagtgaaaaattcaccccctcagctgaagatctaccgaaaaccttctaacatattgagggggagattgacgagctcgacgaagtcatagctgggcatggtgacttctgtgcctgcgtggcttctcgaggcactgctgcagcttttctgaaggctggctgcgatcatgcaaagattgtcaatagggccaaattcactttatcaccatcaatcctggatgacattcctgatctcgcccggagtatctcgaatagatttgtaaaaatgatat

SEQ ID NO: 11106 - DNA, 381 bp, Zea mays
agcttagatgccacctaaatataatgtgaagattctccaaagtcgttcctaaggggatgcagagcttaaataccacctaaataaaaggtgaagaagctccaaagtcgttcctaaggggatgaagagcttagctctaaagtcattcctaagggaatgcagagctgcaataccacctaagtaagaggtgaagagacttccaagttgttcccaagaggatgcagagtctcggtgtggatttgtgtggaattttaccttccgcacaaacatcattttgcatcataccatcatttcatatcgaatagcatcgcattatacatcattttgcattaaccaaaagccatggagaaacagggaaaattgcttcctcaaaatatttggtgg

SEQ ID NO: 11107 - DNA, 389 bp, Zea mays
  unsure (1)..(389): unsure at all n locations
caatntgatcaggagaagctagaactgaattctaagcttatagccgaagtccagaccagctcagaattgaagaaagcattaacaagccttcaagacaaatgcttgaactttggcaataattgtattggacgattaaaaaagatattttactctgttggagccagcagtgggaaatttaacccttctgcggaaaatttaccccaggccttcgatcatattgaagctgaaatcgaagagcttgacgaagttatagccgggcacggcgacttctgtgcctgggtagcttctcggggtaacgctgctgcatttctgaaggccggctgcgaacatggaaaggttgtcaacaggcccaacttcaccttatcttcatcaatcctggatgatatgcc

SEQ ID NO: 11108 - DNA, 419 bp, Zea mays
  unsure (1)..(419): unsure at all n locations
agcnttgcaggaggaggagatggtatgaagctttggggtgcttgagaaagtcaattcaatttttttgactcaagctatcaatcttcaatgatctatattcaagattaacccaaggttattgtaatttgttatatcttaaactcatatcatctcgagggaagttgttgatgttgtaggaaataaagaattatcctatgcggaaaagtcaaagcctacaacatggaggaaagtcaaaggatggtaatacttatgttctttaagtacaattatcttaaaattatcatgtgtcttgtgtggtcacatagaaataggaagcacttaagatgtctttaaattacatcaccattccttaaagaaattcctctcatatgggagaatacatactcatcattntcatattatggcaatctacatgcttt

SEQ ID NO: 11109 - DNA, 104 bp, Zea mays
gcccatcatcctcactataacatcatgatgaccgacaggccgcttgagctactccacatggatctatatcgtccgaatggttacataagcatcggcgggagtaa

SEQ ID NO: 11110 - DNA, 414 bp, Zea mays
  unsure (1)..(414): unsure at all n locations
agcttctaaagggagagcacattttatgattattaaatgttcattntgagaaagacaggatttgtagtgcatgccaggcagggaagcaagttggagtccatcatccacacaagaacatcatgacgaccgacaggccgcttgagctgctccacatggatctattcggcccgattgcttacataagcatcggcgggagtaagtattgtcttgtaatagtggatgattattctcgcttcacttgggtattctttttacaggagaaatctcaaacccaagagaccttaaagggattcttgagacgggctcaaaatgagttcggattaaggatcaagaaaataagaagcgacaacgggacggagttcaagaactctcanattgaaggctttcttgaggaggagggcatcaagcatgagt

SEQ ID NO: 11111 - DNA, 458 bp, Zea mays
  unsure (1)..(458): unsure at all n locations
tcacatggatgtggggtatgatctatttgatgtatatgtttgtnaggaagaagtatcacacaaattagagcaggtgacatctatgaatgcacggttgtcgaattgtgatgctcatgatttgcccaatgaaatttctaatgatgttcagtgggatgaggagttcttatctgatcagagtatgcacatcggcttacttcaacacttaattgtgggaatggtttcaacttgccacccaaacatagattggatctcccacacttgtctgatgcagactattcatcttgaagaatttctatcctcacttgagatggacagggttggtgttttgatagagccagacatatttctacaaatcctacaagaatctggtagcatttgttcagttatatgtgacaatcctaatgaagtgtaccatgaaacacaatggaagcaacggcagctgctccatgctgttgacg

SEQ ID NO: 11112 - DNA, 418 bp, Zea mays
  unsure (1)..(418): unsure at all n locations
agcttntccaattgtattttctctgattctagtacttatgcaaacatgttagtacacaaaaaccaatgtactaagtctagaatcatacctttgtattgatttgcaccttatttaccatttggcatagtttatcacttaagcacttgtgttggacactaaatcaccaaaatacttagaaatggcccaagggcacatttccctttcactggctcactgctcatcctgaagcttgggtcaagctctgcgagtactgggcctcagatgagtacaaagtgatttcagatagaaatcttttgaaccggaagagcaaaccgggcctccatcgatttggagcagatggatttattgggaaatcacaacgaatggtatgacgagctaagtaacatttagtctttttccctcagacaaatttatatat

SEQ ID NO: 11113 - DNA, 421 bp, Zea mays
  unsure (1)..(421): unsure at all n locations
agcttattcacatcaaacttgctgaatgaatctctnggatcaagacaagcaaaacaagtaagcaattcggaggatacctcattgaatcgatgatccaactctaatataagagagtcaatagcagcatagaagatatcaacacgataaaaatgatcttgagtgatattatttcttcatcctcttcttgactgaccaaatcttggtattggaccatccatatctggtatatcaataccagcttccacacaaaaagctttaactccttcaaacaatagatcccaacctttacttctcaaatcattcaaacgaattttcacatcaacaactaaagacatagcatgaacaatgttttgatccttcttttgcaacagaagggacaactcatttgtgatgcgaaggatttgcaacatcatcttcatga

SEQ ID NO: 11114 - DNA, 423 bp, Zea mays
  unsure (1)..(423): unsure at all n locations
agacaatacaataaatcgtcttcattcgtaccatataacattaaggcccctttctggtacttaggttcttgggcatagtgtttagcttcanaaatatcttcctcagataacctttttcctgaagcatgtcgaattacataatcaatgtcttcggaaggtgcttttggagcaggagcggcaactttttcaggcaaagttcgttctatagcctcttcctgtgctgccttctcttcaatttcgaggggtttttttagcaggctctgaggcccagcttctgcactagcctggctcattgcagctccgcttctgcaggtttgattagctccatttgcatttcaagccttgcgattttcctgggtagagtcgaagcttaccgtttagacattagtcacttgcaccttttctttagagtgccagactttt

SEQ ID NO: 11115 - DNA, 135 bp, Zea mays
tcactttaaccgagcgcacgtgacttatctctgatagggactagtgaggtatccgtatcccggatgcgtaggagaccttctgctcggtcagacttgtgtgcttacgtgtacctctgtcgttcctggatccgcttt

SEQ ID NO: 11116 - DNA, 418 bp, Zea mays
  unsure (1)..(418): unsure at all n locations
cttgaaactcagctngtctaagcccgctggcattaatcttcggagaaacccgagctcgctgtaatatgacaccctaagggtcaacacaacaagcaatgagtgaatttagaattatggcagagcatatcagcacaagggacctggttcaagagtttttagcattcanagtttttcccagtttgagagaatgggaaatgccgaagctgcagggggaaaagaaagaaggtgaactcgtacgtttaccttactatttcaagtttaaaaagtactttatagcaccttgccaagagtggctagatacgattgaagcaatgtgtaatgaaatactcggcaattattccataaaagaagatcaattgatgaccgcagtcttctgcactcgtacgaaacgaaggctatatcgagtgttggacgcctt

SEQ ID NO: 11117 - DNA, 349 bp, Zea mays
  unsure (1)..(349): unsure at all n locations
catgctctattgttatctgtttcgagcgaggcatcgaagccaacccggtgaagaatgcggccatcaccagcatgggacccatcaaggacttaaaaggggtacagagggtcatgggatgcctcgcggccctgagccgcttcatctcacgcctcggcgaaagaggtctgcctctgtaccgcctcttaaggaaggccgagtgtttcgcttggacacctgaggccgaggaagccctcggcaacctgaaggcgctccttacgaaggcgcctgtcttggtgcccccggcggacggagaagccctcttggtctacgtcgccacgaccactcanngtggtagcgccgcgattgtggt

SEQ ID NO: 11118 - DNA, 391 bp, Zea mays
atactatgattaagaacaggcaacacaaatgttaatggttaaagaccttcatccttcgaagcattattttccttatgaaaataatgatcctcatacgaagggaatgaaggacataccttcatcatctcaatacataataacatgaacaagaacataaaagaagacatgagtcaatatatcaagccatcatattattcacatttccattatatgattatggacaaacattaatgatatcaaattacattggtaccttcggtcttgacaggaggtaaaagtccaaggatgatgtacgagcgaatacaagtcagcgtgaacagtacgatgttactgttcatctatttataggcacaggacgcagcttgtgtaaaatacattcatgtacttgaca

SEQ ID NO: 11119 - DNA, 263 bp, Zea mays
ccttttagcgccgtcttgaatcttttaatgatgagagccatctctttatcattgagcccgggcgcctcaacatgcgccaacttgctaagtagcgactccttgctcctcgttgcctttagagcaatgggatgaggctcgtggagtggaccgttcaacgcgtcgtcgacgtatctttgcttcatgatcatcatccgcccgctcacgaattttccaagcactttctccggccgcatcatcgtgtacctgggattctcacgaatatt

SEQ ID NO: 11120 - DNA, 291 bp, Zea mays
  unsure (1)..(291): unsure at all n locations
gagaatcagatactactctgtaaatatgtccatacacttgtaatatatattttgccttatcgttcatgtatgaactgctttgatgtggacgaaacttgtacttattgagccgaacgcgaaaaacaccttcccttcttttcgtacacaacgaagcaataatctgcttcctatcctttcgccgaagtgttatccatagagccgaagcaattgtctgtatctgtatgatatgatgatgatgatcctatgtatgtcttaatgaatgtttatgaatgcatanatgatgtgatgtat

SEQ ID NO: 11121 - DNA, 442 bp, Zea mays
  unsure (1)..(442): unsure at all n locations
aagctatntttacagtatcacctatgtaccccctctaggtgctctcagacgctactgcgaggctatagaggagataagtctatggttgatggctcgagggtttatgatgacacatatttatataggcaggcaggtgggtagttacaagatagatctaatctggtacttacctattagaatcctatcctatctgtntggaactaacctgaactctnttattccaataatattgctggtaatttatactaatcatattagacctccaatctaaataaattttagagtaatttttatttaaattttagattaagantttgcgtgttacacgcgagacgaaaggagtactctcataaatatcttattgcgacatcctcagttatatagactntgctaaatgatgtcgtgtacaaacanaccaaccaaacatacatcgatacattat

SEQ ID NO: 11122 - DNA, 326 bp, Zea mays
  unsure (1)..(326): unsure at all n locations
tatgctagtcttagcaattaagcatgcatctagaccggcctgctctnttggcaaatcaactaaatataagttgtcgtctagtacaccctctaaagctaatgaaccatcacttcttctaaagacagacacatctatatttgtgaataaacagttatattccatattacaaagttgactcacagacaacaagttatattcaagcgactcaactaagaacacattataaatagagtgctcggatgaaatagcaatntttcctaaccctatcacctcgccttggttcccatcaccgagaattattgaatcttgtggatccttgttcttga

SEQ ID NO: 11123 - DNA, 420 bp, Zea mays
  unsure (1)..(420): unsure at all n locations
tcttcatcattcatgtgtcctcattaattaagtattttattattaaatgcacaagcaaacaaaacccatcatgatgcatgcattatctttgggtattgcttgttaattaggcatttgtgtaagtaatgtgctctcatgaaatgataaacatgggtaacacatatagatatatagtgatatactttctctttttagcctntcatacaaagtgggtgttacaaatcctacccccttaaaaataatctcgtcctcgagatttaagaagatctaggagaaagatggtgaaaatctatacgaagctcttcttctcttatctaggtcgcttcatcttctacgtggtgactccattgcacttngcacatctttatcaccttatatcttgtaactcgagtcaatgtatcatgaatcttgaccggatac

SEQ ID NO: 11124 - DNA, 396 bp, Zea mays
  unsure (1)..(396): unsure at all n locations
cttgcaaagtattgcgccatagggtctggtcagagcctcttgatcatggcctcaatgacgatctcattgtgcactgtangtgcttgagctctcagccgcaagaaccttctgacatacgcctgtaaatactcctcctggtcctgcgtacactgaaagagagcctaggcagtgaccagcttcgtttggaaaccctaaaagctggtcactaacatnatctttagcttctgccatgacgtaattgtccctggcagaagagaggagtaccaagtttgagccacacttttgactgccatgacgaaggactntgccatgactgcagtattgcccccatatgaggatatggttgcttcgtagctcatcangaattgcttcgggtctgagtgcccgtcatacatg

SEQ ID NO: 11125 - DNA, 438 bp, Zea mays
  unsure (1)..(438): unsure at all n locations
tcgaaacgcctgtgcgaagtttcagagaagataccgcccgcgcgcagattttatcgctagttgcgcacgatttcttccacccgttgcccagttatctcgccacgaacgcccgcgatcccctgcgcagttctcgcccatcgctgctttgcctctccgatccgccgccggagcctcgcctcgtacacgtcggcggagtgccgcgcccgcgccgccgaggtgagcccgccccatactctctctcttttccattcttcttcccgcgcgtacgcgtctgctgcgacccgcagccctcgcgcgccgttcacttcgcggcagccctcgctagtcgctgccagttcgcggcaggaggcctaccgcggctgtacctggcgncagtgctagcccggcatttggaacgtgctcgtccactacaacattggactttatgaattccttatg

SEQ ID NO: 11126 - DNA, 319 bp, Zea mays
gtcttatatattcaaatattaagtattgcgtattgaacaattagattagaatgcatgattttgtccacagttatgtagaatcaatgctatgttttgtgtgatttgaaggcatgatgttgccatttaatgttgaatattgatgaacctgtgataaaattatgttgggttcgatacatttgttatgctggtacttattgttgcgattcaaatgatcatgtctatcgcaatgttaatgggtatgggtacccgatgggtacccgctacccatggtgggtatgggtatgatgtaatattgtacccatgatgcgtagtgggtatg

SEQ ID NO: 11127 - DNA, 445 bp, Zea mays
  unsure (1)..(445): unsure at all n locations
tgctttcctgagagctactattatatgagaacttcgctaatgggaaacaaacatcccatttctatgggagactcagaacacatgctcgcaacatatcttcaagtatttgatttaccctctcagtctgtccactgtgttgaggatgataggccgaactattgagcaacttagtacccacggatatgtgaaatgcttcccaaaacttggctaccaattgaggttcacgatccgacactatagtcttcggaacaccgtgcaaactgaggatgcgagcaatgtacaactctgcatatgtggccactatatactttaccctgacaggaaggaagagggcgatctttgtaagtcgatcaatgataacccagatagaatcataccctctgggcagtctaggcagttccacaataaagtacatactaatatactnnnccattccatgtggaat

SEQ ID NO: 11128 - DNA, 233 bp, Zea mays
tcccaggtggcggagtcgtcacctgctgctgcatagcagcttaacgactttgttggaacactagaaactgcgctaaccgttaagcatgacctcgttctcgagaaaacatgacattgaaagacggaacccaatgggtatgcaaccataaaattatcaggacgtcttgacacttggagtaggctttaaaatgcaatactacttgcctgctgatccatacgaatatgaactggatc

SEQ ID NO: 11129 - DNA, 249 bp, Zea mays
  unsure (1)..(249): unsure at all n locations
tgatgtgtcaaaatatgccactattcttgttacctggtaactatttgggccatcaccaacaaaaccaagctctgccatatatggtctagcgcatccattatggcgtccagttatcctcaccaccacagactccgaatccttgataccaacctattaagcagatacagtaacatgaaatgacagggctccagatatatgcatctgcatctacataacangattctcacaatatgtcagacaaatacctta

SEQ ID NO: 11130 - DNA, 291 bp, Zea mays
  unsure (1)..(291): unsure at all n locations
cacacctactcgtatgttatatatgctgangtaagaagcgaacaccataattttacaccaggcggacacccactcgcactcgctgcatggtggaccgcagagaccgaacagtaactctgcaaggtggcgccgctatacgctggaagatggaatcgtttctcgacaacgagctcagggaaggtggtttatcagaccttctgcgttccgaagcttaagagactttttcacgaatcaagctcgttacgaataacaatctatcaccgtgaaaggtgctactcgtgggtctatgct

SEQ ID NO: 11131 - DNA, 146 bp, Zea mays
  unsure (1)..(146): unsure at all n locations
ccgatgtgatcacatcgagtgaagatgcttttggtttgcctagctccaccaaaaggcagggggacatatgtntggcaccaaaaagagccagcggacggtccgaccctgtagcctgacggttctcggtccggacagtacgcgcctgt

SEQ ID NO: 11132 - DNA, 413 bp, Zea mays
  unsure (1)..(413): unsure at all n locations
ttaaggctagtgaaccatcacttcttctatatacatacacatctacatttggaaaaagacaattatatcccatattgcatagttgactaacagatagcaaattgtaaccaagagactcaactaaaaacatattggagatagagtgctcattagaaattgcaattntaccttaaccctttaccttgccttgattcccatcaccgaatataattgaatcttgggaatccttattcttgacgtatgaggtgaacatcttcttctcccacgtcatatggtttgtgcatccgctgtcgataatccagcttgaacccccggatgcataaacctgcgaggcanaattatgcttgngtcttaagtacccaactcatgttgggtcctacaagggtagtgcanatatccttagggacccaaat

SEQ ID NO: 11133 - DNA, 425 bp, Zea mays
  unsure (1)..(425): unsure at all n locations
agaaggagaagacttctctgatacttactcacctcgtgctagaatgaccactattcgagtactactttctttggctgcctcgtatggtctccttgttcatcagatggatgtaaagacagcttttcttaatggagagctggacgaggaaatctatatggaacaacctgatggatttgtagtaaagggtcaataaagcaaggtgtgcaagttattgaaatctttgtatggtctgaagcaagcaccaaagcagtggcatgagaaagttgacactactctaacgtctgcaggctttgccattaatgaggcagacaggtgtgtatattatcactgctggtggggcgaaggagctatattgtgcttatatgttgatgatatattgatatctggcacanacattgatgtgatcaatgaagtcaagtcttttc

SEQ ID NO: 11134 - DNA, 443 bp, Zea mays
  unsure (1)..(443): unsure at all n locations
gagcaatgcacttccctttatagtgtgtcaagctcatctttagcctctcattctcttctttgagcttatgatatgtatcatcttttgctcctgcaaattctagctcacaggaagatttgcttgtcgacgaacaacaagctttagcacatggtaatatagtttcaatttgaatacatgtgcatgagtgaggttgttgggagtttaagttttctattacaaccttatgagcaatgtttaatatgatatgatcatccataagattntcattagaatatagaagcatatcatatnattcttgacaagctagatattctatttttagctntgctcattggtccttaagcaccgcattcctatntactaatcgagcgatacaatgtanagagttatcttgctcaattganatagtttcatacctttggaccaaatcaacatgagagcac

SEQ ID NO: 11135 - DNA, 428 bp, Zea mays
  unsure (1)..(428): unsure at all n locations
acatgctttcataagtgcataaactgtcttgagcatcacacatatactatgacacaatgcacttcactttctctatgatatagacttggtctcattaacctaattaatgtgctcttggcatttaatgccaaaatatgtttatctctcaaggcacatatttatggggagaaatctatatatatagaactatgatcatgcttaattgacatatctcttgatcatatctctttcattttggtacaaatgcatatatcctattattcccgtaccatgactacgaataatatgtgtncaagtatattactatgctaagtcgtagatggaaagggaaatggagtcttcgcgaagacatcgtttcactcaacttattggataattaccttcgcatactcatatattctcacatggataacttactctatataata

SEQ ID NO: 11136 - DNA, 410 bp, Zea mays
  unsure (1)..(410): unsure at all n locations
tgccttcgcttcagtctatcatccgcagtccaacggtgtcttgtagttcgccaatgggaaaatattcacagctgtcaaaaagatgctcctcgatgaaagagaaggcagatggacagagttattaccagaggcggtctgggcgctaaacacaaccgagtgcagagcgaccgggttcactcctttccgacttctatacggatcggaggcaatgaccccgcagganatagagcatgggtccccgcgtacagttccgtcagccgtccccgaagtggatgagccaacttcaaaagatctcattgacggagaccgggtcttcgccctacaggccctanacaaatatcatgcccataccaaagcatggcgcgaccgcgcagtcatcccaagggagttcagcgagggggacctcgtac

SEQ ID NO: 11137 - DNA, 328 bp, Zea mays
tcaatggaccattctatgtatatgtctatgttgagcatccttccggctctgaagatagtgagtaccctaatcacgtatataaactctctgaggcgctctatgggctcaagcaagccccaagagcatggtatgaatgcctaagagattttcttatcactaatggcttcacagtcggaaaggctgatcctactctattcactaaaactctcgacaatgattatgttgtatgccacatatatgttgatgatattatatatgggtctactaacgaatctacatgtgatgaatatattgtgatcatgacacagaaattcgagatgtctataat

SEQ ID NO: 11138 - DNA, 309 bp, Zea mays
ctgctctcgtatcttatctatcctctctatcgcctctagatcccacttttaagactctccaaccacttcttgtctttctgtgagatttctgtgtccatccactgctgcaaatcagagagcggtggatgagtttacaaaacatgcaatgattagtctgcaaacaaaacatgcaccactttgattacaaatcgttaacttattaatagattattctcaccattaaattcatccggtgctgaacaatcgttggctcaaatgtatagttagcacacatccaatacctctgacgataggtgtcttgatcctcag

SEQ ID NO: 11139 - DNA, 277 bp, Zea mays
  unsure (1)..(277): unsure at all n locations
aacaccatttntatgggaccgcctttgcaatgattgtaactcttgccccacaatataaggatgttttcccttcaaattgataaaagtgctattgtgttgtcattattgagtgcacataggctccatagtacttcaagtggaacgcagagtcaaaaagagaaaatagagatcccaaagtcctttgggtgaaggcaagatcgatcacacagtaatggtgatatagactccgaagagcttcaagtggaaggcagagtctaatatgaaagaatagatctct

SEQ ID NO: 11140 - DNA, 354 bp, Zea mays
  unsure (1)..(354): unsure at all n locations
tgagtggagggttgatgatttctctgtattttttatcttattggttatggacaccttgtctgcacctctcttaaccacacacaccatggtattagctcactagctaaagtaggatgagcgatcaaacgagctatanaaagatattatactctntttcagtttatacatttcttattcctttgacaagaataatcgtaatattaatcttatntagttaatatctaatatgttaaatatatgtttaatttaatattcaatttagtttttatgtgtcttaaacataattgagtaagattcgtaacgatgacaaataagagcccctccgggttgaacccgcaaccttatgaacacatt

SEQ ID NO: 11141 - DNA, 363 bp, Zea mays
  unsure (1)..(363): unsure at all n locations
ctaagcttatgatctctgtgctcgagtaccaagatggtctgaaaacacatgcattgttatattagatganagacatttcaattgatccagaagagcataagcgttcatacttgagacacaaaatgtttgctcataggttcttaacaatagaaatcactcgcaatagtgaatggtagtcggtcgttccagactttgaactacaacgaggtagcattaaattagccaaatgaactatatctgataaagtgataattaactaatatatggggtaatatacgcagtacatgcacagtgtaatcataaccgacataaaacaatattagtcagaaataaagattaacaatccaaataaaattaaaatca

SEQ ID NO: 11142 - DNA, 405 bp, Zea mays
gcagcaggtgttaaactccgtaagaaggatgtttctatttctattaatgaagaaatcaacatgaacaacgaataaggtagaaaatcaattagtcatgttggttgcactgatcatctctctatgttatccaagagcataaagagaagacgaaaaaggaggtgatttaagtgcaatgagttaggccatctcattgcgtcttgtccatacaacgacaaggatgaagggatgaggagatgtttcatatgcaatgacaaggaccatatgatcacttcatgtgcgctcatgaaatatcaaacacatgcactctccaggatgaccatcacttagaaagaagacaaacagcatgcgtcatgtcatgttaagcgacgcttctgctacatgtgtggtgagcatggtcatctacct

SEQ ID NO: 11143 - DNA, 370 bp, Zea mays
  unsure (1)..(370): unsure at all n locations
cttctttntcttcacagcaggaaccttactggaatactattccacttaaaaagaatgagggtagatctctcgaatcttgtggatatgaactccttgaagtacctcataacaagggtgttacggcgccttcttctgtcgttgctgcttgagcaagctgcggagagatgaccgacacacggttgattctgggagaaccttcttcttatcttctcttcattgtcttcttttcactgaccctatctgtctctttgctcttcccactggaggattctatcaaagagtattactatcatacactggaggaaaccaaagactatgaaccatgtgcaacagtcttcaacccaagaatcaccgagcattgtgatcttag

SEQ ID NO: 11144 - DNA, 314 bp, Zea mays
  unsure (1)..(314): unsure at all n locations
tttcaccgaaatccaaaccttcgacttgtgaatacccgttggccacaagtcgggctttgtttcttgtcaccacaccatgctcatcttgcttgttgtggaagacccacttggttcctacaacattntgattatgacgtggaactaaatgccatacctcgttcctagtgaaattgttgagctcctcttgcatctgcaccacccaatccgaatcttgtagtgcctcctctacactgtgtggctcaatagaggagacaaaagagtaatgctcactaaaatgtgcaacacgagatctagtgggtacccncttatgaata

SEQ ID NO: 11145 - DNA, 304 bp, Zea mays
  unsure (1)..(304): unsure at all n locations
aagcaggtaaacaagtgggaggagcgcatcacagcaagaatgtgatgaccacatcaagacctctggagctgctacatatggacctcttcggacccgtcgcctatctaagcataggaggaagtaagtatggtctagttattggtgatgactattcccgcttcacttgcgtggtctttatgcacgataagtctganacccaagggaccctcatgcgctttctaaggagagctcanaatgagtttgagctcagtgggaagaagataatgagcgacaacgggtccgagttcaagaatcttcaagtgga

SEQ ID NO: 11146 - DNA, 397 bp, Zea mays
  unsure (1)..(397): unsure at all n locations
taaatgatttggagaatatggatattgtatgtctagccatcttttatgtcagatgaggtacgattatggcaagttgaggttgtagcaagggtataataaggaaagatttcatcctanactctgggtcttgattcctctcgcgatccaacttgatctttgaggacttgagttgatgtttgtcctcctatgacgtnggtggtcttctttggccttcatcgttagagatgccatctgtgttaaagacatatggctaacgtagttgtatgtggtctagtactaaatggaatattagtccaacttggattaaaacatatttattacggtagatctgatcaaattagatgggatcattgattacnatggtataaccagatcagactagataagatctacttaa

SEQ ID NO: 11147 - DNA, 166 bp, Zea mays
  unsure (1)..(166): unsure at all n locations
gatgtaggggtcccaactcgtgatttcctcggccttcatcatgcactcaatactacaaaatgcgcgataacttcctcgggggtcaatttagtatatctaggattaccacnaattaattgtacttgagtggtttaacgaagataagagatcttataataccttaacc

SEQ ID NO: 11148 - DNA, 374 bp, Zea mays
  unsure (1)..(374): unsure at all n locations
atgggtagcagaatccaacaagttcatcatttattttgtcacaggtcttccattcagtcacaagcgctagcagactntattgctaattggaccccagcccacacgatgaagcaacccactcagatgaagctatatggacacgtttttgtgatggctcatggtggtcctttgccgctggagctgtagcttttattgtgccaccatctanagtaaaggcattgtgtgttgtcaggctgcaatctcaatgcacaatcaatatagcagaatatgaagccttattcctacgactattgaagatganagcaatgggtagaagaagggcagtactgaaatcatactccttggttatcacacgatacgtggatcaatcaagc

SEQ ID NO: 11149 - DNA, 307 bp, Zea mays
  unsure (1)..(307): unsure at all n locations
atgctagtcttagctattaagcatgcatctagaccggcctcttcttttgcaaaatcaactaaataaagtttgtcgtctaatacacccttaggagctagtgaaccatcacttcttctaaagacagacacatctacatttgtaaatagacagttataccccatgttgcataattgactaacagatagcaaattatatccaagagactctactanaaacacattagagatagagtgctcattagaaatngcaattntacctaacccttntaccttgccttgattcccatcaccgaagataattgaatctt

SEQ ID NO: 11150 - DNA, 341 bp, Zea mays
  unsure (1)..(341): unsure at all n locations
tacgaaaacttggtcatcaaacagactgtngaccatctaacccgtcagcactaaagtaggtaggctgcctttctggttgatttgaataagtctgctatagaagcattggaaactacacttcaagagctatccaaagagtacttatgggccttcataccttttgggaatcaaaagatacgattgcttcttttggatgggtctgttctgcttgactgactcngacatagctcttcttgctgagtcgacctcgatatgttatgtccttctctntggtgaacctaagtaatatcaacatacacgactctggtagcataaagtctcattagtgtttaattgaaatc

SEQ ID NO: 11151 - DNA, 345 bp, Zea mays
  unsure (1)..(345): unsure at all n locations
tttctatctattactactctataagagcataacgagggcgtccacaggcataccatgcccctgccgtgacctgcctatcgcgctcgcctgtcgtcttccccgccgctcgccgcatcgacttttatgggttctcgctccttctcctctatcctatgcatnctcctgccctcaacgcatgcgcgtcgacgaggatcggcagcctgacaacaatctgttgcacgcactcgctacgaggaagcctatgcacggagacgtgtcgcggtcgccgacctgctcctcacgctcgactacgtaatgggctggtcatgttgatgctcgacgagaggctatacggcttgctcatgg

SEQ ID NO: 11152 - DNA, 296 bp, Zea mays
  unsure (1)..(296): unsure at all n locations
caaccaccacacccacaagagagctntcacccctctactatgccaactcatgccttggctccctctcgcgaggagccataagtgtattagtcggttgctctccatcgggacccgagcacatccactagatggttatctagcggaccactggtgtacttcggcctgtcgaccacctgatcctctcagcttcatcttcttcagcgctcatcccgagttgacctctgtccgtagtgggctcactgccccaatttatagagcgctataaaggagtacatagtgagagtacctagaggagg

SEQ ID NO: 11153 - DNA, 392 bp, Zea mays
  unsure (1)..(392): unsure at all n locations
ctcgcaagagctttcaaggagaggtgctgtcctccggtgagttgcacccacacgagttggtgagcaagtaaaaagtaaagcacatatcttcctaatactggcaggggcctagtaatgtgtggagcatgtgccatacgtgccctgctcctgggtttgtagcattctattccncaagatcctatgcttcctcggtgtggatcttcagctgctgacacacctatgatgtggagtcgatgttagcggngtggcgacattcgatggtggtctccacccttcccaacttccatttgagggtgatgatgaagtcgaggtactaanatgcatgtctgtgctcagtacctatcatacaacatatctagccatcctgcgctgtgtggtgaaaagtgtatgat

SEQ ID NO: 11154 - DNA, 459 bp, Zea mays
  unsure (1)..(459): unsure at all n locations
ctcntattctactatttcaacatctctcatgtggtatctgtatccattatcactntggcctttattntctctccctttggcatcaagcaccagaacgggattaatcttggcctattaaccccattgcctcaccanagtcttcaattaagagcaaatggcaataagatntcatgagatgaacttggaattagttaccctctcattggagtgcagtggaagtctttcatggtccaagtccaccttttccctttcaatcctccttcgagactcaatcaagcaaactcaagcaaatggttagtctcatagggtcaagttgtaacacatctccccctatacatgtgcatcactttgcaacggacttgtgaggtccagggagtgttggtacaacttgagcaccacaataagcaacaaaatgcagaatgaacctgatcaaatgcataaacacatgtatgctacaat

SEQ ID NO: 11155 - DNA, 391 bp, Zea mays
ctatgttatggatggcttctgagtcggaccagtttccttctgtccttctgacagcttcctgacttccatgaatagcgatgggtccatgatccgaaggtatcttcatgcacagataagcatgatgaagaatcgcttccaaagcattgagagtgccacgaccaataattgcattgtaagggtattccatgtcaacaatgtcaaacacaacttgctcaattctagttgtcgtgatgaacgcgaagggtactgacatggtgatcttgccgagtgctacaatctgtctttcttctaagccacagagaggatgtgtagcatcattaatcttatcttctggctcttgcatttgtctgaaggccttaacaaatatgatatcaactgcactacctgtgtc

SEQ ID NO: 11156 - DNA, 300 bp, Zea mays
catcaagtggcttggtgaagatatctgctaattgatctctagtattaatgtaagaaatctcgatatcccccttctgttggtgatccctacaaaaatgataccgaatggctatgtgcttagtgcggctatgctcaacgggattgtcggccatcttgattgcactctcattatcacatagcaaagggacttttggtaaaatgtaaccgtagtcccgcagggtttgcctcatccaaagcaattgcgcgcaacaatgtactgcggcaatgtactcggcttccgcggtggaaagagcgaccgaat

SEQ ID NO: 11157 - DNA, 291 bp, Zea mays
gctccctctcctccacttaaccacatgaaacaacaggtcatgggtgcaagtagggagtcagggccttggtaacacatggggtgttacagccctcctcccttaaaggaatctcgtcccgagattatatgcagagtcccttggaggggtgccatgaacgagtgttgatgtgtgggttccgcttggctttaagtttctctaagtaactgttcctcgaatggtatcctctttgcaacttcagaaggaagttctttatgagttaaaaccacaacttagactaaccttgttatctat

SEQ ID NO: 11158 - DNA, 362 bp, Zea mays
  unsure (1)..(362): unsure at all n locations
tgcactccggtactagtgtattttcttcagttcatatctatgctcttattgcctttgtgctcttaattgacaatattggtgaggcaatggggttaaagggccaagaatgatcccgttatggtgcttaatgccaaaaggggagaaattaatgccaaagcaaatggatcagctaccacttgtgaattctgaaaacaatagagttagaactcttgcttcgcccaaaatactcttactgtaaaanttggtctcttgtggggagaatttatgattatgggaaaaacggcgagttttttggcacttgatcaattacactcttgcattatctctctatgtgcccaaacaagtgtgtttgacttacagat

SEQ ID NO: 11159 - DNA, 356 bp, Zea mays
gtgtgggtgctcaacgtgtatggcaagctgaccatgtgtattacatcaatatggagggagagggaagctggctgtgaaagagagcccaacacggagggcaagcttgccatcaaggaggagcttggaacgaagcggagatgcgccaggagctcagcacgaaaggcaagcttgagtgcttgaccccatcagggagctcacatccgtagtggcaggggataatgctgtcggtgaaacaggtgtggtagttgcacatgatatgaggttttggctcactagcctcatgtgcaatatggcgaatcaattcactgtgattcccacatggagccaaatagccaatggaagaaaaggcatctgat

SEQ ID NO: 11160 - DNA, 324 bp, Zea mays
gacttacagagatacgttgtgagcatctagtccagaaatagttgagtcttatgtccttctccagcctggtaaaagaaaggtgatcaaatcggtgccatttgtcattcatcatcaacatagtgagaagctggatcggagttgaaccttgcaaacagcgagctgactcggtgaagacgccatagtctcaacatattgagtatgttaaaagcaaggacattcctcttatgtgtaaaaagaacgctgattgactgaaatggagctgctgaacatacatcaaagatgaaccacgctgatctgtacctgtggtggatagttacttggtag

SEQ ID NO: 11161 - DNA, 294 bp, Zea mays
  unsure (1)..(294): unsure at all n locations
agattagatcaagggagagtactatgggcaccatactgagtatgtacagacctctaaccttctgctaggttactaacagaaaatggtattgtagctcagtattcaacacctggtgaaccccaactgaatggtgtagccgaaagacgaaccacatgctaatggacatgataacgagtatgcttacttactctagattaccattggatatgcggatagaggctttaanaaccgctatccatataatcaatagagttcctactaaatcactgtctaaaactccatatgagttgtgta

SEQ ID NO: 11162 - DNA, 260 bp, Zea mays
accaacagtgcccaatgaaattgtcattgatgccatgattaaggagctatggccgggacctttatcccaatactttgcttggaagcctcctcatactttggagaagctgctccataagatggacgagtatattccagcctgcaaagactttctgcaaagaacggaagaggcatacagggtctctgaaatgaccacgggcttctgaggaagaatccatccgatgcacgtcacgtcaattcactactctactcagagtgatg

SEQ ID NO: 11163 - DNA, 369 bp, Zea mays
  unsure (1)..(369): unsure at all n locations
actacatacatgatatcactgctgcgacatcaaatcctatttgtattatattcttgtgcatctccctcggtttgttacagaataaacatgtctaataagctctatatcatagtttcagctttagaaagtcataatctgattctgaggtgagcttggacaatatggacataagaatgaactgacatgactttggtcagcgttgaaggcaatgacacatcatccaatttaatacgcttgaatagtcgaatcagcttccctaatatgtgcgaccccaacgcaagaagctgcagtgcaaagtctgcttccattgtgaatgactcgatcaccaggaaaaggccacatcttttcanacaaaaataattgtaacgt

SEQ ID NO: 11164 - DNA, 339 bp, Zea mays
  unsure (1)..(339): unsure at all n locations
catcatccacataagaacatcttaacgactgacaggccactctagctccttcacatggacctattcggcccgatcgcttacataagcatcgacgggagtaagtactgtctagttattgtggatgactattctcgcttcacttgggtattcntttacaggaagaatctcntacccaagagaccttaaagggattcttgagacgggctcaaaatgangtcggcttgaggatcaagaaaattagaagcgataatgggacgaagttcaagaattcacannatgaaggcttccttgaggaggagggcatcaagcatgagttctctttctcctacacgccacaac

SEQ ID NO: 11165 - DNA, 435 bp, Zea mays
  unsure (1)..(435): unsure at all n locations
cggatcgggtcccagtttatttttaataaccggngaaactgctgaacggctacgcgcagattactcacaagatgtaaccaactgccaggatgccaaccatgactatctatattctgcagtccgaatgtatccagctagcgtatggatctaatgtacctgtacctcatcctgattngaacacttcagcgtatgaatctaaacatgcagcaaacagtcctgcgacgggacttggctgctggccacgtctaacagcaatagttggtattttcattcctaagccacaatgggcctgtcggttgtctccatttttaaataaattaaatttatctaatacacaaatttcatgttaatctgtcattacaaaagactaatggttgaccgaggctgtcttaacaaacggccaattcgcatatgtcggataattattaataacac

SEQ ID NO: 11166 - DNA, 441 bp, Zea mays
  unsure (1)..(441): unsure at all n locations
gcttctaangggagaacacgtgaanggttgactaacgtgcaattcgatatagatatgacctgtgcagctcgtcaagcaggtaaacaagtgggaggagcacatcacagcaagaatgtgatgaccacttcaagacccctggagctgctgcatatggacctcttcggacccgtcgcctatctgagcataggagggagtaagtatggtctagatattgttgatgactattcccgcttcacttgggtgtgtcttttgcaggataagtctgaaacccaatggaccctcaagcgcttcctcatgagagctcaaaatgagtttgagctcaaggtgaagaagataaggagcgacaacaggtccgagttcaagaaccttcaagtggaggagttccttgaggaggaagggataagcacgagttcttcgctctctatacaccacagcaaaatg

SEQ ID NO: 11167 - DNA, 405 bp, Zea mays
  unsure (1)..(405): unsure at all n locations
cccttttattctntttcaccatattatcacggttatctttgagaggttgagcatgacactttccctttaaaagagttaagctccttcttagccttccaacttcttccttgagctctttattttcttgtgtcatagaaatatcactaattcctgaaatatctagctcaatggaagattggatttcttgagagcaacattngttagcacatgataatatagtttctactcgagtacatgtgcatatgtgagggtggtatgattncaaattagttaacacaacctcatgagccatntctaacatgatatgtgaatccataaatttattatgagagcacacaagcatatcatgttnttctagcaaagntaaaatttcaatatttagcctttctatcgtgttcttaaaca

SEQ ID NO: 11168 - DNA, 415 bp, Zea mays
  unsure (1)..(415): unsure at all n locations
ttttcttacttatcatacaaggtcttaccaaggcgagccacttcatgcttcaataattcactatgtatgtgcccatgcgttgccacgaggcatgggagtaggtggagccgcgcctagactgcaaatatacttattgtttatttctaaacattatgcgatgtgtggtctagtggttagacccaaatttctagagtatggggtgtgggatcaagtgcttgctctgcactatatttagcccgcggtggagggtgaagccgtggtagcaccaagtgcccactctaggttcttaatagagtagtatatattttctaatgcaatctcatgcgaacatgtttctataacaatatntntgataagaacttgattgcagagttagaatcataactaaatctaagcacgaagtagagcatccttt

SEQ ID NO: 11169 - DNA, 296 bp, Zea mays
  unsure (1)..(296): unsure at all n locations
atgttatgacatcaccaatagcgtgtgccgcagtgaaggcataccaccaatcggacgcggctccttcgagtcttcccacagcgtacaagaccttctctcagtcattgcattgggtgatgtctaacttctttccaatgatctgcattcaaagggtctactgcgtgagagaaagaangcgggtgatgactcatgaagatccgatgcgtgtctctaacttgtggtgcgagctgctgttgatgatggtacctttggntatgctgattctgctgaatctgatgtaccgaagctgtaagtcc

SEQ ID NO: 11170 - DNA, 274 bp, Zea mays
  unsure (1)..(274): unsure at all n locations
cgcgggcagcgganaagagggcgccatcggacacggtcaggaccctttacaggaatccgatggctctaccgtgccgctcgaccatcgtgtncacgaccgacgccacgccaccggttcgtcctatgacgacaacgacgactccctcgacaatgattggcggtgcgaccgtcgcatctcatagggacgacgaggcggaggacctgcggacttccgtcaggagaacaggcatggtggggacttccgccaggaagacatgcgcggtgggcgcgatccc

SEQ ID NO: 11171 - DNA, 401 bp, Zea mays
  unsure (1)..(401): unsure at all n locations
atacctaaaccacaaaaccctaaacttctaagtagtgcgtgccctatcaactaaaatactgactccacaaaccctagttttctagagaaccgcgaaggagaattgtattcaagaactaatatgatgtacctttattattgcattgtcataagcattacatgagacatcatggntatatatgatatatatagagaacgaagaataagtattggttgatgataaggagttgcaccaccaccacctgaagacccacctttcgggaactgctcttatttcgatatttgtggagcagagcccgaccctagttttctagagaaccgcgaacgacaattgtatacaaaactaatatgatgacctttatattgcattttataagcatacatgacattcatggtatatat

SEQ ID NO: 11172 - DNA, 355 bp, Zea mays
gcaacgcctgggactgaatcgaagatctgtgaacatattcaataccaaaattcattgagcctctgtcaacccacttcttccagtccttgcagtaacattcttcggtatcctcataaatatccttcagaggatgtgaagaatgaacaaatatgttgtaagcttggaaatagtgccgaagcttcctgagggcatcaagacgcatacagaccttcttcaactctgataattttcttgataactaggacctcggaacaaatatatgtggcctgctttgactgacatcaagctttctggcaacgctgacttacgtgatgcaagtgcacttaaaaaaagaccctgcatgtggatatgtgta

SEQ ID NO: 11173 - DNA, 295 bp, Zea mays
  unsure (1)..(295): unsure at all n locations
gacctctatggattctattgaacaaaatttcggggggcgatcctaccattatgattatgagtttcgttcatgcaaataacttacaattgattataaaaaggatcacagccctgacagttttgggtctgttttagattatttgatagtatcccaatcaaggggcaattccctacatgcgaaattatacacgcgccnttgtgtgccacatgccccacatgtcatacacacaaataaatcctccatatgccactcaatggcacataagggatggattatgctgaccttggataaacaa

SEQ ID NO: 11174 - DNA, 410 bp, Zea mays
gtcctgagttagccagatacctatggacttatcatctgtcccactcaggccctctaatggcctatgaactcaatccacgctatgaggccctatgggatatctatctcccacactgaccggtaggtctaacctagacgcagaactcagactcggattctagaaggatttagaccgcatggtaaggatatacctgcacatcagaatatatgaggaaattatgaagcctctcttaattatgaaggcatgatctaatgactcgtgtgcatggatagaaatagattttctaatctataggaagaagtaattttctggttgtattccatctaaaatatagctaggtagcttccatgcaacgaattattggactagatcccaagtctcaatcttgtcagccatagattatatccaat

SEQ ID NO: 11175 - DNA, 312 bp, Zea mays
  unsure (1)..(312): unsure at all n locations
caccgaaatccaaaccttcgacttgggagtatcccttggccacaagtcgagctttgttccttgtcaccacaccatgctcatcttgcttgttgcggaacacccatttggttcctacaacattttggttaggacgtggaactaaatgccatacctcattcctagtgaagttgttgagctcctcttgcatcgncaccacccaatccgaatcttgtagtgcttcctctatcctgtgtggctcaatagaggaaacaaaagaataatgttcacagaaatgagcaacacgagatctagtggtacccncttatgtatgtc

SEQ ID NO: 11176 - DNA, 278 bp, Zea mays
  unsure (1)..(278): unsure at all n locations
gtcggatcaccttancagccagggcccttggccccgcgtgcgagccgcangttccactgtggacctcgcgcaagatttggatgccttcggtctcggtgacgcatttaagcattggctgactgacccccttcttgtataattggccctcgattagtgcgaagtcccggctccgatgttcgaggcgcttcgcctcactgacgtcngttgggtgatagtatccctgtagaaacagggttattgttgcccgccagtcttcggtcatgaataggtggactata

SEQ ID NO: 11177 - DNA, 315 bp, Zea mays
aggtcgcaggcatatacgacgctactgtgtaatatatacatgtcaccattcatgtagccacaacaatgtgtagtagtagtaatacctgaggcaccatgcaatgtgtgccactatctgtgttcccatgcctgaatgtactagcatacgagcaaatcattataaagtacaaccacttgtaccatttaccaactatgtcatgccagacggcatgggcttcaaaacctaccactacaacataacatatatgtcactacaacataacaatcttaacattatggcacgataaaggcatgcacccggactatgtctaagaca

SEQ ID NO: 11178 - DNA, 288 bp, Zea mays
  unsure (1)..(288): unsure at all n locations
cagcttgtcaagcacggaaacaggtgggaggctctcatcacaccataaatgtgatgacgacatcaagacccctggagctgctacatatggaccttntcggacccgtcgcctatctgagcataggaggaagtaagtatggtctagatatacgcgatgactattcccgcttcactcgggagttctttttgcaggataagtctataacccaatggaccctcaagcgctttctcaggagagctcaaaatgagtatgagctcagcgtgaagaagataaggagcgacaacgggt

SEQ ID NO: 11179 - DNA, 197 bp, Zea mays
tggatgacaactcaattataggactaacaagtgtactaagtgttgaacagatgcttaagataaagtctacaacgttcaacacaagtgaacaaatgtgatggtccaagaactagattatggatacataatggacatcacaagtaagatggacattgcataaagtgagactctggtgcgtagctcgaagacaactgatc

SEQ ID NO: 11180 - DNA, 316 bp, Zea mays
  unsure (1)..(316): unsure at all n locations
cattcaccaagttgntgcagctaccatcgtctatgatggtatgtacacggcagtccttgacgatgaggaacatgttgaataggttgtggcgctgtctgttgtcgtcgtcactagccgtggtactcatagctcgttgcacaatcaaggccttataagtctcggtcgcttgtgtactaagaacctcttcatcaccatcataagtctctgcaatgttagctccaacagtatcttcatcttcaacatcagaagcactaacatacccaccatcaccagtagcaatgtatgcccgtttgctggggcaatctcgctgaatatg

SEQ ID NO: 11181 - DNA, 311 bp, Zea mays
  unsure (1)..(311): unsure at all n locations
tagtccctagtagtttgtgtcatgtttgtaatttgttatcaaggacataaatgtaatctcgatcgagctacgtcccacgcctatatataggtgaacagtaaacctgaactgttcatgttaacttgtattcattcgcacgtcacgcctaaatatttaccttctgtcaagccgaaggtataaatataactcgatattgttcatgtttatgcataataatataatacaaatgctctgatgatgtcatatgaatattcatgttactntccatgtttcatatgcttctactttcattattatatgtcgagatgatg

SEQ ID NO: 11182 - DNA, 336 bp, Zea mays
  unsure (1)..(336): unsure at all n locations
gagctggagaggctggctgcactggtccttctgcgtggtgttgangtgcttgtangtcatctccacgatgttctcgtacgtcgcgaacttcatcatggtgtctgcacagcacataggtcggtgaacggaagttcagcttggaaactaatgcacgtgctgcaaattatgaatggcatttgagagacagagangaaaanatgcgtgcttacaaggaatctgtcgcccccaaagaggaaccagtcctctgaatagcctgcagttcagaaacaccatcgttcagatacagcatgcacaaaacaacagatagtcgagcagctgatgccctatatacacgta

SEQ ID NO: 11183 - DNA, 293 bp, Zea mays
gaatgacggtcgaactctctaatcttgtggattagaacgtcctgaagtacctcataacaagggtgttacggagccttcttctgttgttgctgctcgaccacactgctgagagatgactgacacacggttgattatgggacaaccttcttctcatcttctcttcactatcttcttttcactgacccattatttctctttgctcttcccactggacgattctatcttagagtaataccatcatacagaggaggaaaccacagattatgaaccatgttcgacagtcttcaacccaa

SEQ ID NO: 11184 - DNA, 471 bp, Zea mays
gcatgtatgcctcttatgtatgccacgacgagagcgctaaaagacttttctaggaagacttacgccatggttggttctaattagtcctaggactaaactttagtccctacatgtctggttctagagactaaacagattctaaagtcattaaatacactgtccaaagactcaaatgcccttggaatataatgtagaaaacaagtataaaagacgcatccgcagtgttctggtataagactcaaagggttaagggcagctgaggaaaatcacgtttagttccctctagccaccccttaagggactacggactaaagtgcgttagtctcttctttagtccttatgtttggaaattagagaactaaagggactaaatcgtatggacgtaaaattagcccatgtaccaaacaccacctagatgaatggtagaactatactatagtgagagctcttatatgaaagacatcatggcat

SEQ ID NO: 11185 - DNA, 381 bp, Zea mays
atgcaacgaagccttctagtagctgaaggtgttattgaccactgctccggtatttgctcaaccggacattgaagagcctcttgatgtgtattatgacacatcgggcagtggcctcggatgtgtcttaatgcaagagggacgagttatagcatatgcttcaagacagttgcgccggcatgaggaacattatccaactcatgactttagaatagctgctgtggttcatgcccttaaaatatggcatcattatctgctgggaaatatctgtcatatatatacagatcataaaaagttgaagtacatctttacccagtcagaactaaatatgatgcagaggagatggcttgagctgagtaacgaatatgaatgagaaattcacta

SEQ ID NO: 11186 - DNA, 284 bp, Zea mays
gcttcgatgccacgatactgacacgatgctttgttacaccgcgaatgttcttgtaacgcggcacttcaggtgcacgatactgccgcaggaggacaagatacctgcgatagtatccaggctcaaggaggtccacgagaagttcatggatgaattccgtgaatgagctgagtatccatcgccctggcgtgatgtttatctgttcataataataatgctgtcaattggatgaccccgctccctcgtctgtccatggatgctacagccaaacaccattccaaattgtg

SEQ ID NO: 11187 - DNA, 453 bp, Zea mays
  unsure (1)..(453): unsure at all n locations
ctaccgcattngaagcatgatcgctatcccttggtcttagtcttgctctgttgtccattgcgactctntaacaccgtcttgaatcgtttgatgatgagggccatctcttcatcattaagaccggccgcctcaatttgcgccaccttgctgggtagcgattacttgcttcttgttgccttgagagcaatgggttgaggctcatggattggaccattcaacgcgtcgtccacgtaccttgccttcttgatcatcattcgcccactcacaacatttccaagaaaatcatctggcgacatcttgatgtacctaggattttcacgaatattgttcaccacgtgaggatcaagaacggtaaatgaccttagcattaggcggacgacgtcgtgatccgtccatcgcgtgcttccgtagctacttattttggtgataacgatcttgagcctggtgtatgtt

SEQ ID NO: 11188 - DNA, 385 bp, Zea mays
  unsure (1)..(385): unsure at all n locations
aactcgccctcttcctccatacgattctaccatacctcgatgggagctcggaactgagcactgggcgcaatgtggtgggcgatactgcgaagcgaatctcgcggatgccgtggccaacagggcggactccaaccaaatcaaccgatctccacgcgcgcgattctagagatcaagtcaaatctggattgcactcgcaccatataacccagccccttccatcaaccgagccaccatcgccatgagagcaagagagagaggtggatcgggtcgtctagagaggaanagcgtgatgcgtccgccgcggggagaanaacttcgattcaccactttcgagctctgcggtgcgggtctggtagtctacccagagcattattatgggcgtcat

SEQ ID NO: 11189 - DNA, 255 bp, Zea mays
  unsure (1)..(255): unsure at all n locations
taactatatgaattgaaagcaagcaatcctaacatttgaattacctagtatgcatgcattgtctaatgcacatatcacatgaaatactatgcatgaaaggtaaaactcgatacaagaaaatagatacgcatatctaaaaataaggaatacaataaatctagttaccttagtcatgggtgggaaanttgggtccacaattattactaacctacttggcaataaccttgatccaatatgatgtaccccatgatatac

SEQ ID NO: 11190 - DNA, 258 bp, Zea mays
  unsure (1)..(258): unsure at all n locations
gcttcggcattatattcaagcatatcatataattgattcttcatcacaacctctgaaggacataatgaggaatagagaagctattgggaggatcgaanaatgggctgccgagctcaatgaattngctattgactatgtacacagatcctcaattcagtcccaggctgtagcggaattcattgctgattggacgccacgggctcacggagaagaagtacaaaagacgccgagcctgacagtctttgtgatggttttggg

SEQ ID NO: 11191 - DNA, 176 bp, Zea mays
tcggcacctttgctcatatcttcgtagactgggtattcgaaacacaacgcgctcaacactctaattagccttctgtttggacgggagccaaaagctgcggtcatcaattgatcttctctcttggaataattgccaagtatttcacttcacatcgcttcaatcgtatatagccactc

SEQ ID NO: 11192 - DNA, 262 bp, Zea mays
  unsure (1)..(262): unsure at all n locations
tagtattatctacggaattaccaacgaaattaaattgaaactcgagtaggggttaaaggaaaataaagagatcttagaataaccttaactacctcgtggtcatcccactttttgctcccgaggttgcccacttggttcaccaaggtcttgagcccggtggacatgtcttgtggctccttccctttgcgaagccagacccgacccancttcccctcaatcgtctcccgctaggtgatctctgtaagctcatctccttcgtgag

SEQ ID NO: 11193 - DNA, 293 bp, Zea mays
cttacaaagtgcgagctgcgcgccaactggcctttaatttctatgcttacttccgagggccggtcaattagtcgttttaattctgttcatcgattcgaaagctaggtcattactggtaaatgaaactctgccccatttggaaggctaaaacggaactgaaatgccgttttttttttggacactgctacataagagaattctgactgccgattacccttcaaaaaaggggttggtcttgcaatccaatatgttgtctctgcaactcggcaccagaaacaattcttcacttatgc

SEQ ID NO: 11194 - DNA, 257 bp, Zea mays
  unsure (1)..(257): unsure at all n locations
aactaagctctaggggagccattctngactaccaatgttattttgttatataagggtctgtagccatgtcaagccagaaatcaagttggtacccatcatccacacaagaacatcatgacaacggacaggccactgaaactatttcacatggaactattccgcccgatagcttacattaatatctgcgggagtaagtactgtctaataattgtggatgattatcctcgcttcacttggatattctttttgcagaaaaa

SEQ ID NO: 11195 - DNA, 239 bp, Zea mays
cgggacgagcgcattacacccagaacgtgatgaccacttcaagacccttggagctgctgcatatggacctcttccgacctgtcgcctatctgaacatacgacggagtaagtcatggcttaacttattgctgcacgatctttacccgctatcacttgggtgtcctcttttgcatgataagtctgaaacccaaaggactctcaagcgcttccttacgagagcttaaaatgagtttgacctc

SEQ ID NO: 11196 - DNA, 408 bp, Zea mays
  unsure (1)..(408): unsure at all n locations
tttgtgcagcctgagtatgctgacatcgntgaactatgaacctgttgatttgtttcagatttagtcttaatgcacatctgaacatttgaaaaggggtctgtaagaatgtacttttcacatcgagctgagttgttttgatggtcgcgtgcctaggactgctgtcctctgttcctgaactagactttgagctacatttgtctattcagacatgattgtgaaaaatgacaaaataatggaaccaatctggttatcgaatttgtgtcattaatattaatcatcatttgatatattacattcaatatatatatatatataggtgatggaaaaaataatctaatcaaaagattgatacttgtggtagttgaagggaaatgaaatntatatgtatggcggactgtaggaaatgat

SEQ ID NO: 11197 - DNA, 360 bp, Zea mays
agcttcttcaccatgtggtcccggttatcttgataatgtcgacctctgcccttccctcttagttgtgcccagctcattttcagcctctcattctcttccttgagcttttgatatgaatcatcgtttgttcctgccaattctagctcaaaggaagatttgcttgtcgacggacaacaagcattagcacatggtaatatagtctcaatctgaatacatgtgcctgagtgaggttgctgggattttaaattttctatcacaaccttatgagccatgtttaatatgacatgatcatctctaagattcttatgagagcatatgagcatattatattcttcttggaaagctagattttccattttt

SEQ ID NO: 11198 - DNA, 404 bp, Zea mays
cccatgctagtcttagcaattaagcatgcatctagaccggcctcctcttttgcaaaatcaactaaataaagtatgtcgtctaatacacccttaaaagctagtgaaccatcacttcttctaaagacagacacatctacatttgtaaatagacaattatatcccatattgcataattgactaacagataacaaattatatccaagagactcaactaaaaacacattagagatagagtgcttattagatattgcaattttacctaacccttttaccttgccttgattcccatcaccgaatattattgaatcttacgaatccttattcttgacgtacgaggtgaacatcttcttcttccccgtcatatggtttgtgcatccgctgtcaataatccagctggaaccccc

SEQ ID NO: 11199 - DNA, 228 bp, Zea mays
agcttgtggcgccccggagcgtcttgttatatctgaagcaccaaatctcccacttggaagcctcaaagccgaatcctttgggcgtggtagcgtcgtacagactgctggtaccgcgccgagtgtaataaggctacgtcccgagcctcttacagctggtccaatgaatcttctccgctggtctagttgttttggtcgtcgtacgcctttatcctcggggaaccgtatttc

SEQ ID NO: 11200 - DNA, 456 bp, Zea mays
  unsure (1)..(456): unsure at all n locations
tggacgtganaagtgccttcctcaatggacttatctttgaagatgtctatgttgagcaacctcccggctgtgaagatagtaagtaccctaaccatgtctataagctctctaaggcgctctatgggctcaagcaagccccaagagcatggtatgaatgccttagagatttccttattgctaatgacttcaaagtcggaaaagccgatcctacgctctttaccaaaacacttgagaatgatttgtttgtatgccaaatttatgttgatgatatcatatttgggtctactaacgaatctacatgtgaagagtttagtaggatcatgacacaaaagttcgagatgtctatgatgggggagttgaagtatttcttatgatttcaagtgaagcaactccaagagggcaccttcattagccaaacgaagtatactcaagacattctaaacaaagttgggatga

SEQ ID NO: 11201 - DNA, 429 bp, Zea mays
  unsure (1)..(429): unsure at all n locations
agcttatgaatagtatctgcagttacatgtattccgggagcaaattgacctaagtaatgtaaaggaccgatggagatacatatgggattcagacaggtattcaacacaaaaagcttacagacatctaatggggcagacacaggttcactctatttacaagcgcctatggaagagtaaatgtcaaccaaaacataaagttttctattagttatggcttaaaaacagactcaacaccaggaatatgctgagaaggaaaaacatgactctagaatcatattcatgtgagaactgtttatggcaaagagagaagactctttatcacctgtttctcagatgcaattttgctaaagcttgctggaatacaattggcataaccccacccataattgctcatctagaggaggcctcggcaaaccttanacaacaact

SEQ ID NO: 11202 - DNA, 292 bp, Zea mays
  unsure (1)..(292): unsure at all n locations
cctgatgattaagagcnttgttgatggccttgagtgtgatttcccctgtcgtcgcttgagttgggattatggattgtcctgacgtgccttgggtggagtcttcttcgaagcctggtatctggagtatatacggcttttaattctctgcgaagtattgcgcctgatgactctcatatttgaaactttcaagtggggctctgaaaatgatgcgttggaagcctacaagctataaattatggactgacagctgacaaattgatcctgcgtctagctggctgaaactaatatgtat

SEQ ID NO: 11203 - DNA, 428 bp, Zea mays
  unsure (1)..(428): unsure at all n locations
agcttctaaagggagaacacattctatgattaacaaatgttcattntgagaaagacagggtttgtagcgcatgccaggcgggaaagcaagttggaacccaacatccacacaagaacatcatgacgaccgacaggccgcttgagctactccatatggatctattcggcctgatcgcttacataagcatcggcgggagtaagtactgtctagttattgtggatgattattctcgcttcacttgggtattctttttacaggaaaaatctcaaacccaagaaaccttaaagggattcttgagacgggctcaaaatgagttcgccttaaggatcaagaaaataaggagcgacaacggaacggagttcaagaactctaaaattgaaggctctcttgaggaggaaggcatcaagcatgagttctcctcttcctac

SEQ ID NO: 11204 - DNA, 424 bp, Zea mays
  unsure (1)..(424): unsure at all n locations
atcttttttgtgcccttatgcttgacagcttatctcaaagtcaagcctcatgtgatntatactatactggaagacgttagtcgtgtttttgaggaccttcggaagacaaaggcccccaacagtagcccctcgtagtattaatttgttcttgtatctaacaaattcagactgcgatgtgaacaaaggcctttagttgaaggtccgaaaaaacaccttcccttcgctagaatagcgaaagtcaatgacaaatggggcccgccaagttacaatgcactaggcatataaatagaaacccacagcaacaacatttgttacgccatttctgttgcttgcgttgttttctcaaaattntaatcctcttgctatcagctctctcttggttttcgagcttcgtgatatacacaagtgcttattgcatgtctgt

SEQ ID NO: 11205 - DNA, 353 bp, Zea mays
  unsure (1)..(353): unsure at all n locations
agctnntcatgttgtgcttgaacattctaatccgagcccgcatctgaccggggtgaccgtcacaagttggtgttcttctgcagtccgaatccagcatgttcaaatccttttccctttcggtcttctccctgattcctaagcaaaacaagagtgcacgggttctcatggtctaaatatgatggacatgaactccagagtgtcatcacctgatggttgagttgaccagcacgaccgcgagtaataggaccaaaaaatggtacctgtattggtataaatgcatcagtagtgtggatgtcttcatcagtatgctcgccaatgcttgtttcccttgatgatgcaccgtctttggatat

SEQ ID NO: 11206 - DNA, 463 bp, Zea mays
  unsure (1)..(463): unsure at all n locations
ngcacttacgaccaaaccgcacccacatccatatcacattcaatggctcaacaatagtggtaaggtcaaggtaaccaagttggtacgaattaattttgctattggttcatatcgtgatgttgttgactgtgatgttgtgcctatggatgcttgtaatattctgctaggtagaccatggcaatttgattcagattgtatgcatcatggtagatcaaatcaatattctctcatacaccatgataagaaaattattttgcttcccatgtcccctgaggctattgtgcgtgatgatgttgctaaagctaccaaagctaaaactgagaacaacaagaatattaaagctgttggtaataacaaagatgggataaaattgaaaggacattgcttgcttgcaacaaaaactgatgttaatgaattatntgcttccactactgttgcctacgccttggtatgcaaggatgct

SEQ ID NO: 11207 - DNA, 423 bp, Zea mays
  unsure (1)..(423): unsure at all n locations
agcttgtgaagattctttattccaacatgagcaagtcggcgatgctagagccagcccatgttagtcttagcaattaagcaagtgtctagttcaacattgttatcattgaaatcaactaagtatagctgaccatctaagcatctagcactcccttaaaagctattaaatcatcacttcttctaaagacggtaacaccaatatcagtaaatagacaaatgtagcccattttacataattgagaaacaaaaagcaagttgtaatctaaagaatctacaagaaaaacattagaaatggaatggtaaggagatatagcaattttacccaaacctttgaccaaactntgatttccatcccggaatgtgattgctctttggtgatcatcgttcttctcatatgaggagaacatcattctctccctgtcat

SEQ ID NO: 11208 - DNA, 464 bp, Zea mays
  unsure (1)..(464): unsure at all n locations
tatcatatttcaattgcaagtccaacttctctgccttgttgctttcatagtcagagattgacgggccacccagcttctgctgaacaaatctatggggatacaaacatgttagaagccacatgagaaatgcttaggggtcactgaaccaagattgccatttcttgaacgaaatacggaaaaggaaatctcagtcgctagtagattttacatgagccaacttactcgactgcagatgaaggcttgtcgttcacgaaatggcaatcttggtccctgcaacctgcttccaagaaggacaacaaatgcaggagggagcaggggagatggggtggattcagaggtcgagaaagagggcggtaccatggcgagagcagatcctggacaggcacgagcgagaagttgtagtttgcgtcgaggtccgcggagcaaggagttgcanatggcgagagctcgacgacgaagtgtca

SEQ ID NO: 11209 - DNA, 424 bp, Zea mays
agctttaagagtatcttaaagtggtattggttactcctaaagaagaccctacatttatagacatgtcatctgactccctacatcgcgatgttctctctcttccttcctacacattgtttacactctaaactatgaattaagcacattattgatttgtacgtaccattttagaatatgacaaatacatatgtgaaaaaaatctaaatatgttagaaatatggtgtattgtgttgaatttagaggaaatcgctgcaagagctaagctttatggggatggaggatggtgaaaaagtgagactcatgtgtgtactatagagggaacccgtgaagacaacctaaagctgattcaaccattcccttcttttaatctcccatgttcgtactttctattcatagtcttactaccttccatctttcattcctc

SEQ ID NO: 11210 - DNA, 434 bp, Zea mays
atcggctaagcatgtttgaatatctctctgataagtcgctccagcgtttttgaggccgaacggcatggaggtatagcagaaagcaccgaatggagtgatgaacgttgtttttcctcgtattctttcaccaggctaatctgatgatacccagagtagcaatccagaaggacagcacagaacatccagcgatggaatctaccacctgatctatcctaggaagcccgaagggatccttcggacagtgtttgttgagatccgtatagtcgacgcacatgcgccaatccactttattctttttgagtacaagaacagggttggctaaccactcgggatgtaacacctctctaataaatccagtcgcgaccaagcgagccagctcagcgcgaatggcctctctcttgtcgtgcgtgaaacgacgcaacttttaccgaatc

SEQ ID NO: 11211 - DNA, 353 bp, Zea mays
agcttctagatacccacccttatttatctcggcggaagtccgcagtccggtccttatcccaattgggtgcgccatccccacacacacagttcggtcctcatcccaattggaacatgttcatcccaattgggagactaacggataggaggcagatgcagcgattgcaaagatggcactgctcgtgctacgccaactcctcaccatgctctagtctctggccctgctcctgcccttccagaggcgcacgcagcgggggcgttcgatgtcacgacctccacattgcggctatcgggaaaaggggaaggcaacggcattagtgggttacgggtgccggccgggtcgcccatggtcgt

SEQ ID NO: 11212 - DNA, 401 bp, Zea mays
  unsure (1)..(401): unsure at all n locations
cttgcggctgaaagcccaagcgccaacggtgcctaatgaaatcgtcatcgaggtcatgatcaaagggctccgactaagacccacagcacaatatttngcaaggaaaccaccgcagaccttggagaagcttctctagaagatggacgaatacatccgagctgacaacgatttccgccagagaagggagaaagctgtaacaccccacgtgttacttagggttttcactcaaggctacacaagtcaagcccatcatcacatgtggtttaacttgagcaaagtacaccaaacttggaaatcaagatcctaagtaagtgcaactcatcttaaaagtcatgccttggcttatcatgcacatatattggggagaattgcccaaaccctaattcanacccctttgggca

SEQ ID NO: 11213 - DNA, 413 bp, Zea mays
agcttatatgatgttcaacaaaaaattcttggtatagttgaagaagttcataatgttgagtttgatgaatctactggatctcaaaatgaagatgattatttagataatatgagaggcatccaactcaataatacaataaataacatgtcaattgatgatatgaggccaagggaagtgatagaagatgaagagatcatatatttgctccttcaaatgtgctaaataatgatcaatatctagtgctcaagatcaagtaatccaaacgttcacaattgcaagattatcctttggatcaaaagttggagatttaagaagtgttcaaacaagatcaagactagcatcttttgtaagcactactcatttgtgttgtccattgagccaaccaagattcaagatgcattattggattgtga

SEQ ID NO: 11214 - DNA, 461 bp, Zea mays
  unsure (1)..(461): unsure at all n locations
ctcagcttacggctactggggagctgccgtacactggctgttcttgagggtggctggagtgggctggtcacggtggccgaagctctggcggcaatggcgggcggaattaagctcgccggagctaaggaaaagtggctggccggagagggtgagtgcggggcgaatagaggtgcgcccagggaggctttataggcgcgggcgggcacggccgagggcgtgggcgcgcggcggacttgaccggacgccggggtgagcgcgcgcgcgggttgggcgagctctggcgtgccgaccagggtcgaacacgtgtgctcgtgcgttctgcccaagttctggcgcgtgtggtcgctcatccgagcctgctctcgccttggtcagtgcacaaaacctcttctccttcctacaagctaccattcttgtgtggnggtcataggattntgcctactggttgcagagatatggag

SEQ ID NO: 11215 - DNA, 430 bp, Zea mays
agcttaagctatccacactcatggaacccttaatttctactctaaagagaatattctatcctcggcagccaaattatttactctatatcacaattcttccgaggcatatttactctatataataactctataccaactaccacataatataataattttttccactttactcttttcactgcacgcgcccagtaccacttgtgcctggctgcttggagcagaccgcacgacggagaggacatgagagagatttagagtaggatggtacatatgatgtatatgaggtttttccgtgctctccttatatttccagtagccggtgaagtgcccgctgcagcgtttactttactgtatatctaactgcacactggtagcgcttcctttacagtacgtggctgcacatagccttagatttaactacgagctattc

SEQ ID NO: 11216 - DNA, 401 bp, Zea mays
tgacattgtcttctttttggaagctgaaagtcgcctagatgtgtggtgaatatggcgaatctgaaatttaacaacttaagcacaactacaagccgggttagcgttagaaataaaaaccagtccaagagagagggcgcaaaacaaatcgtgagcaaataagaagtgagacacaaggatttattttaccgaggttcggttctcgcaagcctactccccgttgaggtggtcacaaagactgggtctctttcaaccctttccctctctcaaacggtcatttagaccgagtgagcttctcttctcaatcaaacggaacacgaagttcctgcaaggaccaccacacaattggtgtctcttgccttggttacaattgagtttgatcacaagaatgaatgaagaaaaga

SEQ ID NO: 11217 - DNA, 395 bp, Zea mays
agcttgaatctgtcatgctggctctaataatgaatatattgtccctagacacctctaggctctggttttgtgtaacccaccattctgtttgtgacgcttcaattttgaattcataccaccacttcaagtttcaggcttgaagggttcgtttcaaacaaggatcagtcctaccaagatccaattgaagaatgagtagtctccatcagtagtcttctgtgaagctgtaacgaactgcattccctacttaactgtagccaactgctagatttttatgtagctgttaaaaccagtgcccgatttttttacaccgcaagctactgtatgctgtattcgttgtatcaagtgaaaatgccacggttgctgaacttgctacaactttacaagccgacctttac

SEQ ID NO: 11218 - DNA, 407 bp, Zea mays
tatgtcgagcaacctcccggctttgaagacagtgagtatcctaaccatgtctataagctctctaaggcgctttatgggctcaagcaagccccaaaaacatggtatgaatgccttagagatttccttattgctaatggtttcaaagtcggcaaggccgatcctacactcttcactaaaattcttgacaatgatttgtttgtatgccaaaattatgttgatgatatcatatttgggtctactaacgaatctacttgtgaggaatttagtatgatcatgacacaaaaattctagatgtctatgatgggggagttgaagttttcttatgattccaagtaaagcaactccaagagggccccttcattagctcaacgaggtacactcaagacattctaaacaagtttgggatg

SEQ ID NO: 11219 - DNA, 341 bp, Zea mays
  unsure (1)..(341): unsure at all n locations
agctctaactttcgtaaaaaatttcaatatatattgttagacaatattaaattaaaggtctcaaaaggggttaattaattcttaaccaactatatttattttacctcatatattggaatattggataccattataccctcttgctcgacaagggtgggattcaaaaagattccaatgttattaaccaaaatgcgtgaacagtaaacggaatactgttcactatttatatgcacaggacgcagcctgtgagaaactacaagtataccccctataaaagctacaacattgacttagactttatggactaaaaagcattctatttttaatcngttgtaataccg

SEQ ID NO: 11220 - DNA, 363 bp, Zea mays
agcgcactgtgcttatttgcaatcggaacgcccgtgccttattgcagataagaaaaccggccgcgcgcaggtatcttcgctagatgcgcatgatttcttactaccgttgtgcaaatttctcgccaacaacgcccacgacctccctgcgcagatatcgacattgctgctacgtctagccgatacgccggcagagcctcgccttgaccccgctatatgcgtccccgtcgacagagtgccgcgccccgctgtggacgtcgtcgtgcgcgccgtcgaggtaagcccgccccatactctctctactttcccattcttactcccacgtcgtacgcgtctgctgcgtacccgtagccccttgtcgcgccg

SEQ ID NO: 11221 - DNA, 383 bp, Zea mays
ttgttgggttaccaaggagggggaaatgcacgacgactatgcttttcagaaaaggagagagaccggaaccatcgtaatttagagagaggagatcctgcacatgcataatgtaatccaaaaaagacaagactccaaacatgaaattccgcacacattgtacgcaaaaaacagggtcgcggtcgctgttctgcacaaataacaagacggcattcatcgtggaatggctggggctccatctgtggaagtcaaagaacgactccatccatgactcacaagactaccgcaaatgcgtatcccgagccctcagtgagagatggatgatagaggcggacctccgatgcatgggcacagtgggaggaaactttgggcggtgagcctgacac

SEQ ID NO: 11222 - DNA, 322 bp, Zea mays
agcttgtatgtaccaattcatatatagtgcatgtgatgtccctcttatggctagttacttttgtagtttattaattgctcccttgtgctacttagcttatgtagctaagtagccttgcttagtttgtgtacctttacaaactaagtagtgctagcgcagcactactgttgtttacgctctgcgctctttgctcactactatgtctatgagctctcggatacttatagtgctagttgcatatgtttgtgtgaccatgctaactatacttatgtaggtgatctctcactagcttcaacacctaattgcttaattacgatctttg

SEQ ID NO: 11223 - DNA, 444 bp, Zea mays
  unsure (1)..(444): unsure at all n locations
tatgaagattcttcattccaacatgggctagtcagcggtgccagatcctaaccaagttagtcttagcaaccaagcaagtgtcgagttcagctctatcaaaatctaccaagtatagctgaccctctaacactcccttgaatgctattgaatcatcacttcttctaaagacagtaacacctacatcagtaaatagacagttgtagcccatttgacataattgggatacggaaagcaaattgtaatctaatgaatctacaagaaaaacattagaaatagaatggtcaggtgatatagcaattttacccaatcctttgaccaaaccttgatttccatccccgaatgtgatcgctcgttggggatcttggttcttctcgtaggaggagaacatctntntctccccagtcatgtggtttgtgtacccgctatcgatgatccaacttgagc

SEQ ID NO: 11224 - DNA, 387 bp, Zea mays
ccgcgcgaacatccatggaagaacaagagggacaccccgctcggacacccctgcgggctaggccatagtttgcgctacccacttgagccggatcatctctcgcagtaccctcacgggctgggcagtggcttgcgcttcccacccgagccgaatcatccccgacaacatcctcgggggctgggtaagtgtcaacaccatccttgaggaccaagttctctgcagtagccgcctctaaagctgagggtccctcagttacttccatgggaccaagacgatccaagtcagtttcctgaccctcaagaccgcgctctaaagctgatgaagcgcgggacgctgcccgggataaccccaacccggcgtggagcacatcagcacaaacatccgtcg

SEQ ID NO: 11225 - DNA, 486 bp, Zea mays
  unsure (1)..(486): unsure at all n locations
cacataaaanactcaagcttggcctcaaaagaatactctccgtaagtgatgtcttcttctttataaagagcncnctccccctctacagatgaagaaaagctccctctgaccaagatcttangtaaaagcatgtgaaaattacatgtgccagacatgatttgaaaagactaacttccttatgcattgataacagaatacgagttaaccacttatgcatttttagcaacatggaagtatatgatatgaaatatagtctaataaaatattggagaatacatgtaaattatactagatgtagtctcaaaagataccgattgaaattcaatggcgagcttgagagatatgagagttcttgaagattttgcagtggaagattgttgtctttctccggggacgttattttccttacaatgagacaatcacatgacatagactcgaaaggtgttactctcacagtattagattatagacgtacctctccctgaa

SEQ ID NO: 11226 - DNA, 429 bp, Zea mays
  unsure (1)..(429): unsure at all n locations
agcttcacaaactcgttgatctgcactttataggataagtcataagtcaagcattcttacaaatactaaaccagcttctgcagtctagattctaggttttaagatcacaggaaaacatgaaagacaaattacccatgtgatagatgtcaaccgagtgaattcatcagtagagcctgccctccgaacgagtatttcagccatacgaccataatctacattcttttcattttaggtatgataatcagcattgaaaacaaaaaatgaagaaaccctttaagagtatagcgaaagggctgacttggttttggttgtggtatgagtagcactcctcagtgtcctgagttcgactgcccatgggagcgaattntagactaaggttaaaaaatcccatcgtgggtatgagtagcactcctcagtgaaacacataaa

SEQ ID NO: 11227 - DNA, 454 bp, Zea mays
  unsure (1)..(454): unsure at all n locations
cccccctcgcgagacctttcccgtgttcttctaatctttatgaatgtgatatcgaatgtcatacttgatgcatattcactttaatggttcccttgtatgatgtactgtttggttcccaatttgaatggatgaatgtatgtatgcttgcaatcgcatagagaacgatccggtcgaagagcccgaggaactcgcaggagaagcccctgaacagcagtcggttggtggaggcaagtgtcctttgacctatctctgtcctattcattatttaattcacccnccgcattacatatttatacctaagggttgactagcttttgttatccatgtccttgattacctatttgggttggattattattgcctagcttgatgctattgcttaactctaattaatgaacatgatgagattatctatgatacgcttgtttcccttctctattatgatgttgtactt

SEQ ID NO: 11228 - DNA, 418 bp, Zea mays
  unsure (1)..(418): unsure at all n locations
agcttcttcaccatgttatctcggttatcttgataaggctgagcacagcacttcccttttatttgtgtcaagctcatctttagcctctcattttcttctttgagcttttgatatgtatcatggtttgttcctgcaaattctagctcaaaggaagatttgcttgttgacggacaacaagcattagcacatggtaatgtagttttaatttgaatacatgtgcatgagtgaggctgttgggattttaagttttctatctcaacctcatgagcaatatttaatatgatatgatcatccataagattttcatgagagcatagaagcatatcatattcttcttgaaaagctagattttcaacttttagctnttctacttggttcttaagcaaggcattcctatctactaatngagcgatataat

SEQ ID NO: 11229 - DNA, 446 bp, Zea mays
gccttgtggaggctatgtattttctgccatgcgcggcgcacgtctggagggatacctcaccagcgcaaccaagatgcctgatgaggagactgtcgacaacgcgggcaagaagagccccaatcctgcttttgaagagtgggaggtaaaggatcaacagatcctcagctatctcctctcatctataagcagagaggtgcagattcaagtcacctcagccaagactgcagcggaggcatggcgctccatcgaggccatgttcgcatcacagacccgagcccgggctgtgaatcttcgccttgctctgtcaactacaaaaaaaggtagtatgaccgtcgccgagtactacaccaagatgaagggctacggcgaggagatggctgcagcaggaagaccgctgcaagatgaagagatggtcgagtacatcctcaccggcctggaggaagaat

SEQ ID NO: 11230 - DNA, 423 bp, Zea mays
agctcatcttgacttattttgaacaatataatcttccttcgaaagcttttcagtgaaaaacattccaagaggagaaaactagttgacagatttactatctaaatcagcagcacaggggctcccactcccctcagaagtgttcttcaaactctcaaagcacctttagtcgagatcatggagtgagcagtgcttacaatttcacctgtgcacaacgaggactatagaactgagattgtatctttcctccaaggaaattatccttcggatgatgaagcttacataaaaaggatgcaagccaggacaagaccatatatgatcatagaaggggaattgttcaaacaacgagtttgttctccactgttgaaatgtctctctaaagccgaaagtcacgagctaatgaaagagatacatgcacggatatgt

SEQ ID NO: 11231 - DNA, 434 bp, Zea mays
  unsure (1)..(434): unsure at all n locations
tctanagggagaacacgtgatacggttgactaacgttcttttctaaaaagatagaccttgtgcagcttgtcaagcaggtaaacaagtgggaggagcgcatcacagcaagaatgtgatgaccacttcaagacccttggagctgctgcatatggacctcttcggacccgtcgcctatctgagcatagggggaagtaagtatggtctagttattgttgatgacttttcccgcttcacttgggtgttctttttgcaggataagtctgaaacccaagggaccctcaagcgcttcctaaggagagctcaaaatgagtttgagctcaaggtgaagaagataaggagcgacaacgggtccgagttcaagaaccttcaagtgaaggagttccttgaggaggaagggatccagcacgagttctccgcttcctacacaccacagc

SEQ ID NO: 11232 - DNA, 347 bp, Zea mays
catcaagcttggcgtgcacgtttgcacattttgtcttggaagagaaccctgatgcttttcgcaagggcacatggccccgttgcactgagtactttacatggttatatgatgttatatagtcataaacttcttattatgtattatttaccatcgaacaattttttagttatgaactacttattatatattcaaaatgtgcactgcaaattattgattaacatgacttgaagcaattgataaagaacaccacacatttaaagccattgatacacaccagtcttctaatagtgctccacattccacattgtgtggacccttcttcacagtatcctccattggtgttgctg

SEQ ID NO: 11233 - DNA, 460 bp, Zea mays
  unsure (1)..(460): unsure at all n locations
tggcctgctaacatatatcaagcagaactgatttcattatagaatgtcagttttcatatggggacaatagaacaactgcttcatacgatgataggtagcaggggcacctgaaaatataatatcctgccaacagtaaaactactaacagaaaaatgtctaatatgaagtttttggattgttagaggattagacattatcagttttaatttaatccaaaaatccaatgttatatatgtgatgacatgtatgtgcatgtgtgtatctctacttagataagcagtaaacaacagtaaaacatgcaaaaatacgaagaacagagtgtacccagcggtgtgaccgatgctcaaggcatcagtgactctattcacatgagacatctcgtgtgtatgttcgatgtagntgtacgcagtcgatgcaggtagatgtacgcaatgcagtctctcgaacggcaccggcaatg

SEQ ID NO: 11234 - DNA, 303 bp, Zea mays
ggccaaacacaaggtcgaacagccatgccgcccggcgccttgcgcctccgtgccgttttccctccgtttcgacatgctcttcacccaacacatacatattacctctggtgtgtttccacacgcttggacttagcttattttccgggccatgcccgaacctcggttttccgcccctgcgccatgggcgaacccctcgttttcagcccaaacgcaaggccgaacaggcatgccggcccgcggcatcctgcccttcacccaaggcatacgtcgcagcttcggtgtgcttgcacacgcttggacttg

SEQ ID NO: 11235 - DNA, 307 bp, Zea mays
cgactggcggcatggctgttcggccttgcgtctgggctgaaaacgaggtgttcgccatggcgcacgggcctaaaaccgaggctcgggcacgaactctgaaataagctaagttcaagcatgtggaaagacaccgaacatacagtgtatgtctttggtgaagggcacagtggaacgcgagtgaaacgacactgaagcacgcggcgacaggccggatggctgttcgccttgcgtttgggctgaaaacgaggcgttcgccatgtcgcgcgggcccataacaacgggtcggccaccgcctcgaaaataagct

SEQ ID NO: 11236 - DNA, 416 bp, Zea mays
  unsure (1)..(416): unsure at all n locations
agctctatcaaatggacgtgaagagtgtcttcctcaatggaccgatcaaagaagaggtctatgttgagcaacctcccggctntgaagatagtgagtatcctaaccatgtgtataaactctctaaagcgctttatgggctcaagcaagccccaagagcatggtatgaatgcctaagagattttcttatcactaatggcttcaaagttggaaaagcggatcctactctatttactaaaactcttgacaatgatttgttcgtatgccaaatttatgtngatgatattatatttgggtctactaacgaatctacatgtgaggagattagtcggatcatgacacaaaaatttgagatgtctatgatgggggagttgaagtatctattacgatttcaagtgaagcaactccaagagggcacc

SEQ ID NO: 11237 - DNA, 468 bp, Zea mays
  unsure (1)..(468): unsure at all n locations
tactaagctntaaaaggaaagagacgcanaggcaaatcatatatggtttgctgatcaaagccgaccctacttttgatcagttgctctccaagaatactagcaagaagaccgttctacgtgatcggtcaacgaagaaaccctggtcacctgctaaaatgaaacgggtaaacaaaacggcccgaaaggcgacacaacaagcatcacctattcatcctatgagaccagggtactttccatccgtttactcatcgtcggtacattatcctattcaaatatggaatggtacgacgatgaatccatggtacatgtatagtccctttgtctatccagactggggggcacctccattatatttattttgatccattgatcaaatggtcatggccgaggaagatacaatttggaacgacctttatacattggtactttattgaatgatctccattttgaaaagccggtgactcacat

SEQ ID NO: 11238 - DNA, 188 bp, Zea mays
actaagctttgatatttccgccacaggggatgacgggtttctattcttgccttgattaacgtagcaaacaaacatgaggcgcgcactcgtctatccaaacctgccgcatactgctcgccctattacacaccactaaatgctatcggatcacgacttctgctaaagacagtcacatctatttcagaacc

SEQ ID NO: 11239 - DNA, 307 bp, Zea mays
  unsure (1)..(307): unsure at all n locations
caatcatgccgcccgtggacttgagccttcgtgccgtatttcctccggtccgcatgcccttacccagaaaacatataccttcggtgtctttccacacgcttggacttagcttatttccggagccatgcgcgaaactctgtttaacgcccctgcgccatgggcgaacccctcgttttccgcccaaacgcaaggccgaatagccatgctgccccgtcgccatcctgcccttcacacaagcatacgttgcagcttcggtgtccttgcacacgcttggacttggctttntttttgtcctgcaccaacccac

SEQ ID NO: 11240 - DNA, 468 bp, Zea mays
  unsure (1)..(468): unsure at all n locations
aactcaagcttatgaagattcttcatcccaacatgggctagtcggcggtgnctgtttatcccatgttagncctagcaattaaacatgtgtcgagctcagctctatcaaaatctaccaagtatagctgaccctctaacacacccttaaatgctattgaatcattacttcttctaaagacagtaacacctatatcagtataaagacagttgtagcccatgtgacacaattgggatacggaaagcaaattgtaatctatagaatctacgagaaaaacattatacatggaatggtcacgggatatagcaattttacccaaacctttgaccaaaccttggtttccatctcccaatgtaatcgcatcgtggggatctttgtttttctcatatgaggagaacatacttttctcccccgtcatgtggtttggcacacgctgtcagtatcaacttgtgccccggatgctaacctaca

SEQ ID NO: 11241 - DNA, 359 bp, Zea mays
agcttcaaaagctgatgtctctctggttatcttcaacaaagggggtgttcagatgtacattctcatttatgtggatgatattattattatgagcttcttcacattaaccacagatcgtcttaataattaacttaagaccgaagttgcggtcaaggatctggcacttgtcgatactttcttggcattgaggtccatcacacattcactggtctggtattgacacaacacacatacattcaagacttgtgcaccgcacaacatgacttcttgcatggtgttccgaccctatgttcctagtgacaactgctgttaaaagtgggatcctcttcaccgaaacactacacgctaccgtatgttgt

SEQ ID NO: 11242 - DNA, 407 bp, Zea mays
  unsure (1)..(407): unsure at all n locations
tatgttgagcaacctcccggcttttgagatagtgagtaccctaaccatgtttataaactctctaatgcgctttatgggctcaaagcagccccaagagcatggtatgaatgccttaaagattccttatcgctaatggcttcaaagtcggaaaggccgatcctacgttattcactaaaactcttgaaaatgacttgttcgtatgccaaatttatgttgatgatattatatttgggtctactaacgagtctacatgtgaagaatttagtaggatcatgacacaaaagttcgagatgtctatgatgggggagttgaagtattttctacgatttcaagtaaagcaactccaagagggcaccttncttagccaaacaaagtatactcaagacattctaaaacaagttgcgatg

SEQ ID NO: 11243 - DNA, 428 bp, Zea mays
  unsure (1)..(428): unsure at all n locations
agcttanggactaaatagagatatttaagaaattggtattttgggggacccgatttaaagaattattagaacctgatttntggtactcacaccctaaaataattttggagagggttttttagtaactaatggagatggtctaacttattatcgatattactattgacagtcatcggtctttatttactacatgcttccatatataactttatttgtagattttagttntgataaagtataatgttttactacaataggaaatcatttaagtacattntaagcgaataaaattacattatctataaaaataattaacagttacataactcacacataaaagctaaataaataatacgtcaataaaatcttaattatagaaacatatttannaaaattatgattntctacttttagacttcaaatggttg

SEQ ID NO: 11244 - DNA, 461 bp, Zea mays
  unsure (1)..(461): unsure at all n locations
actaagcttctagccaggctgtgtgcangtctgggtcccagtcgatactaccttctangggccaggtcacgaatttttcttaagtatactggcatccagcctcttctatggggctaggtaccagggagaagttggtaacaaacgcacacaacaaaggcaaatagcatacagataagttatgtcactattaggttaatacttcccaaaagtatcttacaagaccaaaaaaatattacaagccgcttccaagcgggacccttgccttatctctgtagattcggctactcgtcattagcaagatcccgctggaagcgctcggccactagctccacgacgtctttaatgccctcccgggcagcgtcttcagtgtcggccataagaccagcgaccatcggctccaaggatatggccgggtcgtggctccggaagcacgtcaggatgtactcgactatcgcccggca

SEQ ID NO: 11245 - DNA, 261 bp, Zea mays
tgggaagacggactgggatcgctcctgcgcagctgttgcggtgccggtagggcagctgcgtgtttgcggctgcttctgcgcgctggaaggtcgctgggtcccgcactatgggctcgtcaccatagtccacggattcctaccggaaagtctcaccgtgcgtggacgtccggccaagtgaactttctgccgcggtttggcgcgccaagatcttggaatttgttgacgaaatgcatgctcctccgcatgtccgatgtgccccgc

SEQ ID NO: 11246 - DNA, 476 bp, Zea mays
  unsure (1)..(476): unsure at all n locations
actcaagcttctnagggagaacacgtgataggtctaaccaatgtttctttctatatagatagaccttgcgcaacttgtcaagcaggtaaacaagtgggaggagcgcatcacaacaagaatgtgatgaccacatcaagacctctcgagctgctacatatggacctcttcgtacccgtcgcctatctaagcatacgaggaagtaactatggactaattattgttgatgacttttcccgcttcacttgggtattctttttgcaggataaatctgaaacccaagggaccctcaagcgcttcctaaagagagctcaaaacgagtttgagctcaaggtgaagaagataaggagcgacaatgggtccgagttcaagaatcttcaagtggaggagtaccttgaggaggaagggatcaagcacgagttcttcgttcctacaaccacagcaaaatggtgtgggcaagaggaagaaccgatgcttat

SEQ ID NO: 11247 - DNA, 400 bp, Zea mays
agcttccaaagcagagcatgctctgattgcaacaaatgcagtgtcgcagctcacaagcgttgcccctttatacaagttgtttcactcatcgaccactgaccccactggccagaagttattcgaaggtcacttttcataacgagcttcgaggtgtttttcgaaccttccgcgtgaagccctcccgatcacattttatgtggtctaagctcgttatggaaaacgaactcattccgcaagggctactgttgaggcctactttaccgaagatcctcaaaacaccttacctttggcctaagcaaatgtattgcagacatactacgaagaacagatgaaaccagtcttcagataaagcggacaacgaagaagcttcgtctatgagcgcagacaacgacgatgcatg

SEQ ID NO: 11248 - DNA, 460 bp, Zea mays
  unsure (1)..(460): unsure at all n locations
cggaagcgtctattgggtgtcgactaggtgtttctttctttcttctgncttccgacgccttgaatgcgacgggttgagctccggatgtggagggttcgtcgagctcgttgatcttcctcgagccttcaaccatgcactcaaaactaacaaaatgcccgataacttcctcgggggtcatttttgtatatcgacgattaccacgaattaattgaacttgagttgggttaaggaaaatgagagatcttagaataaccttaaccatttcgtggtcgtcccattttatgctcccgaggttgcgcacttggttcaccagggttntgagccggttgtacatttgttgtggctcttcccctttgagaagccggaaccgaccgagctccccctcgatcgtttnccgcttggtaatcttggtgagctcgtctcactcgtgcgcgggtttgagcacataccanatcttctt

SEQ ID NO: 11249 - DNA, 429 bp, Zea mays
  unsure (1)..(429): unsure at all n locations
agctagtagatcaggtggccggtggttgtctacttgccagagtcgacgtggccaataaccacaatgttgatgtgagacttctccttacccatggctggaggcgaagcttaaactgttaagccatacgaatcaataattagaaacactagtaaacaactcccactaacaaaatttattagacggcgtcaaaactgaatctaacgttgaaaccgcagtcatcagctttaagaaaagcatcatacatatcagcagtggaaaatgtaaagcagcaaacaaaaaacaaagcaaacgacataatataaacacaaagcaggcctagaaaaaatatcaaactagcaagtgtgcgcacagaattttgagccagtaaaaattggacacaactacataaaccagatcagaaatctggtcatatnttgtggttgcaactct

SEQ ID NO: 11250 - DNA, 417 bp, Zea mays
gcctagctacgggtgcataggtttcaccaaaatccaaaccttcgacttgagagtatcccttggccacaagtcgagctttgttccttgtcaccacaccatgctcatcttgcttgttgcggaagacccatttggttcctacaacattttgattaagatgtggaactaaatgccatacctcattcctagtgaagttgttgagctcctcttgcattgccaccacccaatccgaaccttggagtgcttcctctaccttgtgtggctcaatagaggaaacaaaagagtaatgctcacaaaaatgtgcaacacgagatctagtagttacccccttatgaatgtcgccgaggatggggtcgacggggtgaatctcgtggattgcttgatggactcttgggtgtggcggccttttgtcttcatcct

SEQ ID NO: 11251 - DNA, 391 bp, Zea mays
agcttcttcaaagctggactttgatttcctttgagcaagtctgtagttgaagtaccgaaaatctaccagatcttcatccatcagatcacccccgaagctataatgaggatggggatttttgtctgggcagtaaggagtaaagggttagagccaagcgcgaagtgcttctgcagtatgcatgaacttttatatgagacgaaggccattggtaaagaacagtaccacaacaactttggttgttatggatttatcgctcgccccaacgcaagccacccggtgccaacatttcggaaaagatggcccagagcctggatggaagaatggttttatgtgaagaatgatttacaggcaagggacgacattaaagaaatcatcatgcgccccatctggt

SEQ ID NO: 11252 - DNA, 468 bp, Zea mays
  unsure (1)..(468): unsure at all n locations
actcagcttacaggctactggcggagctagccgaagcactggctctttttgaggatggctggagtgggctggccacggtggccgaagctctagcggcaatagcgggcggaattgagctcgccggagctaaggagagggggctggccggtgagggtgagtgcggggcgaagtgaggggcgcccggggaggctntataggtgcgggcgggcacggccgagggcgagggcgtgcggcggacttgaccggacgccggggtgagcgcgcgcgggttgggcgagatctggcgtgccgacgagggtcgaacacgtgtgcccgtgcgttctgcccaagttatggcgcgtgtggtcgctcatccgagcctgctctcgccttggtcagtgcacaaaacctcttctcctccctacaagctaccaatcttgtgtgggggtcataggattntgcctactggttgcagagatatggagccag

SEQ ID NO: 11253 - DNA, 426 bp, Zea mays
  unsure (1)..(426): unsure at all n locations
agctttaatctataggtccatggtcttatagaaatatactaaaaaaggctctagctgatccaaacaacctagttaatagcgtagattgaactatacaaccaaccagctaacgaaaagctattaattggatccacccacctaatacaactaattgttagctaggtgtatccaaatagggcatgaatcacatgaactatgaccaactaacacatactaaaacaggtttgcatgcatgaactaaaaataagaacggggaagtaagcacaatatcctaagtcttcaaatgatcaacaaatgtacaaatatttccatctgctgaaaacaaacaatcatgactcgccttttttctcaccctacactntagccatagctagaagctccttcttattcttgccattaacatgagacatattctacaaccataaa

SEQ ID NO: 11254 - DNA, 461 bp, Zea mays
  unsure (1)..(461): unsure at all n locations
tgtgaagattcttcatcccaacatgggcaagtcggcggtgccagagccaacccatgttagtcttagcaattaagcaagtgtcgagttcagctctatcaaaatctaccaagtatagctgaccctctaacactcccttaaatgctattgaatcatcacttcttctaaagacagtgacacctacatcagtgaatagacagttgtagcccattttgcataattgagatacagaaagcaaattgtaatctaatgagtcaacaagaaaaacattggaaatggagtggtcaggagatatggcaattttacccaaacctttgaccaaaccttgatttccatccccgaatgtgatagctcgttggggatcttgngttttctcatatgaggagaacatccttttctcccctgtcatatggtttgtgcacccgctatcgagtatccaacttgagcccccagatgcataaacc

SEQ ID NO: 11255 - DNA, 384 bp, Zea mays
agcttgacattgtctccttgttggaagctaatgccatccttaatgcccggccgtctcccactatagaacatgcttctaacacatttaaaatcttaattctccaagtcttgcctcattaattctggcattaagttgagctatgtgatcattttgtctcttaataaagctaggtgatcatggatagcattaacattaatgtcttcacatctagtacaaatgtgacatgttcaaaatagatgtgagggtttggcaagattaattcacaatcttacatgtaaaaagtgttctctctctaaaatggaatagaaaattgcaacatttaatcttacctgacaataattttattctaatttaacgtgcatcaattgtaatctacaataacta

SEQ ID NO: 11256 - DNA, 432 bp, Zea mays
  unsure (1)..(432): unsure at all n locations
gaaactattacgaagctatgtgcagaanagcttcggcatgacagcagaaaagaggaaccgacttaaagatgaaaagccaaattatacctcgaagaattactatagagttactggtaaaagcaaagggcattgatgtaattttacacgggctgtgtcccgtgcctataaatagatgaacagtactcccgtactgttcacgctgatttggcattagcatcacgcctgtacccttactttccttcaaactgaaggtacatttgtaatttgttgtttatataagtaaaataaatagaagtaaattaataataatgttcaaagtagtcatgttattttccgtgtttttgtgcataaatttctcttatcttttattatgattatgaaggtgtgaccttcataaccttcgtncgaaatccattatatccaaagggaaat

SEQ ID NO: 11257 - DNA, 418 bp, Zea mays
agctttggctgtcttatgctgttatctaatctaaatctaactcctaaatttaacttggtcaaaaagtctaagtgccatgtgtgtattgaatcaaaacaaccccgcaagcctcacaaggctgctgaggcaaggagtttggcacctctagaacttgttcattctgatctgtgcgagatgaatggaattttgaccaaaggtggtaaaagatactttctcacttttatagatgactccactagattttgctctgtgtatctcttaaaaacaaaagatgaagcatttaattattttaagacctataaagctgaagttgagaaccaacttgagaggaaaataaaatggttaaggtccgatcgaggtggagaatatttctctaatgtgttcgatgagttctgcgtggaacatggtattattcatg

SEQ ID NO: 11258 - DNA, 470 bp, Zea mays
  unsure (1)..(470): unsure at all n locations
actaagctnaccaaatggacgtgaaagtgcctttctcatgtacttatcaacgaggaggtctatgttgagcaacctcccgactttgaagatagtgagtaccctaaccatgtttacaaactctctaaggcgctttatgggctcaagcaagccccaagagcatggtatgaatgcctaagaggttttcttattactaatggcttcaaagtcagaaaggacgatcctactttatttactaaaactcttgacaatgatttgtttgtatgccaaatttatgttgatgatattatatttgggtctactaacgaatctacatgtgaggaatttagtaggatcatgacacagaaattcgagatgtcgatgatgggggagttgaagtacttcttggtatttcaagtgaagcaactccaagagggcaccttcattagccaaacaaagtatattcaagacattctaaacaagtntgggatgaa

SEQ ID NO: 11259 - DNA, 418 bp, Zea mays
agctttgtatgcaactcgacacccgttttcggaatgggtgacgtgcggcaacgaaattgcgcgaaaccaccccaaacatgtgttctggacctaaagtagtggattgggcatgtttgttgcgaaaaacgaagaaatggtttcggtggcaaaaactcatgctttgtatgcaccccgacacccgttttcggaatgggtgacgtgcggcaacgaaattgcgcgaaaccaccccaaacatgtgttttggacctaatgtactggattgggcatgttcgttgccaaaaacgaagaaatggttccggtggcaaaaacacatgctttgtatgcaccctcacacccggtttcggaatgggtgacgtgcggtaacgaaattgcgcgaaaccaccctaaacatgtgttctggacctaaagtagtggattg

SEQ ID NO: 11260 - DNA, 451 bp, Zea mays
tgcacttacaaccaaaccgcacccgcatccatatcacattcaatggcttaacaatagtggtaaggtcaaggtaaccaagctggtacgaattaattttgctattagttcatatcgtgatgttgttgactgtgatgttgtgcctatggatgcttgtaatattctgctaggtagaccatggcaatttgactcagattgtatgcatcatggtagatcaaaccaatattctctcatacaccatgataagaaaattattttgcttcccatgtcccttgaggctattgtgcgtgatgatgttgctaaagctaccaaagctaaaactgagaacaacaagaatattaaagctgttggtaataacaaagatgggataaaattgaaaggacattgcttgcttgcgacaacaactgatgttaatgaattatttgcttccacttctgttgcctacgctagtatg

SEQ ID NO: 11261 - DNA, 422 bp, Zea mays
  unsure (1)..(422): unsure at all n locations
agcttcttcacgcgtcagaagaaaaagtgcttgacgactctcctgtgactgtgttgcaggtggttacacgttttatggcaatgaaggcaaagtataacttctcgaataattgctataacgatataatcaatctgaatattgatctcatcccatcgaaccataaagatgccaaaaagaactcataccagtctaaaaagattgtgtccggtcttgggatgaagtataagaaagatgatgtgtgcgaagataatcgcatgttgttctggaaggaatatgaagcgagcacccattgtcagaaatgcggtaaatcaagatatgcggaggtactaanagaggatggagctacttttgctacaaaagtggcagttaaacaacttcgatatatgcccatcacttcaaggcttaaacgtctgtttttaccc

SEQ ID NO: 11262 - DNA, 443 bp, Zea mays
  unsure (1)..(443): unsure at all n locations
taagagaacagattctgtacagaattatgagactgaaatctgctattatcaaactgcaataactntctgatctgatatccgattgaggtgttcttcgcggccacggaaagatctacaaattatctacgactcatagatagactctttatttttttgagaccactaagaccacggaaaactggaatgaacagaaactattgaatctgccattctgcagaaactaatttcgagattaaaatctaatctcccatccaatctaaccaaaaaaactaattgcagggcctaaaactcatccaaaacaagcgaaaacattcatcaagtggataaaagagagagagaggaaaggaaatccaaccaattcttggagaggaacgacgattatgggcgacggtatgccctcatctcccctctcttctcttctntttttcttcctctcttctctt

SEQ ID NO: 11263 - DNA, 348 bp, Zea mays
aaatcgtgaatgcgaatataggccgaaaaatgatcgccggacgggaacatttgccgaatcacaaaaaacgaacgattgctggagctaggagaatacgcaggaatgcaaaaatcctgagcccgccacaaagccggagttttccaaagtgccagagctcctgtaacaacttccaagaagaggagaatggctagtgtgctggacgctgtcctggagtggacaagggcatgaactcctgcttttgcaaaggagactgccgaagctgctacagttcgcgttgaagctgaagctaggccctcagtgcccattgaaacagagctctgtgaaactgggcagagcattgaacaacga

SEQ ID NO: 11264 - DNA, 360 bp, Zea mays
cgaaatccagaccttcgacttgtgaataatccttggccacaagtcaggctttggttcttgtcacccaccatgctcgtcttgcttggtgcggaaaacccacttggttcctacaacattgtgattaggacgtggaaccaaatgtcatacctcattcctagtgaaggtgttgagctcctcttgcattgtcaccacccaatccgaatcttgaagtgcttcctcttccctgtgtggctcaatagaggaaacataagagtaatgctcacaaaaatgtgcaacacgagatctagtggttaccccttatggatgtcgccgaggatggtgtccaccgcgtgatctcgttggattgcttgtgggactctt

SEQ ID NO: 11265 - DNA, 380 bp, Zea mays
agcttgtcataagagttatgcagacattttgctaatgccgttatatttcctggaaagagactatgtctacctgaaagtctcaccaatgaagggagtatcgcgttttggggttaaagggaagcttgcaccaccatatattggtccttttcttattctggaaagatatggaccagtggcataccgactccaactacccgaaacattgtttgctgtgcataatgtgttccacgtgtcacaattgaaaaagtgtcttcagattcccgatcgaaccgttgaagtaacagatgttgtccttgagcccgacttgacatattctgagcattctattcaagtcttggatcaaaaagacagggttaccctgagaataactctcaagttta

SEQ ID NO: 11266 - DNA, 380 bp, Zea mays
  unsure (1)..(380): unsure at all n locations
tgtggggactgatatgatggacctttcaagaaagctcaaggggatacactcatgtattgggggcgatcgacaaattcactaaatggatagagttcaagcccattgcttctttaacctctgctaaggctgtggaattcatacaagacataatattcagattcgggataccaaacagcatcataactgacttangatccaatttcacaagttcagaattcttcgacttctgcgagcaaaagagcatttagatcaagtatgcatctgtagcacatccaagagccaacacgcaggttgagcgagccaacgggatgatattggaggcactcanganaaaggtcttcgataagaatgaaaagttcgcaggaaagtggataagggaa

SEQ ID NO: 11267 - DNA, 378 bp, Zea mays
  unsure (1)..(378): unsure at all n locations
agcttctaaagggagaacatgtgatatgtctaaccaatgttcatttcgaaaaagatagaccttgtgcagcttgtcaagcagggaaacaggtgggaggagcgcatcacagcaaaaatgtgatgaccacttcaagacccctggagctgctgcatatggacctcttcggacccgtcgcctatctgagcataggaggaagtaagtatggtttagttattgttgatgacttttcccgcttcacttgggtgttctttntgcaggaaaagtctgaaacccaagggattctcaaacgcttcctcaagagagctcacaatgagtttgagctcaaagtgaagaagataaggagcgacaacggatccgagttcaagaaccttcaagtgg

SEQ ID NO: 11268 - DNA, 408 bp, Zea mays
tggtgtttggatgacaactcaattaaaggactaacaagtgtgctaagtgttgaacaggtgcttaatgtaaagctaacagggttcaacacaagtgaacaagtgtgatggtccaaggactagatgatggatagataatggacatcacaagtatgacggacattgcaaaagtgatactcgggtgcgtagctcgaaaacaactgatcaagccaaggatggaggcaagaagaacttctaggtaccaagtgcacgggagaaggtcaaagaggctgaggaacccaaagccaatggtgaagaagaagacttgcaaagtcaaggatgatcgagttgagaagagctatggcacatcaaggatcactacataaggacatgacttactaccaatgaggtaacaactatagttatgtggtg

SEQ ID NO: 11269 - DNA, 324 bp, Zea mays
  unsure (1)..(324): unsure at all n locations
tcaaaattttattaacaggtactaagtataagtaaataccaaaccttaataaaaaataatcgaacaaaataaataatcccatgccaatgcatatgacaaattgaatttacgttccataaattaatcatgtgaaggtccgagctgttcatgaccgtgagcaccgctagtataccagttttacactctgcaaaggttgcgcatctttacccacaagtcatgttacccatctgccaagggatcgcgacttcccatacacctctaccgaagaggcgaggcanggtaacactacgaggcccttacaaagttccactagcttcagaaaac

SEQ ID NO: 11270 - DNA, 452 bp, Zea mays
  unsure (1)..(452): unsure at all n locations
ngaattgtctgtgaatgtaggtgaactacaagaccggtttgagccattgttgttttgacagtggatgcacacaacatatgacaggcaacccacggatgttcacctcactagatgagaatgttgatggtcaagataaaatcacatttggagacaattcaaaaggaaaagtgcaaggacttggcaaggtggcaatctcaaatgatttatcaatatcaaatgttcttttagttgcacccttgagcttcaatttattatcagtgggacaactctgtgatcttggacttcaatgcttattcactccatcagaggttattgtaacaaaaatggaggatgaatcaatggtattcaagggatttagatacaacaacctctacttagtggatttcacttcaaaagatgcagacttaagaacttgcctcttcaccaaagcttctcttggatggctttggcat

SEQ ID NO: 11271 - DNA, 427 bp, Zea mays
agcttctaaaggtagattttgtgatatgtctaactaatgttacttgcaaaaaagatagaccgtgtgcagcttgtcaagcagggaaacaggtgggaagctctcatcatgcaaaaaatgtgatgacaacatcaagacccctggagttacttcatatggacctcttcagacccgtccgctatctaagcataggagaaagtaagtatggtcttgttatagttgatgatttttcccgcttcacttgggtattctttttgcaggataaatctgaaacccaagggaccctcaagcgcttcctaaagagagctcacaacgagtttgagctcaaggtgaagaagataaggagcgacaatgggtccgagttcaagaaccttcaagtggaggagtatcttgaggaggaaggaatcaagcacgagttctccgctcccta

SEQ ID NO: 11272 - DNA, 457 bp, Zea mays
tgccaagccctcggacccaaccggacttcattggatgctctatatcgacctcaccggacttcggtcttccgccgccgcgcgtggaccgagctatccagtgagtctccgcccgattcctttcgctcatagcttctctggcatcccgtggacctccctgacctagttgattgaactacctcgccgtgaccaggccggtctcctcgccgccgacgagcatccccgcctgcgcgcgtggaccgaccgactccggccatctccgacggtgttccgcacaccgttgtgatccccgcgacctccccttcatcctcgaccacttcaccggaacagtctcgccgccggtaagcccctccgcccttttcttcgccgcggctactgtttgaggtagaagaaggacctcgggttaggttctgtagaacccgaggggttttctgtaatgtcagcgactcatgtgaatagt

SEQ ID NO: 11273 - DNA, 412 bp, Zea mays
  unsure (1)..(412): unsure at all n locations
agcttcttcaccatgtgattacagctatcttgagaagggtgggcaatgcattcccttttattgtgtcagctctttttacctctcatttcttcttgactttgaatgaatatcattgtcctgcaaatttagctcaaaagaagatttgcttgttgacaaacaacaagcattagcacatggtaatatagtattaatttgaacacatgtgcacgagtgaggttgttgggattttaaattttctatcacaacctcatgagcaatgtttaatatgatatgatcatctctaagattttcatgagagcataggagcatatcatatttttcttgaaaagctagattnntcaattttagctcttctacttggtcctttagcaaagtattcttatttactaattgagcgatacaacgagaagcg

SEQ ID NO: 11274 - DNA, 467 bp, Zea mays
tatgaagattcttcattccaacatgggctagtcggcggtgccagagccaacccatgttagtcttagcaattaagcaagtgtcgagttcagctctatcaaaatctaccaagtatagctgaccctctaacactcccttaaatgctattgaatcatcacttcttctaaagacagtgacacctacatcagtgaatagacagttgtagcccatttgacataattgtgaaacagaaagcaaattgtaatctaaagaatctacaagaaaaacattggaaatagaatggtcaggagatatagcaattttaccaagacctttgaccaaaccttgatttccatctccgaatgtgatagctcgttgggaatcttgatttttctcataggaggagaacatccttttctcccctgtcatatggtttgtgcacccgctgtcgagtatccaacttggagccccggatgcataaacctacaaa

SEQ ID NO: 11275 - DNA, 385 bp, Zea mays
agcttgaagccacggttattacacataatccaagtaaagacgaactgactccagcccagctacgggtgcctaggttataccgaaacccaaaccttctacttgggagtattcttaggccacaaggcgagctttggtccttgtcaccacaccatgctaatcttgcttgttgcggaaaacccacttggctcctacaatgtgttgattaagacgtggaactaaacgccatacctcatttcgagagaagtagttgagcttctcttgcatcggcaccacccaatccaaaacttggagagctttctctaccctgtgaggctcaatagacgaaacaaatgatgaatgctcacgcaaatgtgcaacacgagatctagtaactacccccttatga

SEQ ID NO: 11276 - DNA, 462 bp, Zea mays
actcagcttaacatgttactcctgcggtgtgcaatgatttgttgtttattaccacgacacggtcatgaaaatatggctaccactaatgttgatcctttatgctagaatacgaaactgtccttaacgcattcatacttatataaaaaagtactttttaagacaaatcggtggatgtacatcttatgctccaatactaactaacataactgatattagtagtgcaaattctataagtctgactcaaacctgctccagaagtacaactctatagacaccggatggagtatacattaacagtcacgcctcacgttccagggtagcatcatgtgaaaactgaccttaacagaagctagaccagcagggctatccacaagcatatgtggacattcctatttgagctgactgcgacatgctgaaacatacgagacctagggccttcagaacacatactcatgagatatg

SEQ ID NO: 11277 - DNA, 420 bp, Zea mays
agcttttcttcacaataaggggactggtctcttgtgtgttgattgctggtaaatggcaacgtcttcgtgacttcaatctgttgtatttttggaatctgatttctctgttgtgtgtcatctaaatttcttgctggtaaatggtaaggttttgatgacattcttttttcatattcaccatattatacctaattttacctataacccttatctgacacatgttttacatatgagatgatgacacaaagtaccacaaccaacatgaacttaacctactgcgtgtaggctggtactatctatattaacgatcgaaatatcttttcttacaataccattcttaatatcttgaatgaaatatactcatcggcctttcgatatatgtaactatacaatgtaatatatattactgccatctcaaataac

SEQ ID NO: 11278 - DNA, 456 bp, Zea mays
  unsure (1)..(456): unsure at all n locations
ttcttcggcgccatagcgagggtctatagctttcgaatgtgttcaaaaaaactcgaagtggaagtgagttcaccggaggtgggcgccaatgttggggacttgttctcaaatgctatgagttaagaacaaggcaacacagaaaatgttaaacgataaagtccttcgtccttcgaagcattatttcccttaagatataacgatctccggacgaaggtcacgaaggacgaaccttcttcatcacagtatacaaaagacgaagcatataaaacataaaagataacatgaatattcatataatattattcatttaactctattatattatcatagaaaaatagaaacaatattgtattataaatgtaccttcggcttggaaggagatgaaagtacaagtgtgactcaaaaagcgaatgccaagtcagcgtgaacagtacggnggtactgttcacctattta

SEQ ID NO: 11279 - DNA, 420 bp, Zea mays
  unsure (1)..(420): unsure at all n locations
agcttgtggcgctctcgggtgtcttgtcttcaccgaagtaccaagtctcccacttggaagcctcggggccgaacccttcgggcgttgtatcgtcgcagagactgctgatatcgtgccgagtgtagtaaggctacgtcccaagcctcttccagctggtccaatgaatcttctcggttggtctggttgttttggttgtcgtatgcctttgtcctcggggaaccgtattccaagtccgtgggtaagatggccttggccccatagactacgaaaaacggcgagaaacccatggcccggctcggcgtcgtcctcagactccaaaccaccgagggtagctcttttatccaccgcttgccgaacttgttgaggtcattgtagatcctcggttntagtccctgcaaaatcatgccattggcgcgctcc

SEQ ID NO: 11280 - DNA, 331 bp, Zea mays
tatgaccgacagttcactaggcagctgtctgacattatttagtccgccaacctgtagcgtattactgcagcgggtatgccgacaaacaatatgacagaacatgacgggattctggaagagtccactactctaaatggtctccctataaccgacatatccgtctacattgtccgcttcaccccagaatacacccccacacacaccaaagaaaatatggaatatccacctctcagtttactgatagggatatatgggtcaaatggaagcaaatggaggccgtcagacaatataaaataaggcgcggcctatagaagacagaaagtccgaatca

SEQ ID NO: 11281 - DNA, 421 bp, Zea mays
  unsure (1)..(421): unsure at all n locations
agcttaaaaactaagacttgtcaagtttgacccgagttaagctttttcactcgctttgttggcggttatctcaactaggttagacaagtcctagatgcaatacaaggaatttaaatatgcaatgcaagtgacaacaccatttgacatttcacataaaatttctgagatcaagaatatttagttcattcctcaacatgcaaaagcgggtcttatcaagtggcttagtgaaaatatccgctaattgatcttccgacctcactccttctaaaatgatatctcctttagcaacatgatctctaaggaagtgatgacggatatcaatgtgcttggtgcgagagtgttgtacaggattattagcaattntaacagcactctcattatcacacaacaaaggtaccttttctagaactacgccatagtc

SEQ ID NO: 11282 - DNA, 460 bp, Zea mays
  unsure (1)..(460): unsure at all n locations
tagaagcactttcgtttcttagtccctccgacatgatctttcctcacgcggntaagcgttagaacgaggattatgctccgataccaattgaaagttgcctagaggggggggtgaataggcaagttaaaactttttcaacaaaaactagaagcaaactgggtaaaactgaattgatctcgaaattcacccagttaactttggaaatgagatattctaaatgatccacagggttcaaagtagtagatcagagaagggcacttctcaaaatccacacaccaaaaagatataaacaatcttccacggaatggtgagagaacgaagaacactaacaaacacaatgagcaagaacacaagatacacaagatttatcccgaggttcggtcacaccacaaaaggtgccctacttcctcgttgaggcgcccacaaagagccgggtctctttcaaccctaatcctccctt

SEQ ID NO: 11283 - DNA, 387 bp, Zea mays
agcttcttctcgtcatcgatgagcgactttctacgcgagtgcctcctgctcatggaggttgctcggggtttcaattaaaaaacatggattcatgcttggcgttggtttatgaaaatgactcacaagtttgatccatggaaaaaaatattacaaagaataaatctcacgcatgccaaaaagggaatttaagtataaaacattattcaaacaaaagaaattgtatgcaaaactcttctttaaataatattacctccatccaaaaatataatttaagaatctcggtgatacttatctactactacgcattgtgcaagggtagcaagtgagcttggtgagagatgtagtagatgtgtttcctgtcatagatgcagacataaacacacatgt

SEQ ID NO: 11284 - DNA, 439 bp, Zea mays
tgctctcggtcagacatcttcctgatgttctccttgaagtcctcgcgctcctgctcaagctcggcccgctttgaggcgaattggcaggacaccgccataatgcgcttctccagttgggtgcaccaatcgccaaagcgctggtgctcggtctcaagcgcctcccgctcccgccggatagccaccttggtttcctaaagggcctgatgagcgcgggacaacacctgagggagaggagtcagcgttgcttcaggttcgatgctatgccggagcggtcgcccaagaataaccttctggatccttcgaagttggcggcgggatagagctggacgtgccctccacgcctaccgctgatggtgtattcgacgatatcgccgtcgttggatctgcaatatgctgtggcggcattgctacctcccgacccccagctggaactggggag

SEQ ID NO: 11285 - DNA, 197 bp, Zea mays
aaaggaacaaaacaaaaaaaaatatccaataaacaaaacaagaaaaagaacaaaaaaaaaaaaaaaacacagaaaaaaaaaaaaaaagaaaaaaagaaaaaaaaaaaaaaaaaaaaaaacaaaaaaaaaaaacaaaaaaaaaaaacaaaagaaaacagacacaaaaaaaaaaaaaaaaaaaaaaaaaaaaaaaaaaa

SEQ ID NO: 11286 - DNA, 307 bp, Zea mays
  unsure (1)..(307): unsure at all n locations
agcttgacaacaaagagatggcgctctttatttagagtttttgccaaancctcaagcaaaggagggggaaagattaccaaccccgctccaaaagggtgtgctacaagtgtggtaagccccgatcattttattgcttaatgtcctatgtctaatgatagtgacaggggccacgaccagaggggaaagaaagggaagaagaggttcctacagaagaaagggggccatgcccacttttgtcgggaatgggactccgacgagggctccaccaacttctcctccgacaggacgcctcaacatcgccgcaaca

SEQ ID NO: 11287 - DNA, 457 bp, Zea mays
tctcctggacaagtgttgcacttaccgctgagtgcgaatctgtctttataacaacagaggagcccctggcgtcggtggagttagtgttgttaggtctatcaaatattgcttcagctcttcgaaggctttctgttgaactggtccccattgaaaaacttccgctgacttcagcacttcgaaaaatgggaaatttctctctgctgatctagatataaatctgttgagagatgtcagtcttcctgtcaatctttgagcccccttttttgtacttggtggttccattcgaaggatagcttcgattttatttggattagcctcaatcccttttgttgaaactagacaaccaagaaatttccctttcttcactccgaagacacatttttctggattcaactttaaaccggcctgtctaaaattagcgaaggtctcctgcagatcagcaatgtgattatcttgc

SEQ ID NO: 11288 - DNA, 387 bp, Zea mays
agctttacgggaatagtcataaaatattctcagaactgtatttgaatcacatatatacccctgaggtaccaaaaatccccatttgaaccctggaaaaccctaaaactaaaaccttggggcctatgtgcaaaaactgtgtccatttggaccaaaaggtaaaaattaccatgataaagcatataaagtcacatgggtcacatttggaaagatttacaaaccaaaccctcaagtttggactcatttgcaaaaagagccctacttgtgaatttatgctaagtctgaatttcaaatgatgagctaactttggacctttgcacttttaaaatataaggtttttggcctgggcaccacctcaacttatagacctataatggatacaagttgcta

SEQ ID NO: 11289 - DNA, 439 bp, Zea mays
  unsure (1)..(439): unsure at all n locations
tctgtcctacctcgcgctaaagcagccatccctaatatttgcgttcctcacgtctctgaggtaataggaagtgttagatcgtgggtagcacgcgttatccaccgcgttgcttggatatctttctattgattatgggttcgccttgggagggtgcattgttccttcccatgcattctgttcaccgaaagaggaagagtgagctatctcatgctccttgttgacaacggagattacgacgagcctctntttctgtggggcgggtcctcgggtcccttgctcattacggaggatccgtctgggggcacatactatattttctctattccttcccagttcccacacatcccgttcgccatgaggggaaccgcgagtcataccatgctcccctcggtagttgagatcatggcccttaaccgtccctgatggactgatccaaatg

SEQ ID NO: 11290 - DNA, 417 bp, Zea mays
agcttgggaaaccaattattagtctatttaacaacgacactaaatgtaactggtcttcaaaatgtaatgaaacctttgagcagctaaaagtattattgaccactgctccggtattggctcaaccggacattgaaaagccctttgatgtgtattatgacgcatcaagcagtggtctcggctgtgttctaatgcaagaagaccgagtaatagcttatgcttaaaggcaattgcgccggcatgtggaacattatccaactcatgacctggagttagctgctgtggttcatgccctgaaaatatggcgtcattattttttgggaaatatctgtcacatttatacagatcataaaagtttgaagtacatctttacccagtcagagcttaatatgagacaaacgagatggctcgagttgataa

SEQ ID NO: 11291 - DNA, 464 bp, Zea mays
  unsure (1)..(464): unsure at all n locations
tctgttcagattctccgaagtagcccagattctttattatatgcacgtcgacttcagacacagtagacttctcaaaatcaaggtggctgggttttgatgggatcaaaatactataatcctcctcttcttcatcagcattttcttcctcaatatcagcttgttcagcttcggcagcatgtgcaccttcgtcaatggctccctctgttacaaccaagcccgattgtctcatgacttcngaaatcggagctgacttggttgcctcagtctcttctccttcacgagtcaccctcgcagtcgagcgtactctggccatctgatgaatcttttgcggtttttacgaagctgatgtttttacagcttttttacgaagctctctcttttgacgaagctaatccaaaatgatggtttgctcgagaatgcagtgaacaagcttccgctatggttaaacttttcaacagcacaac

SEQ ID NO: 11292 - DNA, 424 bp, Zea mays
agctttgcaggagaatgatatgatatgtatccttgggatgcttgagaaagttaattcaattcttatcaactcaagctatcaatcttcaatgatctatatccatgattaacccaaggttatttttcaaattactatgtcttaaactcatatcatctcgagaaagatattgatgttgtacgaaataaagaattattctacacgaaaaatcaaggcctacaacatggaggaaagtcaaaggatggtaacatctatgcttttaagtgcaagcattttaaaattatcatttcccatgtgtcctgtgtagtcacatagaaaaatgaagcacttcaaatatctttaaattcatattaccattctttgaaaaatttcttctcatatggtagattgcatactcatcatttccatactatggcaatctacatgc

SEQ ID NO: 11293 - DNA, 415 bp, Zea mays
  unsure (1)..(415): unsure at all n locations
gaggtaaatttggcggaaatcgtgcttaatcaatgaatgctggggtaactntacacctactcgtctgtttatatagtgctgcaggtaagaaggcgaagcgccagagtttttacaccaggcgcacacccgcttgtgctcgctgcgcagtggaccgcagggacaaacagtaaactctgcaaggtgggaccgctacgtgctgggaaattaaatcgtttctcggcaacgagctcagggaaggtgttttttggaccttcggctccccgaagcttaagagacttttttcacggatcaagctcgttacgaaaaacgatctagcaccgcgaaaggggctactgttgggtctatgcttcgtcgccgaaggtcttcaagggagaagctcanaagatacaaaggttgacacagcgccgaagctgtg

SEQ ID NO: 11294 - DNA, 423 bp, Zea mays
  unsure (1)..(423): unsure at all n locations
agctntaagagactatatctcgtntgtattgcttaccccacgggtagctgtagtaggacggagccgcaccagatctatcacccgctgtcgaacaactttgttatttctgtccaccttgaagttggccaagaattttgcttttgcttcctagatcagctgcttcttgtgctcctcgaactggagctgtttgtcaaccgacaaggtttcccaagtcggctctatgatattgccggcggaaatgtcatagctatcttttgaaccgaccattgagggctgatctgataggtctataagcgatgtccccagcagagtcgccaaaaagtgtgttggcgccaatctgggcgtcaatcactgtgttgagaatccgcgatagtgctctctgtggaggcacggacagaccgcggccaggggccggacggtaca

SEQ ID NO: 11295 - DNA, 463 bp, Zea mays
  unsure (1)..(463): unsure at all n locations
aactcagctttccaaagcngaccgagtccagatggctcttcttgtcttctaccgtggcaaaagggttgggcggccgccgactctctgtgcacgggcaaacgacgaccagctaactcccgcgaagtattgaaggtgtgccgaaaggtgtaaccgaaacctggggggatttataagctcgggcgcgggccactgcgcgggtttggcttcggcgcggcgcggggcatgcgaaggcgcgcgcgaacgtgctctggcgcgggcagacggcgtcgaacacgtggcagtgagtttcttccaatgttcaaacgcttccagagatcgcaaacgtgcgaatctcgccatgaatccggcgcagacctcctcctggcacctagggctatctcacatgtgtgagttccaagggatgatacgccctagatagggagatagaccggcgccaaatctggcttgtctccctgcccgctca

SEQ ID NO: 11296 - DNA, 409 bp, Zea mays
  unsure (1)..(409): unsure at all n locations
agcttcatcggccggtacctggctgattcgtccactggcgggaccgacgccggagtcgggttgccgaggccatgggccgggctgatgtcctcgggggacagctggctgaggctacggagcggccggtcgagccgtctgctcgggccgggttcccggaggagaccctancggcgatggcccatgcgtggtgccgacaggttccttcgaggtggagatcctncgaccgtgttgccgtccgaggccgggtcggattccgccgaacgtggagtcgacgccgagggtgctgctgctcccccactgatgtctgatcctgcaggaacagcttatctgtagtgtgcgtatgttttttggcggncgctgaggcccaaacatatcgtcatcatgttgtacagctgcgtctcttttcccc

SEQ ID NO: 11297 - DNA, 459 bp, Zea mays
tgtgaagattcttcattccaacatgggctagtcggcgatgtcagagccaacccatattagtcttagcaattaaataagtgttgagttcagctgtgttttcattaaaatcaactaaatatagctgaccctctaacactcccttaaatgctattgaattgtcacttcttctaaagacagtaacaccaaaatctgtaaaaagacagttgtaacccattttgcataattgagaaacggaaagcaaattatagtctaaagaatctacaagaaaaacatttgaaatggaatggtcaggtgatatagcaattttaccaagtcctttgaccaaaccttgatttccatccccgaatgtgatagctcttcggggatcttcgtttttctcataggaggagaacattcttttctcccctgtcatgtggtttgtgcatccgctatcaattatccaacttgagcccccagatg

SEQ ID NO: 11298 - DNA, 350 bp, Zea mays
  unsure (1)..(350): unsure at all n locations
agctntggagactcttatgcgaggtctttcctctatgagctcgcagctcacagagtcatgaattcacaaagatcttgacgttgacccacaacgcaagagagactgacgagaatcaagaatgaagcccaacaatttacagtatctcaacttcacaccgagttttagtcaagatttggaatgattgagtctccctgtgtccgagagattggagaggagtaaatgctcttatgttgcttttgtctcaagttacgcttgaagtaaaatgtgtgctatgttgtgggtaccggaagtacgagagggtatatatatatgaggccccagatatagctatttacgtagatttgcatgac

SEQ ID NO: 11299 - DNA, 443 bp, Zea mays
ctaagcttgtgttagtgaagaatttgtttgttcttttattatttgcgcttggattgctttctttctcattctttcttgcgatcaaactcacttgtaattaatgcaagatacaccaatcgtgtggtggtccttgtgggaactttgtgttccaattgattgagaagaaaagctcactcggtccaagggaccgtttgagagaggaaaagggttgaaagagacccggtctttgtgaccacctcaacggggagtaggtttgtaaaaaccgaacctcggtaaaacaaatccgcgtgtcacactctttattcgcttgcgatttgttttgcactctctctctcggactcatttatatttctaacgctaacccggcttgtagttgtgatataactttgtaatttcagtttcgacctattcaccccccctctatgcaactttcaattggtatc

SEQ ID NO: 11300 - DNA, 422 bp, Zea mays
agctctggctgtcttatgctgttagcaaatctaaatctaattcctatatttaacttggtcaaaaagtctaagtgccatgtgtgtgttgaatcaaaacaacctcgcaagcctcacaaggctgctgaggagaggaatttggcacctctagaacttgttcattctaatctgtgcgagatgaatggaattttgacaaaaggtggtaaaagatactttctcacttttgtagatgactccaccagattttgctatgtgtatctattaaaaacaaaagatgaagcgttcaattattttaagacctataaagctgaagttgagaaccaacttgagaggaaaataaaacggttaaggtctgatcgaggtggagaatatttctctaatgtgttcgatgagttctgcgtggaacatggtattattcatgagag

SEQ ID NO: 11301 - DNA, 444 bp, Zea mays
  unsure (1)..(444): unsure at all n locations
ctttgtcttatggcttattaacgagtaaacaagttatactgtgcaatacttatatatatatatatacaaactccaatggggaaccttgctttaatttctgttacacacatataaatttacagacttgaaaaatagattaaggaactattgggcgcactactattaatgtctatttcatcaatctgattgtcactaggtggttatgatacttgaaacagattgtgctttctatttttttattaaaagagactgcactatctgatatttaagttaaatctcatcattatgttgtgttttttggcacttgtattagtgggcacggcaagcagtagcagccagatgttgtgtagtgttctgtttcaaaatgatcttgacatctttgtgttctaaattatgtccatgaaacttgccaccgtgaatcangtggacttaaatagcctgact

SEQ ID NO: 11302 - DNA, 402 bp, Zea mays
agcttgagccaagctcacggtctcaccatgaagctatttgggtgcttgaatcgaacggagggtggctggagaggggttggccaccgcggtggtgctcgggcggcactggcggttcgcggggaggtcgccggaggcaacggctggctcgggcaaatccggcgaagtacggacgaggcaacgggggaagcaaccgagcgctggggcgggttttatagccttggcgcgggcgtggtcacggggggggccgcgggcgcgccggggttcgcgcaccggcgtgcactgagcgcgcccccgggtgccagcatgcgtcgaacacgtggatggttgcgtctgccaatgttcaacggccggtttgagcgccaaggcgtgcatatctcggcaaggtcactgtgtacggtcact

SEQ ID NO: 11303 - DNA, 457 bp, Zea mays
  unsure (1)..(457): unsure at all n locations
nggcttcgctggtattcagcctatccactaaggagagctgtattttgtttttttcaagagcttcattccttagtgtaataacctctgattgaagatttccaagagctaactgttggggacttgttctcaaatgctatgaattaagaacaaggcaacacaaaaatagattaatggttaatgcccttcgtccttcgaagcattatttctctaaggatataatgatctacaggcgaaggttatgaaggactcaccttcataatcacaacatatatcaatggaagacgaagcatatgaaacatgggaaacaacatggataatcatatgacatcataatatatcttntattatataatcatgaatgaataagaataacataggattacatttgtaccttcggcttgatagaaggcaaaagtacaagcgtgacgcacaagcgagtacaagtcagcgtgaacag

SEQ ID NO: 11304 - DNA, 438 bp, Zea mays
agcttgtcagatcaaccaggctagtatcctcatcaagctagtatctttgcttcaacccaccatgagagtttgtagcacataagtgcatgtctgaccgaatgaatctatatcctttggctcatgccagaattagtggcagtggccacttcaatttccatcaaaacaacctttccaaccataaatttttccttgcatacattgtctaccccgatgcaacgttcatgtccactccctgcaacttctcccacttggaggggccgaccgttcttggtgacctgcttgggtaaagtggctccatgtcctattaatcatagcccatctaaacaatcacaacctcgcaacatattaacagaaatgaacatattacacgatgtcttcagtcttcaacaactcactttagaggagagtcaccataatatacaggttaaaccatattag

SEQ ID NO: 11305 - DNA, 450 bp, Zea mays
  unsure (1)..(450): unsure at all n locations
ntggttgtcttatgcgggtagcannatataaattaatttctaatattaacttggtcaaaaagtctaagtgccatgtgtgtgttgaatcaaaacaaccccgcaagcctcacaaggctgctgaagcgaggagtttggcacctctagaacttgttcattctgatctgtgcgagatgaatggaattttgaccaaaggtggtaaaagatactttctcacttttatagatgactccactagattntgctatgtgtatctcttaaaaacaaaagatgaagcgttcaattattttaaggcctacaaagctgaagtagagaaccaacttgagaggaaaataaaatgtttaaggtccgaccgaggtggagaatatttctctaatgtgttcgatgagttctgcgtggaacatggtattattcatgagaggacaccgccattctcaccacaatcgaatggga

SEQ ID NO: 11306 - DNA, 379 bp, Zea mays
cctgcagcatgcagcttataaactcctctgcttatatggatgacctttttatgtatataaagccctctgaaagcaaactgaactcatcccaagtgatttgatgactagtcggactgaatgaccactaaattttccccgcacgtactggcataggcacgcaattgttgtgctacgaataagggctttttgaatcttcgtgcaccggagaagcccgaacttttgttcaataacacagattcatttatccgctttcaaaagatctttaacttttgacaaataatggagggtgtgtcttggagaaattcatatatgatgttttacagcgcccttgcggatatgcccgcctggcttgttgctgcatctgttgccctgcatttcc

SEQ ID NO: 11307 - DNA, 385 bp, Zea mays
actcaagctttgcccgatgcccttcttaggtaatcagctagtacaaattctcactcttcccattgagccgcgaaggcaagatgtggccgcttttggcaaggaagttgagtctgaggctgtgaaaattgttggtaaatactcaacaaagatagagttaacaaaaagttgggatatacggtgttctaacgtcaggttgaaccaagtctttgagttgaatgttctacggtacggtccttacctggaggggggttctgccgatgccggggatgaccgaggaaagaaagtgaagacccggtcagacgaatgctccttgaaggggaaggtggtaattgcggtgactcacaagagtagaattgaggtcaaaggtacgaacaggacattggtg

SEQ ID NO: 11308 - DNA, 402 bp, Zea mays
agctttaccaaatggacgtgaaaagtgtcttcctcaatggaccaatcaacgaggaggtctatgttgagcaacctcccggctttgaagatagtgagtaccctaaccatgtttacaaactctctaaagcgctttatgggctcaagcaagccccaaaagcatggtatgaatgcctaagagaatttctaatcactaatggcttcaaagtcggaaaagccgatcctactttatttactaaaactcttgacaatgatttgtttgtatgccaaatttatgttgatgatattatatttgggtctactaacgaatctacatgtgaagaatttagtatgatcatgacacagacattccagatgtctatgatgggggagtcgaagtacttcttgggattcaagtgaacaactc

SEQ ID NO: 11309 - DNA, 456 bp, Zea mays
tatcagcagtataagcacacaagagagaaggctgcctcatcagatcattcgaagcctatgctcttgtgtgaagacatagcagatcaaaaggtactgctgagatcttagctatctggtgaacaggaaaagactctgctaaggttcttattcaacaacaaagatgtcttcgcttggacagctaatgatctatgtggtgtcaatagagacgttattgagcattcactcaatgtggacccatccttcagaccaagaaagcagaggcttcggaaaatgtctaatgataaagctgaaggtgcacgaaataaagtaaagagacatctcagtgccggtgttatcagagaagtaacatatccagagtggttggctaacaccgttatggtgatgaaagctaatgggaaatggagaatgtgcattgacttcacagacctcaacaaggcatgcccgaaggatgagttc

SEQ ID NO: 11310 - DNA, 402 bp, Zea mays
  unsure (1)..(402): unsure at all n locations
agcttgaagccatggtaagtagcataggctagtaatatgcgaattgactcaagcctagctacgggtgcataagtttcatcgaaatccaaaccttcgacttgtgaatatctcttggccacaagtcgggctttgttccttgtcaccacaccatgctcatcttgcttggtgtgaaagacccacttggttcctacaacattttggttaggacgtggaactaaatgtcatacctcattcctcgtgaagttgttgagttcctcttgcattgccaacacccaatctgaatcccttaatgcgtcttccaccctgtatggctcaatagaagacacaaaagagtaatgctcacaacaatgtgcgacacgagatcgagtggttacccncttatgaatatcgccgacgatggag

SEQ ID NO: 11311 - DNA, 346 bp, Zea mays
gccaccttgaaatccttaagggtgaatgcttgagatgtttataacatgctctcataagtgcataaattgtcatgagcatcacacttatactatgacacaatgcacttcacattctctatgatatagacatgatctcactaacctaattatgtgcacttggcatttaagaccaaaaatttgtattcctctcaaagcacattgtcggggaccataattaggggtaccctcaaggctcctaattctcagctggtaacccccatcagcataaagctgcaaaggcctgatgggtgcgattaagtcagggatcagtccattcgagggactcgatcacgcctcgcccgagcct

SEQ ID NO: 11312 - DNA, 234 bp, Zea mays
cgccatgcgtggagctcggacaagattttatctctttgttgtgtctcgcatcgaatgttatagctcttgtcaggcgtacaaccgtccaaacttgcatgccattgaatgtggggtggcccccatcatataaacccctcactatgatctctccacatccaacccttcctacctttcatctccttttttacaatctccttccccccctctcaccaccccccctccccctcacttccc

SEQ ID NO: 11313 - DNA, 468 bp, Zea mays
  unsure (1)..(468): unsure at all n locations
gctntcttggcacttctcatcccactagaattctcttgctttctccagcagtgaggtcataggcttagcaatcttagaaaatccttcaataaatctccgataatagcctgcaagccccaagaaactccggatttcagtaactgtagtgggcactctccactccattatctccttcactttagcaggatctactgctattcctccattagaaataatatgaccaaggaatggcaccttgtcaatccaaaactcgcatttgctaaactcggcgtagagttggttatctcgtagcttctatagcaccaatctcagatgttcctcatgatcactatcactcttgggataaataaaaatatcgtcgatgaaaaccacgacgaatctgcccagatcatgaacaccttattcatcaaattcataaaataagttggtgcattaattaatccaaatgacataacagtgaactcatat

SEQ ID NO: 11314 - DNA, 388 bp, Zea mays
agcttctaaagggagatctcttgatatgtttaactaacgtaactttcgaaaaagatagaccttgtgcagcttgtcaagcacgtaaacaggtgggaagctctcatcatgccaaaaatgtgatgacaacatcaagacccctggaattacttcacatggacctcttcggacccgtcgcctatctaagtataggagaaagtaagtatggtcttgttatagttgatgattattcccgcttcacttgggtattcttttttgcaggataaatctgaaacccaagggaccctcaagcgcttcctaaggagagcccaaaacgagtctgagctcatagtgaagaagataaggagcgacaatgggtccaagttcaagaaccttcaagtggaggagtatc

SEQ ID NO: 11315 - DNA, 467 bp, Zea mays
actcagcttctctgtcgcataaccttgacatagattcacttttacttcagcctgatgcccatttgcttcgatagctgattacaggaaactttgtggttttccgataagcaaaattataacaaccaaaattgtcatgtaatccatcttttctagccttcgtctgataatgcagctcgtgaactcgacaaaagctgtccgcaaacggctccaccgcttggcttcggagtgcccaaatataaacactaagcctaacgatagcattaggagtcaactgatgaaagtagataccaaatctcttcagtacctctgcaataatcccatgtagggggaatcttaatccagcctttagaaagctcttgaaaatgactatttcatccttctccggctttggggtagtttcttctcccccgaagcgtaatagcttcttctgattgtcactgaaaaaacccgactttaccatcttggag

SEQ ID NO: 11316 - DNA, 270 bp, Zea mays
agcttaaacgcctttgaaattatatctttctccacaggattggacctctctggcctatttatcagaaaggagtgtaagaaggagacgcggttcacttctgataagggtgccgtgtccatcatctcgaagcttgaagatgttgcaaaagcactgaatctcacggtaaggaagaaagacaatggtgttgtcaacattcaggggaggaaggtgctgctctccctctctctctctccctcgctcctccctcgcccccttccctgcccctccccc

SEQ ID NO: 11317 - DNA, 458 bp, Zea mays
ctcagctgggccgtggaaagcaaatcctgatgtttgttgtcaactgtctgtcgttgtcaactgttagttcggacggtactccgaagcggcaaacaatgttttgccaaaagaatttctatgcagtctttgatgttattgtggaaacagccctcgcctcgatccatttggtaaagtattcgacagcgacgaaggcgaacttaaggttcccctgagccatgggcaggggcccgacgatgtccaggtcccagcgctggagaggccaggtgtgggcgatcagctttgtgaattgcgaggggctgcctgatcgaggagaaaacttctggcaggcttcgcatgaccttgcaacccgatttgcggcgcagatcattgcgggccagtagaaaccttggcgaatcacctttgcggctagggcccttggccctgcgtgagagccgcaagtaccactgtggacttcgcgc

SEQ ID NO: 11318 - DNA, 424 bp, Zea mays
agctttctaatcaaagtggttaaaatgtatggtctgatcattcttaaagtgagaatagatgtacgatgctcttgtggtgcacattctgtgcttatttctttggggttaaccataaatatgttgcttgcattttcaggcatcacaagcaaataaatttagatggaacatctgaagctgccccaactcttgtaggacatattcaccttgacaaggtatactgatatatgatttatactgaatttttttgcataaactgtttctgtaaaaaaagtatgcatgatttttttgcaggggcatttagaaaggataaacattagtactcaagacattctccaaaaatgtcaagaagtctctgggagaattggaaagaagaaaggacacctttgccacatctttaaaaaaattacttttgctactaggtatc

SEQ ID NO: 11319 - DNA, 456 bp, Zea mays
actaagcttaccaatgacggaagaggctactcttggactcttcaggaagagctctatgttaagcaacctcccgactctgaagatagtgagtaccctaaccatgtttacaaactctctaaggcgctttatgggctcaagcaagccccaagagcatggtatgaatgccttagggattttctcatcactaatgaattcaaagtcggaaaggccgatcctactctattcactaaaactattgaaaatgacttgtttgtatgccaaatttatgttgatgatattatatttgggtctactaacgagtctacatgtgaagaatttagtaggatcatgacacaaaagttcgagatgtctatgatgggggagttgaagtacttcttgggatttcaagtaaagcaactccaagagggcaccttcattagccaaactaagtatactcaagacattctcaacaagttt

SEQ ID NO: 11320 - DNA, 379 bp, Zea mays
atgacctgcacgcatgcaagcttaatgccccttataaattgtctaactttgtttaaggcaaagctcccatggttcacgataatgagggctatattttatatcatgttgattatcccgaacccaaaattacgagaattcatgctaagaaatcttattctgtttctcaccatgcctttatgtataagaatgaggcttctagctctaagcattctactcatgttcaaatgcctaaaaagaaaactcctactacatcaaatgatcacaacatttcatttaagacttttgatgcatcatatgttgtaactaacaaatcaggcaaaatagttgcccaatatgttgggggcaaacacaaaggcaccaacacttgtgtttgggtacc

SEQ ID NO: 11321 - DNA, 446 bp, Zea mays
tgtgaaggatcttcatccccacatgtgctaagcggcgatgccacagccagcccatgctaggcttagctattaagcatgcatctagaccggcctcctctattgcaaaatcaactaaataaagtttggcgtctaatacacccttaaaagctaatgaaccatcgcttcttctaaagacagacacatctacatttgtaaatagacagttatatcccatatgacataattgactaacagatagcaaattatatccaagactctccactaaaaatacattagagataaagtgctcaatagaaattgcaattatacctaaccctcttaccttgccttgattcccatcaccgaatataattgaatcttgggaatccttattcttgacgtaggaggtgaacatcttcttctcccccgtcatatggtatgtgcatacgctgtcgataatcagcttg

SEQ ID NO: 11322 - DNA, 323 bp, Zea mays
agcttctgacttgtgggcccgcctgagtgttcggtgcacaccggacatgcactgttccttgttcggtgtgccagtatgggccgccctgacttctgcgcgcgctgcgcgcgcatttaatgcgctgcacgtagccgttggcgcggagttagccgttgctccggagttgcaccggacagtccggtgcacatcggacagttcgatgaattatagtggacaagccgatgggcgatccccaaagctgcgagttcctgaggccgcttctccttggcgcaccggacactgttcggtgtacaccggacagtgcggtgaattatagcgcgagt

SEQ ID NO: 11323 - DNA, 450 bp, Zea mays
tgtgtcttcggagtgcccctaggctttctcttgtggttcatcatctctgagcggcgcatcgaagccaacctagaaaagatcgcagccattaccagcatggggcccatcaaggacttgaaaggcgtacagagggtcatgggatgcctcgcggctctgagccgcttcatctcacgcctcggcgaaagaggtctacccctgtaccgcctcttaaggaaggccgagtgcttcacttggacccctgaggccgaggaagccctcgggaacctgaaggcgctcctcacaaaggcgcctatcttggtgcccccagctgccggagaagccctcctggtctacgtcgccgcgaccacccaggtggttagcaccgcgaatgtggtcaagaggcaagaagaggggcatgcattgcccgttcagaggccagtctacttcgtcagcgaggtactgtccgaaacc

SEQ ID NO: 11324 - DNA, 411 bp, Zea mays
agcttaaaggttctccgaaatgaccagtggcttcggagggagaatccacccaagacatgtaagatcaatccattccactcaaaatgatgacagaggaagtcagcaacagcggccacaatactcctctcaggcttcgaggcaacaacagagctattctcggccgccagcttcaaagggcagaggcgccaggggcttcagaggaagatttcgggaccagcccaggagaatttattgcttattctgcggtgaggacaagggccatactaccaggatgtgccatgtcaccatctagaaatagaaagagatagcagaagctgcagcccaacagagtcagccgaagcaagttatgcatactgcttcatatcactcaccgtacattccagagtatgtgggtaaccaccctacagcttc

SEQ ID NO: 11325 - DNA, 462 bp, Zea mays
tgctctaccagtacaggcatgtatccataatgccttctatatggtattgcttaagaaattctatggacagatgacaacaacattggcaccgctacccccccccccaaatcaaaaatgggcgtatgttgccacagccaggaaagattttgcgtgcccaccttaaccatggagtctgggaggaagtggtcagttggatgggtcaatctgttgctaaagctacatgggagcaactcattgagtccaaggtggtcgttgttgaccaatagctccaagaccatgacaaaattctacttgaaattcatgacagattgttgcatgcccaggagatcacgaaaggatattacgacacccatcatcacgtactagagttctaggcaactgagtgggtttggctgccccttcaccaccgtcttgtagcatcactgactgataatgatcaacgcaaccaggctcccaagtact

SEQ ID NO: 11326 - DNA, 410 bp, Zea mays
  unsure (1)..(410): unsure at all n locations
agcttgtctgcgatcacggcggcaagatttccgcctttcccggtgtactcgctcgtcgggagtttcttctacttctgagacctcgtctcgggatatgggctgcgccggatcctgttacccagcctcgtgatgtcgccgtacgttccaacgtctgttcctctatcaccgtgcttcacgctggggaggtacttcccctttcatggtacgttcatcgtcagagatgggtggtgactccaatctccccccgatgaagaggatgttggggtagaaaggggctggcaccatggcacttttctttccatcctcctttgagggcgtacgtgccgganagatgactcggcgtgttcacgttccctgactcgggatgtttgcttccttctttcgagtgatctgtgtncactcctttgtgg

SEQ ID NO: 11327 - DNA, 440 bp, Zea mays
  unsure (1)..(440): unsure at all n locations
aatggacgtgaaaagtgccttcctcaatggactagtcaaggaagaggtctatgttgagcaacctcctggctntgaagatagtgagtaccctacccatgtctataaactctctaaggcactttatggactcaagcaagccccaagagcatggtatgaatgcctaagagatttccttatcactaatggcttcaaagtcagaaaaaccgatcctacactctttactaaaacaattgcaaatgatttgtttgtatgccaaatttatgttgatgatatcatatttgggtctagtaagaaatctacttgtgaagagtttagtaggattatgacaaaaattcaagatgtcaatgatggnggagttaaagtatttcctatgatttcaagtgaagcaactccaagaaggtaccttcatcagccaaaccaagtacattcaagacatactc

SEQ ID NO: 11328 - DNA, 408 bp, Zea mays
  unsure (1)..(408): unsure at all n locations
agcttatcataagattntncgatgttatttattctaccttcttataataatctcatcctcgagattagtaagaaaagggatatagaaagccaaatgtttggttgtagtttagcttccagttttcccaagtggttttaagcacaaatgttttctatattcttaagtcattcaataacgaatggattatgaaaacatgggtatattatgtttagctattaggtaaaagtacaaaaggttggcgtcagaggaattatggcaacgaaagactccatcatggatggtgggtcttgactcatctggtgatccagttctgctctctgaagacttgagttggtgcttctccttacttggcgaggctggtcttctttgtccttcattcttggatttccattcgagttaacgacatat

SEQ ID NO: 11329 - DNA, 472 bp, Zea mays
tacataagaattgataaataagattttgaatcttatgatataaatttctccccctaaatatgtgcatttcagaaaataacacttctgtattcaaatgccaaaaacacatatttgggtcaaggtatggagacaacttatatcatactatacatagggtgcagtgtgtcataaaataaacatgatgctaatgacatagaatgcacttatcaactttctacatcttatatttttcttatgattccccctttttaaattatatctccccttcttaaaagtcttctaacacttagttacataagactaaaggtaagctttaatgcaaaatttctccccctttgtcataaatctccaaataggatataaataatataaagggtagaaattatgattaagcgagatgtgaacacactatcatgaaaaggatccttatatgacacaaaggtaatggataagtgtcataagtgatgtaccg

SEQ ID NO: 11330 - DNA, 461 bp, Zea mays
actcagctggcatttattgctactgtcccgatatgatagtgttctgtatttggaaacaagagggaaaagaagaagcattacaagaaggcaaagggcgaggcgcatctatgcaaggagtgggactcggattgctcctcgtccgactccgacaatgaaggactcgccgccaccgccttcaacaaatcaaccctcttccccaacgagcgtcacacatgcctcatggcaagggagaagaaggtatgtactcgtaactctacctatgcttcttcaagtgaggacgaatctagtgatgaggatgaagtagattattcatgcttgttcaagggcttagatagatctaagatagacaaaattaatgaattaattgatgccttgaatgaaaagaatatacttttagaaaagcaagacgatctgttgtatgaagagcatgataaatttgttgaggcacaaacatcctatac

SEQ ID NO: 11331 - DNA, 387 bp, Zea mays
agcttaatgaagactagcctaagtgtgctttataaaaactcacgattattttgtaacaactctcgtaaatagaatcaaactgttcttcaaggaactttgtccatacctttgaatatattcttaccctttcattgaagcgctttgatgtggaccaaatcagtcttttgagccgaaagcgaaaaaacccctttccttttttttctacacaacgaagcataaaaggcctgtttcttatttgcagaaccctttccttacataacaaaacataaaagactgctactcttatctgccgaagcttttatttacataacaaaacataaaagactgctactcttatctgccgaagcttttatttacataacataacataaaagactgctaccttta

SEQ ID NO: 11332 - DNA, 242 bp, Zea mays
ttgacgtcatcaacctcgacatagaaccaatgtgtcttccagcctgcggcccatttgcagagtcgcggataacacgaaacaatgtggtgtcccatatgggaggggaaacggccaaaattgaagagcggtccatgctttctatccttaaacagatgaagaaactcgagaactcggcttaagcagaccgccaatggctgcactgctcggcttcggagtgcccagatgtaaacactaagcctaac

SEQ ID NO: 11333 - DNA, 420 bp, Zea mays
agcttgctgccttgtgagatctcacaatttccctgcatatacttgggtctacttcttgccatcaagaaacttaccaatgaccaactacaaacgattattgataaaatcgccaaccaactatcggggtggaaatctgatttgatgactaaagctggatggaacgtccatgtgcagtttgtcctcacagggatggtcatatatctcgcaatggctgtggatttaccttcttgggctctcaaagctattgacaacatccgccgaggctttctttggcgatggcgcacagaagcgagggggggacacttgcttgttgcttggggaacagtttgtcagccggttgaacttggtgggctaaggatttccaatctcattgatcttgcttgggcacttcgtatgcgttggttttggttaccaaaactg

SEQ ID NO: 11334 - DNA, 466 bp, Zea mays
  unsure (1)..(466): unsure at all n locations
taacaatagcaagaaaaatggttggattatttaactaatgttattataatttagagaagttattatctacctactgacctagttaaaaatattaaacacctctgtccactccatttaagttagttntaccctttatcctataatatgcttaaagataaggaaaatagaaaatgcaacttaattaatgaaccagagagtacttctattttgttaggttacttattccatatagttcactggaaaaatatatcataccctggtttagtacaaattaagtaggatatcttttattttattaaaacaaggataacttagaaaaaccctacaaaaatgaccccaaggtaaaaacacccccacccttgggataactattgttttattagaaagaacttaggaaaaataagaaatctgctgtttgacantttttaaataataatgtagtaaaaagtgcctttntgacattaaa

SEQ ID NO: 11335 - DNA, 387 bp, Zea mays
agcgtttgactagactatgaaggggcctctccacttgtgttccaacttgcccttggactccgcccgagctgttctgacgagtacgatgtccccctcgctgaacttccttcggatgactgcgcggtcgcgccatgctttggtctgggcttgggatttgcttagggcctgtagggcgaagacccggtctccgtcaatgagatcttttgaaattggctcgttcacctctgggacggctgacggaactgtacgcggggacccatgctttatttcttgtggcgtcatcgcctccgatccgtatagaacgcggaaaggagtgaaccccggcgccctgccctcaggtgtgcttaccgcccagactgcctccggtaataaactcgtccatctgcc

SEQ ID NO: 11336 - DNA, 476 bp, Zea mays
  unsure (1)..(476): unsure at all n locations
gaaactcaagcttgtgccataagatgcgnatgaaagattcaaccctgttcttcttataggtacaaagacttcgcctgctaaccaatacacctcatgttctgttatgttttacacaggatcaataattttaatataataatacgtataaacagcgcctgcccaaggtgggtggttgccatgctcgtaacgatcggcagccttgctgttcgctgtacgtgcaaagaacaaccttcaacttgtccagcgacttccctggaatatcacattgaggcatgcacgtactggtcctgtggcttcaaactctgctctccattgtcacgcacgttcgcgtcgcgatcataaaaacacactgctagccagcaaatccctttcttttgcgtttattttttatcacgttcagaggacggtcngttggatttaatggaattagtctaaattaattcattaatattttgtctactatatacatcatcatc

SEQ ID NO: 11337 - DNA, 395 bp, Zea mays
  unsure (1)..(395): unsure at all n locations
agcttancttcgggttggtcattttttgggccctcgggatcgcccattatgaaattttcctcgcttgagtacgcgccaacgttggcgaagctaattcttattctcttcacacaatccatagatctctcaaaacatttttccttggatatacgaagctcttcaatgtttttctctaaacattttgtcctttggtcgctaatttctcgtttagcttttgcaacatcacatttttctttaaattccaatagctgttttcgaagatcttcgatctcctgtttctgagcttcggcttgcgctttggaaacaacttcatcttcttctattttactcaacaatgagcttaatattttatctttttcaagaccttcgttccttaattcaattacttcggaacg

SEQ ID NO: 11338 - DNA, 466 bp, Zea mays
  unsure (1)..(466): unsure at all n locations
tgtgaagactcttcatcccaacgtgggctagtctgtggttctagagccaacccatattagtcttagcaatcaagcaagtatcgagttagctctattaaaatcaactaagtatagctgaccctctaatactcccttaaatgctactaaatcatcacttcttctaaagacagtaacacctatatccgtgaaaagacaattgtagcccattttgcataattgagaaactgaaagcaagttataatctaaggaatctacaagaaaaacattggaaatagaatggtcaggtgatatagcaattttaccaagtcctttgaccaaaccttgatttccatccccgaatgtgatagctatttggggatcttggttnttctcataggaggagaacattcttttctccccagtcatgtggtttgtgcacccgctatcgatgatccaactngagcccctggatgcataaacctacaaa

SEQ ID NO: 11339 - DNA, 386 bp, Zea mays
agctaggccaaaataactcaaacaaatttccaaatcaagcttctcatgtggggacttaatgggaattctgaatttcaaaattctgaaattcagaccttgagccaaagattagggatgttcaccttgatccctaactctaatcctaatggccccattaacaaaaatgtgcctaattaacccctctgtcatgtgccacgagatggcattgggacgcgtgcctcagacatgtcaaaccagggattttctccctgtgtgtggcagtgaggcaaacaggatttctcccctctctatctcttaatccagtcagcgaaacttgctagccttcacacacaaacgacaaagggacctgagaggaagagatctttcaacgggatcgtggccttaat

SEQ ID NO: 11340 - DNA, 456 bp, Zea mays
tgaagctgacatcagccgctaccgatgatagtatattgtctgtagtttattctattctaatttcaaggtaaaatttttcctttagctttttattgttttacgatgaaggtgattgctgatgaagattattttgcacagagtatgctactaagtaaagccttgaggatgcaacaggacctcgaagataagaaaaatgaggttataattgaaggcttggaaagcaaaattaaagatcatgaagctactcttgaaaggaaagattttgttcttcaaacgatggatggttcactggcagaagcccaagccaagattgccagattaaacagtgaactcctcctgaaattagaaaacttcgagcaagaaaagaagaatctcgatacgaagcttaaagccgaagtcgaaaagagttcaaattttgcaaaatccttgaaagagcttcaagacaaatgcctaagc

SEQ ID NO: 11341 - DNA, 395 bp, Zea mays
  unsure (1)..(395): unsure at all n locations
agcttataagctctacttccaccctgttaagagatctgggagcctctcctcnctctctagattgcttgtaacccctactacgagtttgatcatcaatattgttggtagcgcaagccactaatgactggaagtacggatgttctgctcgaaccagtataaatcttgcgccctctgcgcacaccctccgaaacccagaacacgcacaataaatttacttgtccgagcgaggtacgaaacaccgaccacctctgtccatttcttgcaaaaatctccatggccaccacctctatggattgacaaaccgcaatgacctcttgatgatcttctttttctgcacaacctccacaatcggaactagtatgttcctctgaaaaggaccggtataattgatagta

SEQ ID NO: 11342 - DNA, 462 bp, Zea mays
ctttccttgtcgtcatcaaccttgacatagaactcctcttacttccagcctgctgcccatttgcttcagtagctgattacaggaaactttgtggttttccgataggcgaagttatagcaaccaaaattgtcgtgcaatccatcctttctagccttcgtctgataatgtaactcgtgaactcggcaaaagctgtccgcaaatggctccactgcttggcttcggagtgcccagatgtaaacactaagcctaacgatagcgttaggggtcagctggtgaaaatagataccgaacctcttcagtacctctgcaataatcccatgtagggggaatcttaatccagcctttagaaagcttttgaaaataacaatttcatccttctccggctttggagtagtctcttctcccccgaagcgtaatagcttcttctgattttcagtaaaaaagcccgactgtaccatcttg

SEQ ID NO: 11343 - DNA, 411 bp, Zea mays
  unsure (1)..(411): unsure at all n locations
agcttgtgaaggttcttcatccncacatgtgctaagcggcgatgccacaaccagcccatgctagtcttagcaattaagcatgcatctagaccagcctcttcttttgcaaaatcaactaagtaaagcttgccgtctaatacacccttaaaggctagtgaaccatcacatcttctaaagacagacacatctacatttgtaaacaaacagttatatcccatattgcataattgactaacagatagcaaattatatccaagagactctactaaaaacacattagagatagagtgctcatttgagatngcaattntacctaaccctgttactttgcttgattccatcaccgaatattatgaatcttgggaatctttgttttgacgtaggggtgaacatcttcttctccccgcatat

SEQ ID NO: 11344 - DNA, 456 bp, Zea mays
  unsure (1)..(456): unsure at all n locations
ccgaagcattgcctcaccggagaagcgatttcattctcttcggacttcggtcttccgccgccgcgcgtggaccgagctaaccagtgagtcttcgtccaattccttgcacccacatcttccctggcatcccgtgaagccctctgacccgttcaattgaactatcatgtcgtgagtaggccggactcctcggcgccgacgagcatctccgcctgcgcacgtggaccggccgactccgaccatccccgacggcgacccgcacattgttgtgatccccgagacctcccctacgtcctcgaccacctcaccggagcaatctcgccgccggtaagcccctccatcctttcttccgtcgtggttactgtttaactngngagaaggacctcgggttaggattagaagaacccggngggttttctgcaatgtcagtgactcatgtgaatagtagcccacggactg

SEQ ID NO: 11345 - DNA, 374 bp, Zea mays
agcttattacaagagaatctattgattatgctacttgaataatgaaagtcgcaatcctggataaaagcgatacttctttataaaaaaggattgagttgtactagcttactctatgagaaactcattcttatatatgacactatatgagattactaagagaaggtgttagtctcaatatgatcaagatatagaaatgggcccccctaaagatatgcatcaagtatctgaatgacttggttagatgcactctcctttacagacaaatagacgaattcattgacctcttgatcaaggatatgaacactcgcatatcagctatgcctggtatctcaaatgaaaacgtcacaatactacaccacaccattgattattcc

SEQ ID NO: 11346 - DNA, 458 bp, Zea mays
tcagttccatctatattatggattgcttttgagtctgtctcttttcctttggcccttctggcagcttcctgacttccatgaatagcaatgggcccttggtccgaaggtatcttcatgcaaagataagctggatgaagaattgcttcgaaggcattgagagtaccatgactgatgattgcattgtaagggtattccatgtcaacaatatcaaacacaacttgttcagtcctcgtgttgttgataaatccgaaggttactggcattgagattttgccgagtgctacaatctgccttcctccgaagccacaaaggggatgtgtggcatcaagaaatttatcttcaggctcttgcatctgtctgaaggccttagcaaatatgatatcagctgcactgcctgtatcaaccaaaacattgtggaccagaaatcctttgataacacaagagataaccatagcatc

SEQ ID NO: 11347 - DNA, 409 bp, Zea mays
agcttcccttttaccccgaaacatgatatacccttcattggtgaaactttcaagtagacataatctccaactagaaagtacaagggttgtcgtcgcttgtctgcataactcttctgacgagcttgagctttcttcaaattatgaattattcgctgaactttttcttcggtctcttttaccacattaggtctgaagaaatttctttcacctggttcagaccagtttaacggagtacgacatcgtcgtccatataaagcttcgaaaggtgccaccttaatgctttcttgataggaattattatatgagaactccgctaatggtaaacaatcatcccatttctgtgggaagtccaaagcacaagcccgtaacatatcttcaagtatttgatttaccctctcacttgcccact

SEQ ID NO: 11348 - DNA, 452 bp, Zea mays
  unsure (1)..(452): unsure at all n locations
tagggcatcagaactcggntgattgtgtcgccggcgatggctccgccgctggccacccagggcgccgccgttgcctgaccgatgttggggggaaaggctctcggccgttggatgagcgatcgacagtccggattagattggcgataccgtctcaccttgttttgatcctagccgtttatctcgcatcgtacagttgggcctgtatcaggggataattaaatctgaatcatcgatcatggatccaacggcctaggtagcataccggttcggtaaagtgaggatttcatctgggcccttagtgtctaatccaacggctcacaataaatcttaccccttcgccgtgcacttttcttaaagagcccctgcgttttatggaaaataacccgccgtccagtatacagaaacctgagtctcgggaatcttagtagattagcccctgtgctttccagtat

SEQ ID NO: 11349 - DNA, 389 bp, Zea mays
  unsure (1)..(389): unsure at all n locations
cagcttgattctatggcaagttccatattgttagtaatacacgaattgattcaagcctatctactggtgcataagtctcaccgaaatccaaaccttcgacttgtgaatatccctcggccacaagtctggctttgttcctagcaccacaccatgcttatcttgcttgttgtggaagacccatttggctccctacaacattttggttaagacgtcgaactaaatgtcatacctcattcctcgggaactcgtagacctctcttgcatcgccatctctcaatcccaacttgaagtgcttcctctaccttgtgtggctcaatagacgaaacaaaagagtagtgctcaccataatgtgccacactagacctaagcgttacccncttatggatgtc

SEQ ID NO: 11350 - DNA, 457 bp, Zea mays
  unsure (1)..(457): unsure at all n locations
tgagacatgcctgtatgtggtggtctctttacattctgttatccgaagatccgaactgaaggaaagaaattntacgaggccaagcaagcggccattcatggcgcatgagatgcctgatgcaccaagcagtgtcagtaaaatactgaccctgcagccttggaggaagggagaaaagcacacggttcttttcacgtcaccatgacacgaaccgactgatcccgtcactggctcaggagcagcgtcgcctccggccgctgtttttgccccaacccgtggaacggatggagctggtggtggtgcagctcctcctcctccgcctccgcatacacttcccgcggcgcgacccgtgctgtcggctccgggctctgtatcagattctccttgtcgccgtcgtcaccgtccttgtgcttccaccaccgctcctcgaactgcgagtggctccgcccgaatcggtcgc

SEQ ID NO: 11351 - DNA, 405 bp, Zea mays
agctttcccagccatcggacccgacatttatttattcgtgtagggccaagaaacgcccttcgccgggactctagggtcacaccgcgcagccgcagccgtggaactggagcttcttccgggtgaagccatatccttcacatatcctccgcgccacaacccctttcctttgatctccttggtgaaaagctctctcgaccccggtttgaattggtcacatttcgcgcctagaataaggccggacctcctctcgcccccttctaactctcctttttggcgactagttctaacggagcgatgacatccgtcgtccatataaagcttcgaagggtgccaccttaatgctctcttgataggaattattatatgagaactccgctaatggtaaacaatcatcccatttctgtg

SEQ ID NO: 11352 - DNA, 426 bp, Zea mays
  unsure (1)..(426): unsure at all n locations
atgcaattcttgtatattaatatattttcttcacgaagcatgaaaagaagggaaggtgtttntttcccgaacgctcaaaaaatggtatgtatgccaaacttcatgcctcgtcaagaattaaactataaatagattatatattacattccaagctacaatgtattacacatgttacgttccaaattgttctaacataacatttaattcttcttaagaactatttctgcagcttcgttaaatagttggtcgacaaccttggtcataatggctttcggcatttttctaatttcatcgtgccccttccggtgggggctccgagatgcctcatcaagttctgacggaagagaagataccgctatattactaatacaaaccgtgaacaaattctggattaaaaatttcacctaattaaaaccactattaata

SEQ ID NO: 11353 - DNA, 406 bp, Zea mays
  unsure (1)..(406): unsure at all n locations
gactgagctgccactgatactgtgggaaattttaattttgttacctgaaaattttacttagaataatctattggaatttgccatactgtatatattttacctttccatcatgtgtgaagtgcttcgatgtgaaacaaaactcgtactttttgagcccaaagcgaaaacacctttcctttcttttcgtacacaatgaagcatgattctgctntcgaagctgctttcttagagccgaagcaactggttgtatctgtatggtatgatgatgatcctatgtatgtctaaatgaatgtttatgtatgcaatgtatgatgtaatgtatcgtgcacatgaatgcccaaacacacacacatctgaagcttcatccacaagctttattccctaaggaatgactganatatctttg

SEQ ID NO: 11354 - DNA, 473 bp, Zea mays
actaagcttcggattacagcatatccgaagacgaagggttgaaccttcttatttattaatgaccttttagtccataagggtctgagtcatcgttgtaaacttttatgaggggcatgattgtaattcctcacaggctgtgtcctgtgcctataaatagtgaacaatattcctttactgttcacgcattcctgtaattactaacgcatcactcgggaattattgtttgtcaaggcaaaggtataaatgtacctaaacattgtattcaaataccttaaattcatataataagacatgtgaatgatgtcatttattctcaatgtatttatctttaatgtttcatattttactttactttgtattatctttataagaattacgaaggtgaaaccttcgtaatattatgcttgtgaccttcgtccgaagttcattaaatccttgtggagataatgcttcgacggacgaagggcattgat

SEQ ID NO: 11355 - DNA, 388 bp, Zea mays
  unsure (1)..(388): unsure at all n locations
agcttggagagtgttgttgcggaagctgcaaatgagtgcgatggatgggaataggggcacaaccaccatgggcgcctcgctagacatgagcaacattctttatgggactagcagattacgttcgcgccttcgatcatccagcactcatgatccgatatgttntagtgttagatacattaaacttagagtttcatatgtcattgctgtattgattagtgaacttgcgcaacggtagtccgtaattgatgtgttagtgaatcccattccttcatttttggtgtacgcgcccagaataaatcgagtttgagatggtcttttagaccccatagacatatgccaagttgtgccatgagttgaagaggtgaccangaccaccatgtgcctgaca

SEQ ID NO: 11356 - DNA, 471 bp, Zea mays
  unsure (1)..(471): unsure at all n locations
actaagcttgtcaacattggttgagatggtttagacatgtccaatattggagacctctagaggtgctagtgtgtagtgggatcctaagatgcggtagtaataagaagagcgaaagaggaagaccaaagttgacataggaaaagacagtaaaagaagacttcaaaggatgggatatacctaaagttttagccttgaataggagtgcatggaaaacaactatctatgttcctaaaacatgacttgtggattctattagggttttaactctagtctaccccacttacttgtggtaaaaggttttttgttatagttgacccccgacccaatagattaggatattttgataagcctttcaaagtaagggcccctttggcaggacttctccctaccagcttctgatgtggcttctcgttttttaccataaggtgtatncaaacgccaatttgcaaataatttttagtaaaaatcact

SEQ ID NO: 11357 - DNA, 313 bp, Zea mays
agcttgagacgggaacaacccgggcatgcactacatcccttgaagaacatgtccaagatttgaggattgcccagaggaataaacaaaagaagaaattcaacacctcctccaaaagcctcaaccacgtttccacaaaaggtaacatccaaagtaatgatcaagccacactttacattaaaaggtgtagtgaatgctttgaaatggggcacttgattacgtcatgttcctatattaatggcttgactattaaccacgatgaatgaacttgttttaaatgctcttagaaaggacacttgcttaaatcttggcccca

SEQ ID NO: 11358 - DNA, 307 bp, Zea mays
  unsure (1)..(307): unsure at all n locations
ntgatacacggattaaacatcgccatatcactgggtgttaagagactgatggngtatggagattctctggtagtcatcagtcagataaacaaagaatgggattgttcaagtgattcgagggaaaatactgcgccgccgtcggaactaaagataattcaggttggagtcatatataaaaacgacacgcgcatgcttaactcatcgcgactagccccattttcagattcacacttataaaaaatccattatactaaatttatagcccaatatttaaaaaaacaaaactgaccatgcaaatattattgag

SEQ ID NO: 11359 - DNA, 396 bp, Zea mays
cggatcttaagcactgagcatgcactttatgttggctgacttttaccgacccgcttgacggggacgtacagttgggtcttttgaagccgaatcacatgtcaaatcttttcctttcggcttcttcctggttcctaagcaaaacaacagtgcacggctctccatggtctaaatatgatggacatgaactcaagagtgtaatcacctgatggttgagttgacgagcaccagcgcgagtaatgggaccacaaatcggtacttgtattggcatagatgtatcagtagcgtggatgtcttcatcaagagagggcatcgtccttgccaatatcgaacaaaccgctccggtggcaaacatcgtgctttgtatgcacaccgatacccgcttctcgaatgggtgac

SEQ ID NO: 11360 - DNA, 308 bp, Zea mays
  unsure (1)..(308): unsure at all n locations
ntccatgttgtgctngaacattccaatctcactctttctgttcgcggcgaccgacacaagtaggtgttcttctgcactccgaatccaccatgttcaaatccttttgcctctccgtcttccccctgatttctaagcaaaacaagagtgcacggcgctccctggtctaaatattatggacatgaactcaagagtgtaaccactctgatggatgagttgacgagcacgagcgccagtaatgggaccacaaataggcacttgtattggtataaatgcatcaagagcgtggatgtcttcatcattattgatgc

SEQ ID NO: 11361 - DNA, 421 bp, Zea mays
  unsure (1)..(421): unsure at all n locations
agcttgcgaaagatcttcattccacatgtgctaagcggcgatgccacagccagcccatgcaagtcttagccattaagcatgcatctagaccagcctcttcttttgcaaaatcaactaaataaagtttgccgtctaatacacccttaaaagctagtgaaccatcactttttctaaaaacagacacatctacatctgtaaacagacagttatatcccatattgcacaattgactaacagcgacttcgaccatccccgacggcgacccgcacatcgtcgtgaccctcaggaccttctctacactctcggccacctcaccggagcaatctctgcctcggttagcctctccgccctttttgcgtcgtgggaatccttatttttgacgtaggaggtgaacatcttcttctnccccgtcatatggttt

SEQ ID NO: 11362 - DNA, 459 bp, Zea mays
  unsure (1)..(459): unsure at all n locations
tatgtcanattcatgaggtgaaggatgagaattgattttatacattagtagaattggtttctactctgtaacttacatgacactcttcgtctcacttctctatagtaaaaatgtaacacataaatatctccagcatcttgctaataatagtatacaaatatattttgcataaaatggaattagcttaattgatatatgtctaaattactaatattagaatgaaattcaattccaatgatccaaacggggcgtgagacaattagttgcatttggaatagaataaaggttaggagtaaataaactaaaaactatttcaaactctgcacttcaagttatacaagaactgttttatagaagaatataagaaatgttaaggtggtgtttgaagaatgaaatgtaataactgctatggcaaacattccataagcttgacctcataggttacagcctgtttcccat

SEQ ID NO: 11363 - DNA, 420 bp, Zea mays
  unsure (1)..(420): unsure at all n locations
agcttctttgccgagtgttgtggccctggcacttggcaaagaagcaagctttgctgagtgccttctagagcactcagcaaagaaactgacaaagggcccgctggtggaccctttgccaagtgcaggcttgtggacactcggcaaagaggtaatctttttgccaagtgtattacctaactgtcgataaaggtaatttctttgccgagtgtcacctaaaacactcggcataggcgtcgtctccgtgaccaggcgccgtgacggcggcttttctttaccgagtaccttgtgacactcggtaaagtctttgtcgagtgcccgataaaaagtactcggtaaagaagccgttgccgagctactgttcgccgagctctctttgccgagtgtcacactcggcacagtnttgtccagtgttatcggctt

SEQ ID NO: 11364 - DNA, 461 bp, Zea mays
  unsure (1)..(461): unsure at all n locations
nggtgccgatggagaggcagaagtgcctgatgtcctgtttgtctaactgtttgtcgntatcgagtgtgagctcggacgggactccgaatcggcaaacaatgttttgctagaagaacttctggacagtcttcgacgttattatggatattgtcctggtcttgatccacttggtgaagtattcaacggcgatgaaggtgaacttgaggttcccttgagccgtaggtagtggcccgacaatatctagcccccagcgttgaagtggccatgtgtgggcgatcagcttggtgaactgcgaagggttgcccgagcggtgagaaaacttctggcaagcttcgcacgacctcatgactcgattcgtgacgcagattatcgcaggccagtaaaatccttgacggatcaccttggcagcgagggccctgngccctgagtgagagccacaagttccgctgtggacttcgcga

SEQ ID NO: 11365 - DNA, 373 bp, Zea mays
agcttctaaagggagaacacgtgatatgtttgactaacgtgcatttcgaaaaagatagaccttgtgcagcttgtcaagcaggtaaacaagtgggaggagcgcatcacggccagaacgtgatgaccacttcaagaaccctggagctgctgcatatggacctcttcggacccgtcgcctatctgagcataagagggagtaagtatggtttagttattggtgatgacttttcccgcttcacttgggtattctttttgcaagataagtctgaaacccaagggactcttaagcgctttcctaagagagctcaaaatgagttgagctccaagtgaaaaaaataagagcgacaaccggtccgatttcagaaccttcagtg

SEQ ID NO: 11366 - DNA, 449 bp, Zea mays
  unsure (1)..(449): unsure at all n locations
cttcatcncacatgtgctaatcggcgatgccacaaccagcccatgcaagtcttagccattaaacatgcatctagaccggcctcttcttttgcaaaatcaactaagtaaagtttgccgtctagtacacccttaaaagctagtgaaccatcacatcttctaaagacagacacatctatatttgtaaataaacaattatatcccatattacataattgactgacagatagtaaattatatccaagagactcaactaaaaacacattagagatagagtgctcatttgatattgcaatcttgcctaaacctttcaccttgccttggttcccatcaccgaatatgattgaatcttgggaatccttattcttgacgtaggaggtgaacatcttctcccccgtcatatggtttgtgcatccgctgtcgataatccagcttgagcccccggatgcata

SEQ ID NO: 11367 - DNA, 371 bp, Zea mays
agcttgaccaaagtcttgttactacactcaccttggtcattagcgttagcataatatggagataaattgaaccaacccgtacctctttacatataaatggcgatctacaatcaatgcttacggtatctcgaatctatatatgatatgctcgataataaaatctattatctccttatgtgtcatatctcttcaagtaatcacctcaatccatttagtgtagtaattttgagcaaccaccacatactgatgtcattaaatgatatgggatgcacttgaccatcaaatctaccccaaccatgaaaaggccatggattgatgttatgatgaaaataacagcagtcacaagttgaatattccaaatcattgtactt

SEQ ID NO: 11368 - DNA, 456 bp, Zea mays
  unsure (1)..(456): unsure at all n locations
tgacggtccctccacgtctgaagcacaaccggtcgcatttattgcgacggaggagaagaaggaggagtctacaccaagtagacaaccaatcaactcctcaaagctcgacaacgaggaaatggtgctcgtcatcaagagcttccgccaaattctcaaacaaaggagcgggaaggactacaaaccccgctccaagaaagtgtgttacaaatgtggtaagcccggtcattttattgcaaaatgtcctatatcgagtgacagtgacaggggcgacgacaagaaggggagaagaaaggagaagaagaggtactacaagaagaagggtggtgatgcccatgtttgtcgcgagtgggattccgacgaaagctctagcgactcctccgacgacgaggacgccgccaacatcgccgtcaccaagggacttctcttccncaacgtcagccacaagtgcctcatggc

SEQ ID NO: 11369 - DNA, 328 bp, Zea mays
  unsure (1)..(328): unsure at all n locations
agcttatgaagattcttcattccaacatgggctagtcgcgggtgctagagccaacccattgttagtcttagcacattacagcaaagtggttcgagtcttangcctctacttaacattctaccaaagtatagcccgaccctctaacactcccttaaatgctattgaaatcatcactttcttctaaagacagtgacacctacatcagtaaatagacaagtgtagccaatttgacataatgagataccganagcaattgtatctaaagaatctacagaaaaacattggaaatggaatggttcggagatatagctattttacccaacctttg

SEQ ID NO: 11370 - DNA, 433 bp, Zea mays
  unsure (1)..(433): unsure at all n locations
ntacctcattcatagtctgtgtcatgttgaagtatgtgtttgttgatgtacaattngagtatgagtgacagctactatgttgggtgggcatcttgtcattgttcagatgaagctgtgccatcaagtaacctcttgcttcttgtggcttcaaaatattttattcagcatggtcttatactcttattacagattctcagttctctttgtgttactagcttcttataaatggtttcttttgggtctaatgtatgtcctgtaagagtgttactttgtatgcaaaacccttggcaccatagttattaatgcggtaaggcgacataatgcgatcacccccttatgaccttttaggcggtaaagtgtaaggcgaggcgatgccttaattatatagataaatataaaaactagactaaantttagttataatcaataattg

SEQ ID NO: 11371 - DNA, 363 bp, Zea mays
agaggcgagctgagtcatgcgagctagcgatgaatctctattcgaaattttctagactgtgaagcgagaaaactctgtgttaacgttactttaaacaccataggaaaaataccaatatatgataatttcagacaataatatgaagttaaataccacttcagagaggttagtggcttaccaaaacttcacccatgagctggattgaacccctaaagtaactaatagaccggacccaaaaatagctaatggtctaaaatgcataaaacactgtgttttacagtttagaacgccaaaacgctaaaacgcgatttcaacctctaattacagtttcgacgcttaaacgcacttcacacatcctctcac

SEQ ID NO: 11372 - DNA, 193 bp, Zea mays
cattgaaactgatagaatgctcttactattatatatattctttacgccaaaatatggctcaatgttttcttactattatatatattctttacgaactttgcgttttttgctgaacagaaaacaaaaggacaatcctggttcctggatatacgatatatgaaaaacacaggatctccaaatcaactggcgatac

SEQ ID NO: 11373 - DNA, 406 bp, Zea mays
gcttcataatctttattgtagcctatttattatattccaatgtctctaattggcctaagccatgattgtatatttttcatggtcttctaacccttcctttcatttctacttaaatagcttacttacggctggtattagggtttcaacactcttccctttttgaaaaatcttatttgctcggaacatgactctttagatatacacttagtagatcttttcttctcaagttaattcgatgcttcatgctcaatttggctcacataaaacgctgattcttgggttagcactgagagaaaccgtatgtgacactcgggtgcacagccttccctccttaaaaaaatctcgtctcgagatttcgtccagagtcctcccggcgcgagcgaagggcgcgacttacatatttcaa

SEQ ID NO: 11374 - DNA, 271 bp, Zea mays
ggcctatgctagccgcctttaaacaatccttcagttcactagaatgctacgtgtagggcagtgaccaagtcttcatgtctgagaagtaacggcgatccgaatcgaataatacccagctggggatctccaaccacatgacaaatgtagcacttaacccttgcatatgtcaactcggcaccgggtttctcaagaccagaatggattcacgctaaacgagagcatagatactccactgtccagcctcttgccacgaagggtacatgctacttct

SEQ ID NO: 11375 - DNA, 406 bp, Zea mays
agcttgtcatcatcctcaaagaatagcatgcatctgttgcgtattacgccgatcctcccagatgccatccgaagatcaggcaccatattctctgcgccacccacattttctgccagcgtaccgctgtcccgcccaacttctccacccgcccccccatcttcctcttcctcatccttctactcctcgtccgccctcgcctgctccctctcctccttccctctccctccctctctaaccctccctccccttttcttccgtcgccgctccgctgcggtgcgtccctctcacccacctccacctcttccccatcctccccctctatacttccttctacctctcttccccctccctcttcctctctcctctcctttccccgctttcccctccctccttcctttcccctctc

SEQ ID NO: 11376 - DNA, 354 bp, Zea mays
tgcaagcttgtgccgcctcttcatccccacatgttctaagcggcgatgccattttcagaccacgcaagtcttagccatataagcatgcatctagaccggcctcttcttttgcacaaataactaaataaagtttgccggctaatacacccttaaaagctagtgaaccatcacttcttctaaagacagacacatctacatttgtcaataaacaattatatcccatttgacataattgactgacagatagcacattatatccaagactctccactaagaatacattcgatacagaacgctcattagaaattgccattctacccaggcctcttacctctgcctggttccatccccgcc

SEQ ID NO: 11377 - DNA, 386 bp, Zea mays
  unsure (1)..(386): unsure at all n locations
ttaagtcactgagatgcagctgaagcttgtttagtcctcgntgtagttagttacaccttggcttggagtctatttcagctccttcctctgtttgctcagatctgccagtgcgacagatagagccttccactatgttgatatcagctacaacgatgcccgggctgcttacaatcttctcgacagcactccggcagagtaacaacgccgcttaagatattgctctagctctcagcagcactctccctctctctaaaggcttataacttcgcctctacacaaactacatagatacacaagagagggagagaaataattgatccaaatgatgtatgaactcgctggctgcagctgcgtacttgcctgaggcgctcacccctcccttctat

SEQ ID NO: 11378 - DNA, 342 bp, Zea mays
  unsure (1)..(342): unsure at all n locations
cactatagatactacgctcatactcgctgcattgttagaggccgcgaatagaattggatgtcgtacttgaggngttcgcctccaggtgcggtgaagagaatccctgctcctgctccctgcagcttcagcgagccatcaaaatacattcgccatacttctgcagnttctggattatccggtacttgctgttctgtccactctgatacgaaatcaaccagtgcttgagttttgatggcagggcgaggacggaactcgatgttgtgggatcccagctcgcaagcccactcggctattcggtcaacggcttccttgcatgcgacaaagacccctactgtgcacccc

SEQ ID NO: 11379 - DNA, 209 bp, Zea mays
cactcacccccaccccccacgctccctaccgcaccaccaactgtcttctaatccacacgccctcgcctgccactcatccgacgactggtcccccacactccccttctgcccccctcccccctcccaactgcctgtccaccccgcccgctctccgcatccctacctcgtccgccgcgtccctctctgccccctctctcctccccccctcc

SEQ ID NO: 11380 - DNA, 399 bp, Zea mays
  unsure (1)..(399): unsure at all n locations
taagcactgagctgcagctggaaggtttcatcctactgtctaatcggcgatgccacaaccaacccatgctagtcttagctattaagcatgcatctagaccggcctccttttttgcaaaatcaactagataaagtttgccgtctaatatacccttaaaagctagtgaaccatcacttcttctaaagacaaacacatctacatttataaaaagacaattatatcccatattgcatagctgactaacagatagcatattgtaaccaagagactcaactaaaaacacattagagatagagcgctcattagaaatcgcaattttacctaacccttntaccttgccttgattcccatcatccgatattattgaatcttgggaatcccttgttttgaccgaagaag

SEQ ID NO: 11381 - DNA, 408 bp, Zea mays
  unsure (1)..(408): unsure at all n locations
tgtgaacttacangtcanaatattnttgagntcgtttattatttagcctacatagaatgtatggtggaacaaagaatgccgaactccttgccataactacattcatactgggcagctgtatgttttggtgtaggtggcatgattctttagtcagtaaatttactcccagaaaaagaagaatactacaagaattggaccatcggctgtattcacgtattagtctaggatccaaacacttgattatgttagatttaagggaaataaaatgctgcagggactgataccattttctccaaaatggtattcggacttggctattagcgatgatgaattatgagtgccaggaaaaacgcttttctatcaatgtcagaattagtagctcttgttttgttggttagtttcacctat

SEQ ID NO: 11382 - DNA, 259 bp, Zea mays
agcttagcccagcttttattgagctgactatatagttcgttgaacgaaatgttcacaaccaaaagtgagaccatgttgctcagctgtggtgggattggcccggacaaagaattcactgacaagtcaagcagctccagatcttctaggttgccaaggctacttgggatttggccgctcaatctgttgtggctaatggtgagagctttggacaggtactgaacgttccctacgctgcgaggaactgctccttccaaacgac

SEQ ID NO: 11383 - DNA, 346 bp, Zea mays
ttcatcctttttcttcacaaacagcgcggtattatctttaaggttatttactcgggcgaataaatcccttgtccagcaattcttgcaattgctttttcaactctgccaactcagcgggtggcattcggtagggcctcttggaaattggggccgttcccggttgcaactcgatggcaaattcaatatcccggtctggtggcattcctggcaattcgttagggaagacatctgcatactcacagaccactgggatcttcttcagaggtaactccgtcatagagaaagcacatgactgagtagaaccttgattaggcagaattaaggtgaagctccccgagaacggaga

SEQ ID NO: 11384 - DNA, 340 bp, Zea mays
  unsure (1)..(340): unsure at all n locations
agctntacatgtgccattagggtctaccattatgttcgcacctttgatgtctctgcaaatttaggaagagagtaagcacaagaaaagataaaatagcaaacccctagtatgcataaaataatagaccggaaaagggaatctaaaaaaattatgttacctgtgtactgtattctttgcatgcaaaaaagctaggcccaaaagtatttgtttagtataactgcgaatggcctgttcaccaaactgaccatactcttggagaagcttatgtatagatccaccagaaacatactccaggtatatgtaaagcttatcatcaacctgttctcaatataatatggag

SEQ ID NO: 11385 - DNA, 193 bp, Zea mays
caggaatataacactagcttaactaggctttaaatacttaagaaaatatttctcttcataaaaaacacccggcaatttattgtgggtgatataacccaccgccgctcaaactcgatcagatatttcttaattttgcgaacatttctcttttgtatcttgcagtgaacctaaccgcgtagatgaagctctactt

SEQ ID NO: 11386 - DNA, 412 bp, Zea mays
agcttcttctcgtaatcgacgattgatgtttacgcgagcgcctcctgctagtggtgtttggtcggagttttcaagtaagaaacatggattcatctttagcgttggtttatgaaaatgactcacaagtcagatccatggaaaaatattacggagaataaatttcacacatgcaaaaaaagaaatttaagttggaaacattattcaaacaaaataaattgcaagctaggctcttctttaaatactactccctccatccaaaatataattcaagaatctcggtgataattatctactactactacacattgtgcaagggtagcaggtaggcttcgggagagatgcactagatgttcttactgtaatagatgtagacataaacacacatgtggtgtagcggtagctacaagcacat

SEQ ID NO: 11387 - DNA, 419 bp, Zea mays
  unsure (1)..(419): unsure at all n locations
tatcaagcctagaaaacaacagaaccaaaagcttcttttgtgattaaaangcacgtaagcagaagttccgaacaatgcaatagaacaaatgtttaaagcttctgtaacttgcagaaaccgacattaatttaggtttatgaaatcaagaaaccagctactaggatcaactgcccttctttttaagaacatatgccgacagttactaggaagtacggaaaccatgtgacgataagcccacatgccatgagtaagatcgtaaccgacaaaccgtgacattactggcggtttcaacaaacacaacaggacaattcaagggcaacacttcataagtataaattgataccatttgcaaatatcctgtggttggataaacgcaacacgacaattcaaggacaacatntcagaaagcataacatgca

SEQ ID NO: 11388 - DNA, 301 bp, Zea mays
accacttttagtagattaacattgaatgagatagacgactagctatacaaaataactaacgcaaccaatttccaaactcagactcctatcttattaataaaacacacgcgaataccgagcatagcacaccccggcctacatcgcacccctgagtcctacgccgtaccctccccttcactcccacccaccccccacccctccccccccccactccccccccacccccctctcacaccccacccctcctcccccccccacccctcaccccccaccaccccccccctccccccacgcccccccc

SEQ ID NO: 11389 - DNA, 168 bp, Zea mays
  unsure (1)..(168): unsure at all n locations
tcacgagagagnggttggccttgaagtgagtcgnctgttntagacaacttactcgtgccttgggaaggccctgggcattcccttttatagatacaacgggatggtccagctgtacatatggngcgggagctatgcgctaacgtggtcgccggagaagagccctggccc

SEQ ID NO: 11390 - DNA, 378 bp, Zea mays
  unsure (1)..(378): unsure at all n locations
cgacaaaatggatatagacccggctgaaaagacacagccatgcgagcgtncgaaagacggccgcaaaagaattcggtccgggagatgacgaagaagaggaaccagaagcgggacgcgaagaggaggaagatgaggacgagaccgaggagcacggctagagctaccgaactttattttaatcggcacgcactctgtcattctcaactcaacacaagacacaaaagtcatgcgactctccgagcgccgaaacaacacagcccccctacccacactccccccccccccccacctccccgcccgccccacccaacccccccaccacccacaccccccacacaccccacccccgcccaccccccccccccctctacccccccc

SEQ ID NO: 11391 - DNA, 311 bp, Zea mays
actcaagcttcatgcaactctacgctcgcctaagctaagaagataatgcagtcatactcaaacttctagaaagagcaagagagcaacgcgaagctcgtcaaagcctacaaaatggtctctccatgaaaatgctacactttgacgagttgactaaagaacatgaagagctaaagtgctctcatgttgatttggtccaaaggtatgaaactatttcaattgagcaagataacgatttacattgtatcgctcaattagcaaatagcgaatgccttgcttaacgaccaagcagaaaagctcacagatgaaaatct

SEQ ID NO: 11392 - DNA, 438 bp, Zea mays
  unsure (1)..(438): unsure at all n locations
tcgtaccgtatctctatagcgacctgagcatgcaagcttggcctcttttntctcttggcctcagatccttgtttagctgcgcatagccaggatattcgaagcccagtgcatcaagcactcggttcagncttcgcttcggacgggtaccgaaggctgctgtcatcagttgatcttcttttttcgaataatttccaagaatttcattacacatcacctcaactgtgtccagccactctcgccaggcctccctaacatatttcttgacttccacctnntaaacaacctcgacacgagngccctccctgtcctcgcccaccaacccccactactatccaccctccccacccctcactccttccaccgccacacctcctcaaccccccccctccccctccctctccccccccttccacccaccccccccgccacctccccccc

SEQ ID NO: 11393 - DNA, 347 bp, Zea mays
gcatgcaagcttctctttgtctcatcaacctcgacatagaaccattcttatttccagcctgccggccatttgcttcggtagctaattacaggaaactttgcggtttttcggtaggcaaaattgtagcaaccgaagttttcatgaagcccatcttttctggcctttggttgataatgcaattcatgaactcgacagaaactgtcagcaaaaggctccactgcttggcttcggagggcccaaatataaacgctaagcctaacgatagcgttaggagctaactggtgaaggtagataccaaacctcttcaatatttccgcaacaatctcgtgaacagggaatcttacccc

SEQ ID NO: 11394 - DNA, 336 bp, Zea mays
caagctttggaatgtactaagcacatgccgttttttatggaaccgccaaacatagtttctgagagaagccgggcgcgggctgtatccctgatgcgacctgagacagggtctcccatgctagctatggagggtacaagcgcggtcactgcacggcggcagccggggtcagcggagcattgtatgccaaggcgctgaggcctggacgcgaacggcgaatcgatggggacagttgtcttgtgtggggtcagagtaccctgacttgacgtgtgcttaggtttaccttggaaggtttaacaactcgattcgaatcgtctgcttctccgaggtaacgacact

SEQ ID NO: 11395 - DNA, 288 bp, Zea mays
  unsure (1)..(288): unsure at all n locations
ctcatatttaccaccaccccncatacaactnatttttgacatcagcataatatgtactgtactcacacccagtgcactcttcaagtaaatgcaacacattaaaaaaacctctcatcttacctctagcctccaaactgaacgcatatcaatataccaaacgtatgtcactccactatctaaggaattcaagctgcattggaaacacaatagctctaagatttaaatctctttcacacgctctcaaatgcgatgcaattcccagaatatggtgaacaactagtggactac

SEQ ID NO: 11396 - DNA, 330 bp, Zea mays
  unsure (1)..(330): unsure at all n locations
agctccacncaaacttatttggcccaaattaatagtatttattcgccangacncngcggaccagacaccatttgtatcgcctccattgccgaccctacaaaaaattaaacataacgctcgcacccacataacctatttcgtacattgcttcgccctaacgcgatcatacctgcgtgcagcgcgcctgccttcactatacttgccaccatgtccaccctccccatactctacctcatccccctcctccacaccccacaccctcctctccccctcccttccgtcgcctcccccctccatccccctctccctattcactccccacctcccccc

SEQ ID NO: 11397 - DNA, 171 bp, Zea mays
  unsure (1)..(171): unsure at all n locations
agatactcccgcttcgcgaaaccgatactctntgatagagtgccgattattaatgttccgtcgctatcgcgaatacatcctaaggctcctttgtcaattccaccaaagagcatagctcctggctgcgagccacaggatatcccaattcctgcgactcttcgtctcaacctc

SEQ ID NO: 11398 - DNA, 396 bp, Zea mays
agcttatgtgaagcgtatatttggtaagctatttcgtaggcaaagaagacgagacaaacacggacattcgtggcaaaagtcaatcaggcatacgtgagtcacgggagactagactagcgatgatattaatcggcgcgtgcttgctgtggcgcggcgaggcttgagaggaaatcgcggtccccatcctccgcctcgtacgctctgcttccaaccgccaactgttcccccacgtcctctctcactccactccccaatccaatccccacaccgctcccttctttcctcccctcacccccccccccccatccccactcctctcctccctctccacccctctccctccccctcttccatccccaccactcctccctccctcccactctcctccccccctcc

SEQ ID NO: 11399 - DNA, 404 bp, Zea mays
  unsure (1)..(404): unsure at all n locations
agcttcttcaaggctggacttcggctcctttttgagtagcttatagntgaagtgctgaaaacctaacagatcttcctccatcagatcacccccgaagccataataaggatgggaatttttgtctgggcagtaaggagtcaagggctagagccaagcgcgaagtgcttctgcaatatgcacgaacttttatatgagacgaaggccattagtaaagaacaataccacaacaacttcccatgctatgcatttatcgctcgccccaacgcaagcccaccgctgccaacatttcggacgacatgccccccancntctaatcaacaatctcctctcctcccaactcctcccacgtcctccacaacctcacctcccctcttctccccctctctccctcccccccctcctcc

SEQ ID NO: 11400 - DNA, 221 bp, Zea mays
aggaaagcaagttggagcccatcattcacacaagaacattatgacgaccgacaggccgcttgagctactccacatggatcttttcggcccgattgcttacataagtatcggcgggagtaagtattgtcttgtaatagcggatgattattctcgcttcacttgcgtattctttttacaggaaaaatctcaaacccaagagaccttaaaaggattcttgagac

SEQ ID NO: 11401 - DNA, 302 bp, Zea mays
tcggcatgttcgcagaagagggaaccgacttaaagatttattgtcatttagacctcgatagattgctatggaattatcaccaaatgtaaagggcatgtatgtaattctgtatgggttgtatcccgtgcctataaataggtgaacagtacccccgtactgttcacgctgacttgtcattcgccttttgcctcacacttgcactttcatctcctttcaagccgaacgtacacttataatacaatactgctcctatttctctatgatactataataagctatttgaacaactctacatcaattat

SEQ ID NO: 11402 - DNA, 428 bp, Zea mays
  unsure (1)..(428): unsure at all n locations
tcaatacccttacctaaagtaccactaggntgatgctctgtgctcaatcgcacaacaccaaacatggcttcatacaactgataagtctgggataatttcatacgaacagtttatggaagattagagtagttagtgccagtgagactagataacctcaaaagaagcatatggaaacccctcattttagctctaggatccaaaatgaaagaaaatgagtatagaatgggtatttgcctccagtatttaagaaacttggttttcattggcacatcaatagctctcattagctcatcattttcataagaacttaaatgtctaacaattctaagaatatgatgcaacattaatggagaggtagggtaataaacatcagacaatgcaacagtagattcatgaaacaactaaagaaangctaacaatttttcagc

SEQ ID NO: 11403 - DNA, 294 bp, Zea mays
agcttcggtactataacatattcgagatttaggatcgaaccgacttaaagatggaatgactttttagtccataaggctctgagccataaaggcaaatcttttgaaaggcgcatgattggtaatttttacaggctgcgtcctgtgcctataaatagatgaacaatactcctttactgttcacggaatcttgtaactgctaacgcattacgctgcgactattgttttctgccaaggcgaaggcataaatgtacccgaatattgcgttttaatactcaaatccatattataaaataa

SEQ ID NO: 11404 - DNA, 426 bp, Zea mays
tctcctgaacaagtgctgcactcaccgcggagtgctatatctgccacatatagcaacagaggagcccctggcattggtggagctagtgctgctaggtctatcaaatattgcttcagctcttcgaaggctctctactggactggtccccattgaaaaacttcggctaacttcagcacttctaaaaatgcgaaatttctctctgctgatctagatatgaatctgttgagagatgccacgtctcctgctaattcttgagccccctttttgtacttggtggctccttctcacgcacgcttccactcactccccatacctcatccccatctctagtcactcccctcgctccactcccctttcactcctcccccacctcattctatccccttctcctcctcaccaattctctctaccctcactcctccctcc

SEQ ID NO: 11405 - DNA, 305 bp, Zea mays
  unsure (1)..(305): unsure at all n locations
tcgtcttgcttaagcctgcccaagatanaantaatgtacttacatgacacatatatatcatttggagaatttatcatgtcatgctcaaagcacattatattcctcgctttccaaatagcccaacggatagttgagactccaacaatatgaatgctatccaatccaggcataaatctttttaaccacctccagcattgatcaataatcctaggaatgaccctcacattgatgcaattggncacaactttggcgatagaacagataacatacatatgatcgcgtgattcagcctgataacacaaact

SEQ ID NO: 11406 - DNA, 193 bp, Zea mays
agcttgcaccccgctacattggtccatattctatccttgaaatatgtggtccagcggcgcaccgactccaactacccgaaacattttctgctgtgcacaatgcgctccatgcgccccacctgcagaagccgaccccgcctcccagcccccccagcacactcccccttgcccactatcctccgctcccccctcc

SEQ ID NO: 11407 - DNA, 425 bp, Zea mays
  unsure (1)..(425): unsure at all n locations
tcggattncgaacattagaagatggacttttagtactttctgagtatgaaatggccgacagcttagcatataatagtataaaggtgcgaaaactaattctttacttatacaacgaccnttcttaccctcttcatcctccaccctaatctaccatcttctctaccacccaaccttcctctccttcctccacaccatccctctttctttcgttctatccccatcctccctcgtctacatcttcactcgtaatccctaccctctatcactctccccctcccctaccatacctctttcttcactccttccatctcacctctccccttctcctcatccttcttccctctccccacatactccttctcatcctccactaccctctattacacactacccttacattcatctatcctcgtctctcctctccc

SEQ ID NO: 11408 - DNA, 363 bp, Zea mays
  unsure (1)..(363): unsure at all n locations
catgcaagcttgacgatcttaaaaacaaactacgtcatgtgtgcatntgcacactggngagccgcgcctacccttgggccaggctactggcgattgcattggatctttttcttgcaaacctgtggctcggctctcgagctctttctgtccacacaacctctagccaattctatccaacccatactttcctgctccctgcccatgctcatcactcgtgccatctgccgcccgccaactgcttatttgcacgtttgttcctagaagaagatctaaaaaatgcgctttattacaaaataaacagattaagaagaccacagccaccatgcgagagagaatatatctaccactttctgtgttcttgca

SEQ ID NO: 11409 - DNA, 274 bp, Zea mays
  unsure (1)..(274): unsure at all n locations
tgcaggctttctggcattgatgtgattgttctagtcagagagaagataccaagtcgtgcgacactctcgaccaccatgacgaaggatttcgccatgactgcagtgttcgccccatatgaagatatggntgcctcgtagctcattagaaattgcttcaggtctgagtgcccatcatacataggaagctgaggtggcttgcatgatggcggccatgccgtagcctgcaactctgctgntagagcacaancattgtcaaacacaaaactaccacgac

SEQ ID NO: 11410 - DNA, 128 bp, Zea mays
accccccaaaccaaaggagaacaaaacggggaaaacgaggggaccgacacaacagagagagaggcggaacaggagaccgccggaaaaccgagaaaccaccaagcaaaagcaagaaacaacacaggaca

SEQ ID NO: 11411 - DNA, 418 bp, Zea mays
  unsure (1)..(418): unsure at all n locations
agcttttattgtgcagatactcataaatctttagctcttcatctccctcaatgcagcaaccaagaagcctgaccaagtttctatgctgcagcttggcaatcagaacaacttcgtttctgaactcctgagttccttggtccgagtccctgctaagtcgtttgatagcaacctcttgaccaccttcaagtgttccctttgtagttaccatcgaaaaagcaagattgggatatgccgctgagattaactaattatataactactcaaccaacaacaacgcgagcaaccttcatcgcaaactagagtaccttgccactttccccaaccttcctgcccaccataaacacactgccaacttctcctttttcactctactccttcctcttnccccctccacaccaccaccctccccaccctcctc

SEQ ID NO: 11412 - DNA, 74 bp, Zea mays
aaaaaggaggaagccccacaataagaaacaaccgaggggggtaggggaaaaacccccaacaccaataaaaaaga

SEQ ID NO: 11413 - DNA, 292 bp, Zea mays
  unsure (1)..(292): unsure at all n locations
agcttgcatgtctatattgggcaacattcgtactcatgaacatgaaagaaaccgagtcacaaaacataagatttggttctatcatatcttatatcttcggacatcggcgtagctaggatgttttataaggtatgncgcgcgaaatttttcattggctattatgatttggcacacaattcagaatataaaatagcatattaaacttcatgtctacataaaaatttcttctagagttactaaacatcgctgctaaaaaattaaaacaaaaaaggagtttactaccttctcgact

SEQ ID NO: 11414 - DNA, 405 bp, Zea mays
  unsure (1)..(405): unsure at all n locations
agcttctaaagggagaacatgcgataggtctaacttatgttcatttcgaanaagatagaccttgtgcagcttgtcaggcaggtaaacaggtgggaggagcgcatcacagcaagaatgtgatgaccacatcaagaaccctggagctactgcatatggacctcttcggacccgtcgcctatctgagcataggagggagtaagtatggcttagttattgntgccgccttttcccgcttatctctttctctttctntcctccctctttcacacctaccctccctctcacctcttcctctcccgccccccctcctctctcccttcctcctacctctccccaccctcccccctcccccctctcctctccttctcccccccctcctccctccccatccctcttccccgcccc

SEQ ID NO: 11415 - DNA, 421 bp, Zea mays
agctctgatgagttgactaaagaacatgtggagctaaagtgctctcatgttgacttggtccaaaggtatgaaactatttcaattgagcaagaaaactctttatattgtatcgctcaattagtaaataggaatgccttgcttaaggaccaagtagaaaagctaaaagttgaaaatctagcttttcaagaaaaatatgatatgcttctatattctcatgaaaatcttatggatgatcatatcatattaaacattgctcatgaggttgtgatagaaaacttaaaatcccaacaacctcactcatgcacatgtattcaaattgaaactatattaccatgtgctaatgcttgttgtccatcgacaagcaaatcttcctttgagctagaatttgcaggaacaaaagatgatacatatcacaagctca

SEQ ID NO: 11416 - DNA, 444 bp, Zea mays
  unsure (1)..(444): unsure at all n locations
tcaatgcagggttcttgactgaccgccatcgcagcaatttttaccatggaccctcctacactgaccactcctctactggccttgcccctttcgggtaagggaagcctccactagctttcctaaataatcaggcaagggccgccataaacccttggggtggcacgtgtttctcaaggtaagctctatggtccaattaacattaatgatcttgacatgagcagtaaataacaacggataacaaaagtataatcatgaataatgtgtatctcaatgcccaaaaccacatatagcactagcaagtactacccaaaaagttcagtggtaaacaaggcataaaaatagacaaactagggtaacctattaggtcccatcanaattaacctatgcagatcattatgattaattagaacatgagtgggtaaaagaagtgatcaagggcacaac

SEQ ID NO: 11417 - DNA, 377 bp, Zea mays
  unsure (1)..(377): unsure at all n locations
agcttgaacggnggactatcacatgntaatttccctacacacaaacaagatcattttctttcaagtgggacgcagctattctgcgcccagctatctctgaaaactatgggaaccctgaatgtaaaaaaaattgggacatcagaatattcgtacgggcgagaaaaatgggaaacaaatggcaacagcagacatgtcaaaaaataaaattagtaacagtgttctacaaacaacaaacaatactcttggtggtccttactatgtcttagactacaaacgcttgcgttggacattaccataccatgctgaaacaatggctataaaacatccataaataaaggcaaaggaacttctcggttctacaataacgatatatggca

SEQ ID NO: 11418 - DNA, 408 bp, Zea mays
  unsure (1)..(408): unsure at all n locations
tctaaagggagaacatgtaataggtctaacaaacgtnactttctagaaagatagaccttgtgcagcttgtcaagcaggtaaacaggtgggaagctctcatcatgccaaaaatgtgaggacaacatcaagacccctggagttacttcatatggaccttttcggacccgtcgcctatctaagcataggaggaagcaagtatggtcttgttatagttgatgatttttcccgcttcacttgggtattctttttgcaagataaatctgaaacccaagggaccctcaagcgcttcctaaggagagcccaaaatgagtttgagctcaaagtaaagaagataaggagcgacaatgggtccgagttcaagaacctttacgtggaggagcatcttgagggagaaggaatcaagcacga

SEQ ID NO: 11419 - DNA, 386 bp, Zea mays
  unsure (1)..(386): unsure at all n locations
cgcttaaaggattctattcaactaaagtatgatgaagncgataagaggccaagaatgagtattcattttccatccacatattccaagtgctttcaagacggaatcaaaatctacggatataagagtcttggctctttcaatcattgagcttcaacgcgcctcatatcacgcctgcccgcaccacgcccagatgtatcacccccccgacccgctgctccctctcctctcccccctccctcccccctcccccccccaccacacccctcccctctactcaccccccccccttccccccctcccccccacccctcctcccactccctcctcccccccaccctccccaccccccctcatccccccctcctccccccccccccccccccccc

SEQ ID NO: 11420 - DNA, 417 bp, Zea mays
  unsure (1)..(417): unsure at all n locations
agctntgcctcataacannantttgacttttttataggtgaaaccaacacagcagcccgctcgtgctccgaagcgttcccaagatccatcacanaacactgtccaggcttcgntatctttattcgtttcctcctcctgagccccctggcgtcaatcagcaataaagtctgccagcgcctgtgactgaatcgaagatctatgaacatattcaatacaaaattcattgagctctgcagcccattttccaatccttccagtagcttctcgattcctcataatatccttcagaggttgcgatgaaggaacaattatgtctgaagcttggaaatagtgcngaagcttcctggagggcattaagacagcatacacaaccttctccagctctcgataatctttccttgacaaataacaaccccc

SEQ ID NO: 11421 - DNA, 437 bp, Zea mays
tgacattgtctccctgttggaagccaatgccatccttaatgccagggcgtctcccactatagagcatgcttctagtaaattagaattttcattttctaagtcatgctcattgatcttagcactaagttgagctaggtgataattttgttgtttaattaaagctaggcgatcatgaatagcatcaacattaatatctctacatctagtgcaaatagtaacatgctcagcggtagatgtagagggctcgtctgtatttaattcaacaatcttagaatgtccaatagcattcccacctcctactatccttaatcgcactttgcacacactccaaccctaacatcatcaactactctctttcctatctttcaccgcctacatccacctttttacttcgcctccctcaccccacacctcctcttactctacataaccttcca

SEQ ID NO: 11422 - DNA, 394 bp, Zea mays
  unsure (1)..(394): unsure at all n locations
agcttactccttcctgcgatgggccgnttatcatcngcaaaantctgaagcccgggacatacaagctggccaacgatcaaggcgaggtctacagcaacgcttggaacatcgaacagtcgcttttacccttaaagtgtttcaagtcgttcatgtatctcgatccctttacatgtataaataaaaagtctaaccgtcaagggaggatcgcgcttgcctcagcaaaaatcgaacctccctcggnggctagaaggggggaaccccctctgcgccaaaactctcctacaacacatctctaccgacctgtctttctccctctcactatacccacccccccactctacctcccctcccgcacctctcccgcacctcccccctcctctcccccctccccccc

SEQ ID NO: 11423 - DNA, 429 bp, Zea mays
  unsure (1)..(429): unsure at all n locations
tgtggtaaaagctttgaccactcttgcctctttgntttaaattgacgacaagtatgccatgagcgaggaagtccttcaacgcatgtcatcatctcgaaggaacaaagagaagaaagagcaaaaggttgagtcgaataacaacaaagataagaggcgaaagacatattattgaacaattgaacagggggctcagtgttgatccgttgtccctaaccaagataagtttcaaaagattatggagggatgctgcatttatcacctagagagcaaccataaatactaaggattgtttcatctcaaaggtcctcacacttactaagcccaagtccaaaagcctaagtcaagcacaaggactcacacaagctgatataccgaattctgagagccactcaggaatcattacactctttcttcccccatcttaccggc

SEQ ID NO: 11424 - DNA, 217 bp, Zea mays
  unsure (1)..(217): unsure at all n locations
cccacttcccccccctcgcccctcctccgcccacccctcccccccctccaccccccaccctccccctccacccacaccaccaccacccccccccccctcccccccctccccccccccccaaccctcacccccccacgaccggccccccccctccacccccccccccacccacccnaccccccccccctcacctctcccccaccccccccccatcccc

SEQ ID NO: 11425 - DNA, 93 bp, Zea mays
tgctgcacgagagtacttgatatgtgatcgagcgaacatttcaggaatcagatgagaactcaggatacagctcacctgaggtgattttgtctg

SEQ ID NO: 11426 - DNA, 386 bp, Zea mays
  unsure (1)..(386): unsure at all n locations
agcttgacgtcgcttgcccgaccttctctgagctcgctccattcgccattcgacctcgccgcgtcaccccaacctcatcaaagctccatcgtccgccattcttcgtcgccaatcatcctcggcccttctaccctctcgcggcaggctctaacccgctcgcgctctcctaccccccccccgcgccctgcctcaccctcctcgccccccccccgtccccccgcccccccccccttttcccnccctgcccatccctccaccccccgtcctcgcccgcccctcgctcctccccccatcccccccccctccaccccccccttcccccacccccccctcccccctcccctccccctctcccctcccctccccccccccctcccccccccccc

SEQ ID NO: 11427 - DNA, 295 bp, Zea mays
acatgaaaagcgtcttcctcaatggacctatcatataaaaggtctatgttgagcaacctcccagctttgaagatagcgagcaccctaaccatgtgtataaactctcaaagacgctctatgggctcaagcaagccccaagagcatggtatgaatgcctgcgagattttctcatcactaacggcttcaaagtcgcgaaagccgatcctactctgtttactaaaactgttgcaaaaaacttgtttgtatgctaaatttaggctgatgatattatatttgggtctactaacacagccac

SEQ ID NO: 11428 - DNA, 240 bp, Zea mays
agcttctaaagggagatcatgtgttaggtctaaccaatgtccgctgtgagaaagatagaccttgtgcagcatgtcaggcaggaaaacaggtaggaagcactcatcacaacaagaatgtgatgacaccatcaagaccactggagcttcttcacatggacctcttcggacccgttgcctacctcagcatcgcgggaagtaagcatggcgctcgaattattaatgatttttcccgcttcactt

SEQ ID NO: 11429 - DNA, 367 bp, Zea mays
  unsure (1)..(367): unsure at all n locations
agcttgggaaggttctttcatcccacatttgttaagcggcgatgccacagccagcccatgctagtcttagctattaagcatgcatctagaccggcctcttcttttgcaaaatcaactaaatacagtttgccgcctaatacacccttaaaagctagtgaaccatcacttcttctaaagacagacacatctacatttgtaaatagacagttataccccatatgacataattgactaacagatagcaaattatatccaagactctctactaaaaatacattagatatagaatgctcattagaaattgcaattttacctaacccttttaccttgccttgatttccatcancgaatataattgaatcctggg

SEQ ID NO: 11430 - DNA, 413 bp, Zea mays
agcttgtccctggctatttattaaacgattggcgtggctatttcagagtcgctgatgcagatataaacacagatgaagatgaacgcgagtggtagtagagaattaccacggagggcagtctcttcttcccgacgtcaaccggcagagcttgtccgcacctcagtctccggctgagcaccataagctcctccagcgtcgtggccgcgctcctcggagggctccatggattgtcctcgtcattggccacctcccagctcttctctgaaggcgcccggcgaaactggaactccttgtcgtgtgctgaagcatcgccactggagtggctgtagtcttccgactctgaaaacgagaaccagctctcacgacggccgcaggaggagccatccgcccacgctgcagcgccagagccgcct

SEQ ID NO: 11431 - DNA, 399 bp, Zea mays
  unsure (1)..(399): unsure at all n locations
agctctagttccatctatattatggactgctttagagcttgnccaagttccttcggcccttctggaagcttcttgacttccatgaatagcaacgcgcccttggtccgaaggtatcttcatgcaaagataagctggatgcagaattgcttcgaaggcattaacagtaccacgaccaatgactgcattgtaaggccactccatgtcaacaatatccaanataacttgctcagtccttccctcgccgatcccccgcgccggccaccgacctctcccaccctttccacccccacccccccccttcctcccacccctcccccctccaccactcccccccccccctcctcccctctacctcctccctccccccgccccccccctcctcatcctcttctctccccc

SEQ ID NO: 11432 - DNA, 407 bp, Zea mays
  unsure (1)..(407): unsure at all n locations
agcttgaagccacggttagtagcataggtatgtaaaaagtgaattgattctagcctagctacgggcgcgagtaggtttcagccgaaaccaaaccttcgacttgtgaatatcccttagccacaagtcaggctttgttccttgtcaccacaccatgctcatcttgcttgttgcggaagacccacttggctcctacaacattttgcntaggacgtggaactaaccgccatacctcattcctatngcacccccccacctctttcgcatcccaacaccccctcccctccctgacccgtccccctacccccgccgacgcccccccctcctacctcccacccctccacccctcccccccgccccctccccctcccctcccccccccgcgccccccccccccccctccccccccc

SEQ ID NO: 11433 - DNA, 126 bp, Zea mays
tgatatactgcagataggatatcatatagttcgacggtttctgaactgaacaggggcaccttgttgattttttttttttgaactaacgccaccctgttgattgacgctaacgttcttgttgctcgt

SEQ ID NO: 11434 - DNA, 357 bp, Zea mays
  unsure (1)..(357): unsure at all n locations
agctcgttctatacaatcattttttttcttagctgcggcgaactcttntgcaactttgacggggcttaaggcgaactacaacaaatcaagtatgtaccccatcaatgcttgccccgctaaaacggagaatctagccggaactctcaactgtcagacaggttcaatgcccttcacctaccttggtgttccgattggtctgccaaagcctaacatctgtcactttttaccgctcattcataggattganaagagattgccatgcacttctgctctcctttcccaggccgctaggctagagcttgttaactcggtgttctcagctctcccgacctctttgatgtgcaccctgaaaattcc

SEQ ID NO: 11435 - DNA, 449 bp, Zea mays
  unsure (1)..(449): unsure at all n locations
tacctttagtcttatgtaactaagtggtagaattcttttattaaggggagatataattaacaaaaaggcggaatcataagaaaaacataagatgtagaaaattgatgagtgcatactatgtcatgagcatcacgtttattttatgacacactgcacctcatgaatagtataatataagttgtctccatactttgacccaaatatgtacttttggcatttgagtacaaaagtgttattttctgaaatgcacatatttagggggaggaaactatatcataggattcaaaatcttatttatcaaatcttatgtaagctntgaatgtgttgtcatcaatcaccaaaaagggggagattgaaagtgcatttatcccttttggtgagttcggcgatttggataacaacacatttaaaggtctaacgaagttgctaagtggttgacaggaaattca

SEQ ID NO: 11436 - DNA, 285 bp, Zea mays
  unsure (1)..(285): unsure at all n locations
agctcctgtgtcataaatcacataaagcttattgatagcgactcggtcgtgactctctaaagcttaataccacaaagcgcctttctactgccttgttatttgaaaaatgtcaaacactcaatttcatattcttccaacgctcttaataacaaaacattaactactccaacgcttggcgtgttctcactctggggttatttctctagcgcttttctaagctctttttattctnttaaaataaaacgcatcctattcattctatactaaaccaacgtataacatatt

SEQ ID NO: 11437 - DNA, 320 bp, Zea mays
  unsure (1)..(320): unsure at all n locations
tggaccatgaattctgtattaaaggctttgnactacgatanatatgttctctcagctccagctgtactgtaattgtcttttatgtgcgcaatagaatcttatatggttctgtcaaatctaaaaggcctagntgctattttgntgtttctcttttgcgacgtatcaacttgttaccagtaattctggcttcctgcacaactttactgtgcgcttggccccatatatagactgcacctgggatctgcgaacaacgaccctgagagaaaagactccaggactgtacaacgaacactaatttggtccacgtagctcttccagcc

SEQ ID NO: 11438 - DNA, 427 bp, Zea mays
  unsure (1)..(427): unsure at all n locations
catgcaagcttatatggacgacgatgtcgnacttttgttaaattggtctgaacctggcgaaaggtacttcttcaggcctgatatggtgaaagagaccgaagaaagagttcaaagaataattcataatttgaagaaagctcaagctcgtcaaaagagttatgcagacaaacggcgaatgcccttatatttccttgagggagactatgtctacctaaaggtttcgccaatgaaaggcgtgtcgtgtttcggggttaaaggaaagcttgcaccacgatatattggtccttttcttattcttgaaagatatgggccagcggcataccgacttcagttacccgaaaccttgtctgctgtacataatgtgttccacatgtcacaattgaagaagtgtcttcgggttcccgatcgaaccatcgaagtgacagat

SEQ ID NO: 11439 - DNA, 323 bp, Zea mays
ccaacccactcctcataaggcgccctcctcttctttgcccataggaactctattcagaacacgacatgaagtcaggactgccttcccccaccatgccttagataaaccacaagtgtctaacatggcatttaccaggtcagtcaacgtacggtttttcctttcagcaatcccgtttgactcggctgaatagggaggaggcctctcatgaataacgccatgttccgcacagaaatacgcaaagactttgggaaagaactcgccaccaccatcctgatctaagacgtccgcactttctctcaactcgccttccacttcaccctcac

SEQ ID NO: 11440 - DNA, 403 bp, Zea mays
  unsure (1)..(403): unsure at all n locations
agctngtcctcaaaagattacctcccctatttgagtgttctcctttagaaagagatttctccccctttagagatgaagaaaagctccctctgatagagatcttaggaaaaagcatgtgaaaactacaggtgcaagacatgatttgaaaagactaacttctcttatgcataggtaacaaaatatgagataaccacttatgcatttttagcaacatggaactatatgatatgaaatatagtctaatcaaatattggagaagacatgtaaacgatactagatgtagcctcacaagatatcgattgaaattcaatggcgagcttgagagacatgagagttcttggagattctgcagcggaagactgtcgccttctccgggacctcattttcctacaacgaactatca

SEQ ID NO: 11441 - DNA, 344 bp, Zea mays
atacgacacagggtcaaaaggaaacaaacacgccatatatgtttgagataaaggttgcaagagcatacacaagggccgtgatgaataaattccaggagtctttgaaatatgcaactacattcaagataatgcatgatcaagaagggggcgcaaatgattgcgtagtgcaacatataacaagatcgaataaaattgtgtggtgacaacaccaattcaaagtgacagctgatgaagaatcagggaagtatacatgtgaatgcaaacattatgaatatacaggtatggagtacgaaatagtactatatacctttatatgaaaacatataaaagatcttatgatcgta

SEQ ID NO: 11442 - DNA, 261 bp, Zea mays
taaacaagcaattatagccgatatgacataatccgactacagaaagcaacacgtaactaagggattctactaagaatacactgcaaattgaacgctctatagcgatggctattttacccaaacctttgaccttgtcatgattcccatcttcaacgataatcgcatcttgcgaatccttgctcttgacggaggaggcgaacatcatcctctccatggtcacgtgcgcttttccatttccccccctcctcctcctctcctact

SEQ ID NO: 11443 - DNA, 196 bp, Zea mays
  unsure (1)..(196): unsure at all n locations
gcacgccagcagggaagtatgtcgtagtncatcctccacacaagaacatcatgacgtatgacaggtcacttgagctacttcacatggacctattcgacccgatcactcatatatagattggcgtgagcaagcacctgcctggtaatgctgatgaatactctcgcttcacttgcgnactccttttttaccatccatc

SEQ ID NO: 11444 - DNA, 339 bp, Zea mays
  unsure (1)..(339): unsure at all n locations
tcgacctcaccggacttcgggcttccgccggcgcgcgcggaccgagctatccagtgagtctccgaccaattccttgcacccatatcttctctggcaccccatgaacctctctgacccatccaattgctctatctcgccgcgaccaggtcggactcctcgccgncgacgagcatccccgcctacgcgcgtcgatcgacccgctccgtccatctcctaccgcccaccgccacccgtgtccccccgccatctctccccgccccgcgccccctgcccctaccccgccccctcctccctcccccatccctctcccctccctcccacccccctcttcccccctct

SEQ ID NO: 11445 - DNA, 105 bp, Zea mays
attttcttccttccgcccgcgaagcgcatcatcgtttgcttctgcagattctagctcaaaggaagaattgctttgccgacgcacaacacgcaatatcacatggta

SEQ ID NO: 11446 - DNA, 347 bp, Zea mays
acatgcaagctggtacctgtagagtcaccaaacttgttatgtaaaaaactctataatcttcttatagaaaaatctgcgtacaaattggtacctccacaagagcgctatatcgcctatcaagctttgcagtcatgtgcacagcttcagcatggaactgggaattctcaccaacaaaaataagtgtcctgcactgtagctgcttcaggttctctgtcaagtcttttctcctgtataaagcatcgcacaatattattatctggtttcactcatccactgactcacgcaccggatgaccgtaggagctgaacatataagctttagagataaaaaggacatactcattgata

SEQ ID NO: 11447 - DNA, 457 bp, Zea mays
tgatggttttttttgcacattcgaaatatgacgctgttgttcgtttttgccatatacttttattggctagaaaatgtcagcagcagtgccaattcactgaaatagaagataataacacatctagaaaagctaaaagtgcttataactcggagcagaggaagtactagctaatgccaaagtctagattgttgaacttaacattttcaattgtgggaatccatacaaaataggaagcatatgaaaacatggattagggataaaagtcctagactatagatgaattggccagggttttgaaaaccgagagcgccgcagattgttattgctgttgctgatccgcctctgaacgctgaagctgcaatctcatcgcaactggatccctctgaacgatgatgcgcctttctgatggcaacggaaaaatgatccaactggatcaggcttgatcgtgcacgactgc

SEQ ID NO: 11448 - DNA, 466 bp, Zea mays
  unsure (1)..(466): unsure at all n locations
cactataaaactaagcttattatgttgacttgttgcgccggattgtttgataatatatcaggcacatagggntgcgggggngatctcctacccgttaaaggccatccttcacaactctaatgccataggcaacatcgtcaagtgggcagtggagcttgctgagttccaactggattacagcctcgccatgctgtcaagagacaggtcctgtctgacttcatcatggagtggtccccttctccgagcgctcctgggggtccggatcccgattcggatcccacacctgtagagcctagtactccggtcttcactgagccccactggaccctcttctttgacgggtccgcccaccagaagggtggaggcgctagagtggtcctcatcgacccaagcggagatcaagtgaagtacatggtgcacctttgagttaaggccaccaacaacatggcagagtatgaagctctga

SEQ ID NO: 11449 - DNA, 422 bp, Zea mays
agcttaacaatattagtcatacaaatctttttcttgttcttaacaaaccaccaattgacatttttctcctgaagaaataacctgtattcataggtccaacttggtccaccaaagttccacaggttgaagaaagctttgaattccggacgatcaatgcatttagaattatagatgtgaaaaccaacaaccttggaggagactgcgaagcggaatacccgatcagcaagctgagaaacgttgaaacccttagcaaaaccacccaggacagcttgaagaagatgaccaactgcaaccgagtcaagcttgaagatgcagcggccaaacgagactaacagccaaaaaaccgaccggaaatccggactttcaggacacacgggagaggctaaccgacgcctgatattattctcgaataacaaaccccg

SEQ ID NO: 11450 - DNA, 434 bp, Zea mays
  unsure (1)..(434): unsure at all n locations
gctaaagggagaacacattttgcgactaaccaacgaataatttgataaagacagggntcgnagcgcacgtcaagcagggaagcangncgccgcccaccatccacacangaacancangacgaccgacaggccgcnggagctacnccacacggancaaaacggcngganagcnaacanaagcancggcgcgaggaagnancgccacgaaccgcggacgacnacncncgctccactcgcgcggacattctgcaggataaatctcaaacccaagagaccttaaagggattcttgagacgggctcaaaacgagttcggcttacggatcaacaagattagaagcgacaacggcacagcagttaagaactctcaaatagaaggctttcttgaggagcgaggcaataagcatgagctcctctcttcctacaaacctaacaa

SEQ ID NO: 11451 - DNA, 360 bp, Zea mays
agctcgagaaatacctgtatacagcccgttgtttttattctctttagaacggtcttctatcaagagtattccacgaggagaaaatgagcacgctgatctgctagccaagtcagcggcacaggggctgcccttaccttcggaagtattctttgagacaataagagcaccttcggcggcacttcttgaaagagcagcgctcaatatatctcctgctcatagtgaacattggaggactgggattatatcttttctccaaggcaactgccttttagatgacgaagcttataataagagaatggaggcacgacccacaccatatgtaataatagagggcgagctacacaaacatggactctgctc

SEQ ID NO: 11452 - DNA, 309 bp, Zea mays
  unsure (1)..(309): unsure at all n locations
tcaagctncacgagcggaagttactttactacgnncaaacggacttgccgagaggtgtttgttcctgcaggaccttcggcgacgaagcatggccccaacacaacccatctattgtccaattcacatccttgaaccttttccttatgtccatccgcacgaccggcataactaggacacgcacccctccctcgccccgcccactcacccacccgccccccgactgatccctcctccacccccaccccccctccacctcccttacctccatccccccccgcgcccgccggcgccctcccaccctcccccccc

SEQ ID NO: 11453 - DNA, 150 bp, Zea mays
  unsure (1)..(150): unsure at all n locations
ttctaaaaccaccacctcatctttttcaggctccggtttaaaaataanatnttccgaagcgaacnagctcgctcttgttttcgctaaaatagcctaccttcaccaacttagccatatcaccttcggtaatagcagacttcccaaactcta

SEQ ID NO: 11454 - DNA, 356 bp, Zea mays
  unsure (1)..(356): unsure at all n locations
agcttgtgtatattcttcatctcaacattttctagtcggagatgccagagccaacagatattagtcttagcaattaagcacgtatcgagttcagctctactaaaatcaactaagtatagctgaccctataatactcccttaaatgctactgaatcatcactacttctagagacagtaacacctatatccgtaaaaagacagccgcaacccattttgcataattgagaaactgaaagcaagttatagtctaaagaatctacaagaaaaacattgcaaatggaatggtcaggtgatataacaattttaccaagtcctttgaccaaaccttgatttccatccncgaatgtgatagctct

SEQ ID NO: 11455 - DNA, 454 bp, Zea mays
  unsure (1)..(454): unsure at all n locations
tatagaaactcaagctggggaaganncttcattccaacgcgggctagatggttttgnttgtagccaacccangnnagncctagcgattaagcaagnancgagcccacctctattgcaatcaactaagtatagctgaccctctaatactcccttaaaagctactgaatcatcactttttctaaagatagtaacacctgtatccgtaaaaagacagttgtagcctattttacataattgcgaaacagaaagcaagttgtaatctaaagaatctacaagaaaaacattggaaatagaatggtcacgtgatatagcaattntacccaatcctttgaccaaaacttgatttccatccccgaatgtgatagctcgctggggatcttgtttttctcgaggaggagacatcttttctcccagcatatggttgcgcaccgctgcgataatcacttgagccacg

SEQ ID NO: 11456 - DNA, 392 bp, Zea mays
  unsure (1)..(392): unsure at all n locations
agcttgtatacctaacanaggggaacatatttgtttaagagtgtgagcatagttgntatgcagaattctgagataaatgagcctgaagttggactgtcaaactgcttgaaatctgaaattcagattaacagtggcatgacatgaacttagggcttaattttaagcaagatcctatgactgcttgtggatgcacgacgtatcaaagttggagctgccctattaacctataattctgcctccccnccttccccccccgctacagacccggcccccctccgctcctactctctcccgtcctctccctcacctccatccacccctccaccccccacccccccccccccccctctcccacctcctcgccctcctctcctctcccccctctctcccct

SEQ ID NO: 11457 - DNA, 344 bp, Zea mays
  unsure (1)..(344): unsure at all n locations
gacactatagaaactaagcttgttgtgacaaagctaagaaaacacnggattttnattatggacataactatcttagcgattcaaacttttatttgactataaggcatagtatcatttgtctttttgttttctttttgcataacagggncagattaagactggagcaccctgcagctcagaccgtcttgccaaatacactgaggcaagtgatttctcgagccctgtactactatacaacacaacattctgataaaaactcgctcttccacttggacattcgacgctgctcccgtccataccgccttctctccctccatctccctcccccactcttcctccacccc

SEQ ID NO: 11458 - DNA, 432 bp, Zea mays
  unsure (1)..(432): unsure at all n locations
ggcatgcaacctttgcaggagaaagagacgatatgaatgcttgggngctgatatagtcaacctaattcttgttaacgtaagctatcaatcttaaatgatctatatccatgattgatccaaggttatttttcaaattactatgtcttaaactcatatcatctcggggaaagtattaatgttataggaaataaagaattatcctgtgcggaaaccaaggcctacaacatagaggaaagccaaaggatggtaacatttatgcttttaaatgcaagtatcttaaattatcatttcctatgtgtcttgcgtagccacatagaaaaggaaaagcactctacatgttcttaaattatgtcaccatcttctgaagaaattcctctcatatggnagactgtatattcttcatttcaataccatgcaatctacatgctttaa

SEQ ID NO: 11459 - DNA, 462 bp, Zea mays
  unsure (1)..(462): unsure at all n locations
tgaaatgggntttcctccatcattctttgatatgcaagtacaccttattatacatctcgcggatcagataaaaatattaaggccactatatttacgtcatatgttttagttggagcgatacctggtagtattaaaaggttatgtgcgaaatcgcgctcacctagagggttcaatcatggagggatacactacataagaagtgattgagagctgtatagattacatcagtgacggaacaatgataggtgtgcatgtacctaaacatgagggtaaactatgtgggagagggagaatgggcaggaaaacttttcgcgttgaggattacaagctagtacattgtgctcatggtagtgtactacaacatctcacgatagccgagccttacatagaggaacacctagatgagctttgttaagaanaacagaaccacacagaggactggatcatgagggagcacaaaca

SEQ ID NO: 11460 - DNA, 346 bp, Zea mays
catgaagcttagctcatcatagcgcggagtgtttttgatctgttcaacttctctcaccgcgctggtagctggctgaacttcatgaattgcaataggcccttgctccgaaggtatcttcatgcataggcatgctggatgaagaactacttcgaaagcattaagtgccccacgaccaatgattgcattgtaggggtattccatgtcaacaatatcgaaaacaacctcgtcagttcttgtgttgtggacaaatccaaaggtcactgccattgcgatcttgccaagcgctacaatctaccttcctccaaagccacacagagggtgcgtaccatcatgaatcttggcccct

SEQ ID NO: 11461 - DNA, 408 bp, Zea mays
ctacgctttatgatctgataaatgtgacagatactacccaccttataatgactctttgattttagggcccgaaccactgcagctagctctagatcatgagtcggataatgttcctcatgtcggcgtaaccttcttgaagcataagctattactcggccttcttgcattaatacatagccgagaccactgcctgatgcgtcacaatacacatcaaagggcttattaatattcggttgagccaataccgcggcagcggtaataatactttcaattgttcaaaagcttcattacattttgaataccaattgaatttaatatcattcttcaataaacttgagattggttcacaagcttagagaaatccggaatgaattggcgcgaataaccagccagcccaaggaaacttcg

SEQ ID NO: 11462 - DNA, 251 bp, Zea mays
tttggaaaaacaaacaaaaaaaagttggccgcctaatacaccccttaaaagctagtgaaccatcacttctttctaaagacagacacatctacatttgcaaatagacagttatatcccatgttgcataattgactaacagatagcacattatatcccaaggactcaactaaaaacacattagaaattgagtgctcgttcgagactgcaattctacctaaccctcttaccttgcctttgattccttcaccgaa

SEQ ID NO: 11463 - DNA, 408 bp, Zea mays
  unsure (1)..(408): unsure at all n locations
gcttctaaagggagaacacattntaggagtaacaaacgcttatattgagtattaagggcnncgagcgcangccaggcgggaaagcaagctggtacccatcatccacacaaaaacatcatgacgaccgacaggtcactggagcttctacacatggacctattcggcccgattgcttacataagcatcggcgggagtaagcattgccttgctattgtggatgattattctcgcttcacttgggtgttctttttgcaggaaaaatctcaaacccaagagaccctaaagggattcttgagacgggctcaaaatgagttcggcttaaggatcaagaaaattagaagcgaccacgggacggagttcaagaactcttaattcgatgcttccttgaggaggagggcataaagatga

SEQ ID NO: 11464 - DNA, 146 bp, Zea mays
  unsure (1)..(146): unsure at all n locations
actagtagggcctttccttgccgcacggtcttggccttgtaatttttcttttttagagacaacaggcagcaaacgaacagggcgcaccctacaaccaactctcaaggngcggcggcggaacacaacccacgaaagccgccaccaca

SEQ ID NO: 11465 - DNA, 327 bp, Zea mays
  unsure (1)..(327): unsure at all n locations
agctcgcacttacgactcttaccgcaccctttatttatatcacacncagacggcttaacaggtagcggtataggtcacaggtaaccacactggcatcgaattaacttntgctcattggctcatacccccgatgctgctcgactgtcgacgctcgcgcctatggactgcttgcaatatctctgctacgtacgaccatgcgcaatctgattcacattgtatgcatcatggtagaacaaatcaatattcctctatacaccatgataacaaaattatctctgtttccatgtcctctgaggctattgtgcgtgacgatgctgctacagctac

SEQ ID NO: 11466 - DNA, 396 bp, Zea mays
  unsure (1)..(396): unsure at all n locations
agcttgtcttttagaattctagaatttgattattagttccaaaaatcataaaactttgtgggcaagcttaaatgataattagagcccttgngtaaagtttagcatattttggatattgtttgatccgaaacccaaaaccctagctttctaaggcaatatttgccttatcctaatggattactaactcggaaaaccctagctacccagctgtaccattaaggaaagctgtattccagataccaacttacgatcccttttatacctgccactcctactccccacgaccactcactatcatctccacccctccgccctccccctactccccctctcccacccccctcccccaccccccctcctcctcccctccccaccttctcatcccccctctccgcc

SEQ ID NO: 11467 - DNA, 219 bp, Zea mays
  unsure (1)..(219): unsure at all n locations
tatcaatagtgctagcgcatgttctgatcctggnttactattgaaatagatggaaaacctaatcctatgcctagaatgtttgcattctgatgacttgcatcttgctgaccaacctctccatttttaacttggaaggtagggttcctttctccagacacactacaacttatgtcgatcgaaatgcttgtgctttgacacaagccatgctcttgcgctctc

SEQ ID NO: 11468 - DNA, 364 bp, Zea mays
  unsure (1)..(364): unsure at all n locations
tcatgctgtggccncaccagtagattcttatttctccccnaaggngcggggaggtgccagtgtcggtaccctacaacatggctaccccttattacagtatgaagacgcgatacccacgcggctatctctagttgngtggcaaacaacgcccgaccccaccacgtggacggctccgcgatcgccacgtgcccagagaagatgacgcacccccggcactcccagcgcccctacanccccatctcaccccccccacccctctacaccccttcccccccccccccccctctacactaccccccacccctctccccccacaccccctcgcccccccccttcctccacccccttcaccctccccgctccc

SEQ ID NO: 11469 - DNA, 340 bp, Zea mays
  unsure (1)..(340): unsure at all n locations
agctnttgtttggtgttgaagcaataacatcgtaagaacaaagaacgggttcaataaggaccctagcttcggcagaagacgaagaggattgtaaaataacaaaatacaccatagaagggatcagacttcaggcaatagatcacatcaataagtatcaagctgaaacagttaaatggcgtgatcagaaggtaagactaaaaacatcaagccaggacacttagtacttcggagtgtgtccaccccggatacagtgggaaaacttcagcccaaaagggagggccctttcttggtggatattcgctaagacctggatcatacacgctcgaggacatggatcggc

SEQ ID NO: 11470 - DNA, 153 bp, Zea mays
ttgctccacctacaggctcgtatcctcccctgagggggttcctagggccactgtcggtaccctgaaacaggggtaccccttactacagtgtgaagacgcggtgcccgcacggctatctctagtcgcgtgggaaaccgcacccgaccccaccat

SEQ ID NO: 11471 - DNA, 285 bp, Zea mays
  unsure (1)..(285): unsure at all n locations
agcttgtaagagacacctaattgtgtggttatccttgcggcgtcttagtgacccatgagattgagaaaaagcactcgaccggtctgagtgaccaactgagagagggaaatggtttaaatagacccggcctcctcaacggggaataggttctttggaaccgaacctcattaaacaaatcgccgcgctcattcgcgttgatctccagtcgatttgtttcccctcccttcctctctctaaagntcccttgctcatattgattcgcgccgncttcctaagctactcaca

SEQ ID NO: 11472 - DNA, 427 bp, Zea mays
tatgtggacgatgtggtaatcaaaacggaaattttgtttattttcattgaagatttacaggtggttttcaacagtctacgacgatatcgatggaagcttaatcccgaaaaatgtgtcttcggggtaccagcaggaaagatactcgggtttattgtcagccaccgccgaattgaagctaatccagaaaagatcgaagctatcatgaggatggaggcaccgcgatcacaaaagaacgttcaaagacttaccggatgtttggcagccctgagcagattcatatctaggctgcgacgaataggcttaccattctattacttcctcagaagtgggcaactttcagtctcctcatcaataactcacgccttcccccctaaaactttctgccactcactctccccgcacccgcccgctttctcctctctctact

SEQ ID NO: 11473 - DNA, 339 bp, Zea mays
  unsure (1)..(339): unsure at all n locations
agctngagttatgttattacagtttagatctattagcgagcgcagagtagtaatattatacaaaccagggaggcacaaactcctcccgataagtttaataaacaaaagatcctaagtggaggaccgagtcctcccgcacttcagtcttgtttttcctcgtttggtaccaccttggagcaaaagcaacaaaagtttgtcgcttcctcacctaaaaacaacaaagggataaaccctgagtatggaatactcagcaagtcttacccgactaaggaaaagactctcaagggtatgctggataaataggagtcaaggagaggcttttggcacaaatcaacttat

SEQ ID NO: 11474 - DNA, 366 bp, Zea mays
  unsure (1)..(366): unsure at all n locations
taaaggcatggtaagtagcataggcaagnaaaatttaaattgacttaagcctagctacgggggcataggtttcaccgaaatccaaaccttcgacttgtgaatagcccttggccacaagtcgggctttattccttatcaccacaccatgctcatcttgcttgttgtggaataccaacttggttcctacaacactctggttaggacgcggaactaaatgccatacctcattcctcatgaagatgttgagcttctcttgcattgtcaacacccaattcaagtcaattagtgcatcctccacctctgatggttcacaagcggacactactgacccatgattcacacactgaccgctaccactccgtcgtt

SEQ ID NO: 11475 - DNA, 274 bp, Zea mays
  unsure (1)..(274): unsure at all n locations
gacgaagtcccaacagaccctcacatatagttgttcttgnaccctcagactgccccaacgagctccatcttcccgctccaacccctcctccttcgtcaaccggctccaccgtctccctccccccctcctcctcctcccacccacccccctccgccacatctctccctaccccctccgccccctcccctccctctcccctccccctccccccccctctcccctctcccccccccttccacacctctcccccctcctccccccctctcccactccc

SEQ ID NO: 11476 - DNA, 395 bp, Zea mays
ctatagaccactcacgcttcaagccttcgaactgtatccatatatctctcgagctttggatctcttgctttacaactcttggcaacatgaccagaaataacttgcgaatcggttttgagaaccgcccttcttatccccattgcctttaacttctgaagccccaaaagcaaagcttcgtattcagcaatattatttgtgcagctgaaatcaagtctcactgcatagcatgttctaactttggaaggtgcaactaaaacagcgcctgcacctgccctcaagacccctccgacaccccgcagatctcctgcgcagctccacctccacatcttctttaacccccactaccccctcctcctctcataaccactccacctcctccccctacactcctccct

SEQ ID NO: 11477 - DNA, 154 bp, Zea mays
actcgcttagaagggagaatgtggccttttatttgcctgatgtcttcttattttttggacactaatgaccggcaaagaacaatggggggtctggggagttgtcccgtatgaaaagagtattgtcgggacgtcggaaggaaggtgaaaaaccgtc

SEQ ID NO: 11478 - DNA, 371 bp, Zea mays
  unsure (1)..(371): unsure at all n locations
caggatgcaagcttntccctgcgcgccgagacgtcgcatatctcggcgggaatgttcgtatgaagannacacgggcacggcgagcataagttgcacccttctattcgcccctgagcccacgngtcggngctcagaacccttgtacatgccccccttgaactataaaaggggaggcatgtgacgcgaacacggacatacacaggacattcaggcttacactcaactcaagctctcaaagcaatacaacatagcggagtagggtattacgcttcagcggctcgaaccactctaaacccttgcgtgttcttgtggtcatccctccaaactccaacaggcaaaacgcttaaaccccctccgaatttatgacttag

SEQ ID NO: 11479 - DNA, 267 bp, Zea mays
gactgagaatgcagctttttgtctttgaaaaactcgtatgttccggcgtcatcggacttagctcgagaggcaaagagtgagccattaccttcagaatttcttctacttcggcagcagaaggtgtcacaggaatttcctcatctcggaccaatctctctggttccggagacacaggttttggagatgcagattctctttttctctgcggcggctaccctcccttcagccaggacacttactacttccgagtgcccctccccctccctc

SEQ ID NO: 11480 - DNA, 249 bp, Zea mays
atggatgaactcgcacacatggccatctcaatgctccaagcgtagagtgcgcaacatctaggaatcacgctaagctgcgatactgcattgcactcgcactcgcacaagacgtgaagaggatgacctacggagggtcaggacactgactgacacacaaggcagcagacaagcatggctccactgtgccaatctcagcattaaaaaggatgatcgccatcgcattgcaggcatttgcatccgtggaggacc

SEQ ID NO: 11481 - DNA, 453 bp, Zea mays
tgacattggattgactcccttggtggaaaccaatccttttcttaatgccaaggcgtctcccattatagagcaggcttctagcaaatttaaatttttcattttctaactcatgctcagtaattttagtagttaatttagctatgtgatcattttgttgcttaatcatggcaaggtgattatccatagcttcaatattaacatctctacatctagtacaaatagtaacatgatcaacagtagatgtagatgatttgcaggcatttaattcttctaccttagcatttaatctaatattctcatctctaagacaggaaattgaatcattgcaaacattcaacttttcaatcttagaaactaaactagcattctcagttctaagacttgaaattgaatcatgacaaatgctaagctccttagataagtttctacactctctctcttcctgagcataag

SEQ ID NO: 11482 - DNA, 386 bp, Zea mays
aaaagaggatcacgaagcgatgctcagatagagctttgacataaccccccaaaaggggaaccgacttaaaggcgaaaagccaaactagaccctgaagaattactatatagctattgataaatgtaaagggcattaatgcaattttacatgggctgcgtcccgtgcctataaatagatgaacagcgctcctgtactgttcacgctgacttggcatttgcttttgcgtcacgtctatacctttacctctttttcgagccgaaggtacatttcgaacttgatatcatttctattttttcataataataaaacagaaatgagctgacattaatacataactattcatgctatcctttatatttcatgcgatcctcttttcataatatacg

SEQ ID NO: 11483 - DNA, 386 bp, Zea mays
tataaatttcagattctgcctatttaccccccctctatgtgactttcagtacctgatggtcattcttagcttatgtccattgctgatgcttgatcagtcagaggtgtttctgcttgcagattgatgacttccatggatccttgtatcagtttgaagttagaacactaagggctactctgggaaccttaaatccccttcgggattggaggggattgaggtggaaaatgaactaattttctctctaatccccttcaatcacgaaggggatctgagttttcaaactagccataaaattctaatccatttattttagtccattctcttgtgagtttaggcgccatgtggtccctgtattagtttggcacatgaacggaatgtgaactgat

SEQ ID NO: 11484 - DNA, 231 bp, Zea mays
  unsure (1)..(231): unsure at all n locations
gactgagcatgcngcttttcatgataaaacaagataaatttgtcaacaactatagacgaatagtagttcttcaaaagatcatataattccatacaccaaaatttaaaaaaaatgaatatgcataaagcaaataaagatgagaggaggatggataattatgtgtactaaactctgttcttaaggcgtcgnctaggcgtccgnccggngnnctaacgcctaggcgccttgccc

SEQ ID NO: 11485 - DNA, 431 bp, Zea mays
  unsure (1)..(431): unsure at all n locations
ntcctgctcacaccttcggctccgtaccaaccttcgtattattctggtctactgcaatgccaactttaatccgaggatacctgttcacacattgtactccagaaatactgctaaatcctgtttttgagccccctcctcacccctcacccatcctcccccctacccctcctacacctctcctcctaccactcgtcatcccactctcccccttccccctactcctaccatcctctcctcatcccctacctcacaacgctcgctcccccccctcatcactctctccttcccaccccgcccccttcctactcaccccctctcatctcttccctcctcccctacccccctctccctccccaccctcacccgtccccctctacccctctccttctccccccccccccctctcctctcccctaccctcctctcccccc

SEQ ID NO: 11486 - DNA, 402 bp, Zea mays
  unsure (1)..(402): unsure at all n locations
caggatgcaagctctatcacacacgagtgctacctaagtgacccctgaactctttctctaaagcgcccccaaattccttgagaaggtcatcaaggctggccagccacatgtcctcggtgtcggactggtttctgcgagggcttccttcntggtgcccagtctgccctctccgctctcttccctctccccccccgctctcccccctcccctcccccccctccccctcnccccccccccctcccccccccccctcccctccctccccccccctcccccccccctcccctcccccttctcccctctccccccccccccctcccccccccctctccccccctctccccctcccccccccctctcctccccctctcccccccccccttctcctccccccctcccgcc

SEQ ID NO: 11487 - DNA, 417 bp, Zea mays
cttactctcggtgctattgtggctaaaaatacgtcttttttatcttagtagtatacaaacatggatttagcagctttaatttagagaacttcgctcacgcgcacacatatgttaagagtctatcaagccctaccccttctcgcccgcctcggtcgcctcccctctcccccgcgcgctccacaactccccacccccgaaccacacgccccccctccagaccccctcccttctctctctcccccacatatcccccccgccgctgcccctctccgcgcccacccccacaccccctcatctcctctcctccatctcccctcgcctctcgcctctcttcctctctccaccccccacctcctctctccctccctctttcactctcctccctatctccacccgccccacgccctttcgctctct

SEQ ID NO: 11488 - DNA, 311 bp, Zea mays
  unsure (1)..(311): unsure at all n locations
ctagctataatcacaccaggtgaagggcatgtagaaccgaagggggactattatgaaaaggtcgaccagatctaggcatcgtctaccagtcaactatggcaccttggagatagtatcttagctagatttaatgaactattagttattttcgaacgaattatcgctaagcaataaagcttaaaacactccgccctatacactagccaccgcatggcccacccccgccctcgcgccaaccgcacgcctcccccccctcgcccaacccgcccgcctccccccactccccanccctccccccccgcccccccacc

SEQ ID NO: 11489 - DNA, 205 bp, Zea mays
  unsure (1)..(205): unsure at all n locations
tatagactactcacgcttcaagctgtggaaaacatcaacaaataccaagctgaattatatattatggtgtgatagaaaggctaggctaannaacatctaaccaggatatttggtgcttcgaagagtagccaacccagagacagtaggcaaactananntgaagtgggaaggaccttttctggtagtatcttcgtcaagacccggc

SEQ ID NO: 11490 - DNA, 279 bp, Zea mays
atttaagtactctcatccttaggattgtttgcgttccttacgataaaagagcatcacagggaactttgcagtaagatcccaccatgcttccaatgaaaatatatttgccggcgtttctagaccgcccgccccctgcgccgcctcatcaattgctccgccgtctccatccctctccccccctcttcacccccccccccctccccctaccccccctccctcccactccaccccccccccccccccccctctctctccttctccctcccccacccccaccct

SEQ ID NO: 11491 - DNA, 313 bp, Zea mays
ctcaagcttctaaagggagaacacgtgataggtctaaccaacgtttatttcgatttaaatatatcttgcgcagcttggcaagcagggaaacaggtgggaggctctcatcacaccaaaaatgtgatgacaacatcaagacccctggagctgctacatatggacctcttcggacccgtcgcctatctgagcataggaggaagtaaagatggcttagttattgctgatgatatttcccgcttcacttgggtattctttttgcaggataactctgcaacccaagggaccctcaagcgctttctcaggagagctcaaa

SEQ ID NO: 11492 - DNA, 293 bp, Zea mays
agcttacaggttcttcgaaatgaccagtttcttcggagggagaatccacccaaggcacgtcagatcaatccacaccactcagaattgacgacagaggaagtcagcaacagaggccgcaatatttctcccaggctttggggcagcaacaaagctatcctcggcccctagctccaaggggcagaggcgccaggggcttcggcggaaggtttggcgatcagcccaggaaaatttattgcctattctgtggcgaggacaagggccatactacaaggatgcgtcatgtcaccattcac

SEQ ID NO: 11493 - DNA, 257 bp, Zea mays
ttttaccttctgtcaagccgaaggtataaatgttatttaatattattcatactcatttatgataatataataaaaatattctgataatatcatttaattattcatggcactttccatgcttcatatgtttccacttccattattatatactgaaatgatgaaggtatgtccttcataaccttcgtctgaagatcattatattctgaagaagataatgcttccaaggacgaaagcctttaattattaacattttgcgc

SEQ ID NO: 11494 - DNA, 140 bp, Zea mays
cgatcgtaatgtaaacactcctaccagaccaccattgcaaatagaatgcgctggcgacatagcacttttcaccaactctccgccaccccttccttctctccccccacgcctcctttgctcctctctccctccctccctcc

SEQ ID NO: 11495 - DNA, 453 bp, Zea mays
  unsure (1)..(453): unsure at all n locations
tagcagnagacctcctgggatataatagaataaaanttgctcagtaaattatggcacaaagngcagaagaaggataaatcttaacaaaaaaactaacaatgtggcgaactttcttcaaggacactggacacctaccccagaaacgtgttgatgtttgtatctttgtaagatagtctactgttgctcttccaggctttatccttggtaccctcgcacacatcttattcaggtaatcagatatctctttgggtaagttagcctggagcaaaaaaaaatgcagataaaatatgtgcaaataagcatgcatcccaataaactatcagttactgaaaatttttaagaacttgagagtccaactacgacactataggactgagatcattataatttttgccatgtgcattgtactgcagtgctccatatatgtgaaaatgtgaattgtacttcgcttca

SEQ ID NO: 11496 - DNA, 410 bp, Zea mays
  unsure (1)..(410): unsure at all n locations
ntaccttgaatcccacaagccagcatattcttgagagtcttttcctttggcgcggaagacttgccgaaagtacacttcgttcttaagcgcctcgaacctatgttgttgccggcgcgccccagccgcactttccgcccccctccacgatgcccgccgcgcccgccgctcccctgccctacgtcgccgcctccacgctcgcgcccccgctgcccgtccctcccccccacgcgcgcagcctcccgcctcacgtccacctcccccctctcctcacaccccacccaccccccacactcgtcccacgcccccgccccccgcccgacgcccgcgcccccctcgctcctccctcgcccccgtccccccccctcctctcccccgctccccccccttttcccccctctccccctcccccc

SEQ ID NO: 11497 - DNA, 364 bp, Zea mays
  unsure (1)..(364): unsure at all n locations
agctcgcgaaggctctttatccccacatgatacttttgttgacgccacagacacgccatgctagngttagcaattaaccatgcatccacaccggcctcctcttttgcacaatcaactaaacacagcttgccgtctaacacacncttaaaagctaatgaaccagcacttcttctacagacagacacatctacatttgtgcatagacaattatatcccatactgcataattgcctaacatataacacactatatccaagagactcacctaaaaacacactagatatagagcgctccgacgaaacaacactctcacctaacccctttaccttcgcttggactcccacaccgcacactattggaacct

SEQ ID NO: 11498 - DNA, 337 bp, Zea mays
agtcacttcaatcactctttgatcggttaacggcgtcgcgaaacaaaataagagtgcttggaagggaagactggagtgactccaacgccatgagactatttatgagagcctacaaagaacaggacaagagtctagcaaggatgataagggaccgtgatgactatgaggaaatgacgcctcatcaattatttgcaaagattcaacaacatgaactccaagtagccccaatcaagacaagaagacttcatgccttgatctcaaatgaacaagacaccctcaagacgaacacagatcacaaggcaacgacagtcgcccagacattaagcgatgaagatag

SEQ ID NO: 11499 - DNA, 143 bp, Zea mays
  unsure (1)..(143): unsure at all n locations
gcaaggagacacggaagngacaccatatgaaaaagaagacnggcgcggcagaggaaaaaggcacacgacaagagaaggagacaacagacccgagcgcaaaggcccacgaccgcgcacaagaaggggagagaggcagnaaggga

SEQ ID NO: 11500 - DNA, 350 bp, Zea mays
  unsure (1)..(350): unsure at all n locations
agcttaagttagggaactagaaatatatatagaaacagaacagaaaagagaagaaaaaggaaaagaatatgtgctataggacaatagtaataataatatataaataaatatatcatcttatactgctattttaattgtgcacttgacctatgtgtaaaactcactaacaaattcaaattcaaatggtaaactttgaaatggagaaagaaatgcaaaatataaaagaaaataaaaggagaaacttacccactaacctgngccgaaacccctcctacagcccactaccgatgctcccttcccctgctcggnccacgctacctccttttctttttaccagtgacacttatacg

SEQ ID NO: 11501 - DNA, 157 bp, Zea mays
  unsure (1)..(157): unsure at all n locations
ttttcggccnncgcaggggctgatgggatgaaggaaaacccctcgcccgaaggattcaagaaagaatgctggagaagaatgcttcaaggcatgagagaccgcgacaaagaatgattataagcgattcatatcaaaatgacgaacacaactgtcagcc

SEQ ID NO: 11502 - DNA, 393 bp, Zea mays
  unsure (1)..(393): unsure at all n locations
agcttgcattgcatgtttaaattccttgtattgcatctagggcttgcctaacctagntaagataaccgccaacaaagcgagcgaaaaagcttaactcgggtcaaacttgacaagtcttagttttacgcttttagcacttcaattcttactttttatgcaactattggntcttgaaatatgcatgaggtactgcacttagggggagtactcaaaactcacataactcatgaaaaccaatagtgcaagccaccacgctaacttcaccattcgcctatcttctctaacaactatctagcccatcccacaatctcccgacccgcacaccacgcgcccccccacctgcccacccccgcccactctctcccctcatacnccgcccccccctcccccccc

SEQ ID NO: 11503 - DNA, 433 bp, Zea mays
  unsure (1)..(433): unsure at all n locations
agctngacactcggcgaagacgtctctttttctttttctttccctcaccaagaaaagtggttgattggctcggtgaggacgcttcaggtgaacactatcagacctctgaatatccaaagctttgccagcctctgggatgggcactgcatccagtgattcaccaggggctgcgtcagaggaatctttagccaacatatccaacatggcacttatctcagcatcacttggattcaaaggtacttcgaaatgaacctgcctctcatcatcagggatttcaccaagtgaggcaaccaaagcactaacctcttcgggagatggtcgctctctaaggcccaaatcgctatcaccagcacgaggattcgacaacaaattggtaaaagccttggaaggaggcagattccaggccgtgttttcaacaggagcactgatgttc

SEQ ID NO: 11504 - DNA, 326 bp, Zea mays
tctaaagggagaacatgtgataggtttgactaacgtgcatttcgaaaaagatagaccttgtgcagcttgtcaagcaggtaaacaagtgggaggagcgcatcacggcaagaacgtgatgaccacttcaagacccctggagctgctgcacatggacctcttcggacctgtcgcctatctgagcataggagggagtaagtatggtttagttattgttgatgatttttcccgcttcacttgggtgttctttttgcaggataagtctgaaacccaagggaccctcaagcgcttcctcaggagagctcaaaatgagtttgagctcaaggtga

SEQ ID NO: 11505 - DNA, 419 bp, Zea mays
gcttaccgcatttgaagcatgagcgcattttcttgtttttggtcttgcttggctgtcccttgcgacccttaatcgccgtcttgaatcttttgatgatgagggccatctcttcatcatttagtccggccgcttcaatttgtgccaccttgctaggtagcgcctccttgctccttgttgctttgagagcaagaggttgcggctcgttgatcggtccattcaaggcgttgtccacgtacctcgcctacttgatcatcattcacccgctgacgatattttctaagacttcttccggcgacattttggtgtacctgggattctcacgaatattattcaccacatgaggatcaagaatggtaaaggaccttattattgtcggacacgtcatggtccgccatcgcgtgcttcatagctccttattt

SEQ ID NO: 11506 - DNA, 329 bp, Zea mays
tatctcgaaagaacctccaagttattcttgcttgacttggagcaatttcggatggtgtggccgaccgggaagtttcctcgggtacgcatgagtgaggacaaagtgcgcacaaaagactcatgttggtctgtgggaacgatatatgatcctagagagctgctaggagtaagtaccactggtccagagattggacgaggtgttacatgttaagagtcttcttgcttttttattgcgccctccatttgtttagcaaaagttttcaacacctgcaccatgaaaatttgaaatgttggtacttttggatccttgcagccgacaaatagccatat

SEQ ID NO: 11507 - DNA, 384 bp, Zea mays
caagctttgaggaaatattgagcgaccgtggggacgtctgtgcattctctggcgcgaggggggttgccgcgattatggagaaggcatgctgtgaacatgttaaaaccttggcccagaccgaagccgccttcttcgttgatgatacgaatgaccccctcgaccaatgcgagtttaataggtggaaaaatatttaccgatatccgggaaaacacggccaatggatggcttatgaaataatgaataagagcgaaaaagaaatttttgactctcgataagcatccaaagaaactgaaaaaccgccggactctaaaaacaaaaggaatacataagggatttacctcgacttcttaattctagaaatgatgtgtcattaaagcagacaac

SEQ ID NO: 11508 - DNA, 327 bp, Zea mays
ttctaaggtgctctatggacttaatcttgccccaagagtgtggaggaattgcccgaattattctagcttaagtgcctaagtcccgccttaaaggcaaggccacacttaaactggaataaaccgtcagtccctcggatcttgtcctataaagccacttatccaggatcaaataccactagctcactcgaaggtgaggcacagagaaatacaataaagcataataccataaattaagaaagcatcattagtgattacattatcggagttttagaaataataacaataagctttaatgcagcggaaataactaacggagaaaaccgagta

SEQ ID NO: 11509 - DNA, 415 bp, Zea mays
  unsure (1)..(415): unsure at all n locations
agcttcggcgacgggttaaaaatttggcagcaaaactgtgcatatagcaatgaatgctgtggtaacttcacacctactcgtctctttatatagtgctgcaggtaagaaggcgaagcgccaggatttttacaccaggcggacacccgctcgcactcgctgcgcggtggaccgcagagaccgaacagtaactctgaaaggcggggccgctacacgctgagaaattgaatcgtttctcgacaacgagctcagggaaggtggtttttagaccttcggcgctccgaagcttaagagacntttttcacggatcaatctcgttacgaaaaacgatctagcaccgcgaaaggggctactgttgggcctgtgcttcgtcgctgaaggtcttttgggaagaagcaaccttcggctgaagctcttt

SEQ ID NO: 11510 - DNA, 326 bp, Zea mays
tatgggatgtttttcaggagagtaattggcctatcacaactttgatagtgcaatagatgatcctaacaatcactacccgccagagttcttgaattctttgatgccaaatggattattgccacatattctaaagtttaaggttaactgtccagtgattttggtcagaaatcttgatccacctaatggcttatgcaatagaacaagattggtggtttgacgccgaaattgtgctaggagaacacgtaggaaagagagtctttcttctaagtatacctttatatttgtcagatgatgaaatattctccttcaagtttaagagaaaacga

SEQ ID NO: 11511 - DNA, 368 bp, Zea mays
agcttatgaagattcttcatcccaacatggtgctagtctacgatttcttagccaacccatgttagtcttagcaattaagcaagtgtcgagttcatctctatcaaaatctaccaagtatagctgaccctctaacactccgttaaatgctgttgaatcatcacttcttctaaagacagtgacgccaacatcagtgaatatacagttgtggcccatttgacataattgacaaacggaaagcaagttgtaatctaaggaatctacaagagaaacattggaaatggaatggtcaggagatatatcattgtttccaagacctttgaccaagccttgattttcatccccgaatgtgatagctcgttggggatctt

SEQ ID NO: 11512 - DNA, 331 bp, Zea mays
tgacattcatgcaaaatgaaccctttattttttccttgccccaaccaaacaaccttccactcaatattactacgtttttcaatcatatgatttgcacatacaatcctacgtttttcctattcctatatttttcaattcctacatttcaaaggagcccttagtccaagatctctccaatagtctagtccctcccaagccaactctgcttgactatcttcccggcgctgaactaggattcataacaataactaatataccagtagaaaatagttaactgtgatactttcaagtttcaaccatatgtaaccatgaaagcctgcttattatgaaa

SEQ ID NO: 11513 - DNA, 427 bp, Zea mays
agcttgcttacttggtaagatgactcaatgttcctctcacgggtttaccggagaggacattagatttattggaactcatacatactgatgtgtgcggaccaatgagtacgatagctaggggaggattccaatacttcataaccttcactgatgattttagtagatatgggtatgtctacttaatgaaacacaagtctgaatccttagaaaagttcaaagagtttcagaatgaagtataaaatcagcgtggcaagaaaattaaagcactgcgatcagatcgtggaggtgaatatttgagtcatgaagttagcaatcatctaaagagttgtggaattgttccacagcttacgccgcctggaacgccttagaggaatggtgtgtctgagcaacgtaatcggactttattggatatggttcgatcaatgat

SEQ ID NO: 11514 - DNA, 327 bp, Zea mays
tgtgaagattcttcatcccaacatgggctagtcggcggtgccagagccaacccatgttagtcttagcaattaagcaagtatcgagttcagctctatcaaaatctaccaagtatagctgaccctctaatactccattaaatgctactgaatcatcacttcttctaaagacagtgacacctacatcagtaaatagacagttgtagcccattttgcataattgagataccgaaagcaaattgtaatctaaagaatctacaagaaaaacattggaaatagaatggtcaggagatatagcaattttacccaatcctttgaccaacccttgat

SEQ ID NO: 11515 - DNA, 387 bp, Zea mays
agcttgtgaagattcttcattccaacgtgggctactctgcgatgctagagccaacccatgttagtcttagcaattaagcaagtgtcgagttcagctctattgaaatcaactaagtatagctgaccctctaacactcccttaaaggctactgaatcatcacttcttctaaagacagtaacacctgtatccgtaaaaagacagttgtaacccattttgcataattgagaaacaaaaagcaagttgtaatctaaagagtctacaagagaaacattggaaataaaatggtcaggtgatataacaatttacccaatcctttgaccaaccttgatttcatccccgaattgaacgctcttgggaatcttgggtttctcggaagaaggaacattc

SEQ ID NO: 11516 - DNA, 326 bp, Zea mays
tatgaagattcttcattccaacatgtgtttttcggcgatgccagagccagcccatgttagtcttagcaattaagcaagtatcgagttcagctctatcaaaatctaccaagtatagctgaccctctaatactcccttaaatgctattgaatcatctcttcttctgaagacagcgacacctatatcagtaaatagacagttgtagcccattttgcataattgagatacagaaaacaaattgttatctaatgaatctacaagaaaaacattggaaatagaatggttaggagatatagctattttaccaagacctttgaccaaaccttga

SEQ ID NO: 11517 - DNA, 273 bp, Zea mays
agcttaactaaagtcatctaagagtcggctatctagaacaacgacatcgcccgctagacagcatacacgtcggcttgcctattattatcacaattcgagacaccacatatataacaaacacttaacgaaatcgactcctgtttaacatgagttggctaatcacagtagaagacctagcgaaccattttagacatcgtaactcaagaatatgggttggagccgattgatcagtgtttctcagccattgctcaacttgaattagttaacacacaa

SEQ ID NO: 11518 - DNA, 323 bp, Zea mays
tgccttcgcttcagtctatcattctttgtccaacggggtcgtggagcgcgccaatgggaaaatattcacagctgtcaaaaaaatgctcctcgatgaaagaaaaggcaggtggaccgatttattaccagaggcagtctgggcgctaaacacaaccgagtgcagagcgaccgggttcactcctttccgccttctatacggatcggaggcaatgaccccgcacgaaataaagcatgggtccccgcgtacagttccgtcagccgtccccgacatcgatgagccaacttcaaaagatctcattgacggagaccgggtcttcgccttac

SEQ ID NO: 11519 - DNA, 415 bp, Zea mays
  unsure (1)..(415): unsure at all n locations
agcttgttatcgaaaaacgattaatatanttctatcgtcgaacggnccaccgctcagccagtgtaggcggtctggcggttcgccttcttcccctatagcactatataagcagacaggttggtgaggagttaccacaccattcattgccattgcactgttgtgctgttaaaaattttcaccaaagccgaagctttccggattgctctttccaaacacgctcttcgtcattcaaagtcagctttgtcttaaggaaccacgagacttgagatggtctgagtaagatccactgctagagtgtcccatgagggagatgatgctgaaatgtcacaaatagctctaatatcagaaatgatgaggtgatcgggtctaatagtgctagaagaagctattgctgaaggtaaaactgccgaagctg

SEQ ID NO: 11520 - DNA, 326 bp, Zea mays
ttcccttatttagactttatttactcttctgagtccagcttagggttaagtaccctattttagggttttacccacaaccagtcacatccacacaaattgtttgaaatttttgcctagtgaatgcattctaggtgtaacaaacacatgatatgccaatgcttatgatgtcatgctcaaaatttagtggcagtaacaccaggggtgttacaaaaaatagttgttaaaaactccaaacaagccattcaagtggaggttcaatggggaaatctgaaattcagatttctgaattttcagcctttgaaccaaaaccgagcgcgttcaccttg

SEQ ID NO: 11521 - DNA, 420 bp, Zea mays
  unsure (1)..(420): unsure at all n locations
agctttaccaaatggacgaaagagtgccttcctcaatggaccaatcaaagaggaggtctatgttgagcaacctcccggctttgaagacagtgagtaccctaaccatgtctataagctctctaaggcgctttatgggctcaagcaagccccaagagcatggtatgaatgccttagagacttccttattgcaaatggcttcaaagtcggcaaggtcgatcctactttattcactaaaactcttgacaatgatttgtttgtatgccaaatttatgttgatgatatcatatttgggtctactaacgaatctacatgtgaagaatttagtacgatcatgacacaaaaattcgagatgtctatgatgggggagttgaagtatnttctaggatctcaagtcaagcaacttcaagagggcaccttcat

SEQ ID NO: 11522 - DNA, 338 bp, Zea mays
gaccttagaatctcagctttaccttggtcccaaagccttttattcttgagagtctttttcctttgatgggtaagacttgcaaaagtacactctgtaattattgttttcgaacccatgttgttgtaggtgatgaaacaactgagctttgttgtttctgctccaaggtggtgcccaagcaggaggaagaacactaaacttatttggggagggtgttttgcctcctggacagtctggtgaattatagcggagcgcgcctccaaattcccgaaagtggctggttcatctgttgtacggcctggtgcacccgacactgtctggtgcgccaaaaatcagcacac

SEQ ID NO: 11523 - DNA, 401 bp, Zea mays
agctattgcgcgtcgatccgttctccgtcttagcaggcgctgcgcccttccacgggatcacccctgggaagcgcgtccagcccctcgggcgactcgacctcccagtctgcttcgggacaccctccaacttccgaagggagaccctgacgttcgaagtggtcgggttccgaggaacctaccacgccgtgctagggaggccatgctactcgaagttcatggccgtccccaactacacctacctgaagctcaagatgccgggccccaacggggtcatcaccgtcggccccacgttcaaacacgcgttcgaatgcgacgtggagtgcgtggagtacgccgaggccctcgccgagtctgaggccctcatcgccgacctggagaacctctccaggaggtcccagacg

SEQ ID NO: 11524 - DNA, 319 bp, Zea mays
tcgggaagccaatactcttttattattccgataacttttgctccggttcggtctcgaaggcaacccaggctttcgtcgtcaataccaccgaagagtagtgctcctggctgatacccgcaggaaatggcgtagtctttcaattcttctttctcggcctttgttaattcttgaccaattaagctttgaaagttgaaactttctccttctgaaatatcttcggctatttccctatcttttccaggtactgtggccatggtttctttggcggctgtggcaacctcttttgcggctatgttcacaagtattttatcaatatcca

SEQ ID NO: 11525 - DNA, 376 bp, Zea mays
gacccggatccttaagcacctgcagctgcagcttgaccgagacccgcgtttctgtattcgaaaccggctcccggagtcattccccgcggcgccgtggaccggtaatcactgagccttttccgatcaatgccaaatgcctctcataccccaggactaatctgtcgtggaatgaatagtcgcgtggttggcggacacccccgccgagaggaccccgctgcgccgtggactgacattcggcatccctcgggaccgacgtcgtggaaccgcaaactcccagctaacctacctcgcggatttttgtcccgtaacccgccccctttctcttgcggtctgtacacctaagggacgggtgaaggaaaaagtaggggcttttact

SEQ ID NO: 11526 - DNA, 321 bp, Zea mays
tttagtgaatgccaaatagaaactttggatccgacaagatatataatgattaaaatccaccaactctgctacaaccattagaattagaacagaatacttttagtgtattaggatagtaactaattgcatatgaatttacaaatagtaaaagatagacctcatttcataaatcataaataaatatattatgagggtctgcaaaccatgaaacaattccattcagaaacgagaaacagaggcatagcaattttatgcataaatacttcctctgtcactcattgtatgaggtcctgtcccattactaaacagttttgtgcccca

SEQ ID NO: 11527 - DNA, 416 bp, Zea mays
  unsure (1)..(416): unsure at all n locations
agcttgggaaggttcttcatccctacatgtgctaatctactattccacagccagcccatgctagtcttagcaattaagcatgcatctagaccggcctcctcttttgcaaaatcaactaaatagagtttaccgtctaatacacccttaaaagcttatgaaccatcacttcttctaaagaaagacacatctacatttgtgaatagacaattatatcccatattgcataattgacttacggatagcaaattatatccaagcgactcaactaagaatacattagaaatagagggctcatntgagattgcaatcttgcctaagcctttaacattgccttggttcccatcaccgaaaatgattgaatcttgaggatccttgttcttgacgtaagaagagaacatcctcttttcccctgtcat

SEQ ID NO: 11528 - DNA, 328 bp, Zea mays
ttatcaaatggatgtgaaaagtgcctttcttaatggaccaatcaaggaggaggtctatgttgagcaacctcccgactttgaagatagtgagtaccctaaccatgtttataaactctctaaggcgctttatgggctcaagcaagccccaagagcatggtatgaatgcctaagagattttcttatcgctaatggcttcaaagtcggaaaagccgatcctactctctttactaaaacacttgcaaatgatttgtttgtatgccaaatttatgttgatgatatcatatttgggtctactaacgaatctacatgtgaagagtttagtaggatc

SEQ ID NO: 11529 - DNA, 415 bp, Zea mays
agcttccaacactttggaggaagttcgaatgggagttataaactccacgcacaaatgaacacaaagatgtagcacacactatctctcaatgaatctcacaaggcgctagggctaaactcaattgagtagctctcaattgcttgctctctcttttgtggcacttgtgttggttgtagtggactaaatcttgtgtataggatggatcaatgaatataggtggttgggagggcttgagtatgtcaactaggtgacttggaatgttgcttggactcccacaccttgaagtggccggttggggtggtatttatagccaccatccaaaaactagccgttgatgaagtctgctggcgatgggcgcaccggacagtccggtgcacaccggacatgtccggtgtgccagccacgttatcctatc

SEQ ID NO: 11530 - DNA, 327 bp, Zea mays
tggagacggagttccaccgccctttttcttgctgcctgacatgctcgacgagcagcttgtcctcctggctggtccagggccccttcctccacccgtccaccacctcctcctggcgccgtccccagccgagcggcccctcctccatttgcctctccgacggcggccggctgtgctggtttcctggagatttttgttctgcccggcccgttggcagctagctagctagctatttgccggcgtgcgtgggagcaagcagcctttctttgccgttgatgctgcctgtccacccgcactgagtgagggcgtggagcgagcgagtgagccgct

SEQ ID NO: 11531 - DNA, 443 bp, Zea mays
  unsure (1)..(443): unsure at all n locations
cacctgcggcatgcaagcttagaaggtttntatatatatcttatggaaaggcttcacccttccaattattgtaagtaagttatgcccttcgagtactatcaggacttgtaataaatacatctcattctaccatgtaaaacttgagttctggaaggtaaagtgtactttgtaaaagtcttctgctctatctccaatgtgtgtgtatcaaatgtgattactgtaatatacttgttatgtgggagatccttgggatgatgagttccagttggcgaactccatagccttgttaagttacctggtacacgtggacagccatctgaggctgttaatggcaaggggtggtgcatgtgggcctgataacttgggagggcttgcatagctttctcgacccgatatggtttatatgaattcatgcgtatgtcatttggactaactattgcacc

SEQ ID NO: 11532 - DNA, 328 bp, Zea mays
tgtggagatagaaactgtgatttgtttgatatgccacaaggaaggccacaagtctttccaatgcaaggaaaagactagggataagcaaaagccaacaagcaaaatctccaacacctacatcaacaaggtggaaaaaaggcttctacaccattgtttatcacttgttctcaaatgttgtgaatcaagaacaaggcaacacaattgttaagtattaaagacatcttctgaaacattacctcctcgcggatataatgatcattagacgaaggtcatgaaggacatgccttcatcatgttatagataaataaggatacacaaggataaatat

SEQ ID NO: 11533 - DNA, 429 bp, Zea mays
  unsure (1)..(429): unsure at all n locations
agctngngaaggttcttcatccccacatgtgctatgttgtgatgccacagccagcccatgctagtcttagcaattacgcatgcatctagaccggcctcctcttttgcaaaatcaactaaataaagtttgccgtctaatacacccttaaaagctaatgaaccatcacttcttctaaagacagacacatctacatttgtgaatagacaattgttgggaccatgcttcgtcgccgaaggtcctgtaaaaagaaacagcttcggctgaagctgctcatacgtgacgccgaaggcaccattcatgaagcttcggtattgcaacatatacgaagatgaaggggcgaaccgacttaaagatagaatgactttttagcccataaaggtctgagtcaatgttgtaaacttttatgaggggcatgagtgtattcctcac

SEQ ID NO: 11534 - DNA, 327 bp, Zea mays
tgcattgcatgtttaaatttcttgttttttatttagggcttgtctaacctagttgagataaccgccaacaaagcgagtgaaaaagtttaactcggatcaaacttgacaagtcttagttttaagcttttagcacttaaattcttacttactatgcaattgttggttcttgaaatatgcatgaggtactgcacttagggggagtattcaaaactcaaaacactcatgaaaacccctagtgcaaggccaaaatgcaaatttcaccatttgcctatttctctaaaaattatctagcctatggcaaaatattttgaaaattatgagaaaata

SEQ ID NO: 11535 - DNA, 439 bp, Zea mays
  unsure (1)..(439): unsure at all n locations
aaccatcacaagtctattgaagaatgagattatttttaattggnctttagaatgtaatgaagcctttgataaattgaagatattattaaccactgctccggtattggctcaaccggacattagtaagccctttgatgtttattgtgacgcatcaggcagtggtcccggttgtgtattaatgcaagaaggccgagtaatagcttatgcttcacgacagttgcgctggcatgaggagcattaacccactcatgatctggagctagctgcagtggtccatgccctgaagatctggcatcattatctacttggtaatatctgtcacatttatacagatcataaaagcttaaagtatatcttcacccagtaagagttgaacatgagacaaaggcgatggcttgatgcttataaggattatgaactggagatccattatcaccca

SEQ ID NO: 11536 - DNA, 332 bp, Zea mays
tcgtattcagcaatattatttgtttttctgaaatcaagtttcactgcgtagcatgttctgactttggaaggtgcaattaagacggcagctgcacctgcaccgaaggttccccaagaaccatcgcagaatattgtccaagcttcgacatctttacttgcttcttcttcctgagcccctgtcgtcaagtcagcaatgaagtctgctaacgcctgggactgaatcgaagatctatgcacataatcaatgcagaactcattgagttccgcagcccactttccaatccttctagtagcttctctatttctcataatatccttcaaaggctgtgaata

SEQ ID NO: 11537 - DNA, 437 bp, Zea mays
  unsure (1)..(437): unsure at all n locations
agcttgtcaaacatattttggtacccatctcttgatgggnccatcacggttagtcaacaaagatctatgaacccaaaagtcctttgtgttagcgcttggtaaactagttacctttctagcacaagttgcaattttgggttgcctagttacatgcgaaatgattgacaagctagaggtggggttgttaccaatgggacaatccttgcattgatgtccctttttccggcatgtgtagcataggcgtttttgaagtcttgaagatatcttctttccttgttggttgcttgctacatggttagtaaaaactttcttttctaaccctatgcctctttgtttcaaatggggacaagatttgattaagtgtcccttctttgagcatttaaaacaaagtctatcatccttgttaataatcaagccatttttaatgaacgaacatg

SEQ ID NO: 11538 - DNA, 326 bp, Zea mays
ttgaaagactaactgggctttttttttctaactaaactagcgacctacggtcacattgctttgataccacttctgtcacacccggttccagggggtagaaccgagcgcatagcatatgtgtgccaggatctatttccacacatatgttgacgtcacaagtgtaatatatcaaaagaacaatgcataaaagcgtaaataacgattatattacactttgaacagacataatgtcttaacctttattcatcaaagtacagggaaacaaggacatccatccacaggaagatgaccgagggtatcactagactagcatccatggagttcag

SEQ ID NO: 11539 - DNA, 453 bp, Zea mays
  unsure (1)..(453): unsure at all n locations
ggatccttaagtcacctgaggctgcagcttgttcgcagcttaacaatcttttaatgagcttcggactattgaccttcaacatcgtcatcctgtacaaaacaaaacagtataaggtaaaaagtaattacaagagagcaagcaacatgtataagtatcgtaccggctntagtaggcttcgggcctcatcactagccaactctcgaccacccttcgcccaaatttgcgttataaatctgctccctatgcttcaggctatattggggatgtcaaccaaatccgattcagataggctgaagtttggtctatttaaattttttgcgtgagtacagccagccttcaaaaatgttgcggatgtgccacgagaagctagcagggcacagaagccattgtgcccggctattacttcatcgagtgcctctacttcgccttcaatatgttctaaggtgctggata

SEQ ID NO: 11540 - DNA, 325 bp, Zea mays
tgtcacgcatgagctggaggcctttttcttactgtcaaggccttggaggatgactgtgtcgtcttgaaggctcagcgtgacagggccatggataaggccatttgcgctgggcggatcctgatgaggagacccggtgtcgtggtgcctgttgatatcgtcgctaatgtcatggtcgcgcctgacaccgcaagccgtccatcttcctcttgctcctgcaaaagatgatgcctgcagggatacttcagcgcaatgattttcctgaaaaacacttgtttaccgagttagcatcttttagagaaaaggtgtaatgtgagttcttgtatga

SEQ ID NO: 11541 - DNA, 475 bp, Zea mays
cttctcgacccggatccttaagtcacctgcggcatcaagctggccagcattccggaattgcttttctgtgtgtcctaccccccgcaggactaagaccacactagctcccgcgggatgtaacgcgagacgcagacacaggggcgtcgtcatcttctagcatgccgaggtggttgtctccgccgtgatccccctgatcgatgtggaaacactcgcgacttgggccattacccccgtcgtcgaggctgtggtcatcgtcggagcagccggagatgcagtagtcacatgcagacatgaagtctcgcatggtactgggatcacggagtccggagaaatcccaatcgaagtcggagtcgttgtcttcctcggaacccgtgggtccggtggttgagacggccgtcagtcggtcccaagatgaccacatatggtaccctggaaggtcaaggtatgcccttgcgaaagcgctcaccgaagcggg

SEQ ID NO: 11542 - DNA, 327 bp, Zea mays
tgtgaaggttcttcatccccacatgttctaagcggggatgccacagccagcccatgctagtcttagctattaagcatgcatctagaccgacctcttcttttgcaaaatcaactaaataaagtttgccgtctaatacacccttaaaagctagtgaaccatcacttcttctaaagacagacacatctacatttgtaaatagacagttataccccatgttgcataattgactaacagatagcaaattatatccaagagactctactaaaaacacattagagatagagtgctcattataaattgcaattttgcctaacccttttaccttgc

SEQ ID NO: 11543 - DNA, 441 bp, Zea mays
  unsure (1)..(441): unsure at all n locations
agcttttaatgcactcttcctttntagccttctctttctagcaggaaagcagtaatcagggtaaataaatccaattgcatcaaaaactctgtttaatctcctctttcctcgggcaccaagggcagaattcatagcttcgtcttcagctatggagtaggcccctaacagttcatcacttgttgcttcgatggcatcaaccagtcatcatcaggctcaccaaattgatttatgtaccgataagaatacttcaaataaactaaactacttttccaacattttgacttgtatcagccccagcatccttcggcatttcccagtcggcagataggggccataccttgaaagctatgtgctcccgcactaagtctcaagtgccgatgtagctgtacacgatgttgaacgctgctaggcagacttgagatttttccgtgtccacgatag

SEQ ID NO: 11544 - DNA, 340 bp, Zea mays
aggaactatgaaactcaactttctggacagtgctgccttatttttttgcgaagctgccacatataacaacaaaggagcccctggcgttggtggagttagtgatgttagatctatcaagtattgcttcagctcttcgaaggctctctgctgaactggtccccattgaaaaacttcagctgacttcagtacttcaaaaaatggtaaatttctctctgttgatctagatatgaatctgttgagggatgccagtcttcctgtcaatctttgagctcccttctttgtacttggtggttccattcggaggatagcttcgattttgtttggattagcctcaattcct

SEQ ID NO: 11545 - DNA, 417 bp, Zea mays
agcttgtgaaggttcttcatcctcacatgtgctaagcggcgatgccacagccagcccatgctagtcttagctattaagcatgcatctagaccggcctcttcttttgcaaaatcaactaaataaagtttgtcgtctaatacacccttaaaagctagtgaaccatcatttcttctaaagacagacacatctacatttgtaaatagacagttataccccatatgacataattgactaacagatagcaaattatatccaagactctctactaaaaatacattagagatagaatgctcattagaaatcgcaattttacctaacccttttaccttgccttgattcccatcaccgaatataattgaatctggagaatccttattcttgacgtaggaggtgaacatcttcttctccccggcatat

SEQ ID NO: 11546 - DNA, 332 bp, Zea mays
taacaacagggttaatagccttttgtgttttgcaagataaaagttcattttcaacaagaagattgtcatgatcaaatttaatttgagtatagtcttccttgatcttaactagtctattttgcaactccctatttgcttcatttaatttgtcatatttctccttagcatcttttagggagtttgtgagctcatttatggttgatgacatagatttattttcttcttttatttcatcactagcctttataactatgtcatatttggcatttaaagattcattttcatttttcaacctatcacatttagcttttgactttctaatgatttgagtg

SEQ ID NO: 11547 - DNA, 408 bp, Zea mays
agcttatgaagattcttcatcccaacatgttccatgcggcggggccagagccaacccatgttagtcttagcgataagcaagtgtcgagttcagctctatcaaaatctaccagagtatagctgaccctctaacactcccttaaatgctattgaatcatcacttcttctaaagacagtgacaccaatattagtaaaaagacagttgtagcccatttgacataattgagatacagagagcaagttgttatctagagaatctacaagaaaaacattagaaatggaatggtcacgagatatagcaattttacccatacctttgaccaaaccttgatgttcatccccgaatgtgattgctctatggggatcttggttttctcataggaggagaacatctttttctccccaatca

SEQ ID NO: 11548 - DNA, 324 bp, Zea mays
tctaaagggagagcacatttttttactaaccaatgctcattttgagaaagacactatttgtagcacatgccaagcatggaagcaagttggaatccatcattcacacaagaacacaatgacaactgataggccgctcgagctactccacatggatctattcggcctgattgcttacataagcatcaactggagtaagtattgtctaattattgtggatgattattttcgcttcacttgggtgttcttcttgaagggaaaatctcaaattccattaactttaaaaaaattcttaaggcgggctcataacgagttcgggttaacgat

SEQ ID NO: 11549 - DNA, 312 bp, Zea mays
cgaaccgcaagcatgctagcgttacaaagcactttaagatataataatgggaaggagaaagcaatcccagcgacacgagctacaaaaagaacacaaaacaccctctctcaagccactagcaattgaaatgagtttgaggctaggagaggatttgaactttggaaagcgcctcggagggaatgctatcgctcttttattgaaagttgggctcagaaaacttggatgccatagaaggaggggggtgcggagatttatagccatcaaccacttactagccgttcgctgggtttgctatcgaagggcacaccggac

SEQ ID NO: 11550 - DNA, 241 bp, Zea mays
ccccacgaggcccaaaaggggggggggcgggcaagaacgccgggtctacccactcgagagaagacggaagactatccgaaagaaacgcagaaacaaatgccaaaacgaggcctccattgcagaggcgtacattctacaagagatggccaacttcacaacaacctattagggggacaaactgccgagcgtgcataatccacccccccattaccacgaagggggcaatgaaacgaaccctaac

SEQ ID NO: 11551 - DNA, 295 bp, Zea mays
acgaagctcctgtaatattcagtagtatgctgaaagcaaatggttagccgtgtttttgagaaccttcggaagaggaaggcccccaacaatatcccctcgcagaaatactttgtttctttataacaaattcagactgcgaaatgaacgaatgcctttagccgaaggtccaaaaaacaccttcccttcgataaaatagcgagacattttgtattgtgggacccaccgatcactggtgttttgggtatatatacgaaggcttgcattgaaaatatttttcatgctatcaagctgtgtt

SEQ ID NO: 11552 - DNA, 325 bp, Zea mays
tcctccagcattcttgagcccctcatgcttccgaagataacaataagtcccacttggagttatgaagcttgtctttggctcatcgtctttcttcatccaaatttgatgatagcctgagtagcaatccaataaactcataagctctaaagtagctgctgcatccacaagggagtatattcttggcaatgggaattcatcctttgggcatgctttattgagatctatgaagtcaatacacattctccattttccgttagctttctttaccatgacggtattggccagccactctgggtatgtcacttctctgataacgccagcactt

SEQ ID NO: 11553 - DNA, 429 bp, Zea mays
  unsure (1)..(429): unsure at all n locations
agcttgtacagagtccgcttgaactgatcttttgatttaccacaccccaatgcagtatgacaccagaaggtccaacgcanatcgcgttgactgaattcaggattattgcaaagcacattggcactagagatttagtgcacgaatttttagctttcaaaatatttccaactatgaaggaatgggctatgccgaagctcgaaagagagaagaaggagggggagcttgtccgcttgccctaccactataagttcaagagatattttaaagcaccctgccaagaatggctcgaaacaatcgaagtaatgagtactgaaattcttgggaattattctaaaaaagaggatcaattgatgacagcagcctttggcacccggccgaaatgaaggctaaacagagtgcttgatgtataggctttgaataccctgacta

SEQ ID NO: 11554 - DNA, 326 bp, Zea mays
tctaaagggagaacacgtgataggtttttctaacgtacaattcgaaaaagatagaccttgtacagcttgtcaggcaggtaaacaggtgggaggaacgcatcacagcaagaatgtgatgaccacatcaagacccctggagctgctacacatggatctcttcggacccgtcgcctatcttagcatagggggaagtaagtatggtttaattattgttgatgacttttcccgcttcacttgggtgttcttcttgcaggataagtctgaaacccaaaggaccctcaagcgcttcctcaggagagctcaaaatgagtttgagctcaaggtga

SEQ ID NO: 11555 - DNA, 437 bp, Zea mays
agcttcatcacactatgaagtccaatggatcttaacatctttcttcgatagactagtgattggcttcacaagctttgaaaaatctggtatgaatcggcgtgtttatccacccagtccaatgaaactactgacctgatgaacccgggtcggcggtttccactccaaaatgaccttgactttgctaggatctaccgcaatccccctgacaaacagtacatgtcccagaaactgaatttcctgcagccataacgtgcatttgctaaacttggatataactgatgttctctcaagcgcggtaacacgatccggatatgttgggcgtgctcctcttcattcttggaatatatcaaaatatcatcaatgaagaccactacaaacttgtccaactcgggcatgaataccgattttcacatatacgtgaagctggcaggagcatt

SEQ ID NO: 11556 - DNA, 328 bp, Zea mays
tgtgggcttgtcgccggtcatgatctctttcttggcgtgatctcccgacatcacttctagttgttagactctaatgaagcaacaggctctgataccaattgaaagtcgcctacagggagggtgaataggcgtaatctgaaatttacaacttaaaacacaaactacaagccggggttagcgttagaacttaaatcgagtccaggagagaggggggaaacaaatcaaccaagaaataaagcggatgaacacggtgatttgttttaccgaggttcggttctaaagaacctagtccccgttgaggtggtcacaaagaccgtgtctctttcaa

SEQ ID NO: 11557 - DNA, 449 bp, Zea mays
  unsure (1)..(449): unsure at all n locations
agctngaaattntntcctttgtcactctcaggtgacttctcgtgcggngtcgctgggagtacgagtgtatgacgctgtcatctgaccaactgtgggggtgaaaaacatatgaattcttccaccggtttcatttcantggaaggacggagaagggtgcgcacgacagggaaaacctggtgcagggagcgcaagaagccgtggtacgtccggccgcgttgacaacttcacatctcggcaatgcggcctgcgtgcggcggccgtttattcgttccaaggaaaagctgcggctatgcgtggagtgctgctgactgatgtctggccgatccggcagctgccttccagttccaggcgtcgttgcccctcccaattttccacacgccagccggcttttctggctttgacatctcgtcacggcgcctgcctgcctcgctcctaactttatttttgga

SEQ ID NO: 11558 - DNA, 329 bp, Zea mays
tgatcccaaattaaaaatacaagtttttgttgaaaaagggaatggtcataagcaataagcaatttgtatgcaaatataagggttgccgattgcataagggctcccatgcagttactaaagttatgaaaaaatataatgcacagatcaatgatttctcaaccatatgcatcaacatattttgctgatatttggaccttaaagtacattagtttttcaaccgaggggcacaagcacaggaagacaatgagattcataaaaggtatctttttaatcatcgtatatttttgggcttgactatttttagaatgcttggaatcaagaagcactct

SEQ ID NO: 11559 - DNA, 425 bp, Zea mays
  unsure (1)..(425): unsure at all n locations
agcttgaccttaccccgaacattttcaatgcagccgtctttgaatacatngaataagcaagttaggcatttcactggttcgggaaatacccctatgacttacaaccttaggcctgtcattgaagagatccaaaggtctgcagaggataatggtgatagacgaacttcaaagatgtgcttggggatgctaaagaccatgagaaatcgctctgaacagaacttcgttgcttatagaaaggtatgccttcagcaaactcttaactgagggtcatttcttgtttctttttgacatgctgtttccatactttcagggcctcggtgttgcgtgcaacaaacaacgtggatctggtgtagatcgacttgttgtagagttctttggggaggtatgccttactttttaatagtcatccattctacctagaatga

SEQ ID NO: 11560 - DNA, 334 bp, Zea mays
tgcttacttggtaagatgaccaatgttcttttcacgggtttaccggagaggacattagatttattggaactcatacatactgatgtgggcggaccaatgagtacgacagctaggggaggattccaatacttcataaccttcactgatgattttagtagatatgggtatgtctacttaatgaaacacaagtctgaatccttagaaaagttcaaagagtttcagaatggagtagaaaatcagcgtggcaagaaaattaaagcactgcgatcagatcgtggtggtgaatatttgagtcatgagtttaacaatcatctaaagagttgtggaattgttc

SEQ ID NO: 11561 - DNA, 404 bp, Zea mays
tgaatagtagccatctttaaggagcacaaggaaaatacgccaggaacccgagcgccaaagtggatttctttttcattatgaatttcaattcctttttaataaacaacagacttagaaaaagcataacctaaataatattcatccaaatttggtcaaaccaatttggctagactctatataatataatctatcaagcaaaaatagtagcccccatatttcctatagtactcttttgagttttgatttaaataaaaaaccacttaaaccttggaaataagaaaaagggtagaaaaacttttagactgaggttgggaaaatatatggagatacttgaccagtagttacactttaaaaatgttaattaccccagtacccaagattaaacaaatttcatcccctacgat

SEQ ID NO: 11562 - DNA, 289 bp, Zea mays
tagcaaatcgtagtgcacaagagcttataattgagtgagcgggagcagttggccagagagcgtgtcaaatgcgtttgcggtatggccgtatttatacggcaagtgcgttgaaaattgaaagaccccgcttgtcagtgaatgttgctattctagcaaagggaaggtgttttttcggaccttcggcgtaaagcctttgtccaggtcgcaatctaaatttattattttgaacaaattaatattgcgaggggctactgttggggaccttcggcatccgaaggtcctcaaaaac

SEQ ID NO: 11563 - DNA, 272 bp, Zea mays
ccaaataccatgcttcttgttgtttgactaaccattgcaggaagaaaagcccacaggtgaaggtcaaagaaatattgaagagatgctctagcaatgatgggttaaaaaaagttgaacccaaatacaagtttttaaagcccaacaatggaaaaagggggcttgggttcaactaatttaaggaaaaccctatcatattgcataaggggtggagatcccctcaagttcatagagggaaccaccctatagatgccttggaggattactcctaaatg

SEQ ID NO: 11564 - DNA, 321 bp, Zea mays
tcaaaaagccgttcccaagggagcgtagtgtaagttttctgctcaaaagtcattccaaagggaatgcagagccaaataccgctgaaatataaggcgaagcgcgaaaagtcaacgcgaataccgccgaaatagaaggcgaagaagttcaaaagacgttcctcaggggatgcagaacttacaccgaaaaataagcggtgaagccaaaaaataaacgacaaagagattttttatggttcctaaggggacacagatattggggttcaacatgggtatgtgtcttcggcattagcatcattctttgcatcatatcatcgcatcata

SEQ ID NO: 11565 - DNA, 443 bp, Zea mays
agctggcggtcacaggtgctactacgagttcttccacgacgaatcatcagaagacataagaggtgacgccatgttttatcgtctcatgacattagaaagagttcaaagcaggcaacctctttttactcttataatttcatgtacctctgaagcaattcctactgctaaacagcagaccaaaacacacaacatttatgaaacgactgcccgatgaacagtgcgagctgtaaaagctcacaaccacgtaccagcgagtacaaagagaaaaaaaactcgaaaaagatgtaccgcgagtttcaacagcagaggaaatcatcatcaaatcaaaagcacatgcgactacagtgaacaatagcaggccacaactgcagtggcgatgtgacctgtataagcaagattcttctcacccagcgagagggcgataatggcaattccgaaacaag

SEQ ID NO: 11566 - DNA, 289 bp, Zea mays
cgaattgactcaagcctatctacaggtgcataggtttcaccgaaatccaaaccttcgacttgggaatatcccttggccacaagtcgggctttgttccttgtcaccacaccatgctcatcttgcttgttgcggaaaacccacttggttcctacaacattttgattaagacgtggaaccaaatgccataccttgtttctagtgaaattgttgagctcctcttgcatctccaccacccaatccgaatattgaagtgcttcctctaccctgtgtggctcaatagatgaaacac

SEQ ID NO: 11567 - DNA, 443 bp, Zea mays
agcttctaattaaatcatgactgcgcctattcttctttattatgagagtgaaggtgtatgtgctgctacttcccacttccctagatgagcaacaagcacctgcattgactaatgcaagagtgagatgaaacgtctcagcaagcgaattgttttgacgagatatttaaaccacaaattgaattaatcaacattttaaaagaatcacaaataagatcagaaatacttgtagatatagaactcagtagtcccaatataaccaataccatctcatttcctcgaacaaccataatatgttctataacacttccttgcgtcaacaaaacctgcaaatatcacttcaatgtatgcataggaatgcaaagtgtaggtactctgtcttcatacctctaagggtataaaaccacatcatctgcaaatatcacttcaatgaatgcatatgaatg

SEQ ID NO: 11568 - DNA, 325 bp, Zea mays
tttgcattgtcgatatggactatgttttcagtttgtcgctctgtccttgaaaactgtatgttctgctactaacagttttttagtttgtagaaacagtacggaaggccctattgttatgtattataaagaatattaggtaacaaaaactggtatggccctactgctggataaacaaattgtgggaacatgcccaaatctggtatgttttttggagcattgtaacagtgtgatttagttccatgccatccttgtcccaactaatttgagttcttctctcaaatgctttactgcagcacaagtcaaccagtgatgtaactgtataatc

SEQ ID NO: 11569 - DNA, 388 bp, Zea mays
  unsure (1)..(388): unsure at all n locations
agcttcttaaggttgggcttccgttccctctaagcagttttgtggttgaagttttaaagatatttgaaatctgcttacatcaaattactcctgaagcaatcataaggatgggagttttcatatgggccgtgaagagccaaggtttggagccaaatgcaaaaagtttctacaatatgcatgagctattatatgagacgaaaccctagggtaaagaacaatatcataacaattttggctgctatagcttcggtgctcgatctaggtcaagctgccccccccaaccttccgaaagagacggcctgnccactggatgagctaatggttctctgtgataaaactattgaaggcacgagaagcanttaagatatcatcatgtgccccatctggc

SEQ ID NO: 11570 - DNA, 331 bp, Zea mays
tggaggcgtcgattggatgtctttttgttgtaaactcctccttcttctcctccgttgctttgaatgcaacgggttgagcttcggatgtggtggcatcatcgagctcgttgatcttcctcgagccttcgatcatgcattcaaaactcacaaaattcccgataacttcctcgggggtcattttagtatatctaggattaccacggattaattgaacttgagtagggttaaggaaaataagagatcttagaataaccttaaccatctcgtggtcatcccattttatgctcccgaggttgcgcacttgattcaccaaggtcttgagccggttgta

SEQ ID NO: 11571 - DNA, 354 bp, Zea mays
agcttccccgaacgacgttcgtgcttccttcttgctcgagcatgccgggacactatcatcgatgtcgtcgtgccttcgtccgtgacggcgtgtgtggcaggcatttctccgtctgtctcccgccgccctgagatcatcaccgaagtcgccttcatccactgtcgctcgtcgtagcctcacccagccatcttcaccaccggtaagccgccggtcgagccactccatctctcctttctctcactgttccgagaaagaagacaagggtaccgcccgggaatgggtcaaaacccgaggggttttctgcaaacggtcatagactcacggtaatagtgtccgaggacctataagtaggat

SEQ ID NO: 11572 - DNA, 324 bp, Zea mays
tttttgggttcttgctccaccatatattgtgtgtctcaatgtcgacccacacgcaggcatctaactaggtcgtccgatatcgatcgtgcgcacctgcccttggccaccgaccatgttagccctcaccagcgaccgcgatagtcgtcgtgcatcaggatcaggtaacccattaggttacatccatttgacttgaatcgttcgatcaaatctatagtcagaatcatgtggaagctcccctataaggtttaataatgctttttgttttatacaagaatattatatatgtatttttttggggaaaacttctatatgatgcatgtttgg

SEQ ID NO: 11573 - DNA, 424 bp, Zea mays
  unsure (1)..(424): unsure at all n locations
cagcaagcttgggaagttcttcatcccttcatgtgctaaacggcgatgccacagccagcccatgctagtcttagcaattaaacatgcatctagaccggcctcctcttttgcaaaatcaactaaataaagtgtgtcgtctagtacacctttaaaagctaatgaaccatcacttcttctaaagacagacacatctacatttgtgaatagacaattatatcccatattgcataattgacttacggatagcaaattatatccaagcgactcaactaagaatacattagaaatagagtgctcatttgagattgcaatcttgcctaagcctttaaccttgccttggttcccatcaccgaatatgattgaatcttgnggatccttgttcttgacgtaggaagagaacatcctcttttcccccgtcatgtgg

SEQ ID NO: 11574 - DNA, 316 bp, Zea mays
taataggtggaaaaaaatttttctgtcatatgggaaaatggcggccgaggaatggcccatgaaataataaagaaaaacgaaaaagatattcatgacactcgagagtcaataaaagcagctgaaaaggctgcggagcttgagagacgaataggtattacttaatggtttttaactttgttgtttatttttgtgacttcgaactgatttacgttttctaccgcagctgaactatctcctctagagcccttcgagtcactggccgacccagaggcaaaggaatcaacagaaattattaacatggccgaaactattgtag

SEQ ID NO: 11575 - DNA, 432 bp, Zea mays
  unsure (1)..(432): unsure at all n locations
agcttcgtgaaaacattctccgaagctatactccgaagatgattattgtgtctccttgcgacttaacacgaatttcactctttcaaagcatacttccgaagatcaatattgtgtccccttcttgtgccatatgcaacatgatgtatgatgcttatgctatgcaaaatgatgtgatgatgttatgttacgtggatgacatttgttccgaaagatacacacatatccccacacaatatntttgtatcagcgctgattcttcgctgtaagctctgcattcccttacgaacgactttcgagcttcttcaccttttacttagtcgggataagctctgcattcccttaggaacagttttggagacttttctccttttacttaagcggcataagctctgcattcccttaagaacgtctttggagcttcttcgcctttac

SEQ ID NO: 11576 - DNA, 329 bp, Zea mays
tgtgaagattcttcatcccaacatgggctagtcggcggtgccagagccaacccatgttagtcttagcaattaagcaagtgtcgagttcagctctatcaaaatctactaagtatagctgaccctctaacactcccttaaatgctactgaatcatcacttcttctaaagacagtaacacttaaatctgtaaaaagacagttgtagcccattttacataattgagaaacgaaagcaaattgtaatctaaagaatctacaagaaaaacattggaaatggaatggtcaggagatatagcaattttacccaatcctttgaccaaaccttgatttc

SEQ ID NO: 11577 - DNA, 393 bp, Zea mays
agcttcgtgaagctgaccaagtctaaagatatgaacgctatcagtggtgctggtgcagcgacgagaacacagctgtatccaaaatacctacctaaactatatacctcattcactaaaaggttgtgatgctttggtttcgactgtttgtttatttttatgtgctgtgagaggctgaatgtttctgaaacatattagtagtttcaacctaaaccctttaatctattcgtcattgactatctaacccggcctcatctataaaaccaaagaatatatatgctcctactcctgcccctacctttcttcgagaagaaatgggcggcagcgggttcgtgagggagaggaggcgacgacggtttcacaagagtggaggcgagataaccctttctggccttc

SEQ ID NO: 11578 - DNA, 312 bp, Zea mays
ttatcaaatggacgtgaaaagtgccttcctcaatggaccaatcaaggaggaggtctatgttgagcaacctcccggctttgaagatagtgagtaccctaaccatgtctataaactctcaaaggcgctttatgggctccagcaagccccaagagcatggtatgaatgcctaagagatttccttatcactaatggcctcaaagtcggcaaagccgatcctactctctttactaaaaccattgcaaatgatttgtttgtatgccaaatttatgttgatgatatcatatttgggtctactaacaaatctacttgtga

SEQ ID NO: 11579 - DNA, 451 bp, Zea mays
  unsure (1)..(451): unsure at all n locations
agctngaagctgacattagcagttaccggctacaacatatcgtcggcaacttattcttttccaactttaaggtaaagcttttttcctcatctttctaatttttgtgatgaagcataaaattctgatgaaggctatttttgtacagagtatgctactaagtaaagcactgaggatgcaacaagatcttgaggataaaaagaatgagattataatcgagggcctagaaaagaaaatcaaagaccatgaagcttctctggagaagaaggacttccttcttcagacaatggagggttcattggtagaaatccaaaccaaagttgctagattacatgatgaactccttcgtaaatcagaaagcttcgaacaagaaaggaagaattttgatgcgatgctcgaagctgaagtcaatacaagctcaaatctacaaaaatccttaaaagaacttcagaat

SEQ ID NO: 11580 - DNA, 329 bp, Zea mays
tgtgtttacaagaaggaaagtgggatctctattgtatttctgatcttgtatgtggatgacatattattgattgggaatgacattcctatgctggagtccgtcaaggcttcactgaaaaagtgtttttctatgaaggacttatgggaagcagcatatattttgggcataaggatctatagagataggtcgaagaggcttataggattaagtcaagatacgtacattgacaaggttttgaaacggttcaacatggaacagtccaagaaaggtttcatacctatgtcacatggtaaacaccttagccagatgcaatgtcctgcgacggctaa

SEQ ID NO: 11581 - DNA, 451 bp, Zea mays
  unsure (1)..(451): unsure at all n locations
agcttgtganaaaaccctactaataacatgttaaggttctgttgcacactggctcctcaatctatcaccctcgttgcccggaagaagccaagccgcgatgagatgtacagatcttgtttcccttacgggacaacacaatagaaaagagtatacaggagataaacacgtagctgattatataatcctcttttatttgagatggcactcttcttattatggaaaagtataaatctatatatagcctcactaaagagatattggatagagtttacaacttgatagttccattcaattcatttggtgtttctagttgctcagaggttttggcttgcttcacactgccctacaattaggttattctcaatggtagtttcatacacatttaacagtgtgccacatcagaaggtttgatgatatgccataacatttaagataattgagtttcacggga

SEQ ID NO: 11582 - DNA, 329 bp, Zea mays
tgtggaacattgaacattatctcatattttcattcaatgtctattaagctatcactctgtactataatcgcactttgaagttagcatccagctatctgcattggatcactaatctgtactagactgcccccgcttgcgaatcccacccgccactccgcctcccacgcctgcgaatcccacccgccgctccgcctcccccgccgcggaacccgcaccccgcctgcggagccgctcctcaatctcccatgaatagcccgccactcctccagccaaatcctcgcacgcgtccctcgttgtcccaactgctccatccgcgcaggccatacaca

SEQ ID NO: 11583 - DNA, 444 bp, Zea mays
agcttctaaagggagaacacattttaggactaacaaatgttcattttgagaaagacaggatttgtagcgcatgccaagcaggaaagcaagttggcactcatcatccgcataagaacataatgacgaccgacaggccactagagctcctacacatggatctattcggcccgatcgcttacataagcatcggcgggagtaagtactgtctagttattggggatgattattctcgcttcacttgggtattctttttacaggaaaaatctcaaacccaagagaccttaaagggattcttgagacgggctcaaaatgagttcggcctaaggatcaagaaaattagaagcgacaacgggacggagttcaagaattctcaaattgaaggctttcttgaggaggagggcgtcaagcatgagttctcttctccctacacgccacaacaaaatg

SEQ ID NO: 11584 - DNA, 335 bp, Zea mays
tattacaaccactcgtacgtacgctttttattcaaactcgaagggattatattgtattgtttgtttagcttccaaggagagccagcaggaagctgctgtagtcacccgaggtttccttggcgatagcctgctgcaaggtacacgaagccctcttctggaacgcaccgcagatggcccccatgtcatccttctccgcgtgcagcaccaccacccgggtcaggctatcctcgtcggtccctgctgcctcgcgcgtcgcgttcctcagcacctgcttgattagtcgtcaatctcagatcgaattatatatccagaaaatacagtggcaataatcgacg

SEQ ID NO: 11585 - DNA, 425 bp, Zea mays
agcttcttgtagttgctgccaatatttatatgtgtaactgcgtcctcgatctgacactatcttcttcggcacaccatgaaggcagactatccgtgacatgtataactcaccttacgttgctccggtgtatgttgtctccacgggtatgaaatgggccacctttgttaatcggtccacaaccacccaaatggaatcatatccggcccgggtaccaggtacgccaactatgaaatccatcccgatctcttcccacttccactgaggaatccgcaatggtagcaacaatccggcgggcctctgatgctatggtttggtcctttgacagctattacagaaggcgacatattctgcgatctctctttttatgccataccaccacaacctctcttctaaattctggtacatcttttcacttaccgggtgta

SEQ ID NO: 11586 - DNA, 318 bp, Zea mays
tcttatttttaaccgaaccgactttttgttacactgtgtcgcgcgtgcttacagccgctaccgcaagaagaagaggcaggcagttagcctgagcgatcagtcagctagccacttcgcacgggtagctaggctatggctatcactcacacgtacacctacttaattgtactgtcgtgcgcgcacgggctgggcggctgtgggtggcgactcctccccggccggggggggcctatttataggctcggcgccggcggcaggggttggtcccgcgcccacagtatctgaatagtagtattatcacaagaaaatcggctccgc

SEQ ID NO: 11587 - DNA, 139 bp, Zea mays
aacaattcgctctcgaggtgtgcttcgcaagattagattgactctaaaacatctagcacattaaccatccttcttcttctaggggccactgctagacccttatggctatgcgtcgtcacagtttctgccgaaagactca

SEQ ID NO: 11588 - DNA, 327 bp, Zea mays
tgtgaagattcttcattccaacatgtgtttttcggcgatgccagagccagcccatgttagtcttagcaattaagcaagtgtcgagttcagctctatcaaaatctactaagtatagttgaccctctaacactcccttaaatgttattgaatcatcacttcttctaaagacagtaacacctacatctgtaaaaagacagttgtagcccattttacataattgtgaaactgaaagcaagttataatctaaagaatcaacaagaaaaacattggaaacggaatggtcaggagatatagcaattttacccaatcctttgaccaaaccttgat

SEQ ID NO: 11589 - DNA, 437 bp, Zea mays
  unsure (1)..(437): unsure at all n locations
agcttacacagtaacacgggtgccaatctttccaagtctacaaccacggtccgagataactcttttgcacaaagctgacggaagaaatagctcaactctgaaagcgctagccagacatgcttagggacattgcctcgaaccatcgcataaagagtccgttcaatccatatgtggaagtcatgactcttcatccctaagacttgcatagtagataagttcacccccctactcaggttagctgcatacccatcagggaacatcaacatcttgatccactgaagtacttccttcctctgggccctgcttaggacgaaatcggccttatgccttctccacgtctttccgccacttggcgggcttatctctaggtttggtctatcacataacgctgtcaggtccactcttgccttcacgttatcctttgactnatcagaaat

SEQ ID NO: 11590 - DNA, 327 bp, Zea mays
tcgtgttcagttctgatatttttgtttcagcttccgccaataaaccttcggttgcctggagctcaaagttcttcttctcgaaagcatctgattgctcctttattttgctttctaaatttccaattataacttcatgctttttatcttcaacatcttgttgcatttgcaaggctttgctcagcagcatactctgcacgaaaacaagcttcgtcagatatgtttttattattagaaacaataaaagttaaggggcaagtagttcaccttaaagttggaataaaataaactaccaacgacatgttgtcgtcggtagcggctgatatctgt

SEQ ID NO: 11591 - DNA, 441 bp, Zea mays
  unsure (1)..(441): unsure at all n locations
agcttctagtggaagtagaccaagcactctttctattgtagttngcaatgaacccggaatacaagttgaagttcaagagaataatattgaagatgccaatggtgaaaatatttatggtcaagtcgaaggtataaatcaattcaacccagatcacattatttctgatccgggactttgtattccaatcgattattttgctcctaataatagagatgatgttagaagggctttcatagctaaaggtccgactcaaccaattggtcataactttcctcagtcacatgacaaaaggagctttcaaaaacatttggttagacaacatagttggttggaatatagtgtggagaagaataaggcttattgcttctatcgttacctttttaagcacgatcgaatggatgataaatattccatgatgcattacaaaagttggcttttaca

SEQ ID NO: 11592 - DNA, 325 bp, Zea mays
tgtgaagaatattgtggcctttgctgctgactccctctatcgtcattttgagtagagttatgaattgacctgacgtgcctcgggtgaaatcttcctccgaagcccctggtcatttcagagaacctgaatgcttcctcccttctttggcgaaagtcattgtcagctcgaatatactcgtccatcttctggagcagcttctccaaattctatggtggcttcctggcaaagtattgcgctgaaggtcccggccgaagtcccttaatcatggcctcaatgacaatttcattgggcactgttggctcctgtgccctcagacgcagaaacc

SEQ ID NO: 11593 - DNA, 312 bp, Zea mays
ttggagaatccagttttagcttttttttttgggttacattatggaatgttatttatttggctatgactcttagctgcacccaaaccaggttgagtgaatcaaagctcctctatggggcaaaaacaaaaatgaaagtttgattatacccgaggttaccctggagggttcaaaaggagaaaaagatacgggacaatagtccatagactgatgacgtatataagccaaaaaggtcttcacctgctacgaaaagaaaggctgtaactgtaacaaaagcttgaagaccctgtctaaggcttacaatttggggcaaaa

SEQ ID NO: 11594 - DNA, 331 bp, Zea mays
tgcacacatagctcttttgaatatcttttatcatatctcttttatatgctatgactaatgtgttctcaagtttatttcaaaccaagtcatacgtatattgaaagggaattggagtcttcggcgaagacaaaggcttccactccctaactcatacttcgccaccactccgagcaactctctcttctttgggggagaaatgagcatcaacgaaaaggacttcattcttgggggagagagtaaaagctcaaacgcataaggacttcgtctttggtataatcttaactcacttatttatgaccaaaggggaagattgcacttctagggctctaat

SEQ ID NO: 11595 - DNA, 367 bp, Zea mays
agcttggtcccttgggtggaaacccgaatgttctagctctctggtgccgatcttgctgctgagctcggagaacttgaaacttcctcttgaggtgacctttttcttcttcctttgccctttccacttgtatggctttgttggagaggtgcgagaagctgaagaaatcttggctggcaaggatggtcttgagttctggtcttagccctttcagaaaatgggccatcctcttggcttctatgctgacctcgtcaggcgcgtagcgagccaattttgtgaatttgtgcacgtactcactgacatatcttcctccttgagttagttcccgaaattcatcttccttgagctaaatgatcccctgtggtacatg

SEQ ID NO: 11596 - DNA, 323 bp, Zea mays
ttgggcacacatttgaacttcatcatatcttatcacccgcagacagacggccagactgaaagaactaaccagatcctagaagatatgttgagagcctgtgcgttgcaagacaagtcaggatgggacaaaaggttaccttatgcagaattctcctacaacaatagttatcaggccagcttgaagatgtcaccgtttcaggcactctacggacggagttgtaagacttcgctgcattgggaccagcctggagagagacaagtgtttggccccgacatcttgcttgaagccctaaaaaatattaaaatgggtcgggagaaacttaa

SEQ ID NO: 11597 - DNA, 425 bp, Zea mays
agcttctacagtatcatgacatttagactttttttgtagtatcttttttattctaaaaataaccaatgcattctcaaaataaaatatgccatagcacgataaatctggcataatctggaccaacaaaactaagatattcgcgatttcatagcatgttgtccctttggagttctagagttctgcagatataaatgattaaatagagcttaatcactcagcttattgattcacaagctctacaggtaagatggtgtcatggtgttggtgatataaaacaatacatgatagtgatatgtactatatgcatcacgaaacagtcccgtactgcaaccatgtacatagtgtgcatttactttggtcctctcaaatcctaagaccccaattttctaactactatacggtggtatagtactaatcaacaaatt

SEQ ID NO: 11598 - DNA, 324 bp, Zea mays
taccgcatttgaagcatgagcgcttttccttggctttggtcttgcttggatgtcccttgcgacctttgagcactgtcttgaatcttttgatgatgagagccatctcttcatcattaagtccggccgcctcaatctgtgccaccttgataggtagcgcctccttgcttcgtgttgccttgagagcaaggggttgcgactcgttgatcggaccattcaaggcgtcgtccacgtaccttgcctccttgatcatcattcgcccgctaacgaatttcccaagaactttttcgggcgacatcttggtgtacctgggattttcacgaatat

SEQ ID NO: 11599 - DNA, 253 bp, Zea mays
gcagcagcaacctaagagaataacaaagacgaaatgctaaacacaattatctaacaacaccaactcccgtgtagaacatgctatgagatgcactaagagtcaacatattgacatcgatgcttgtagcgaacacctaactcgcatttctaaattaaatgaggaagcggctagccttaatgcccaacttaagactagcaagagtgaaattgacaacataaaccttgaagggaagccacaccatcgggagacaccc

SEQ ID NO: 11600 - DNA, 327 bp, Zea mays
tgtgaagattcttcatcccaactgggctatttggcgatgccagagccaacccatgttagtcttagcaattaagcaagtatcgagtttagctctattgaaatcaactaagtatagatgaccctctaatactcccttaaatgctactgaatcatcacttcttctaaagaaagtaacacctatatccgtaaaaagacagttgtaacccattttgcataattgagatacagaaagcaaattatatcctaaagaatctacaagaaaaatattggaaatggaatggtcaggtgatatagcaattttaacaagtcctttgaccaaaccttgatt

SEQ ID NO: 11601 - DNA, 418 bp, Zea mays
agcttgcagttgcaagggaggggaaagctatctgatctgatatgagaaaactgatgagtagtggaaaggatggggatgtgtgggctatataaatcgtttggaaagaaaggggatatcggagaggagaatttcggctggctttctgaccggagctgctgcagcttaacttaaccggctggagtcgttaggcggtcttccggcattgcgtcaggtaattctggtgcaactgatcatgatccgtcggtagttcaacgaccccctaagtgtagcagtagtagtaccatgctactgcatgcaccgctgtgcttgcatcgaaggatgcaacttatatattattcttagctttagtttagcatgttgtattacttggcttgtctcgtaataacttcttaggagtagggttcataagaaaaagaaa

SEQ ID NO: 11602 - DNA, 326 bp, Zea mays
tctaaagggagaacacatgataggtctaactaatgttactttcgaaaaagatagaccttgtgcagcttgtcaagcagggaaacaggtgggaagctctcatcatgccaaaaatgtgatgacaacatcaagacccctggagttacttcatatggacctcttcggacccgtcgcctatctaagcataggaggaagtaagtatggtcttgttatagttgatgatttttcccgcttcacttgggtattctttttgcaggataaatctgaaacccaagggaccctcaagcgcttcctaaggagagctcaaaacgagtttgagctcaaagtga

SEQ ID NO: 11603 - DNA, 421 bp, Zea mays
agcctccttcgaaggggtttctgtcaagaatattcctctaggttatatatgagcacgctgatctactagccaagtcagcggcacaggggctgcccttaccttcggaagtattctttgaaacgataaaagcaccttcggttgaccttcttgaaagagcagcgctcaatatatctcctgtttatagcgaagattggagaactgagttcatgtcttttcttcagggcaatttccttttagatgacgaagcttatcataagagaatagcggtaagagccaatccatatggaataaataaaggggagttattcaagcacgaagtctgttcttcattactcaaatgtttatccagagctgaaggtataaagctgatgaaagaaatacatgcaggcctgtgtggatctcacatcggatctaagctttt

SEQ ID NO: 11604 - DNA, 330 bp, Zea mays
tcgagtccatctatgttatgaattgtctttgaatctgtccagtttccttcggctttcctggcagcttcctgactcccatgaacagcaatgggcccttattccgaaggtatcttcatgcatagatatgctggatgaagtattgcttcgaaagcattaagtgtcccacgaccaatgattgcattgtaggggtattccatgtcaacaatgtcaaacataacatgttcagtccttgtgttgtgaacaaagccgaaggttaccggcattgtgattttgccaagtgctacaatttgccttcctccgaagccacatagaggatgtgtagcatcatgg

SEQ ID NO: 11605 - DNA, 422 bp, Zea mays
cttcatccccacatgtgctaaatggtgatgccacatcgagcccatgcaagtcttatcaattaagcatgcatctagaccggccttctcttttgcaaaatcaactaaataaagtttgctgtctagtacacccttaaaagctagtgagccatcacaccttctaaagacagacacatctatatttgtgaataaacaattatatcccatattgcataattgactaacagataacaaattatatccaagtgactcaactaaaaacacattagaaatagattgctcttttgagattgcaatcttgtctaagcctttcaccttgccttggttcccatcaccgaatatgattgaatcttggggatccctgttcttgacgtaggaggtgaacatcttcttttccccgtcatgtggtttgtgcatccgctgtc

SEQ ID NO: 11606 - DNA, 319 bp, Zea mays
  unsure (1)..(319): unsure at all n locations
tggtggaaacccaaacaannttttatgttagagcagcactttagtcagactaaacagcggcttagatatattgagcatgcacgccaatcgtcaggtgcagtgcatgccggcagaacagacacatggattaagttgtgaatataacattactaaaaaaaagcaccgaactgttgccatcccataatcggagagccgtcattgttgtacgatctccggggctaacagttatgtgccaaccccttgcttgctcattcagcattccttgtttggtaggcagctttccttaagccggctttacctgtccacgactgtcagaaac

SEQ ID NO: 11607 - DNA, 393 bp, Zea mays
  unsure (1)..(393): unsure at all n locations
atcctctaactcacctgtggcatgcaagcctgttatcggaaaacaataaaaatattctgggctgctggctgtccatcgntnaaccagggtagacagtctagcgattcgccttcttctcctgtagcactatataagcagacaagttggtgagaagttaccacaatattcattgccattgcactgttgtgctgttaaaaattttaaccgaagtcgaagctttcttgattgcgcttccgagcaagctcttcgtcacttgaacttagcttcattttaaggagtctaagcagtgaaatggcccgagtaagatccactgctatagtttcccgtgagggagatgaggccgaagtgactaaaacggcgccgatatcataagtgatgagacgatcacgtctg

SEQ ID NO: 11608 - DNA, 333 bp, Zea mays
ttatcaaatggacgtgaaaagtgccttcctcaatggaccaatcaaggaagaggtctatgttgagcaacctcccggctttgaagatagtgagtaccctaaccatgtttataaactctctaagacgctttatgggctcaagcaagccccaagagcatggtatgaatgccttagagatttccttatagataatggcttcaaagtcggaaaggccgatcttacactctttaccaaaacacttgaaaatgatttgtttgtatgccaaatttatgttgatgatattatatttgggtctactaacgaatctacatgtgaagagtttagtaggatcatgac

SEQ ID NO: 11609 - DNA, 431 bp, Zea mays
agcttgccttcgcttcagtatatcatccgcagtccaacggggtcgtggaacgcgccaatgggaaaatcttcacaactgtcaaaagagctcttgtgtaaaaggcaatgacagatttgtacctgaggcaatctgggcactaaacacgaccgagtgcagagcgactgggtttactcccttccgccttctatacggatcggaggccatgaccccgcaagaaataaagcatgggtccccgcgaacagttctgtcagccgtccacgacgtggacgagccaacttcaaaggatctcattgacggagaccgagtcttcgccctacaggccctaaacaaataccaagcccagaccaaagcatggcgcgaccacacagtcatcccgagggagttcagcgaaggggacctcgtactcgtccgaacagctcggacggagtcca

SEQ ID NO: 11610 - DNA, 327 bp, Zea mays
acactgtagacttgtcaagctacgggcagacatctgaatggtcttttttcttatcagccgaaaacggagggcccggctggtagaaccagccagatacttgaagatatggtgagagcctgtgcgttgcaccatccatccggatgggatcagggatgacatcttgcttaatttgactatttcaacacataccaagccagatggaagatggaaccatatcatgcgctctatggaaggaattgctcaactacggggcactggtgatcagcctggagaaaagcaggtgttggtgccacacattttgtttgaagcctaaaacaacatccaaat

SEQ ID NO: 11611 - DNA, 416 bp, Zea mays
agcttctcctggacaagtgctgcacttacttttgagtgcgaagctgccacatataataacaaaggagcccctggtgttggtggagttaatgttgttagatccatcaaatattgtttcagttcctcgaaagctttttgttggcttggtccccattgaaagacttcggctgatttcagcacttcgaagaatggtaaatttctctctgctgatctggatatgaatctattgagagatgccagcctccccgtcaatctttgggcccccttttttgtatttggtggctccattcgaagtatagcttcaattttacttggattaacttcaattccctttgttgaaaccaagcatccaagagatttcccttctttactccaaaacacattttctggattcactttgaccacttgtctaaaact

SEQ ID NO: 11612 - DNA, 325 bp, Zea mays
tcagcatggcccactctttcatagttgtaaacactttgaaagccaaaaattcttgcactaagtccctagtgccgatgtgctctgtgacaaccctaaattcagccagcgcaatttgggttggaccctctggtgtcatattgcacgggggtctggtctctccgaagatcaactctaacggactctgaaccagcttcttcttatcatcgtcaactttacgtagaaccattcagatttccagctagctggccacttgcttcggtaactgatcactaaaaattttgtagtcttgcggtaggcaaaattgtagcagccgaagttttcatgt

SEQ ID NO: 11613 - DNA, 424 bp, Zea mays
agcttgacaacaccatgtgacattttacatttaatttctgagatcaagaatatttagttcattcctcaacatgcaaaagcgggtcttatcaagaggcttagtgaaaatatctgctaattgatcttccgacctcactccttctaaaatgatatctcctttagcaacatgatctctaaggaagtgatgacggatatcaatgtgcttggtgcgagagtgttgtacaggattattagcaattttaacagcactctcattatcacacaacaaagataccttttctagaactacgccatagtctagaagagtttgtttcatatataaaatttgtgtgcaacaagcacctgcggcaatgtattccgcttctgcagttgacaaggcaacactattttgctttttggatgtccatgaaactagtgatctacca

SEQ ID NO: 11614 - DNA, 328 bp, Zea mays
tgtgaaaccaatcacaagtttattgtttaatgatattaaatttaattggtcttcaaaatgtaatgaagcctttgagcagctgaagatatcattgaccactgctccggtgttggctcaaccagacattgaaaagccctttgatgtgtattgtgacgcatcaggcagtggtctcggctgtgtcctaaagcaagagggccgagtgatagcttatgcttcaaggcagttgcaccggcatgaagaacattatccaactcttgacctggagttagctgcggtggttcatgccctaaaaatatggcgtcattatctgctgggaaatgtctgtcac

SEQ ID NO: 11615 - DNA, 403 bp, Zea mays
  unsure (1)..(403): unsure at all n locations
agctngccaatacttatcaaagcatcaactcttgccttcacagcaactgcagaccataccggtaacttggcctttcgcatgctggggactggatatgattggacctttcaagaatgctcaagggggatacactcatatattggtggtgatcgacaaattcactaaatggatatagttcaagcccattgcttctttaacctctgctaaggccgtggaattcatacaagacataatattcagattcgggataccaaacagcatcataactgacttaggatccaacttcacaagtttaaaattcttctacttctgcgagcaaaggagcattcagatcaagtatgcatctgtagcacatccacgggccatcgggcaggttgaacgagccaacgggatgatactggag

SEQ ID NO: 11616 - DNA, 326 bp, Zea mays
tctaaagggagaacacgtgatatgttgtttaacgtgcatctcgaaaaagatagaccttgtgcagcttgtcaagcaggtaaacaagtgggaggagcgcatcacagcaagaatgtgatgaccacttcaagacccctggagctgctgcatatggacctcttcggacccgtcgcctatctgagcataggagggagtaagtatggtttagttattgttgatgacttttcccgcttcacttgggtattctttttgcaggataagtctgaaacccaagggacccttcagcgctttctcaggagagctcaaaatgagtttgagctccaagtgaa

SEQ ID NO: 11617 - DNA, 441 bp, Zea mays
  unsure (1)..(441): unsure at all n locations
agcttcggcatgacgaaagaaaagaggatttctcttatggatgaaaagtcaagttgaacctcgaaggattgccataaaattattatcaaatgtaaagggcatcaatgtaattttacacgggctgcgtcccgtgcctataaatagatgaacagtactcccgtactgttcacgctgacctggcatatgttttcgcgcatcacgattgtacctttactttccatcaatctgaaggtacatttctaatttgtttttatgatattggtaataaaaataagttgataattatacctgcatcattactcatattttgtgtatatgtgctctcttttaccattattaatcttacgaaggtttttctcntataaccttcgtccaagatccattatatccgaagggacataatgttttcaaggacaaaggagtctaacatttaacactttt

SEQ ID NO: 11618 - DNA, 326 bp, Zea mays
tcttgctatcacacccaagtagttgtatgatcagtggtccagacaaccggaagatcatcctctttaacaaaaaatctacaaccacttgttttcaacttgactgagtggagcagatgaagctatgctgcatgagcagcccaaaaaaactttcgaaacaagcctgataaaacccacttttagttggggcacatgtggcacactctttggtcactatcattaaccttagggggtcatgggggaccatgaccagactcccgttttttaagcaaaaaagatcatgtctcaacctacaacaggtatcgctctgcatcataagaaagtgtggg

SEQ ID NO: 11619 - DNA, 430 bp, Zea mays
  unsure (1)..(430): unsure at all n locations
agcttctgcagnnatctacatgttttctattttcaaccctgnnaacatattaaaacgagttttcctttcattttttagaaacaaatcaatctttatttgttcctcttgagctgcttcagaagttatagaacggagaatggttctcttttgctctccctcgttattccgatcacttttgccacgcttcttaacatctatttacttcacggggcgtttggattccttcattttagaggaattggaattcactcaataaagtaacttatttagtttggaatttgacattccaccactttccaaagttcagatataagcctatctcaaattcatggggtggaggatgaaaaatgatcttatgaattagtagaatttggttctactctgtaacttacatgacattcttcgtctcacttcttcatagtaaaaatgt

SEQ ID NO: 11620 - DNA, 318 bp, Zea mays
tcatcattatctattgagcttctgttcgtctgctaagcttcagctttctgctcttcagcttcgtcatcctgtacatattaaggtgttgtaaggaagattcaagtctaaaggaaaaggtgagcacaaggtatgattttgttaccggcttaagatgacttcgagcttcgtcaccagctaagctctgcccacccttcgtccatactaactttataaatctgtttcctatgctttgggcaagactgggaatatcaattagatctgctggtgataaactaaagttgggtctattgacaatcttttcatgtgtgcaaccagatt

SEQ ID NO: 11621 - DNA, 396 bp, Zea mays
agcttggtgcctacagtttcctttaataattcattggaccaattcgagatctttgtttcttgtaggcaaacgatggaagcaccggtggacagaattgtatgtctaacacttgctctcttcgcgtggtcgtttagcccccgaacattccaagaaaaaatagcacatttttgattcataaggaaaaagctgtcactccacttaacacagcatgctgccatacatggatcagcaggagagcgtgctgtaaaatcctaacaggatgggaaacctccaaacaaggacccgccgagcaaagacacagctcggccacacccgacaaccagaaagaacaacagaggtacacaggcaagctgggggaccttgaccagcgcccagaagtaaatacgcaagatggga

SEQ ID NO: 11622 - DNA, 313 bp, Zea mays
tcgcccatgtgatatcctagctttattggatggtgatatcttggtccaaggcttaatagaattaatagactaattataccaacaaggtgcatcttctttttcgaaaacctatctcgaaagaacctccaagataagcgtgcttggcttggagcaatttaggattggtgaccgaccggaaagttttcttgggtgcgcagtgacgacaaagtgcgcacaaaagactcgtgttgatctgtggggacaatatatgatcatagagagctgccagttataagtacagccggtcccggagcgggcggggggttaccaatgc

SEQ ID NO: 11623 - DNA, 361 bp, Zea mays
  unsure (1)..(361): unsure at all n locations
agctntgatacacggattgaacatcgccatatcactgtgcgttaagagattgatggtatacggagattctctggtagtcatcagccagataaacaaggaatgggattgttcaagcgattcaatgggaaaatactgcgctgccgtctgaaagctggaaaataaattcgagggtctggaatttcatcatatagaaagagatcggaacacagcagccgatgtactgtccaagctcggatccagtcgaactcaggtcccacccggagtcttcgtgcaagaaattctgcagccgagtatctcaatggatcaaacagaagagtgcaacatcatagatcaacccgagtcagactctgatgactggaga

SEQ ID NO: 11624 - DNA, 328 bp, Zea mays
ttggaaaatccccataaaataactactatattatatttggctaaaatttgtcataaggtcataatattatacctagataccagaaaaaataacccttaagataaaatacactcctagaagggagttgtagttcaaagcaccccctctgccctaaatattattatttttgtgcagagaaaaccagtctcattctatgcctcaatttttgagactgaaatatatacaccaatgagaaaccactgtaatttttataggatttttggaaatttttgaaactatgttgtagttcgaacctactctaaaaagcataagtagaaatggggaaagg

SEQ ID NO: 11625 - DNA, 414 bp, Zea mays
aaacgtgaatgccattaatctttctcatcagaaaaatgaacagaattcaccagtttattacacacatcatgcagggataagcggaacaagcctctgcagtcatatcctttaccaacaaaagtaccatgtttcgacacaaacacatttattagactcaagaacaactttatatccatctcgacatagcatcgaagcactaacgagattcttcttgatagagggcacatgctgcacgctcttcaatggcactgtctttcccgaagtaaacttcagaatgaccgtaccaacaccaagaacatgagcgcgcgacccattttccatcaacaaggggccaggccttccgacctggtagaaattgaacatagaggcatcaccacacacatgaatggttgcaccactggcccatcaccactc

SEQ ID NO: 11626 - DNA, 326 bp, Zea mays
tcacctttgttttgagaacctactttttgttaagtaggccacgtaggtcgggtctctttcaaccctttccctctctcaaggggtcacttaaatcggttgagtgcttctccttaatctcgaggatcacttaatccccacaaggatcgccacacaattaggtgtctcttgctagctttgtaagtcactaagagttttgaaggagaggaagaaagcacaatcaataaagccaagcaacaagagcaacaagaaaaacacaagatcacactctctctagacttttcaaggaactaatcactaatgatcactagtcacaattatggcacttg

SEQ ID NO: 11627 - DNA, 378 bp, Zea mays
  unsure (1)..(378): unsure at all n locations
agctntagtgactagtgagagagatttgcttatgttctttcttatctcttgcgcttggattgctttcttctttcttgattctttattgcgatcaaactcacttgtaattgaggcaagaaacaccaatcttgtggtggtccttgtaggaactttgtgttccaagtgattgagaaaagaaagctcactcggtccgagggaccgtttgagagagggaaagggttgaaagagacccggtctttgtgaccacctcaacggggagtaggtttgcaagaaccgaacctcggtaaaacatattcacgtgtcacacctcttatttgctcgcgatttgttttgcaccctctctcgcggacttaattatatttctaacgctaaccccgc

SEQ ID NO: 11628 - DNA, 303 bp, Zea mays
gaaacctttggaaactggtgatcagcatgtccttcagcttctgccatgatgtgattgtacctagccgaagagaggagtaccagggttgtgcaacattcttgactgccatgacaaaagattttgccatgactgcagtattgcctccatatgaagatatggtagctgcgcagctcattagaaactgcttcagatctgagtgcccctcgtacatgggaagctgaggtggtttgtaagatggaggccaaggtgtagcctgcagttctgctgacatatgagaagcatcatcaaaagcaaaaaattcct

SEQ ID NO: 11629 - DNA, 386 bp, Zea mays
  unsure (1)..(386): unsure at all n locations
gcttagtgcaagcgtgtggaatggaaagactacgatttctattgngcatgnccggctcgagtgaagggcaaggtggaacggagggaaaaccggatgaggcgccccgcgactggcggcaaggctgttcggccttgcatctgggctgaaaacgaagtgttcgccatggcgcacggtcccaaaacggaagctcgggcacgaactcgaaaataatgctagttcaagcttgtggaaagacaccgaacatacagtgtatgtacttggtgaagggcacagtggaacggagggaaaacgacacggatgcacgctggtacgggcggcatggcttgtctgccctgcgtttgggctgaaaacgaggccgttcccattgtctcgcgggccgaaaacaa

SEQ ID NO: 11630 - DNA, 328 bp, Zea mays
tttccttacataacaaaacataaaagactgctattcttatctgccgaagcttttccttacataacaaaacataaaagactgctactcttatctgccgaagcttttccttacataacaaaacataaaaaactgctactcttatacacaacgattcataaaaaaccacctcttcgaaacttttcttttacataacgaatcataacaaaccatttatccgaaacttttctctgtgccgaagcaaccatttaggaacacaaatgctatgaatgaatgcttatgcatgcaaatgccatgatgtaatgtgcaaatgaatgtccgaagcgtatgt

SEQ ID NO: 11631 - DNA, 402 bp, Zea mays
  unsure (1)..(402): unsure at all n locations
agctngccctccactaattccatcttggtgatgcaatttacantattcccctcatgagagatcttgagggtgtcccagatctgcttggcattgtccaagccgctcaccttatggtactcgtccctgcacagagaggctagcaacacagtaatagcttgtgcatttatatgaatctgctcattaataaacatgggactatccgtactatcaaagcgcattccactctctacaatttcccatatgctatgatggagagagaacaagtgactactcattttgtgactccaaaatccgtagtcctctccatcaaaatgaggaggtttaccaagtggaatagataataaatgagcattagtactntgaggaatacgagagtaatcaagagaaaagttcgaattaacc

SEQ ID NO: 11632 - DNA, 334 bp, Zea mays
ttaactaacttcagtttgattccactttatacaaatgaattttgatacgttacgtctggattatctcagtcccacgctcgtactaacccgtggtgaggagaacaaatgcgtgtttggagagcgcatgcttgtgcttattcctagagctatggacatcgcaccatctgtagagcatactgaaatagaatctttgccagttcctgcatcaggaaagcacatcatgatatatatatatatacccaatcagtaacctttagtgcataaatagagaggacgcctagactgtcaacacatttacctgcttgccggatggaacagtgcactgcactctata

SEQ ID NO: 11633 - DNA, 359 bp, Zea mays
gaccttaagtcaccgcggctgcaagctgagcatgatgagaatttacaatatcgttcagactgtcgaggtttgtaatgatgcaaacattggccactctgagcatcaatatgtagctacagggatgcccacaaaatttgctctggaagtataattccttcatgtgataaaatatccctttcttttggggcgctgctatagttaaggtggttttttactaggaaaattatctttcatgtgtctttggagcaggaaatgtttatcttgcaacaggtaatatccatttatacaacaaaagataatatgatttcgctctatgttacataacaatgcttccataaccccggacgtaaaggcggaaa

SEQ ID NO: 11634 - DNA, 324 bp, Zea mays
tgctgcaattggagggatttcttttttttttgggtaagttccatgacctgagttgtatgtcagctgttgtactttgaacaaaatgagcactgtttttaaaggaggatggccatctgcttttaggaaagcaacgtaacaagtatcagatacatcaagatggggttgccagcgacaaaagagcacaaaccactatacccttcgggactgacacagacttaagctagctatagcaacaaaagaacacagaccactacacactccagaactatgatagacttaagtcttcatgacatctgatggcaccagcgtaaacgggtgaaagtt

SEQ ID NO: 11635 - DNA, 439 bp, Zea mays
gcttgtgaaggttcttcatccttacatgtgctaagaggcgatgccacagccagcccatgctagtcttagcaattatacatgcgtctagaccggcctcctcttttgcaaaaacaactaaatagagtttgccgtctaatacaccattaaaagctaatgaaccatcactccttctaaggacagacacatctactattgtgaatagacaattatatcccatattacattattgacttacggataacaatatatatccaagcgactctactaagaatacattagaaatagagtgctcatttgagattgcaatcttgtctaaacctttaaccttgccttgattcccgtcactgaatatgattgaatcttgggaatctttattcttgacgtacgaggtgaacatcttcttctcccccgcatgtggttttgcatccgctgccaaaat

SEQ ID NO: 11636 - DNA, 328 bp, Zea mays
tcggtattacaaaccgacttaaatattgaatgaccttttagtccataaaggtctgagtcaatgttgtaaacttttatgaggggcataattgtaattcctcacaggctgtgtcctgtgcctataaatagtgaacagtgttcctttgctgttcacgcattctggtaatggcaatcgcatctttcaggaactaacttttgccaaggcagaggtattattgtattcaataattcaatatggtaaataaatataatataatttgtctatgatttatttacctttttatacccttcattttatgttctcatacaatctattaaaatttcattac

SEQ ID NO: 11637 - DNA, 429 bp, Zea mays
  unsure (1)..(429): unsure at all n locations
ggatccttaagcaccgcggctgcaagctggaaatcttatcccacatggtcnantctgcggngccagagccaacccatgttagtcttagcaattaagcaagtgtcgagttcagctctatcaaaatctaccaagtatagctgaccctctaacactcccttaaatgctattgaatcatcacttcttctaaagacagtgacacctacatcagtgaataggcagttgtagcccatttgacataattgggatacggaaagcaaattgtaatctaaagaatctacaagaaaaacattggaaatggtatggtcaggtgatatagcaatnttacccaatcctttgaccaaaccttgatttccatccccgaatgtgatagctcgttgggaatcttggtttttctcataagaggagaacatccttttctcccctgtcatg

SEQ ID NO: 11638 - DNA, 326 bp, Zea mays
tctaaagggagaacacattttgggactaaccaatgttcattttgagaaagacagggtttgtagcgcatgtcaagcagggaagcaaattggtgcccatcatccacacaagaacatcatgacgaccgacaggccgcttgagctactccacatggacctattcggcccgatcgcttccataagcatcggcgggagtacgtattgtcttgtaattgtgaatgattattctcgcttcacttgggtgttctttttgcaggaaaaatcacaaacccaagacaccttaaacggattcttgagatgggctcaaaatgagttcagcttaaggatca

SEQ ID NO: 11639 - DNA, 350 bp, Zea mays
  unsure (1)..(350): unsure at all n locations
agcttccatcttggaaagcatctctaatgaatanggctggcagggacaccatggttagacatgttctttctgcaattcctatgtatttgctaatttctactaatgttcccaaatggtccatcaaggcagtggataaaatcagaaaagggttcttatggaaaggcagagaaaagggttcttgggataaagtcactcgaccttttgagctaggaggacttggtattcccaacttgagttgaatgtcatggtgtgggatttgcaattaaggtggtagtggcataagaaagtgagggttgatcggccatggacagacatagaactcccctttcatcccaatgctttggctcttt

SEQ ID NO: 11640 - DNA, 322 bp, Zea mays
tgtcaatttgaaaacacattttcgttccaataaaatactatgcggcgctttatggacaacagttacacacaacaaaacaggcaatggtacttaatattgacaatttgaatttattaatttaaaaaattaataaatacacattttgacgcatcatttgtgtagcgtgaattgggaagaaaacaaagaaaactgaaaatgaaatggaaaaagggaatctgttaacactgtagctttaagggacggaatttatgggacgctgctggagactgagaatatatagaggacagaatcttttaaagtgttctgtaaatgatagagaata

SEQ ID NO: 11641 - DNA, 396 bp, Zea mays
  unsure (1)..(396): unsure at all n locations
agctttcctctcaggttgagatattctntattgcacaaattctccccctttgacatcaaacaccaaaaaccatactcgagcaagaacataggatgatgtcaagggacagcagggtgtcaaggggaaaaactactaaaaaaaactcccccttacttattgaacatatgcactatcaacatttaggcaagatacatatatgcaaaaagattaatacttccttttgtacctttaccatgttgtagtgtacttcccatcttgaaagtatttaatctctctagagcttctccacacttgtgcctgattctttatcctaaccttttcttgttgctaagacacaaaacttagaacaagttatagtattgggcacaagaagaaacttctattctaatgaatatc

SEQ ID NO: 11642 - DNA, 314 bp, Zea mays
tagggtttccttaagtcttcgctaacagcaatagcatccaagcgaatttcttcttgttgctgactcagaacttttgatttagaatgagcattagctagctgatgctcaagctccttaatgcgattctgatcagcttggtgttgcgtctgaagtcctatcacctgatgctctagtccaataatctgtttcgcttgagcctttgtttcctcaagtcgttcttgtgcctgggtacaagccctattcttggccatttccatcatcttaaatgctgcataactcccagtgtacaactgcttccacttttgacgactgtg

SEQ ID NO: 11643 - DNA, 325 bp, Zea mays
ttatccttcactagaaacttgtcggaacatttcttgcagaagacatggccacaagtgctgaccgccacaagggacatggtatttgtgatagtggacttgcaactagggcacatgtagctcttttccactgccttcccgctcttctgatcagcagtttcctctgtgaacgagatagggaagagcgatttcaacttgagcttctcctgcccctccgggcagacagtgtcggtggagggcacgtctaccttgaccgtagcttcaggagtagctgaagggagccaaaatgccttcatacagcgaaaggcttcgtcttcaaaagaagtgg

SEQ ID NO: 11644 - DNA, 440 bp, Zea mays
  unsure (1)..(440): unsure at all n locations
agcttcggccagtgaaccgcatagtcgagattcacttttttcaccaggagaggatcacggcgatggatctgcctgctgtttcgcagaagttgttgtgcggcggtggattggataatacgagctgttccagcgacccaacgatcagtgatctatagcaagcgcgcgtgagcatggtggctagcgacatgggcccacttggccggtgacttaagagcgcacgatgggttctgtccatggggccgtgatgtcatcgagacggccaagggtgggccgacaggagagaggaagcanctaaccaggacggtccacacgttataggcattatgcgggaccaagcgtctgcgcaaggtggtgcggctagctgggctgaggatcaatatattagcccatgcgcggagagagaggcttctttttggatttattcattatttctgcttcca

SEQ ID NO: 11645 - DNA, 324 bp, Zea mays
taagttatgaatgtttcaaatatgatgactgaatctgtccagttctagacagcaaagtcttttagtgatgtttatccttagttaaatattaaatcaccttgtgatgtctataaataatttgtagaacattgaattagctttccagaaagtctaggatcaccttgtttggatgtctgaatcttcagttgtgaattttttttaagttgcaagtctgaatctgtccaaatctggacagagctgctgtgtttgcataattcgaccttgctaagtgtttaatcatgttgtgatgacaataccaaagtcgtagagcactttttaagcttt

SEQ ID NO: 11646 - DNA, 422 bp, Zea mays
agcttctagtaacgccatgctaaccaagggtatttttttccatttatcactactcgatcattgtggatatctttccaggtagtaccgccaagggctggaccatatgaattcgaatctaaaatgtctatgcaacgaaactggaaattgattgcatatagagtccagtgactacgacagagcatatgaaccatgatctgtaaacataaattgataggatatgacttaagaatgatttgaatgtgaaaaaagaaagtaaatataaaaaactgaatatactgtgagcaagaaaacagtgtttggtatcaaacaggaaacttattaatcagaaacattaatacaaacttaccaacaataaagagtgggactcaccagtttaacctttgttagagcttcaactggatgaaagctacagacaagtaaat

SEQ ID NO: 11647 - DNA, 330 bp, Zea mays
tgataaagtggtactttgaattttatattgtatagtgcgagcgaacaaatttttttttggtgattttaaaaggaaaatgtaatagtaactttttgtggtttaggacatgtatggtttcttttactaaatgttagtcaatgtgacgttaaatatttgacgctagttaaaagtattaaatataattcaattgcaaaactagctatactaataaaaactgaacgacaaggtaaatctaccaatcctaattaatcaatgatttcccctttaatgatacaataaatatttgctaatcatgaattaattaagcttaaaaaattgtcactttattag

SEQ ID NO: 11648 - DNA, 330 bp, Zea mays
tgtgaagattcttcatcccaacatgggcttttcggcggtgccagagccaacccatgttagtcttagcaattaagcaagtgtcgagttcagctctatcaaaatctaccaagtatagctgaccctctaacactcccttaaatgctattgaatcatcacttcttctaaagacagtgacacctacatcagtgaatagacagttgtagcccatttgacataattgggatacggaaagcaaattgtaatctaaagaatctacaagaaaaacattggaaatggtatggtcaggtgatatagcaattttacccaatcctttgaccaaaccttgatttc

SEQ ID NO: 11649 - DNA, 360 bp, Zea mays
atcctctagagctcacactgaggcatgcaagcttcacgaaccgcctagctacagagggcactctatttaaaacttctgaaatttttcgatggatagtctctccactatgttggaaagccttttgaagcatttggttactggcattgtgggagatcatatacataaacatcccaagctgctattcgacgttaactcctcgtgtatcacgtaacaaaccctctcttctaaggaattctgatgtggctctaaatatttttggctccattcgaaactcggacttgcaccaactctcatgcccttcaagaatccccttaacctctccctgcaccacacagagaggacgtatggataccccttttc

SEQ ID NO: 11650 - DNA, 333 bp, Zea mays
tgaatgtgtctttggttgaagtgaatgctcttgtattgaatgagagtgaatcagaggctttgatcaagtgaatggaggtggttggggttgtatttatatcctccaaccacttcctagccgttgctccaattctgccgaccgtggacggtccgcgcccctggtccagacgacccgcgcccctggtccatacggcccgctcctgcacatcaacgactgaaatcgcaacggtcagcagtaacagctatatcaatggctatagtgcatttaatgcgtcgtcagatgtcagataaagcagtcgcgcacaactaatccactggacttgttgaagactct

SEQ ID NO: 11651 - DNA, 427 bp, Zea mays
  unsure (1)..(427): unsure at all n locations
agctntgtcgtcctcgtccatcgatcgnattctcgctctctgccactgccagtgcggttgcatgctggtaacccactccgagatccttatgaccagctgcctctgcagctctcaagttgcaccgttttatgatcggcgcagggcaacacgaattgggtaacagcttttcgctgggccttgctggcgctcgcgttctttccctgtgccggaacggaagcctggaacgaacatgtgcagcggcgtttctggtcgcgggagtgcccgaaatcctgtggtttatccagagtagctaacagcgagcaaatagataggagagttaatgtattctaataatttaagtatattaattgtgaaactaaattttagtggtactatttttattattttgtgagctccacatcatcgctatttgagacaaccactggga

SEQ ID NO: 11652 - DNA, 316 bp, Zea mays
tctaaagggagaacacgtgatttgtttgactaacgtacaattcgaaaaagatagaccttgtgcagcttgtcaggcaggtaaacaggtgggaggaacacatcacagcaagaatgtgatgaccacatcaagacccctggagctgctacatatggacctcttcggacccatcgcctatctgagcataggaggaagtaagtatggtctagttattgttgatgacttttcccgcttcacttgggtgttctttttgcaggataagtctgaaacccaagggaccctcaagcgcttcctaaagaaaactcaaaatgagtttgag

SEQ ID NO: 11653 - DNA, 429 bp, Zea mays
  unsure (1)..(429): unsure at all n locations
agcttctacccgcttgccctagtgatcggttaagcatgtttgaatagctctctgataagtcgctcctgcgttcttgaggccaaacgacatgaaggtatagcagaaagctccaaacggggtaatgaatgcggttttttctcatcttcttttgctaagctgatctaatggtatccagaatagcagtccaggaaggacatcatagaacatccggtggtcgaatcaaccacctggtctattctaggcagcccgaagggatccttcggacaatgtttgttgagatccgtatagtcgacgcacatgcaccaatccactntattctttntgagtacaagaacagtgtgacagagcctnccaagtcattaggcccacctacagttgtccttgtctagcggacctcggacaaccaatagatgcacctgatcacttgac

SEQ ID NO: 11654 - DNA, 322 bp, Zea mays
tgtgaagattcttcattccaactttttctagtcggtgatgccagagccaacctatattagtcttagcaattaaacaagtgttgagttcagctatgttttcattaaaatcaactaaatatagctgaccctctaacactcccttaaatgctattgaatcatcacttcttctaaagacagtaacacctacatctataaaaagaaagttgtagcacattttgcataattgagaaacggaaagcaaattgtaatctaaagaatctacaagaaaaacattggaaatagaatggtcaggtgatatagcaattttaccaagtcctttgac

SEQ ID NO: 11655 - DNA, 420 bp, Zea mays
agcttcggaattacaaaccgacttttgatttattgtccttttagtccataagagtttgagtcgttgttgttaacttttatgaggggtatgattgtaattgcttacgggctatgtcctgtgtctataaatagtgaacagtattcccttactgttcacgcattcttgtaattgtgatcacatcactcgaaaattattctttgccaaggcaaaggtataaatgtacctaaacattgtatttgaatatgtagatgatgttgtttaactctaatttacttgtctttaatgctttatgactcatgttattatacattatctttaggagttaattacaaaatataaccttcgtaattgtgtcttataaccttctgccgatgttattaatatcttgggaaataatgtttagcggacaaagacataata

SEQ ID NO: 11656 - DNA, 313 bp, Zea mays
tgggttcgcccccttggggaggatttcttgcatttacgaaacctaacgggcggctacatccggggggaatctttgtaaaggctacgtagtgagaccctgcctactcaccttgggagtgttcaaaggtccgtacaacccaatgcaaaaaaggaatcacggctcatgggtaaagtgcacaacctctgcatagagtttgaaaactgatatatcaaccgtgctcgccggtatgatcggccaaaggaactttattgattagagaaaccttgataacagatgttcggatttgcaagtggcaatgaaaccgatggttttt

SEQ ID NO: 11657 - DNA, 411 bp, Zea mays
  unsure (1)..(411): unsure at all n locations
agcttgagagtggcttctcaaagcatctgttgttgtgtgcntgtggttgcccacatactcgggaatgtacgaggaatagcacaaagcggtatgcaggacctgcttcgactgattctgccctgcttcgacttcaactatctctttctgcttttggatcgtgacttggtacgtccttgttatatttcctttgtcctccccgcagaataaacagaacaatctcctgggctgggagctaaacctttctctgaagcttctgcctcctctacctcttggagctggtggcctataagaacttcgctgcgttcctgaagtctgtgagctttgatgatgcccttagagtggctccctctgtcatcacctgatgtaggattgttgatctttctaacacgccttgggtgaagccttccttct

SEQ ID NO: 11658 - DNA, 348 bp, Zea mays
aggacacatagaatacccaagcttttgctcatctcccgacagacagattttttcttgccggcagggagaaaatacaagaagtcttcttctccgctgccattgaatatcaacgccccttttggatataccattttttgcgcatagaaaaggaactctcttttttctttttcgctcaaatttttaccccaagcatgacgcaatatatagtcagaagcttcagaagatgcttcgggcataagtgtgccgaatttctcagataaagattcttctgcagaaactttttccgtttctttttcaaattccaagaattccctcttgggaggctctgaaagcccaagtttagtttcc

SEQ ID NO: 11659 - DNA, 324 bp, Zea mays
tggaggcgtcaattggaattttttttgtgtagactccttcttttcttccgttgctttgaatgcaatgggttgcaccttgggtaaaggtggcgccttactccaagttgacaatttgtttggagtctttgatcataagttcaaagctcacaaacttgccaatcacttcctctggagacatctgtttatatctaaggtgtccacggattatttacacttgagtgggattacgaaaaacaagtgatctaagaataaccttgaccatctcatggtcatcccacttggtgctcccgaggttgcccacttggtttaccattgtcttgagcc

SEQ ID NO: 11660 - DNA, 370 bp, Zea mays
  unsure (1)..(370): unsure at all n locations
agcttaacgtctctttataactaatgcgaattgcctcgttgcgtgctcggtcgcgcgacgagtcgttaatttcttaattcgttttagagtgctatgtcgcgcgcctcgctgcgcgacgattctttttatttatcttcattcgcttataatgattagacataaaacatgactttactttacgctaaacatagtgtctacattagcttccttctattaaacgagtggttaatttataatcatgtaacgtgatcgtttctcgactgtctttttctctttctctcttaaaccgagttgcgagcccgcgtggaacgtctggntacttactgcattctattgatggtggactgttcttttgtataaatatgtggat

SEQ ID NO: 11661 - DNA, 316 bp, Zea mays
tctatcatactctgctagtgctatttatttcattcttggcatttcatttcatatacacctgttgaatagccaacacccttccaaaatcaacttttgattggttttgcagcttaaaagcccctttgtgttatgtattccatccctgacatttattttaacacctggaaatgcagcccaaaagccatgattgtttaaatggctgattggtttgtctgaatttaagttgaagattcaaatatctaagacatccttgatcaaaatttaaaattttaaaggtttaaacaatgggtactatggtttatttttctatttgcat

SEQ ID NO: 11662 - DNA, 392 bp, Zea mays
  unsure (1)..(392): unsure at all n locations
agcttatgaagaatcttctattcttcacgttctcaccggcggcgccagagccaacccatgttagtcttagcaattaagcaagtgtcgagttcagctctatcaaaatctaccaagtatagctaaccctctaacactcccttaaatgctattgaatcatcacttcttctaaagacagtgacacctacatcagtgaatagacagttgtagcccatttgacataatngagatacagaaagcaagttgtcatctaaagagtcaacaagaaaaacattggaaatggaatgggcaggagatatagcaattttacccaaacctttgaccaaaccttgatatccatccccgaatgtgatcgctctttggggatcttggttttcctatatgaggagaacatc

SEQ ID NO: 11663 - DNA, 326 bp, Zea mays
tgaaggaaggagttcgccttttttattttcgttgctcaagactaggactataggtttgggtcacttgtccattgtaaaaatgtgacaactacatggctgaggtacgagacagcacaaattgtatgacgaaacatgtggcgaaagcagacttgaaacagtgttcttgtgaggaatggcagcacactgggaaaccgtgtcaacatggtctagccctaataatagcccaagattgcagagatgtatgcatggaaaattttgttgacgattgttactctgttgaaagattcacgataacatattcaagaagggtggaaccaattggtgat

SEQ ID NO: 11664 - DNA, 391 bp, Zea mays
  unsure (1)..(391): unsure at all n locations
nagcttgggaagatccttcattacaacgtgggctagtttgtgatgccaaagccaacccatgttagtcttagcaattaagcaagtatcgagttcagctctattgaaatcaactaagtatagctgacccgctaatactcccttaaaagctactgaatcatcactttttctaaagacagtaacacatgtattcgtaaaaagacagttgtaacccattttgcataattgagaaacagaaagcaagttgcaatctaatgaatccacaaaaaaaacattggaaatagagtggttaggtgatatagcaattgtacccaatccgttgaccaaaccttgattaccatccccgaatgtgatagccttctggggatcttcgttttatatgtaggaggagaac

SEQ ID NO: 11665 - DNA, 305 bp, Zea mays
tgacgatgaccggcttgaggtccatctctttgttgatcgtggtgcccacatctccaccacctcctcctcctctagcggcgtccacatgagaagcacgttctccatcggtggtgggggttggggtgaaatcaacgacgggcatgcgggcatctcagatcaacggtcatctcaggtgggacgagtgggggcactgaactgcggcatgcggggtgtggcattctccaggggcaagggaaggggtgctggcgggcgggcggattgcggagggtggtcagacgggcaaatcgcggcggctgcggcatgca

SEQ ID NO: 11666 - DNA, 427 bp, Zea mays
  unsure (1)..(427): unsure at all n locations
agcttgtgaagattcatcattccaacaggtctatttgtggtgccagagccaacccatgttagtcttagcaattaagcaaatatcaagttcaactctattaaaatcaactaagtatagctgaccctctaatactccgttaaatgctactgaatcatcacttcttctaaagacagtaacacctaaatctgtaaaaagacagttgtagcccattttgcataattgagaaacagaaagcaaattgtaatctaaagaatctacaagaaaaacattggaaatagaatggtcaggagatatagcaattttaccaagtcctttgaccaaatcttgatttccatccccgaatgtgatagctctntggggatcatggtttttctcgtaggaggagaacatccttttctccccagtcatgtggtttatgcacccgcta

SEQ ID NO: 11667 - DNA, 325 bp, Zea mays
tgttctcagctgagaaaccctatgtggttgttgctatcgcctcgaaatcatatactgctagttgcaggtccctccccttcatgctttgcttcacggcccttgcttattgagggaaccagcagcccatatggatgatcctatgaaaataccgaagttaggattgcgtcaaccaacaaatttacattgatacaataaaatacgttttgccatcccctttggggagaacaacattctgtagcgatagtatgtcacctgattttcttgcttttgttatctttgctctccaaatgtaaaaccctgtgattgctataagaacggtcagcgc

SEQ ID NO: 11668 - DNA, 402 bp, Zea mays
  unsure (1)..(402): unsure at all n locations
agctttcctaacaccaaatcaacatggatatantcttttacttcaataaatatatatatatgaatgcaatacatgctgtgctcaaatagcttaaaccaaacctatccaaacaagagtaacttcaaaagaatcaattaatgcttgcatatttctagacagcagcacaacggttatttggtttcctcataactcacaaaatattcatccaatagaagtaaactaggactttatggaaagcttacaaagtccactatacccttggtattatcatcaccacaagatttgacacttagaaaggccaaacaatgcgaaacgtaaattttgttcagacttgaacagaattcaactactcacttcaaaaatccataattggagtctcattcatcccattcaggcgctctt

SEQ ID NO: 11669 - DNA, 328 bp, Zea mays
ttggtcccacctacaggctcgcatttattctttagtgggcccgggggccactatcggtacccccgaataggggtaccccctactgctgtatcaaggcatagtgcccgcgtggctatctcttaaccacacggcaatagtgccatgactagggccaggccacggttcggcccagtcgcggacggccactcagggcccacagcggcgcctgaccgcaccacatgggcgggtccggagccgccacgtgtccaggaaagaaggaatgctccaggacgttaatagtaagtccggacccccatgggagagcgtctgacctctgggtatgcagtcg

SEQ ID NO: 11670 - DNA, 380 bp, Zea mays
acctgcggcatgcaagcttgaaggaaaaaaggagggagaacttgttcggttgttctaccattacaaattcaagagacatttcaaagtgccctaccaagaatggctggatacaatcgaagtaatgtgcaacgaaatacttggaaattattctaaaaaaagaagatcaattgatgactgcggccttcggcacccgtccgaaacgaaggctaaaccgagtgatggatgctataggttttgaatatcctgactacgagcggctagacaagggtgccgaaggccaaaaaaggaaaagagtagctagtgctctgaataaggatgatgaagatcaaccaaagaagaaaaaacaagagtctgaggcaaaaacagttgctccgaagaaa

SEQ ID NO: 11671 - DNA, 330 bp, Zea mays
  unsure (1)..(330): unsure at all n locations
cggcggaagaatcggatagcagctttgtttgccttanattgcaaatgctgaccagtgaccactaacttagcccatcctggccaaagttattgcagtcatgtagactataactgtagcaacctttaccgtacacagttctttaacttgaatggacaatccaacagaaaattgatagtcctaataacatcgcactgttcctgaaaagctatttttttcaatgctccagcggcaaatatagcatgttctggtgcatttgtcttataatttacaaaatggtgagcttctgacttcttgaactcattgtaggtactggttttccactgagacatt

SEQ ID NO: 11672 - DNA, 295 bp, Zea mays
actgcgttcctcgaactgacactatcttcttcggcacaccatgaaggccaactttccccgacatgtataactcaactaaccttgtctccggggatgttgtcttcaccggtattaaatgggccacctttgttaaacgggcccccaccacccagatggaaatataaccgggcctggtactaggtaggcccactatgataaccatcccgatctcgttccacttccactgaggaattcggaattggtgcaacaatccggcgggcctctgatgctctgctgtggtcctctgacagctatc

SEQ ID NO: 11673 - DNA, 317 bp, Zea mays
  unsure (1)..(317): unsure at all n locations
tcttctttttaaccgaactttccttttgttacactgngtcgcgcgggcttacagccgctaccgtaagaagaaaaggcacgcctttagcctgagcgatcagtcagctatccacttcgcacgggtagctatgctatggctatcactcacacgtacacctacttaattgtactgtcacgcgcgcaccggctgggcggctgtgggtggcgacgcctccccggccggggggggcctatttataagcgcggtgcccgcggcatgggttggtcccgcgcccacagtttctgggtaattttagaatcacaggaaaattggctccg

SEQ ID NO: 11674 - DNA, 440 bp, Zea mays
  unsure (1)..(440): unsure at all n locations
agctntgcatggagaaggaggtgtattgtttctttgggaggcttgagcgggttaagccaaattcttaattcaaactatcaatcttacaatgttttatatctctaagattgacccaatgttgtattgaattattatatgtaaaaactcatatcatgtcgagcaagtttttgatgttgtagggaataaaggattatcctgtgtggaaaatcaagaaaatcctacaacatagaggataaccaaagaattgtaacacttatgtatttaagtgctagtattttcaaactattatttctcttgtgtcttgtgtagccacatagaaaaaggaagcacttaagaatgtttttaaattatgtcaccattctttggagaaagttcctctcatatggtagattacatattcatcatttctatattttgacaatctacatgctttaaatggg

SEQ ID NO: 11675 - DNA, 320 bp, Zea mays
tcagctccatctatgttatggattgcttttgagtcagtccaattgccttcggcccttcttgcagcttcctgacttccatggatagcaatgggtccctgatccgaaggtatcttcatgcaaagataggcaggatgaaggattgcttcgaaggcattgagggtaccacgaccaataattgcattgtaagggtattccatgtcaacaatgtcaaacacaacttgctcagttctagtgttgttgatgaatccgaaggtcactgacatggtgatcttgcccagtgctacaatctgtcttcctccaaagccacagaaaggatgtgt

SEQ ID NO: 11676 - DNA, 403 bp, Zea mays
  unsure (1)..(403): unsure at all n locations
tcggaccttaagcaccgcggctgcagcttggaaggttctcatcctccatgttctaatctgcgangccacagccagcccatgctagtcttagctattaagcatgcatctagaccggcctcttcttttgcaaaatcaactaaataaaggttgtcgtctaatacacccttaaaagctagtgaaccatcacttcttctaaagacagacacatctacatttgtaaatagacaattatatcccatattgcataatcgactaactgatagcaaattatatacaagagactctactaaaaacacgttagagatagagtgctcattataaattgcaattttacctaacccttttaccttgccttgattcccatcacccgaatataattgaatcttgggaattcttattcttg

SEQ ID NO: 11677 - DNA, 393 bp, Zea mays
agctttaaatattatttagaagctttgggtttagtttggcatggtttggacaatgtttggtacctaaaccccaaaaccctaatcttctaatgatgcctgccctaggaacttcagttctgactccaaaaaccatagtttcctggagccccgtgaaggaaaattgtattcaagacctaagatagtatacttttattatcttttgcattttcataatcattacatgagcattcatgattatatatggttatatatagaaaacgaagaagaagtaaaagttgaagaagcaagagctacacctccacctgaagacccactggccgggaactgcttttattttgacatttgtggagcagagcccgactcacctataacacaaggcaagccccggtgcat

SEQ ID NO: 11678 - DNA, 309 bp, Zea mays
  unsure (1)..(309): unsure at all n locations
gctcaagggagagcacattnttgtttcttacaaacggtcattttgtgaaagacaggatttgcaacgcatgtcaagcagggaagcaagttggtgttcatcatccacacaagaacatcatgacgactgacaggccactggaactactccacatggatctatttggcccgatagcttacataagcatcggcgggagtaagtactgtctactaattgtcgatgattattctcgcttcacttgggtattctttttgcaggaaaaaacacaaacccaacaaactttgaaaggattcttgagacgagctcaaaatg

SEQ ID NO: 11679 - DNA, 426 bp, Zea mays
  unsure (1)..(426): unsure at all n locations
agcttctcctcggcgtgggcggcgtcgctatctctttcctcgagctctcgttgtagcctctgcagcgactccacagccgcggtctgctcgacccgctgatcctccaggattttgttgaaggcactcagcttggcctagagctctgtgacgacctcctccctctgggtcaagtgctcctccttcttggctagcctcttctctttccgggccacctccagctcccgggcgtacaccttctggaggtccttcttgtaatccttgcagtctcgctcaagctcggactgctcgaagacgaactggtgggacgccgccttggtgcgctcctccagctgggtacgccagtcgtggaggctctggtngtcggcctcaagcgcctctcactcccgcaggatcgccgcctcagtctcatgtagagcctgatgggcg

SEQ ID NO: 11680 - DNA, 330 bp, Zea mays
tggatggtcttcatcagaacactatggttttcgttgtgataaatgaaaattcttcttcacgaagcatgaaaagaagggaaggtgttttttcgtcaaaaactcaaaaaccgtacgcatgtaaatttcatgcctcgtaaagaattgaaccctaaaaaacaagtatattacatgcagggttacaagatattacacatattacatttcagatgtttttacaatagcacctagtcttccctaagtactatttccgcagcttcgttcaagagttgattgacaacttgatccatgatagcttcagccatctttttaatgtcatcatcatctttcggg

SEQ ID NO: 11681 - DNA, 430 bp, Zea mays
agcttcgtaaaaataatctcctattctatacctcgaaaatcaatattgtttctccctgtaacttggcatgatttgccctttttcaaagcattttccgaagatcgataacatgcccccttcttgtgccacatgcagcatgatgtatgatgattatgctatgcaaaatgatgtgatgatgttatgttatgcaaaatgatattttgtgccgaagatacgcacattcctgcaatggggcacaatcttttgtatcaatactgactttttcattataagcctcccttaggagcttcttcgccttttacttcagcggaatcagcgtttatatttcgctgtaagttctgcatccccttaggaacgtctttggaacttcttcgccttttacttaggcgggataagctctgcattcccttaagaacgtctttggagcttc

SEQ ID NO: 11682 - DNA, 310 bp, Zea mays
tgaaggccaagttaagaggctgccccaatatatttcgcatctgaggttcttagtttatcgaagaaaaattatacagaattggagaaggtactatatgctgttttgatggcctccaaaaagcttcggcattattttcaagcttacaacataattgttccttcttcgcaacctctgaaggatattatgagaaaccgagaagctactggaaggattggaaaatgggctgcagagctcaatgaattttgtattgattatgttcatagatcctcgattcagtcccaagcgttagcagacttcattgctgactgga

SEQ ID NO: 11683 - DNA, 438 bp, Zea mays
  unsure (1)..(438): unsure at all n locations
agcttcttcaccatgtgatcactgttatcttgagaaggttgagcaatgcatttccctttaagttgtgtcaagctcatttttagcctctcattttcttctttgagcttttgatatgtgtcatcatttgttcctgcaaattctagctcaaaagaagatttgcttgttgacggacaacaagcattagcacatggtaatatagtatcaatatgaacacatgtgcaagagtgaggttgttgggattttaaactttctatcacaacctcatgagcaatgtttaatatgatatgatcatctctaagattntcatgagagcataggagcatatcatatttntcttgaaaagctagatattcaacttttagcttttctacnttggtccttaacaaggtattcctatttactaaatgagcgatacaatgtaaagcgttatcttgctca

SEQ ID NO: 11684 - DNA, 341 bp, Zea mays
agtgacactattaaactcaacttcgcctttgaggccgattgttgtattgaacgaagccgccgaagagtgccaaaaagccttcggcgttgtctgttcttttataggaacacgggacttactacaagaacatatcgccttcagggtgtggccgcttgctgagaaatgggaaatgccacaagaaaccataaaagaagccgacgaaggtgggcttgtgagactgaagtacaccttcaaatttggagataaatttattgagccagatgatgagtggttgaaaagcattgacaatttaagtgatgagctactctggacctactcgaaggctgaagataatgcaatgt

SEQ ID NO: 11685 - DNA, 377 bp, Zea mays
  unsure (1)..(377): unsure at all n locations
agctntatcaaatggacgtgaatagtgccttcctcaatggaccaatcaaggaagaggtctatgttgagcaacctcccggctttgaagacagtaagtatcctaaccatgtctataagctctctaaggcgctttatgggctcaagcaagccccaagagcatggtatgaatgccttacagattttcttattgctaatggcttcaaagtcggaaaggccgatcctacgctctttaccaaaacacttgaaaatgatttgtttgtatgccaaatttatgttgatgatattatatctgggtctactaacgaatctacatgtgaagagtttagtaggatcatgacacagaagtttcagatgtctatgatgggggagtcgaagtat

SEQ ID NO: 11686 - DNA, 327 bp, Zea mays
ttttgaaggatcaggaggggggaactccctactgcgcattttattagaaagcgaaaaggaaagcttagaacctgggacttttacaatcaataaaaggaagagaaaaagaaaaagaaagaactattcctatgtttgccacaaacttagccaattcgggattgaggtgtcaaattccccccgcgctctgtgaatgatcagtcgcaattctctactaaattcctgagtacagcggagcaccgagggatctttgtttgaaaacagccactcgtttcggcttttccagatgctccaagtcataaaaataatgatctccataaagaagggaac

SEQ ID NO: 11687 - DNA, 258 bp, Zea mays
aattgagtttctctaaattttcttgtatgaataaaaaagtttgtatcataatttttaattctatactagcatgataattctatactagtgtgacagttcttagcgtgacaatcctgagaatataaatattctaattgaatcgttcacaataaatgttgaattacttaaacataaatgtgtatagtaaagattagaagacatcgattttttatggaggtcttgagagtccaactattctttattggagatctttttagt

SEQ ID NO: 11688 - DNA, 383 bp, Zea mays
gtgtttaagaggaaaaaacgactattcaaaatttccccttacttattgaatagatgccctatcaacatatatgcaaaaagattaatacttccttttgtacctttaccatgttgtagtgtacttcccatcttgaaagtatttaatctctcgagagcttctccacacttgtgcctgattctttatcctaactttttcttggtgctaagacaccaaacttagaacaagttatagtattgggcacaagaagaaacttctattctcatgattatcaaaagatatcaactgaagcacactattacggctatcaattgaaagataccaatttcaaagttcatttattatcatggctccatgatatttaagaagtagcatctattatcacc

SEQ ID NO: 11689 - DNA, 411 bp, Zea mays
agcttatgaagattcttcatcccaacatgggctattctgcggtgccagagccaacccatgttagtcttagcaattaagcaagtgtcgagttcagctctatcaaaatctaccaagtatagctgaccctctaacactcccttaaatgctactgaatcatcacttcttctaaagacagtgacacctacatcagtaaatagacagttgtagcccatttgacataattgagatacggaaagcaaattgtaatctaatgaatcaacaagaaaaacattggaaatggaatggtcaggagatatagctattttacccaaacctttgaccaaaccttgggttccatccctgaatgtgatagctcgttggggatcctaggttttctcataagaaggagaacatcttcttctccctttcatg

SEQ ID NO: 11690 - DNA, 470 bp, Zea mays
  unsure (1)..(470): unsure at all n locations
ggccttgatctcactgttatctcaagagacatattatgcttcttagcttgttcgtcaaatatggtcatattagacaatgcaggtttgcacaagttgatgcacacataaaacataaaatattctcctcacatatctctactaaaaatatgagaccacttctagaacatcgaagtactattcaacaaaatgttaacaatccaaacatagttntataaaatgtggcttgtctgtgtagaataaccaaacaccaagtaacatttctaggcaccccatttattacttgtgaagtgaaatgaacaaaagcaaattgacataagattaacgaagaaaacaaagtacatgtaatggttggtgcttttgatatccctcatataagttacaacanactatgcacacagtacaattcaatgcttgaggaagcannatatgtgcttctaatcattattttatatgtgatactataaataaat

SEQ ID NO: 11691 - DNA, 433 bp, Zea mays
  unsure (1)..(433): unsure at all n locations
agcttgttggtcgtgaagacaggtcacatcatttctactagttatacctcggcttgncgggcgggccgatgtctcgacagctactgtgcggagtggaaggcctcgaaggtcaggtcccgcacgttgctcaaagagcgaagtcaaacggcatctagcaactggttaggtggcgtccaacagattatggtcgaagtgatatatgcgaagacttggttggagatgatatgactaggaggctcatgacaaggttgttttaagcagctaacaactgggttggagacgatctgatgaagaagctcataacatgattgttttaagctgctaatcgctaactgggtttagctatgtagaggcacctcataactaatgattatttgaaaggtatagctaacaatttgttggtccatcagttgattcattctaaatctctcag

SEQ ID NO: 11692 - DNA, 458 bp, Zea mays
  unsure (1)..(458): unsure at all n locations
gtacgtccatggccgcgagcgccactaaagtcctctattcagtgtatactcgctcatatgatcaaccattgaattgccttctcttgtcgatgactgagaaagtcctttaagacgtaaatagcgtcatgtctttcaagtaggtctaggactcctttcttcaagaaatttgcctcatccatgaagacgtgcatagtgcaaatctgtatgaaccttgctacatcaaagaaacatgaacgattgacagttgacttctttcataagatctctgggcttgccactgagctcgtcgccattgtcgcctctctatgtgatgaggaggtcctcgcctatctgctagctagaggctctnggatggctatgacccattcgtcaccctcatgatgaccaatacctatacactctccatcngcaacatgtntgcacacctaatattgtttgatgcacgtcactccacatgt

SEQ ID NO: 11693 - DNA, 301 bp, Zea mays
gagccaacccatgttagtcttagcaattaagaaagtgtcgagttcagctctatcgaaatctactaagtatagctgaccctctaacactcccttaaatgctattgaatcatcacttcttctaaagacagtgacacctacatcagtgaatagacatttgtagcccatttgacataattgggaaacggaaagcaaattgtaatctaatgaatcaacaagaaaaacattggaaatggaatggttaggagatatagctattttacccaaacctttgaccaaaccttggtttccatccccgaatgtg

SEQ ID NO: 11694 - DNA, 342 bp, Zea mays
tcagctccatctatgttatggaatgctcttgagtcattctctatttcctcggcctttctggcagcttcgtgacttccatgaatagcaatgggtccttgatccgaacgtatcttcatgcaaaagtaagcaggatgaaggattgcttccaaagcgttgagggtgccacgaccaataattgcattgtaagggtattccatgtcaacaatatcaaacacaacttgctcagttctggtattgttgatgaatccgaaggtcactggcatggtgatcttgccgagtgctacaatctgtcttcctccgaagccacagagagggtgtgtagcatcatgaatcttatcttct

SEQ ID NO: 11695 - DNA, 309 bp, Zea mays
acttaacacgcgcgcacttactttacaaatatttttttttcaaaaactcatcagatgaatttggagttactgatgagcgggttgctaacatgcttttcttcttataaagatacgcacagaatgataagggaagcttttgtcatggtaatgaagaagatttactctttgaccttacataagacgctcttcattggctttgtcttggcctttggtacttaacacctatatttcagacaatatatggaaatattttgcacaagagagaattctacaactaatgatccttttctaagtcatgttatcatatat

SEQ ID NO: 11696 - DNA, 350 bp, Zea mays
  unsure (1)..(350): unsure at all n locations
ctcagcttnccacgctngccctagtgatcggctaagtgaaagggatttatgcttacacctagttcctaaataatattggtggttgaattgcccaacacaaataattggactaactagtttgctctagtgtataagttatacaggtgtaaaaggttcacaacaagccaattaaagagaccaaagttgggttcaaaatggagagctaaaggcatcccgaaaggctccctggtctggcgcaccggactgtccggtggcgcaccggacagtgtccggtgcaccaagggacctcgcgcagaactcttcagcctcgggaattnttcagagccggcgcgctataattcaccggactg

SEQ ID NO: 11697 - DNA, 478 bp, Zea mays
  unsure (1)..(478): unsure at all n locations
agcttgtgaagattcttcattccaacatgtgctattcggcgatgccagagccagtccatgttagtcttagcaattaagcaagtattgagttcagctctatcaaaatctaccaagtatagctgaccctctaacactcccttaaatgctactgaatcatcacttcttctaaagacagtaacacctatatccgtaaaaagacagttgtagcccattttgcataattgagaaacggaaagcagattgtaatctaaagagtctacaagaaaaacattggaaatggaatggtcaggagatatagcaantttacccaatcctttgaccaaaccttggtttccatccccgaatgtgatcgctctntggggaatctaggttttctcataagaggagaacatcttcttctccctatcatgtggttaggcacccgctatcgatgatccagcttgagcccccggatgcataaaacctactaaacaagtta

SEQ ID NO: 11698 - DNA, 367 bp, Zea mays
tgtgcagagtccgcttgaactaatcttctgagatacccgacctcattgcaacatgacaccagaaggtccaacccataaagcgttggctgagtttaaaattatttcagagcatatcagcacaagagacctggttcaagagtttttggctttcaggttttttcctaccttaaaagaatgggaaatgccgaagctagagggggagaagaaagaaggggaacttgtgcggttaccttactattacaagtttaagaaatattttaaaacaccttgccaagagtggctggacacaattgaaataatgtgcaatgaaatactcggtaattactccaaaatagaggatcagttgatgactgctgccttcggtact

SEQ ID NO: 11699 - DNA, 461 bp, Zea mays
  unsure (1)..(461): unsure at all n locations
aatggacgtgaaaagtgcctttctctactgaccaatcaaagaagaggtctatgttgagcaaccttccggctttgaagatagtaccctaaccacgtatataaactctctaaagcgctttatgggctcaaacaagcctcaagagcatggtatgaatgcctaagagattttcttatcactaatggcttcaaagtcggaaaggccgatcctactctatctaccaaaacacttgcaaatgatttgtttgtatgccaaatttatgttgatgatattatctttgggtctactaacgaatccacatgtgaagaaattagtaggatcatgacacacaaattctagatgtctatgatggnggagttgaagtacttcttatgatttcaagtgaagcaactccaagagggcaccttcattagccaaacaaagtatattcaagacattctaaacaagtttgggatgaaagatgc

SEQ ID NO: 11700 - DNA, 351 bp, Zea mays
tgtggaacatagaacattatctcatattctcattcaatgtctattatgctatcactctgtactataatcgcactttgaagatagcatccagctatctgcattggatcacttatctgtactaaactgcccccgcttgcgaataccacccgccactccgcctaccacgcctgcgaataccacccgccgctccgccttccccgccgcggaacccgcaccccgcctgcggagccgctcctcaatctcccatgaatagcccgccactcctccagccagatactcgcacgcgtccctcgtttgtccaactgctccatccgcgcaggccatccacatgtcgtgcatggcggtcgcacc

SEQ ID NO: 11701 - DNA, 447 bp, Zea mays
  unsure (1)..(447): unsure at all n locations
agcttgtgattntaccaattgaaagagcactatctctacttatgaatntcatgaaatagcttaaaagagattgtattattaacacaagcaatagttcctatttagcaacctctagtatatgaatgacaagaaggttactaaaacaaggaaacctcatgatatgaactaaattacccttacaaacatcatgcataacactaatttaaacatggtgaaaatagcatgattatttaattaagtttacatggcaagtttaattcatagcatggtgagtgattaatgtagaagactcaaaaccaatttaaacaagaatgaatacatcacatggtattggttcgatcttctttgaatgttgaatggcacactccatttgggaaacacattctcatgttgtgagactacatanacacttggatagaaacattagtctcacaactctagtcatat

SEQ ID NO: 11702 - DNA, 387 bp, Zea mays
tcagcttcgtggctgatccatccaattgggccttctgtgtcaccccttatgaagttctcctcacttgagaatgcgccaacgctggcgaagctggtttttattgtcttaacacattccatagatttttcatagcatcttttcttagatgcacgaagctcttcaacatttttctccaaatgatttgcccattgttcactgatttctcgttttgtttcttcaagggtgcgctcctctttagctctggctagttgttttcgaagatcttcaatttcacgcttctgagcctcagcttgagctctaaaagtagcttcgtcttcttttattctatctatcaatgaatataatattttatctttttcgagaccttcgttccttagttcaattact

SEQ ID NO: 11703 - DNA, 411 bp, Zea mays
  unsure (1)..(411): unsure at all n locations
aagccttcaattataatttcgattttcctatcttcattatcctgctgcattnttagtgctttgcttagcagcatactctgcaacaacaagttatagtcagaacatttaattcaccacaaagataataataataacttagtcaaagggttcaccttgaagttggaataaaataagctaccgacaatatgttgtcgttggtagcagctgatattggtttctagcttcgggaagccgacactctctgataaagtgctgactatcttcgccccgacgcggtcacggatacatcccaaagtctcctcatcaaccccgccgaacaccaaagctcccagttggtatccgcacgacatggcagattcttgtagctcccaattttcttctttcgaaagctcctaaccgcccagggtaccg

SEQ ID NO: 11704 - DNA, 443 bp, Zea mays
  unsure (1)..(443): unsure at all n locations
tgatgattgaggaccttntaactggtcacatgcttcatcatgggtaagctntgcctcgggtagactaataccagataggccaacacgcaatgggagtggagagatggcgagagtagcatgtaccctccatggcaagaggctagacggtggtgtatctgtgctctcggttggcgtgaacccggtctggtcttaagaacaccagtggcgagttgacatatgcaaggcttaagtgctacatatgtcgtgtgattggagatccctagctgggtactaattgattcggatcgccgttacttctcggacatgaagaattggtcactgccctacaagtagctttccattgaacagaaaaagggttgataatagaatggctagtatangccaagtgcttgtactanggtagatagaactctagtgacanggtaatgactaacttgctaata

SEQ ID NO: 11705 - DNA, 412 bp, Zea mays
  unsure (1)..(412): unsure at all n locations
agctagacagcccctccacgtncgaagctcaacccgtcgcattcaaagcgacggaaganaagaaagagtctacaccgagtagaacacccatcgacgcctccaagctcgacaatgaggaaatggcgctcgtcatcaagagcttccgccaaatcctcaagcaaaggagggggaaagattacaagccccgctccaagaaggtttgctacaagtgtggtaagcccggtcactttatagcaaaatgtcctatttctagtgacagtgacaggggcgacgacaggaaggggagaacaaaggagaagaagaggtactacaagaagaaaggcggcgatgcccatgtttgtcgcgagtgggactccgtcgaaagctctagcgactcctccgacgacgaggacgcagccaacatcgccgtcac

SEQ ID NO: 11706 - DNA, 395 bp, Zea mays
  unsure (1)..(395): unsure at all n locations
tcttcaccacgcgtncgtggatatcttgaggaggttgagcaatgcgtcttctccttagttgctttgctttcttgttcctttcttttgatcctgcagcttgatgctcattcaaaaatttgctttcttttgagcaacaggggttagcacatggtgatatattatctaaaagtgcacatgtgcaagaatgaggttcacatgaatntaagtttgaaattacaacttcatgagcaacattaagcatgatatggtcatcaactaattcattatgagaataagatagcatatcatatttttcacttagagcaagtttttctaaatttatcatttctacttgactcttaagcatagaattctcagttttaagttgagcaacatcagataatacatcatgaata

SEQ ID NO: 11707 - DNA, 467 bp, Zea mays
cacattttgggactaatcaatgttcattttgagaaagacagggtttgtagcgcatgtcaagcaagaaagcaaagtggcacccatcatccacacaaaaacataatgacaacgaacagaccactggagctacttcacatggatctattcggcccgatagcttacataagcatcaacgggagtaggtattgtcttgtaattgtagatgactattctcgcttcacttggagtattcttttgcaggaaaaaatcacaaacccaagagaccttaaagggattcttaaaacgagctcaaaatgagttcggtttaaagaataagaagataataagcgataatggggcggagttcaaaaattcacaaatagaaagctttcttgaagaagaagagcatcagcatgagttctcttctccctacacacctcaacaaaatggtgtagtggagaggaagaatagaactctactagatatgg

SEQ ID NO: 11708 - DNA, 477 bp, Zea mays
  unsure (1)..(477): unsure at all n locations
gctagcattgcatatttaaattccctggattgcatctaagacttgtctaacctagttgagataaccgccaacaaagcgagtgaaaaagcttaactcgggtcaaacgtgacaagtcttagttttaagcttttagcacttaaattcttactttttatgcaattattggttcttgaaatatgcatgaggtactgcacttagggggagtattcaaaactcanatcattcatganaacccctagtgcaaaccanaatgcaaaattcaccatttgcctattttctctaaaaattatctagcctatggcgaaatantttgaaaaatatatgagggtgccaatacatgtcccaacaagtgttattttgtgtgattataagttgggaattggtttggttgggagttagatagaanaattcanaattttccaaactcttctctgtctgggctcaccggacagtccggtgtgcaccngacactgcact

SEQ ID NO: 11709 - DNA, 482 bp, Zea mays
  unsure (1)..(482): unsure at all n locations
agcttctaaagggatagcacantttgggactaacaaatgttcantttgagaaagataaggtctgtagcgcatgtcaagcaagaaaggaagttggctcccatcatccacacaagaatatcatgacgaccgacaggccgcttgagctactccacatggatttattcggctcgattgcttacataagcatcggcgggagtaagtattgtcttgtgattgtggatgattattctcacttcacttgggtattctttttgcaggaaaaatctcaaacccaagagactntaaaggcattcttgagacaggctcaaaatgagttcggattgagaataaaaaagataaaaagtgacaacgggacagagttcaagaactctcaaattgaaagttttcttgaagatgaaggcatcaagtatgagttctattctccctacacacctcaataaaatggtgtagtggagaggaagaatataactntactggacatg

SEQ ID NO: 11710 - DNA, 379 bp, Zea mays
  unsure (1)..(379): unsure at all n locations
gctcgcttgatgattaggatntggaatcgaaattataatatcagtcatatatgctcacaagaaggtagacgaggagcgagacgaggatggtgttgtagttgccccaaaacgtgtccgcgacgatggcggcgaagatcggggtgaggtatctggtgccgaaccacgaggtgacgctggacgcactggctacattgctgccgtgcaagacggtctctaggtacaccaccaggttcgtgccgatgccattgaacgccgtgctctccaggcactcgaatcctggagaagatgttcggtgttcagtctgtcacagctagtattaatactagctagagaaaggtcgaaactagagtatctgtctcggtggctctgtctcaactct

SEQ ID NO: 11711 - DNA, 438 bp, Zea mays
agcttggtgaagaggcaagttcttaagtctgcatcttctgaagtgaaatccactaagtagaggttgttgtacctaaatcctttgaacaccattgattcatcatccatctttgttacaatagcctctgttagagtgaataagcattgaagtccaagatcacagagttgacccactgataataaattgaagcttaaaggtgcaactaagagaacatttgatattgataaatcatttgagattgccaccttgccaagtccttgcacttttccttttgaattgtctccaaatgtgattttatcttgaccatcaacattttcatccagtgaggtgaacatccgtgggttgcctgtcatatgttgtgtgcatccactgttaataacccaatggctcccaccggtcttgtagttcacctacatccacagacaattcaagcttgag

SEQ ID NO: 11712 - DNA, 429 bp, Zea mays
  unsure (1)..(429): unsure at all n locations
atattctatagtaatcaaaagcaagtgaccaacatggtgctcaacactagagataattatatttatctaggtttatctatttatctatctagataaaattgtaacctagtcatacataaactaacgagtatgatgtttttgctacaatctaaacatgtaatgattagttcacaaaaaaaatcacctagtagaccaaagaaattgtatctatgaattaattatacaaaaagtattgatctaaagttataaaaaaatattgtagtaaagcatatcataatactccatctgttctaatttacaattcgtttgactttnttntctcaatctgatcggctcgtcttattcatttttgcgaaacaaataaaattcaaagttatgtctagaagtatcttgggctatnagaagtacagattacattataatcacata

SEQ ID NO: 11713 - DNA, 288 bp, Zea mays
  unsure (1)..(288): unsure at all n locations
gcacctgaagctgcagctgagctcttactagctcttcttctagcccctgctgacagtcagcgatgaagtctgctatcgcctgtgactgaatcgaagatctatgcacataatcaatgttgaactcattgagttccgcagcccactttccaatccttccagtagcttctctgattctcataatatccttcanacgctgtgatgaaagaacaattatatggtatgctctacaataatgtcgaagcttcctggaggccattaagacagcatacaacaccttctccaattctg

SEQ ID NO: 11714 - DNA, 279 bp, Zea mays
  unsure (1)..(279): unsure at all n locations
tactcagcttgaggaccactntggcagaagagcttccgaacgtgaagacttgttctgtccacggagtcgctttatccgaacgcgagttacttatcgcagaaggtgatgagtgaggtatccgtatcccagaggcgtatgagtccctcggctcggtcagccttggctgcttacgtgtactccgtcgtttccaggatccgcttttcgaagtagtcaaaaagcacgaaagaaattctgctaanaagagactctttttcgagggaaaaattctacgtagggggg

SEQ ID NO: 11715 - DNA, 440 bp, Zea mays
  unsure (1)..(440): unsure at all n locations
agcttgccgataatacacccttaaaagctagtgaaccatcacttcttctaaagacagacacatctacatttgtaaaaagacaattatatcccatattggcataatgactaacaaatagcaaattatatccaagagactctactaaaaacacattagatatagagtgctcatttgagattgcaattttacctaacccttttaccttgccttgattcccatcaccgaatattattgaatcttgggaatccttattcttgacgtaagaggtgaacatcttcttctcccccgtcatatggtttgtgcatccgctgtcgataatccagctagaacccccggatgcataaacctgcaanggcaaattaggctcgagtcttaggtacccaactcatgttgggtcctacaaagttagtgcaaatatccttagggacccaaatgcaagt

SEQ ID NO: 11716 - DNA, 295 bp, Zea mays
gtgtttattaattttataaagattatatcaatcatttatattctgacctcaaatttacgaataaaactagactatacgtgtgttaatatttgaaaaattattaccctctttttatacatggtctgatgtaataccaagcacgagatgtatttatttgatgcctatacaacaccaaacaagactatgttgaataagctgtgtcaaatattggctctacataccggcatgctaccacgttcacaccaaacagacggatattcccatcatctggggggatgcacaacttttatatcaa

SEQ ID NO: 11717 - DNA, 357 bp, Zea mays
  unsure (1)..(357): unsure at all n locations
gctgtgaagattcttcatcccaacatgggctagtcggcggtgccagagccaacccatgttagtcttagcaattaagcaagtgtcgagttcagctctatcaaaatctaccaagtatagctgaccctctaacactcccttaaatgctattgaatcatcacttcttctaaagacagtgacacctacatcagtgaatagacagttgtagcccatttgacataattgggatacgggaaagcaaatgtaatctaaagaatctacaagaaaaacattggaaatagaatggtcagaagatatagcaattntaccaagacctttgaccaaaccttgatttccatccccgaatgtgatagctcgttg

SEQ ID NO: 11718 - DNA, 363 bp, Zea mays
  unsure (1)..(363): unsure at all n locations
tgttcctataaanaatatggagcagcttaatggattaagtcagagtttagtggccagccatgtacctttcccatataataattttagttgacatttttttgtactgtttgtaggcaatgccttatcagttcccttttgttgcagtaagtttgttcttttatcgatatggcgagggaggagaatgtctacatggccaagctggctgagcaggccgaaaggtatgaagagatggttgagtatatggagaaggtggctaagactgtagatgtggaagagctcactgttgaggagcgtaacctcttgtcggtcgcatacaagaatgtgattggggctcgccgtgcttcatggcgcattgtctcttct

SEQ ID NO: 11719 - DNA, 483 bp, Zea mays
atactattcaactaaagtaagatgaagttgataagaggccaaagtatgaaaacttcctctccttaagttgttttagtattctatccttagtggaatgtaccatagtataggttaaattccttgcaatataaaatgttcaatggtgcataaaactttgacatcaactatatgtatgcactaatttaaaggaatttagtctattcctttgggtttcaataatgatgattcatttgccatccacatataaagatcatcatttgtgaaaccctctcttgtgtttctaatgctctcttttctaagtgtttcaacaaggtcctcccaagttctttcaagatgaattcaaaatctacaaatataaaagtcttggttgtttcaatcattgagcttcaattgatctcatatcaagtatgatcgaatcaagaaaagatgaaagaagttcatgatcactttggtgggtgaaatcgtaaagagaaaagagatcac

SEQ ID NO: 11720 - DNA, 350 bp, Zea mays
  unsure (1)..(350): unsure at all n locations
cttgattgtgtctntgaatggattgctagctcttgtattgaatgtagaggattggaatgcttgggtcaagtgaatggaggtggttggggttgtatttatagccaccaaccacttcctagccgttgctccaattctgccaaccgcggacggtccgcgcccctggttcggacggtccgcccctgcacatcaacggctgaaaacgcaatggttagcagtaacggctatatcaacgactattttgcatttaatgcatcgtcagatgtcagataaaggcagtcgcggacgatccggtcgtgcaccccggatggtccgtgaggacactataattcattttaccgaacctgtcacct

SEQ ID NO: 11721 - DNA, 391 bp, Zea mays
agcttcagatcattgatcttcggcttcgtcatcctgtacataacaaagtggtataaggtaaatagaaatctcagaagaaggtaagcaataggcacaagtttaataccgacttgagatgacttcgagcttcatcatcaccagctaagtttcaccctccctttgtccagatttatgttataaacctatttccaatgcttcgggccaggctaggaatgtcagttaaatccgctggtgataggctgaagtttggcctgtttacaattttcccatgcgtgcaaccagtcttcatgaaagcaacagctgtgccgcgagaagctagcagggcacagaagtcgccgtgcccaactataacttcgtcaagcgcatcaacttcgccctcaatatgttcgat

SEQ ID NO: 11722 - DNA, 365 bp, Zea mays
  unsure (1)..(365): unsure at all n locations
ctgtagcatcttttcctttntctttttcttctggacttggagaatttcaaacaaattgtagaaaaatgataaatataccagaccaattttgctaggcttctaatttcctatagtatttaataaaaatagtttcatgatttttagttccaataaggaattttgggatatttagaatagccaaaacccatacttctggaattttagagagtaaattatagtcccaaaattcaccaaactttntaatcaagctttaagtaatatttagaagccttgggtaaaagttgacatgatttggactatgtttggtacttatgaacccaaaccctagtcccgtgccctatgaacttcactatagacaccaaaaa

SEQ ID NO: 11723 - DNA, 381 bp, Zea mays
agcttaagatgccaggccccaacggaaccatcaccttcggatccacgtaccgccacgcttacgagtgcgacgtggaatgcgtggagtacgctgaggccattgccgaatccgaagacctcatcgccgacctggattgcctctccaaagaggcgcctgatgagaagcgccacgccggcaacttcgaaccggccgaggcggttaagtctgtccctctcgaccccagcaacgacgctggcaagaaagtcaggattggctccgagctcgaccccaaataagaagcagtgcttgtcgactttctccgtgcaaacgcttgaaattttgcgtggagtctctcggacatgcccggcataccgagggatgtcgccgagcactcactggaca

SEQ ID NO: 11724 - DNA, 422 bp, Zea mays
  unsure (1)..(422): unsure at all n locations
actcagcttgtgaggttcttcatccncacatgtgctaagcggcgatgccacagccagcccatgctagtcttagctattaagcatgcatctagaccggcctcttcttttgcaaaatcaactaaataaagtttgtcgtctaatacacccttaaaagctagtgaaccatcacttcttctaaagacagacacatctacattggtaaatagacagatataccccatgttgcataattgactaacagatagcaaattatattcgagagactctactaaaaacacattagatatgtagtgctcattagaaattgcaattttacctaacccttntaccttgccttgattcccatcaccgaatataattgaatcttgggaatccttattcttgacataggaggtgaagcatcttcttctccccgtcatatg

SEQ ID NO: 11725 - DNA, 455 bp, Zea mays
  unsure (1)..(455): unsure at all n locations
ctgcagcttaaccatcctgggctatgacacattatacttactccaagatcagatctcactaggcactcttgcttcttgtccaaagatcaggtttcccttgttaaacttgttccttctttctaaattttaatccacaggtgattatggatttctaattactccaattagggactttacaaggatttctgagaaaatggcttccaaacagccccaaatttataccacatactcaaatgactaanataaggttactcaaaaaattctattaattttggctctgtatttntatttctaaaattcaaacagtccttccaaaagcaccttcaattcacttaatattntataatttctctaanaatcctaaaaccaactttaccagagatctcatgaatntagacatccaacaaaattgtcttactattntttctataatttctggcacaatttacaagttc

SEQ ID NO: 11726 - DNA, 429 bp, Zea mays
  unsure (1)..(429): unsure at all n locations
cgtgaagattctntatcccaacgtgggcaagtcggcgattccagagtcagcccatgttagtcttagcaattaagcaagtatctagttcagcattgttatcataaaaatcaactaaatatagctgaccatctaacactcccttaaatgctattgaatcatcactacttctaaatacagtaacaccaacatcagtaaaaagacagttgtagcccattttacataattgagaaacagaaagcaaattgtagtctaaagaatctacaagaaaaacattagaaatagaatggtcaggagatatagcaattttacccaaccctntgaccaaaccttgatttccatccccgaatgtgatagctctttagggatcttcattnttctcatatgaggagaacatnnnctttggtcatgtggtggtgcactcgctatcaa

SEQ ID NO: 11727 - DNA, 455 bp, Zea mays
agcttataccacagataagtattgaagtgcatatataaagacgagtaagacagagagtcaggatacaatacagaacagagcacacagacgcaaggatttatcccgaggttcggccaagcctgaaatgcttgcctagtcctcgttggagttagccacacctgagcttggagtctatttcaaccccttcctccgtttgctcagatctgtcagtatgacagatagagcctttcactattgagatgggttacaacaacaccgtggctgcttacaaacttctcggcagcacctcggtagagtaacgatacgctcaagaccttgctctagctctttgcagctcttctccactctctaaaggcttatagttgtgccttctacacaaactatagagttacacacaagagggagagcgagaattgattcgagtgaagtctatactttgtggctgcacttctata

SEQ ID NO: 11728 - DNA, 274 bp, Zea mays
tgttcggagcatcgcctagtgtgtctgctcgcgttgccacctatctgatttaggggctgaagggtctgctgcttttgtggccacttgcccacaacgcgcactggtacgcttggattatacaactcaagttacttccatcgtgaagcgtagtatggagttatcaatacttaattaacacacgggtgggagactaaaaggatgaggatcccctaagatctgtcgtgcctagctgacggcgggggaccaaatcatacctgcttgggaagcacgatca

SEQ ID NO: 11729 - DNA, 317 bp, Zea mays
  unsure (1)..(317): unsure at all n locations
atggaagacctcgctgacatagtagaccgacttctgtatggtccggacccctacagttggccccangtcctcaaagtctgtggtggtcggaccaccaccttctccctagggaacttcctgacttccctagagatgttgcaccatccttttgacaaccagcaccatgctcactgcctctgtagccgctgcaatatataagtacagcggctcccctggctctggaactaccagtattggtagggacacatggtgctgcttcaactcttggaaggctcactcttgcttctcggtccaagagaatggtccggacttctata

SEQ ID NO: 11730 - DNA, 460 bp, Zea mays
  unsure (1)..(460): unsure at all n locations
agctcgagaaggtncttcatccccacaagtgctaatctgtgatgccacagccagcccatgctaggcctatcaattaagcatgcctctacaccagactcctcttttgcaaaatcaactaaataagagttagtcgtctaatacacccctaacaagctagtgaaccatcactttttctaaagacagacacatctacatttgtaaatagacaattatatcccatattgcataattgactaacagataacaaattatatccaagagactcaactaaaaacacattagagatagagtgcttattagatattgcaattntacctaaccctcttacctggccttgattccatcaccgaatattattgaatcttacgaatcctttatcttgacgtaggaagtgaacatcttcttctcccccgtcatatggttagtgcatccgctgtcaataatccagctttgaccccca

SEQ ID NO: 11731 - DNA, 401 bp, Zea mays
  unsure (1)..(401): unsure at all n locations
cgctatcatttttcttatccacacaacacatgtgggaatcgcaatggtaagacaaaccttntggacaggtggattcatcgtgtggtctccaccggtcattttcttcttcttccttgcaggggttagtatcacaaatactataggaactagaagcacaacatgaactatcatgtctggacttattaaatatgcgtttaattctaatacaaatatcatgcgcaccatggattgattcgttataattcgatatgaaggcaccataatcttctttgctaatagaattagttaagatgtccaaagctagatatgttacgcgataacatcattgatcctactcggaatcaatttttgcattgaaattagaggagagaatactctggtctattacttgctctaatcgt

SEQ ID NO: 11732 - DNA, 476 bp, Zea mays
agcttgtgaagattcttcattccaacatgggcttgtcggcgatgccagagccaacccatattagtcttagcaattaagcaagtatcgagttcagctctattaaaatcaactaagtatagctgaccctctaatactcccttaaatgatactgaatcatcacttcttctaaagacagtaacacctatatccgtaaaaagacagttgtaacccattttgcataattgagaaacataaagaatattgtaatctaaagaatctacaagacaaacattggaaatagaatggtcaggtgatatagcaattttaccaagtcctttgaccaaaccttgatttccatccccgaatgttatagctctttggggatcatgagttttctcatacgaagagaacatacttttcttccctgtcatgtgggttgtgcacccgctatcaataatccaactagagcccttggatgcataaacctacaaaacaat

SEQ ID NO: 11733 - DNA, 329 bp, Zea mays
acaagagcagatggcaagatagcatgccaaatgaacacctggtgagttcttatttatacgtctagtgcgttgaaactggagggtgccgcctgtcaaagactattgctattctagcaaagggaaggtgttatttcggacctttggcttaaagccttcgtccatgtcgcaatatgaatttatcattccggcaaattaatattgcgaggggctactgttgggggccttcggcttccgaaggtcctcataaacatgatttgacaatgttttccaagtgaaatatgcaaacaggtatgttcggaattgggttcaggtatacaagactatggtca

SEQ ID NO: 11734 - DNA, 474 bp, Zea mays
  unsure (1)..(474): unsure at all n locations
agctagagttcgcccctagtggaggagtgcggtgcatttatgaaacctaacgggcggctacagcctcggggaatctttgtaaaggctacgtagtgataccctgctgggccacctangtagtggtcaatggggagtagctctctccgggcagaaagggaatcacggcttgtgggtaaagtgcacaacctctgcagagtgttagaaaactgatatatcagttgtgctcgcggttatgagcggccaaaggagctccattgattagagatacctggatcagagatggttggtttacaggtggtgacaaggatgatgtttatgactatggtaatggtaagtggtattctttccgtttggaaagagtactttgggttaagaacttgagttaatggctaaacctagctttctactagtaataataacctgaccaactaaaagcaactgcttgacttaactccacantaagctagtccacta

SEQ ID NO: 11735 - DNA, 354 bp, Zea mays
actttgaggaagttcatgggagtcaaaactccacgcacaaatgaacgcaagatgtagtacacactttctctcaatgaatctcacaaggcactagagctaaactctcacaagaggctttcttttgcttgctctctcttttgtggcacttgtgtggtttgtagtggtctaaatcttgtgtataggatggatcactgaatagatgtggttgggatggcttgtatatgtcaactatatgacttggaatgttgcttgggctcccacaccttgaagtggccggttggggtggtatttatagccaccaaccaaattatagccgttggagaagtctgctagcgatgggcgcaccggatagtc

SEQ ID NO: 11736 - DNA, 434 bp, Zea mays
  unsure (1)..(434): unsure at all n locations
gcttctatagggagaacacgtgataagtttgtcttactttcaattcaaaaaagatagaccttgtgcagcttgtcaagcaggtaaacaagtgggaggagcacatcacagcaagaatgtgatgaccacctcaagacctctggagctgctacatatggacctcttcggacctgtcgcctatctaagcataggaggaagtaagtatggtccagttattgttgatgactcttcccgcttcacttgggtattctttttgcaagataagtctgaaacccaaaggaccctcaagcgcttcctcaggagagctcanaatgagtttgagctcaaagtgaagaagataaagagcgacaacgggtccgagttcaagaaccttcaagtggaggaagtccttgaagaggacaggatcaagcacgagttctctgcttcctacacaccac

SEQ ID NO: 11737 - DNA, 292 bp, Zea mays
ttcatgagggcggacctcaccgggctggcgcacatatatgtgctacctatgtacaaaggaagaagactgagttccccagctatgcttttatgggaagaacttacggaggtgctctatgttccacggattgtgcagaggctctccttcagctgtggcgaggcggacacacccgggtcggcatactttcgtcaccttgaagggtccttcccagctgggggagagtatatggagcccttctcggttcaatactctgcttaagactatgtccccgaccctgagctccctactatgc

SEQ ID NO: 11738 - DNA, 384 bp, Zea mays
gcttcttcttgtcctcatcaaccttgacatataaccattctgatttccagcctgccggccatttgcttcagtagctaattacaggaaacttcgcggttttctggtaagcaaaattgtagcaaccgaagttttcatgaagcccatcttctctggcctttgtttgataatgcaattcatgaactcgacagaaactgtcagcaaaaggctccactgcttggcttcggagggcccaaatataaacgctaagcctaacgatagcgttatgagttaactgatgaaggtagatgccaaacctcttcaatatctccgcaacaatctcgtgaacagggaatcttagcccagcctttaaaaagcgtttgaagatgacaacctcgtccttctctg

SEQ ID NO: 11739 - DNA, 412 bp, Zea mays
  unsure (1)..(412): unsure at all n locations
tctagtgatggtggagcatgcagagattacgcaatgtacactcatagctnttcacgtacgtatgagtatgacagctacatttgtaatggaacactagtagctactatagggtggcctccactgcgcccacggtcgccggctgcatcgccacttcccgcttctgcttgctgctcccggtgtcgacgacgcgggataccttcgcgttgtacacgtagaaccggcacacgaagaagaaggcgatgaggttggcgcagttgagaatggcgaagaaggcgtagtacttgtccagccgcgaggcgttgaggttattgaggatccagccggtccggccgtggcgctccgtgatgtgcgacacagccgagagcagcgcgctgctgaggaagttgccgatgccgaggctggtcatggagta

SEQ ID NO: 11740 - DNA, 483 bp, Zea mays
  unsure (1)..(483): unsure at all n locations
agcttcttcttcattctgatgaaaaccaagcttcttgatcacttcatcaaaacgaatgttccaactccgagatgcttgcttcaacccataaatggatttctgaagtttgcatatctttccagcattgatcggatcgacaaaaccctcgggctgtatcatatacacgtcctcatctaggtttccattaaagaaagctagtttgacatccatctgccaaatctcataatcgaaatatgcggcaatagctagaatgatccgaatagatttaagcatcgctactagcgagaatgtctcgtcatagtcaactccttgaacttgttgaaaaccctttgcaacaagtcgagccttatagatgtgaacatttccatccatgtctttcttcttcttatagatccatttgcattctataagtctaacaccatcaggcgggtcaaccaagttccaaacttgaaatttctccatggaatctatctcngatctcat

SEQ ID NO: 11741 - DNA, 421 bp, Zea mays
  unsure (1)..(421): unsure at all n locations
cttgccaaataggaatgcataattataccttgatatcttctcttgcttataggtcattcttcacataaaaccattctgtcatccaatcgccgggccatctcttccgaaaggttggtacgggacagcttgccccggaccgagaaacgaaactgtagcagccaaagttgttatggtactgttctttgccccaaggttttgtttcatataataattcatgtatattacagaagctttttgcatcaggcttcagaccttggctcctcgcggcccacgcgaagatatttagccttataattgcctcgggagtaagttgatgaagatagacttcgaagattntcaacacctccacaatgaagttactcaagggaaatcgtagcccagctttcagaaagcttcggtacactacgacttcattttcttc

SEQ ID NO: 11742 - DNA, 474 bp, Zea mays
  unsure (1)..(474): unsure at all n locations
agcttgtggagattcttcatcccaacatgagctattcggcggtgccaaagccagcccatgttagtcttagcaattaagcaagtgtcgagttcagctctatcaaaatctaccaagtatagctgaccctctaacactcccttaaatgctattgaatcatcacttcttctaaagacagtgacaccaatatcagtaaaaagacagttgtagcccatctgacataattgagaaacagaaagcaagttgtaatctagagaatctacaagaaaaacattggaaatagaatggtcaggagatatagcaatnttaccaagacctttgaccaaaccttgatttccatccccgaatgtgatagctcgttggggatctttngttttctcataagaggagaacatncttttctccctgtcatgtggtttggcacccgctgtcgagtatcaacttgagcccccgatgcataacctacaaacaagttag

SEQ ID NO: 11743 - DNA, 366 bp, Zea mays
  unsure (1)..(366): unsure at all n locations
tcttcccttctttggcgganatcattgtcagcctagatgtactcatccattttctgaagcagcttctctagagnttgggggggtttcctagcgaagtattgagccgtgggctctggccgaagacccttgatcatggcctcaattacgatttcattgggcactgtatgcgcttgtgctctcagacgcaagaaccttcagacatacgcctgaaggtactcctcatggtcttgtgtgaactggaacaaggcctgagcagtgactggcttcgtctgaaaccctttaaaactggtgaccaacatgtccttaagcttctgccacgacgtgattgtccctggccggagagaagagtaccatgtctgggctaca

SEQ ID NO: 11744 - DNA, 462 bp, Zea mays
  unsure (1)..(462): unsure at all n locations
ctacttggtgtatactcctccttcttctcctccagtgccttgaatgcaacgggttgggcttctgatgtggtggcatcgtcaagctcgttgatcttcctcgagccttcgatcatgcactcaaaacttacaaaattcccgataacttcctcgggggtcattttggtatatctaggattgccacggattaattgaacttgagtagggttaaggaaaataagtgatcttagaataaccttaaccacctcgtggtcatcccactttacgctcccgaggttgcgcgcttggttcaccaaagtcttgagccgatagtacatgtgtagtggctcctcccctttgcgaagccggaaccgaccgagctcccnctcaatcgtttcccgcttggtgatctaggtgagctcatcaccttcatgcgcggtcttgagtaaatccaaatctccttggcgctttaacccttgactttgt

SEQ ID NO: 11745 - DNA, 400 bp, Zea mays
  unsure (1)..(400): unsure at all n locations
acacatgaaactcagctgagtcaatcatttgcaaggataattgatgcccacatgtttatctgggtatgaagcacatacgagagaagataaaggctggagtagccaaatgtttcaaggaagacgatcaaggtgtgatatggtttaaaaaccacatagtagtgccaaagaatgaagaactccgccagcaaattcttgatgaagcacatcttagtcgtaattctattcatcccggaagcactaagatgtatcaagacttaaagcaacattattggtggacgaagatgaaaattgaaattgcacgctatgtggctaagtgtgacacttgcagacgtgtcaaggccatacacatganaactgctggtccattacaatctttgcccatcccaacatggaaatggga

SEQ ID NO: 11746 - DNA, 366 bp, Zea mays
  unsure (1)..(366): unsure at all n locations
tggatgtgaagagtgcctttctcaatggaccaatcaaagaagaagtctatgttgagcaacctcccggctttgaagatagtgagtaccctaaccatgtgtataaactctctaaagcgctntatgggcttaagcaagccccacgagcatggtatgaatgccttaaggatttccttatcactaatggattcaaagtcggaaaggccgatcctactttattcactaaaactcttgaaaatgacttgtttgtatgccaaatctatgttgatgatattatatttgggtctactaacgagtctacatgtgaagaaattagtaggatcatgacacanaaattcgagatgtctatgatgggggagtngaagtact

SEQ ID NO: 11747 - DNA, 376 bp, Zea mays
  unsure (1)..(376): unsure at all n locations
ctacaaaccatgatntcttttagatccaaaacttgatacttcaattntatcaatcaaataagcaagtgaaatttgaattccctcctccttttcgttaatgggaaattctattaaactcatcgatcttttagatctgatgttgttctataacatggctgatcactgtgcggttgcattagttttctttctcatgtcttgagatagttgtctcatgcttcaatcatgtattaataataatgctttcaagtgcttgatgtgaagcaactttgactcttttgcagcctaaacaacgccctggtctcagcgggcgtataaatacatagtggtcccctctcattctgtgtgtttttttgataaaaggaacttgcacttaact

SEQ ID NO: 11748 - DNA, 408 bp, Zea mays
  unsure (1)..(408): unsure at all n locations
cagtcaatctggatatctacgctgatcaaaatatgcgccttctaatatttatctgaagcacgtccttgtctggactctgtaagatcatatatttaaaagctacttactaatttatatgaaatcacatgatacattttactcagaagaatttaggtcgttcataagactntcttcaatacccttttgtggacttgcaagaggatggcctgctgcatagaacctgtggaactcccaattatgttgctctagaagtgctgaccatgactatgctntaagttatgttcttatcttcactcaataaagtattctgttctcatgtacagtgctcttgcgtctactacttataaacaataaatgctatgatggtgctaacggtgatatgtcggcatgtggagtgattttctttgt

SEQ ID NO: 11749 - DNA, 433 bp, Zea mays
  unsure (1)..(433): unsure at all n locations
tatcaaagataaattatacagaattggagaatgtgttgtcttgtgtcttaatggcctccaggaagcttcggcactacttttaggcgttccatataattgtcccttcatctcagcctttgaaagatattatgaggaacagagaagctactggaaggattggaaagtgggctacggaacttaacgaattcagcattgattatgtacatagatcctcgatccagtcccaggcgttagcagacttcatcgccgactggacgccaggggctcaggaagaagaagcaaataaagatgccgaagcttggacaatgttctgcgacggttcctatggaaccttcatggcaggtgcagctgtctgtttggttgcaccttccaaagtctgaacatgctatgcagtaaaactngatttctgctgcacaaataatatagctaaata

SEQ ID NO: 11750 - DNA, 457 bp, Zea mays
  unsure (1)..(457): unsure at all n locations
gctagtatctacttcacatttgtgttcatcaatcaatgagaggatgtagagtattcacaacctgaacctctctaactgtccacatgttggctcctagtcgtgccatgtttagcacgaccgccgacttacaccccgctctcttccaaaacctatcatttcatgcaactacattattattgatacattgtgtggttgtgtggcaaaaatcgttgtttctgtctggcttgttgagtatcatccgctttatacattntgcttgttaatcaagaagtatccaaaatntagagtttccattatcaataggacacaatggtaccctaatacggcttccttatcatgttntaataaaaaactcgcctgaggaggggaagaccgctctcctggtattgtattaagaagaggccgaaacaatggtttcgaccgagaaaatcaccgaaccctggcccccaccactaac

SEQ ID NO: 11751 - DNA, 329 bp, Zea mays
  unsure (1)..(329): unsure at all n locations
ngcctactgtgtcanggttggctactctccgaagcaccaaatgtccatgcttaatgtctttcaaccgaacttttctatcacaccattttattgtttcagcttgatatttgttgatattttccacagcctgaagtctggtctcttctatagtatcttttgccacagaataattatcttcgtcttctatcaaagctattgttcttatcgaccccgctttagcctcttcgggggttatagcttcgtcaccgaacaataacttgaatggtgtaaaacctgttgaccttgatatagatgtattgtggctccacaccactttaaccaactcatct

SEQ ID NO: 11752 - DNA, 383 bp, Zea mays
aagtacaagatcatcgaaatcggagttcggagctaaaagttacggccaaaatacgacaagcggacgctgtccggtgcacaccggaccgtccggtgcgccatgtccggtgcgccatcttcggaagctcaaacggctacttttaacggctagtacacgtgggatgtccggtgcaccaccggacagtccggtgcacctgtccggtgcgccgcagaaagctgcagaactgctttccaacggctatatttgagttggggcctatatatacttcacccaaccggcccattggaggtgtgggagcccaagaaacataccaaggcatattgtagacatttccaagtgctcaaacacccaagtgcttaatagaatcactcggtgattagcgt

SEQ ID NO: 11753 - DNA, 440 bp, Zea mays
  unsure (1)..(440): unsure at all n locations
ctatgcccgtatccaatctgcctgagctggtactattagcgcttgccagatgcccncgttccggtcgaccatgaccaacacccaacataagacttccctagttatttagccaagaccagagccatgatagtcctcatggtagcactgttttcccgggtggtcactccatgttccaattaatatgcaataatcttgtttaaccatcgggttcacaacaacaaagtaatcttaccatttggaacattaatatcataagcgggagtgactgcataaagttaagttgtagcaatagcatagctacaaatgtaaagtataattcccaggtntgatcaacgaataaggttggaaaggttatctaaataggtaacccatcaaattatgcatatatatccgaaagaataaactgtattaaatgtatttgttgggatcaagcagagtat

SEQ ID NO: 11754 - DNA, 384 bp, Zea mays
  unsure (1)..(384): unsure at all n locations
gacccctagatcatgaattcaaagctcacaaaattcccgattacttcctcgggagtcattagtgtatatcttggatagccacgaattaattgtacttgagtagggttaaggaaaataagagatcttagaataaccttaaccatctcgtggtcatcccactttttgctcccgaggttgcgcacttggttcaccaaggttttgagccggttgtacatatcttgtgactcctccccttggcgaagacggaagcgaccgagctccccctcgatcgtttcccgcttggtgatcttggtgagttcatcaccctcgtgcgcggtcttgagcacgtnccaaacttccttggcgctttctaatccttgcatcttagtgtactcctccctactt

SEQ ID NO: 11755 - DNA, 456 bp, Zea mays
  unsure (1)..(456): unsure at all n locations
accttgatactcagcttgggagaaggtggttccaagccgagtatgccactggagcaccaacgttngaaactttacccctgaggatcatttcgagtcggcttaccaaatcaacagaaggaattctcctattggtaactcgggttgagtcggccagccctcgataaagatatgccggataggccctgtctttcagcggctgaatgtttttgaaaacaaaatctgtgaccacagcttcggcagtcagacctctctctttcagtaatccgacttcagtaagcaacacgcctgcctcggccacttcttgatccgtgggagactcagtccaactcggagtacgaacgtctggctgtcttcctgaacgggaagggagagaatttccataattatcaattataaaccactccagacgccaacctttaatgctgtctttgaggggtatctcgagatactcggtct

SEQ ID NO: 11756 - DNA, 385 bp, Zea mays
  unsure (1)..(385): unsure at all n locations
agcttctagtggaggaaccgatatattttatttacttcattttatccacaaaattcttattttcttctcttttctaaattctacaattctctttggattttaaattccacttttgactttaatatttttcttgtcacatttattattttattttgtcaccatgtgcacacaaaagaaaatcccagcatgatgcaaaattntaatggcatatattctttttattaattatttgcttttgaatatggtgttcacatgggatgatgcataaagatcaaactcacataaatagaaattgtttcactattggtattatntctagcaaattacaaagtgggtgttacaagaaatccgagactcaacctgtcaaactccttggccaactcat

SEQ ID NO: 11757 - DNA, 454 bp, Zea mays
  unsure (1)..(454): unsure at all n locations
ctcagcttatcaatggacggaaagtgccttctaaatggaccgatcaatgaagaggtctatgttgagcaaactcccggctttgaagatagtgagtaccctaaccatgtttataaactctctaaggcgctttatgggctcaagcaagccccaagagcatggtatgaatgccttagaaatttccttatcactaatggattcaaagtcggaaaggccgatcctacactctttaccaaaactcttgacaaagatttgtttgtatgccaaatttatgttgatgatatcatatttgggtctactaacgaatctacatgtgaagaatttagtaggatcatgacacanaaattcgagatgtctatgatgggggagttgaagtatttcttaggatttcaagtgaagcaactccaagagggcacctttcttagccaaacgaagtatactcaagacattctaaaca

SEQ ID NO: 11758 - DNA, 476 bp, Zea mays
  unsure (1)..(476): unsure at all n locations
agcttatgaagattcttcatcccaacgtgggctagtctgtgatgctagagccaacccatgttagtcttagcaattaagcaagtatcgagttcagctctattaaaatcaactaagtatagctgaccctctaacactcccttaaatgctattgaatcatcacttcttctaaagacagtaacacctaaatccataaaaagacagttgtagcccattttgcataattgagaaacagaaagcaaattgtaatctaaagaatctacaagaaaaacattggaaatggaatggtcaggagaatatagcaatttacccaatcctttgaccaaaccttgatttccatccccgaatgtgatggctcgttggggatcttggttnttctcataagaggagaacatccttttctccacagtcatgtggtttatgcacccgctatcgatgatccaacttgagcccncggatgcatanaacctacaaacaag

SEQ ID NO: 11759 - DNA, 198 bp, Zea mays
cttcatagaataatagaacaaaggtgagcttaatagcgccaggaatttggaggtggagctcgtagcaacacctttgtgggcacaagtgagaaataacttcagacgctcctcacatgtttatataaccagagccggctcacaaattaattaagagtcccgcacaaaaaaaacactcgatgtcaaagtggtccaatggac

SEQ ID NO: 11760 - DNA, 361 bp, Zea mays
  unsure (1)..(361): unsure at all n locations
agctngagcagtgactggcttcgtctgaaacccttggaagctagttatcagcatatccttcaacttctgccaagaagtgattgtccctggccgaagagaagagtaccaggtctgagcaacgctcttgacggccatgacaaaagattttgccatgactgcagtattgccaccatacgaagatatggttgcttcatagctcatcaagaattgcttcgggtctgtatgaccgtcatacatggggagctggggtggcttgtaagactggggccatggtgtagcctgcaattctgttgagaggggagaggcatcatcgaaagaaaagtttccatgatggaaatcttcataccagtcgtcctcattg

SEQ ID NO: 11761 - DNA, 503 bp, Zea mays
  unsure (1)..(503): unsure at all n locations
ctcagcttcaggcaagggtgtccttgtacagaatgttaatcctgcaataagcatcggaaaagacattgaggaagcgaaatatgaagctgaatctgtagctcaaaggataaatgataaatatggttctgctaattacaagcctgttgtcctcattgactactcaatacctttctatgaaaagatcgcattttatgctgcatctgactgctgtattgtaaatgctgtgagggatggcatgaatttgataccgtatgagtacaccgtatgcaggcagggaaatgaggagcttgataagctcagaggtcttaataagagctcatctcacacaagcacacttattgtgtctgaatttgtgggttgctctccatcacttagtggagcattcanggtaaatccttggagtatggaagatgtggctgatgcattatacagtgtaacagacctgacacgatatgagaagaatctgcgccatgaaaagcactatcgctatgtcaggtctcatg

SEQ ID NO: 11762 - DNA, 467 bp, Zea mays
  unsure (1)..(467): unsure at all n locations
agctntatcaaatggacgtgagaagtgcttttcttaatggaccaatcaaagaagaggtctatgttgagcaacctcccggctttgaagacagtgagtatcctaatcatgtctataagctctctaaggcgctttatgggctcaagcaagccccaagagcatggtatgaatgccttagagatttccttattgctaatggcttcaaagtcggaaaagccgatcctacactctttactaaaactcttgaaaatgacttgtttgtatgccaaatttatgttgatgatattatatttgggtctactaacgagtctacatgtgaagagtttagtaggattatgacacagaagttcgagatgtctatgatggnggagttgaagtatttcttatgattccaagtaaagcaactccaagagggcaccttcattagccaaacgaaatacactcaagacatcttaaacaagtttgggatg

SEQ ID NO: 11763 - DNA, 375 bp, Zea mays
agtagcataggctgacactgtgccattatactcatgcctatctaccggtgcgtaggtttcaccgaaatccacaccttcgacttggggatatcctctggccacaagtcgagctgtgttccttgtcaccacaccatgctcatcttgcttgtggcggaagacccatctggttcctacaacattttggttaagacgtggaactaaatgccatacctcatttctagtgaagatgatgagctcctcttgcatcgccaccacccaatccgaatcttgaagagcttcctgtaccctgtgtggctcaatagaggaaacaaaagagtagtgttcacaaaaatgagcggcacgagatctagtggttacccacttatgaatatcacc

SEQ ID NO: 11764 - DNA, 454 bp, Zea mays
  unsure (1)..(454): unsure at all n locations
agcttataacaggaagatagaggcaagagctcgtccatatgtcatgatagaaagagagttgtacaagcatggagtttgtgctccgctactcaagtgtttatccagaaccgaaggtatagagttgatgaaagaaatacatgcaggcctgtgtggatctcacattggatctaggccgttacttggaaaaattttccgctaaagattttattggccgaaggcagcttcngatgcagcggagttagtccaaaagtgcgaaggttgtcagaaatctgcacgagatcaaaaacaaccttcatccttaacacagctcatacnaacccattggccattgcaaaggtggagccttgactagttaggtccgttaccaccggcccaaaggaacctaagatatgttgtagtggcggtgggaatattttctaaatggattgangcanagcctttagccacaataact

SEQ ID NO: 11765 - DNA, 125 bp, Zea mays
ttcgacataacggcggaaagggaaaccgacttacagatgaaaagccagattagacctctaagagttactatagagttattgataaatgtaaagggtattaatgtaattttgcatgggctgtgaac

SEQ ID NO: 11766 - DNA, 431 bp, Zea mays
  unsure (1)..(431): unsure at all n locations
agctagccttcgcctcagtttatcatccgcagtccaacaaggtcgtggaacgcgccaatgggaaaatcttcacagctgtcaagaagatgctccttgatgaaaaaagggcagatggaccgatttgttacctgaggcagtctgggcactaaacacgactgaatgcaaggcgactgggtttactcccttccgccttctatacggatcggaggccatgaccccgcaagaaataaagcatgggtccccgtgaacaattccgtcagccgtccccgacgtggacgagccaacttcaaaagatctcatcgacggagaccgagtcttcgccctacaagccctaaacaaataccaagcccagaccaaagcatggcgcgaccacacggtcatcccgagggaagttagcanaggggacctcgtactcgtccgaacagctcgga

SEQ ID NO: 11767 - DNA, 470 bp, Zea mays
  unsure (1)..(470): unsure at all n locations
tactcagcttatgccggagcgccatacaggaagctccttcacttctcttattctctcattgtctcacggcanaggggagatgctaacggtaagtaatcatcaccgctttaaatgatatagatgatgatgtcgatgatgatgatgatggctctccatatgatgatcttgttagaatgttctgtgaggccgatgactacatgcacagataaaaagaaaaatttaagaccttgcagaaattgcatatcaacctccaagtgtcttttgaggagctcaagacctctcacaacaatctaaaagagaattgtgagaagcttgcagaagctcaaaactcatctattgtgcatgaagttgtggtggtcaccgaggatgttggagtcacttgtgacttacttgatagtcctacaagtgaaccactacctactaactctatttgtgagtaatgcacaatttctcttatgaatgatgatatt

SEQ ID NO: 11768 - DNA, 469 bp, Zea mays
  unsure (1)..(469): unsure at all n locations
tgtgaaaccaatcacaagtntattgaagaatgatactaaatttaattggtcttcaaaatgtaatgaagcctttgaacaactaaaagtattattaaccactgctccggtattggctcaactggacattgaaaagccctttgatgtgtattgtgacgcatcacgcagtggtctcggctgtgttctaatgcaagaaggcttatgcttcaaggcagttgcgctggcatgaggaacattatccaactcatgacctggagttagctgcggtggttcatgccctaaaaatatggcgtcattatccgctggggaatgtctgtcacatttataccgatcataaaagtttgaagtacatctttacccagtcagaacttaatatgagacaaaggaggtgacttgagctgatcaaggattatgaattatagattcactatcacccacgcaaagctaatgtagtggcagatgcattaagtcg

SEQ ID NO: 11769 - DNA, 418 bp, Zea mays
  unsure (1)..(418): unsure at all n locations
gctttagtgattagagagagtgattngtcgtgttcatttgagctcttgcgcttggatcgcttcttttctttttctcattctttcttgcgatcatctcaattgtaatcaaggcaagagacaccaattgtgtggtggtccttgcgggaagtttggttcccatttgattgagaagagaagctcactcggtctgagggaccgtttgagagagggaaagggttgaaagagacccggtctttgtgaccacctcaacggngagtaagtttgcgagaaccgaacctcggtaaaacaaatccttgtgtgacactctttattcgctcacgatttgttntacgccctctctcggactcgttattatttctaatgctaacccggcttgtagttgtgaataagttngtaaatttcagaatccccctattca

SEQ ID NO: 11770 - DNA, 360 bp, Zea mays
  unsure (1)..(360): unsure at all n locations
ntaagggcgcaaaaagaagttgatgacgaaagctatcanattgcactngagaaccttcgatcagaggtcatcacactgaggaatgaggcccttgagaaagatataattctgctctcagtggatagactgaaaatcaatgaagctaagcttattgccgaagccaaaactcacaaagccaaagttgaagatctgaagaagaaacttgcggacatgattgaaatttttgaagttgctaagtccaagcaagaaataagtgagtggacaagttcgaggctggaaaagaatgttgaaaagcttcgtgattccagggaaagatgttatgaaaaatccttggagtgcacaaagaagcttaaagatagc

SEQ ID NO: 11771 - DNA, 449 bp, Zea mays
  unsure (1)..(449): unsure at all n locations
agcttgagaaantattggatacagttcgaaagcttgaagcttctttcgaagggttttctgtcaagaatattccacgaggagaaaatgagcacactgatctgctagccaagtcagcggcacaggggctgcctttaccttcggaagtattctttgagacaataaaagcaccttcggtggaacttcttgacagagcagtgctcaatatatctcctgttcatagtgaagattggagaaccgagattatatcttttctccagggcaactgcctttcagatgacgaagcttataataagagaatagaggcaagagcccgaccatatgtaataatagaaggggagttatacaaacatggagttggttctccatagctcanatgtttatccagagctgaaggtatagaatngatgaaagaaatacacgcagccctgagtggatctcacatcggatct

SEQ ID NO: 11772 - DNA, 394 bp, Zea mays
tcgtctatctgcctctgcagttcagctagcctggccatcttttctttcttcctctgcacctgttgatgaagcatctccatgtctctgatttcttgatctatctcatcctctggtggtctcgggctaacagccttcctcttttggcttcgggcctctcgaagagagactgtttcctggttatggtccagaggctgcagagctgcagccccagttgctgaagctttcttcggcgccataacgaaggtttatgatcgccgaaaaaactcaaagagtggaagtgagttcaccggaggtgggcgccaatgttggggacttgttctcaaatgctatgagttaagaacaaggcaacacagaaaatattaatcgataaagtccttcgttcttcgaagcatta

SEQ ID NO: 11773 - DNA, 379 bp, Zea mays
gcagcatgcactgccacccgcctgaagggactaaatctcttcagaagctcggaaccggaactttctgttctaccgtcaaagcaatgcagccctgcaacagctgggtggctccatgcatggtgtgaagaaccaaaacactgctgccgttttccggcctacatccatgatccgccaagaagtttctcgatggtggtagacattttcagtctttgcttgcgagataactgatgacgctggatgatgaagtccactccgctgaaactgcaacgtttgaaggctatgtgtatgaaagtgactgagcactaatctgctctcggcaagaaaaagccacatcccacagcccggatgttgatctgatgcacaagtcagagtcacaaaa

SEQ ID NO: 11774 - DNA, 407 bp, Zea mays
  unsure (1)..(407): unsure at all n locations
gcttatgaagattcttcatcccaacatgggttattttttgtgccagagccaacccatgttagtcttagcaattaagcatgtgtcgagttcaactctatcaaaatctactaagtatagctgaccctctaacacacccttaaatgctattgaatcatcacttcttctaaagacagtgacacctacatcagtaaagagacagttgtaacccattttgcataattgagatacagaaagcanattgtaatctaatgaatctacaagacaacattggaaatagaatggtcaggagatatagcaattttacccaatcctttgaccaaaccttggtttcatccccaaatgtgatagctcgttggggatcctggttttcttataagaagagaacatcatcttctcccctgcatgtg

SEQ ID NO: 11775 - DNA, 288 bp, Zea mays
ctatgcgagacaaccgccaacgaagcgagtgaaagaacttcacatcgatcaaacttgacaagtcttagaaataagcgtgtagcacttaaagtcttacttgatacgcacctggctggtcttgaaatatgcatgatgtactgcgcttcaagggagacttaaagactcaatactcatgaaaacccctactgcaagccacaacgcacatctcaccatatgcctattttctctaaaaattatctagcctatggcagagtattctgaacagtgtaagagggtgccgatagctgt

SEQ ID NO: 11776 - DNA, 487 bp, Zea mays
  unsure (1)..(487): unsure at all n locations
gcaagcttctccggtgaactcaagcaccgaagctgtgttcttatatcgtggccggtgtgtgaagacttttatcctctntctctttgattctggctcgctaggagcagctgcagcttcctcttctgcagaggttgagttctttcttttctgccctcgagtgggataacgatagtcagggtacacaaacccaatggcatctaatacccgattcagtctcttcttttttcggcctccgaaggctgctgacattgcattatcttcagccttcgagtaagtcccgagtagctcatcacttanattgtcaatgcttttcaaccactcatcatctggctcaataaatttatctccaaatttgaaggtgtacttcagtctcacaagctcaccttcgtcggcctctatcatggtgtcttgtggcaatttccatttctcagcaagcggtcacaccctgaaagcgatatgttcttgtactaagtcccttgttctataa

SEQ ID NO: 11777 - DNA, 473 bp, Zea mays
  unsure (1)..(473): unsure at all n locations
cctttaatctcagctctagaaatgttaaaaatggtatataaatcctaaaaatatgatatctattntcttagaaccctaatttcctgtagtatgtaataaaaataagtttgtgatttttagtggaagtaagaaactttagagtaattaaagtagttaaaagtcttggttatagatttttagaaaataattggtaagtcctaaaatgcccaaaatatttatatgagtgttatacaatatttagaagccttgggtaggatttgaattcatttggaccttgtttgatcaccaaaccccaaaacacccccatgccctatgaactcctttaccgactccggaaaccctaagttcccggaactccgtgaaggaaagttatattcaagacattaaatataagtttatgctatctttgcatcctcatgagcatnccatggcatccattcttatacttatgtatgggtataattagaacgtga

SEQ ID NO: 11778 - DNA, 418 bp, Zea mays
  unsure (1)..(418): unsure at all n locations
gcttgtgaaagttcttcatccncacatgtgctaagcggcgatgccacagccagcccatgctagtcttaacgattaagcatgcatctagaccggcctcctcttttgcaaaatcaactaaataaagtttgccgtctagtacacccttaaatgctagtgaaccatcacttcttctaaagacagacacatctacatttgtaaatagacaattatatcccatattacataattgactgacagatagtaaattatatccaagagactcaactaataacacattagagatagagtgctcattggatattgcaatcttgcctaaacctttcaccttgccttggttcccatcaccgaatatgattgaatcttgaggatccttattcttgacgtaagaggtgaacaccttcttctcccccgtcatatg

SEQ ID NO: 11779 - DNA, 411 bp, Zea mays
  unsure (1)..(411): unsure at all n locations
ctcagctgtgcagagtcgcttgaactaatctttggagagacccgaccttcttgcaacatgacaccagaaggaccaacctcaaaaggcgtggctgagtttaaaattatttcagagcatatcatcacaagagacctggntcaagaagttttggctctcaggggttttcctaccttaaaagaatgggaaatgccgaagctagagggggagaagaaagaaggggaaccttgtgcggttaccttactactacaagtttaagaaatattttataacaccttgccaagagtggctggacacaattgaaataatgtgcaatgaaatactcggtaattactcccaacaagaggatcagttgatgactgcngccttcngtacccgtccgaagcgaatactgaatcgagtgctggacgccct

SEQ ID NO: 11780 - DNA, 287 bp, Zea mays
tagagaagatattatctacctactgacctagttaaaaatgttaaacacatctgtccactacattatgatagattttaccccttattccataatatgtttaagattaagaaatatatgaaaggtgacttatataatgaaccaaagggcacccctatttttggtgagatatttagtcaatgtagatcactggaaaaatatatcataccctattgtagtgtaaaataagaaagctatcttttaattcaataaaacaagaataacttataaaaaccctacaaaaataaccc

SEQ ID NO: 11781 - DNA, 431 bp, Zea mays
tctatagggagaacacgtgataggtttgactaacgtacaattcgtaaaagatagaccttgtgcagcttgtcaggcaggtaaacaggtgggaggagcgcatcacagcaagaatgtgatgaccacatcaagacccctggagctgctacatatggacctcttcggacccgtcgcatatctaagcataggaggaagtaagtatggtttagttattgttgatgacttttcccgcttcacttgggtgttctttttgcaggataagtctgaaacccaagggaccctcaagcgcttcctcaggagagctcaaaatgagtttgagctcaaggtgaagaagataaggagcgacaacgggtccgagttcaagaaccttcaagtggaggagttccttgaggaggaagggatcaagcacgagttctccgctccctacacaccac

SEQ ID NO: 11782 - DNA, 459 bp, Zea mays
  unsure (1)..(459): unsure at all n locations
agctcgtggacccgtagcctatcatttgaatttgtctcccagcatgtcagctgttcatgatgtagttcatgtatctcaactgcggaaatgtgttcgcctacccactgaagtgctacctgaaccagacattgagatagaaccagactcgtcctatcaagagtaccccatcgaggtattggatcagaaggagagatcaacacgggcaaggtcaatccgaatgtataaggttcagtggagtcaccattcagcagaagaagctacatgggagactgagggatttctacgctctcgcttccccgactttctgcccaaaggagtcggtacgttaccccaaaaccccacccccacctgcccttngaatagtaatataagaaaaacttatataacaagggtagtctaagttgtggatttaacttanaaaggacttccttctgaagttgcacagagaatgacattcga

SEQ ID NO: 11783 - DNA, 480 bp, Zea mays
ctgtggtgatgtgggatttaaggctatttttctactcttcttacttctggtagatcagatatagattatggtaagcataccaaagggtgaaatccaatgtagttctgttacataaaccccatttatatgtctattcagaatcgacctttaccatttggtttatagtatataccataccagtcaaaggactatcccaagtcaattcagcggctataagtatttaaattctgagagatgtatgcaacacaagcatatatgtcctagataggccgagtaaagtggttcgacgagaacacacaatgttttttcacaccaacgttgtgttctcagaattacctttcgatgtactcgcaacttcgtgttgctaaggtactagccatttatctcaaagttcgcttcatgtcgttcaacgacaaatagcaatgtgccaacatctggttgagcaatgtatgactgagattctagcatttattcatatga

SEQ ID NO: 11784 - DNA, 446 bp, Zea mays
  unsure (1)..(446): unsure at all n locations
agcttgtgaagattcttcattccaacatggtctagtcagcgatgccagagccaacccatattaatcttagcaattaagcaagtatcgaggttcagctntgttaaaatcaactaagtatagctgaccctctaatactcccttaaatgctactgaatcatcacttcttctaaagacagtaacacctaaatccgtaaaaagatagttgtagcccattttgcataattgagaaactgaaagcaaattgtaatctaaagaatctacaagaaaaacattggaaatagaatggtcaggtgatatagcaattttaccaagtcctttgaccaaaccttgatttccatccccgaatgtgaatagctcgtggggatcttcgtttntctcgtaagaggagaacattcttttctcccctgtcatgtgagttgtgcatccgctatcaataatccaacatg

SEQ ID NO: 11785 - DNA, 454 bp, Zea mays
  unsure (1)..(454): unsure at all n locations
tggtgccgatggagaagcaaanatccttganatcttggttatcgaactgcttgccattgtcaactgttagctcggacggtactccgaagcggcaaacaatgttctgccagaagaatttttgggcagtctttgatgtgattgtggaaacagccctcgcttcaatccatttggtgaagtattcgacggctacgaaggcgaacttaaggttcccctgagcggtgggcaggggcccgacaatgtccaggccccagcgctggagaggccatgtatgggcaatcagctntgtatattgcgaggggttgcctgaccgangagagaacttctggcaggcttcgcaggaccttgtgacccgatttgcggcgcagatcattgcgggccagtaaaacccttgtcggatcaccttggcagccagggcccttggccctgcgtgcgagccgcacgtgccactgtggac

SEQ ID NO: 11786 - DNA, 481 bp, Zea mays
  unsure (1)..(481): unsure at all n locations
acgtgttcgacgcgagctggcatcctgtggcgcgctcagagcacgcccgtgcgcgaacccccgcgcacccgcggtcgcccgtgaccacgctcgcgccacggctataaagcccgccccagtgcttggctgccttccccgttacctcctccgtacctcgccggactcgcccgagccagccattaactccggcgacctccccgcgacccgccagtgccgcccgagagcaaccaccgtggccagcccctctcccgtcctcctccgttcgatccaagcccttagagagcttcctggtgaagccgtgagtcttgctcaagctagacccanggacccgcgtcaccggaatagcctaatcgtgctcaccggagttcaagaacccgccgacgcacgtggaccgggtaagcccttgcaccgttttccaattccttgcgcgtatggcctctgtgtcaccccgtgaaagctctcgtgcaccctaattgatcta

SEQ ID NO: 11787 - DNA, 307 bp, Zea mays
tttaacatgctcacaacctgacttctctaaaatagctgcaattcccctcgcaccagagaaggcacagacatcctcactgtcactcaagatatcctcaaaagcttcagcttcgctgctgatccactcaattgggccctcacgatcgcctcttatgaagttgtcttcactcgagtacgcgcacacgttggcgaagctagtttttatcctagtgacgcattctacagaattttcaaaacatctttctttagatgagcgaagttctgcaactagtttttcccaatatattttccagtattcactggcatct

SEQ ID NO: 11788 - DNA, 385 bp, Zea mays
tgcctgagccatcacatcttagtgacaaccctcaagcgcgtgtgctgatcaacattgtttatcttggcatctactaaatatagacgtgcatctctaacactcggctataagcgattgtatcatcacttcttatagagacaggcacacccttatcggcgaatagacagatggggcccattttgcataaccgatatactgaaagcttgttgtattctgtagaatcctcttgacagagcatcatgaactcgattgatcaggagagctatcaattattcccgaacctcgagttccatcacgatctgtgagatgacttgtgggatcaccatctgtctcatatgaggagaacatcctgtgctggactcgctatgtggttagtgccccgcta

SEQ ID NO: 11789 - DNA, 372 bp, Zea mays
  unsure (1)..(372): unsure at all n locations
agcttctaaagggagaacacattntaagactaaccaatgtttattttaagaaagacaggatttgtagcgcatgccaagccgggaagcaagttggcactcatcatccacacaagaacatcatgactagtgacaggccactggaactcctacacatggacctattcggcccgatcgcttacataagcatcggcgggagtaagtactgtctagttattgtggatgattattctcgcttcacttgggtattctttntacaggagaaatctcaaacccaagagaccttatagggattcttgagacgggctcaaaatgagttcgacttaaggatcaagaaaataagaagcgacaacaggacggagttcaagaactctc

SEQ ID NO: 11790 - DNA, 394 bp, Zea mays
  unsure (1)..(394): unsure at all n locations
cgaggctgactcgccgaagcaacagaaactgcaggatgattgcccacatattctggaatgtatggcgaatgatacgaagctgtatgcatgacctgcttctgctgagcttgttgtgctgctgcttcagctatttccttttgcttctgaatggtaatatggcacatcctggtagtatggcctttgttctcaccgcagaataagcaaaagattcttctcggttgatcgccaaatcttcctccaaaacccctggcgcctctgcctcttggagctggtggtctgaaagagctttggtgttgtcccgaagcctgtgaggaacattgtggcctttgttgttggctgcctttatcatcattntgtgtagagttatgaattgatctcacgtgcctcgggtaaa

SEQ ID NO: 11791 - DNA, 399 bp, Zea mays
  unsure (1)..(399): unsure at all n locations
agcttcagcacagtgacagatctcattactataggggaaaccgacttaaagatgaaatgacttanagacccatgatgttttgtgtcattattgtagtcgatggtaaaggacataaatgtaattttacacaggctgcgtcctgtgcctataaatagatgaacagtacccctgtactgttcacgcaatctggtaatcgctgacacattacgctggaattatcgttttctgccaagacgaaggtataaatgtacctaaatattatgtcttaatatttaggtttgtgtaataaaatatgtgaataatattacctatctttggtatatctntcttaatgttntatattttttcatttctcattgtcttataagtctgatcacgaaggtatgaccttcgtgatat

SEQ ID NO: 11792 - DNA, 353 bp, Zea mays
  unsure (1)..(353): unsure at all n locations
ntacaatcacttagaaaaagaatgaggaaggagggaaggcaatccaagccacaagagcgcaaatgaacacaagaactctctcactcaagtcactaagcgttggagtatgatttgggacttggagaggattntgatctattgaatgtgtcttggagtgtagtctttttctcttgtattgaatgttgaatttataatacttggatggatttgaatgacgtggttgggggtatttatagccaccaaccacttcctagccattagctgactntgctatcgatgggcgcaccggacagtctggtggtgcactagacagtcactgttaactgtctggtgcgcgccacgtcaatgcgctc

SEQ ID NO: 11793 - DNA, 448 bp, Zea mays
  unsure (1)..(448): unsure at all n locations
agctttcatctttcttcttacaaacagtgctggacatccccaaagcgaagtgcttgagcgaataanacccttatccagcaattcttgaaattgcttcttcaactctgccaactcagcgggtggcattcggtagggcctcttggaaattgaggccgttcccggttgcaactcgatggcgaattcaatatcccggtccggtggcattcctggcaattcatcaaggaagacatctgcatactcacagaccactgggatcttcttcaggggtaactccgtcatagagaaggcacatgactgagaagaaccctgactaggcagaatcaaagtgaaatttccgcagaaaggagaattaacttccacgatacggctggctatatccagcacaacttggtgcaaggtcatccaatntgcccctagaataatgtccacattttccaatcccaacaca

SEQ ID NO: 11794 - DNA, 204 bp, Zea mays
tgagaaaagagtggccgaagaagccgaatcccttgcttccgaagcactctccgcagaatttgattatattattctacatgccttcggaaaaatattatctccagaagaagatattgaagcccaacactatgcccaggagctgaagtattcgaatggggccttattgtttaatggtacggacggagatgatatctatactgcctc

SEQ ID NO: 11795 - DNA, 377 bp, Zea mays
tgactctatgaggagggcactggtgatgttctgttttgcgtattttaatgtgatagcaagagtaagttattcttttatagctgcatgctgcacaaattgcaatgttgcataagatgctgttatttcttatgtgtggggcttctttcttgtcatctgaattatgacctttctactaattcagtacaattaactctgatatctatcttttcttgaagagcgctgtcatgctttccattgaccaccatggttttgatgtcctcgccaaagtgcctcaaagagacatccttactaatccacaataccactggaaggagttcaagttcacattcaaagaacctgccaaggatgctgaagacttctgccgcatgctggttggg

SEQ ID NO: 11796 - DNA, 361 bp, Zea mays
  unsure (1)..(361): unsure at all n locations
acatctgtgaattcatcatctaaactgtctcgctctactagatgtatagtacgggcggccgatnttgatgtctctttacatcggctttcacaagccaaagcccactgatgtagctgagctattgaaaagaactgaattccatcaaatttatctcttaagtaggatagcaaaccattaaaagccagccctgctagctctttgtctgcgatatggattcaaaagcatcggtttctagtttcccggaacctccggatataatcattaactgattcttcatgtccctgccggactgaagctaaatcagtcgaccctaattcgtaatccctagaaaaaatgttcatgaaatttactctctaaatta

SEQ ID NO: 11797 - DNA, 481 bp, Zea mays
  unsure (1)..(481): unsure at all n locations
agcttctaagggagaacacattttaagattaacaaatgttcattntgagaaagacaggatntgtagcgcatgccaagcaaggaagcaagttggtgctcaccatccacacaaaaacatcatgacgactgacaggccactggagctcctacacatggatttattcggcccgatagcttacataagcatcggcgggagtaagtactgtctagttattgtggatgattattctcgcttcacttgggtattctctntgcaagaaaaatctcatacccaagagaccttaaagggattcttgagacgagctcaaaacgagttcggcctaaggatcaagaaaataagaagcgacaatgggacggagttcaaaaactctcaaattgaaagcttccttgaagaggagggcgtcaagcatgagttctcttctccctacacccctcaacanaatggtgtagtggagaggaagaatagaactctattggacatg

SEQ ID NO: 11798 - DNA, 478 bp, Zea mays
atactacatctattttaataagcatcgctggttacttcttatatgaggagcttcgacaaaattgcgggaagtcaacaacttcgtcaaaaccgttagaaattcagcatcaaatggccagagtgcgttcaactgctagagttacacgcgatggataagaggccgaaactgccgagactgcccaaatctctgaagtaatgaggcaatcaggactggttgttacaaagggtgcctccgacgagggtccacctgctgctgaagctgaacaggctagcattgaagatggtgatgctgatgaagaagagatatattataacaccgtcatgccatccaagcctagccacttggatgttggaaagtctactatctatgaggctgatatgcccatgatgataaagctaggctacttctgggaagccgagaagaagctgattcgttttggcggagaataaaccattccgaagccagaaagtgatgaagt

SEQ ID NO: 11799 - DNA, 424 bp, Zea mays
agcttgaagccatggtaagtagcataggccaattatatatgaattgactcaagcctagctacgggtgcataagtttcaccgaaatccaaaccttcgacttgggagtatcccttggccacaagtcaagctttgttccttgtcaccacaccatgctcatcttgcttgttgcggaagacctcattggttccaacaacattttgattaggacgtggaaccaaatgccatacctcatttctcgtgaagttgttgagctcctcttgcattgccaccacccaatccgaatcttggagtgcttcctctaccctgtgaggctcaatagaggaaacaaaagagtaatgctcacaaaaatgtgcaacacgagatctagtagttacccccttatgaatgtcgccgaagatggtgtcgacagagtgatctcattgga

SEQ ID NO: 11800 - DNA, 448 bp, Zea mays
  unsure (1)..(448): unsure at all n locations
ntcatgtcaacatcaaggccactggaactactacatatggattntattggacctacaaattatgtcagtgccgggggcaacctctactgtctagtgattgttgatgacttctcaagatacacttgggtgttctttctccatgacaaatctgaagttgcatctatattcaagaagtttgccaagaaagcacaaaaatgaatttgattgcaagattaagaagatcagaagtgacaatggcaaagaatttgacaacaccaacattcatgagtactgtgatgaaattgggatcaaacatgaagtatctgccacatacacacctcaacaaaatggagttgttgaaaggaaaaataggaccttgatcactcttgcaagaacaatgattgatgagtataacacaccggagagggtttgggccgaagctgtcaacactgcttgctatgcatcaaac

SEQ ID NO: 11801 - DNA, 440 bp, Zea mays
  unsure (1)..(440): unsure at all n locations
agcttataactntagagacaaaatatactggtgcttgntttttgacctagtcgtcttgcttctcctgtacaagcgtcacactgactgcagagtgagaggctgctacatataagagcaatggagcccctagcgaaggtggagttagagttgtcaagtaaatcaagtattgctttaactcttcgaaagccctttgtcgagccggaccccattggaaaacttcggctgacttcagtatttcaaagaatggtagattcctttctgctgatctggatataaatctatntaacgatgccaaccttcctgccaaccgtggggcccccttctttgtatttggcggctccatctgaaagatagcttcaatcttatttgggttagcttcgattccctttggtgatactagacaaccaaagaacttgcccttctttacttccaaaacacac

SEQ ID NO: 11802 - DNA, 467 bp, Zea mays
  unsure (1)..(467): unsure at all n locations
tcagctccatctatattatggattgcttttgagtctgtccaatttccttctgcccttctggcagcttcctgacttccatggatagcaatgggcccttggcccgaaggtatcttcatgcaaagataagctggatgaagaattgcttcgaaggcattgagagtaccacgaccaatgattgcattgtaagggtattccatgtcaacaatatcaaatacaacttgttcagtcctcgtgttgttaatgaatccgaaggttactggcattgtgatttttccaagtgctacgatctgccttcctcggaagccacaaaggggatgtgtggcatcatggattttatcctcgggctcttgcatctgtctgaaggccttagcaaatatgatatcagctgcactgcctgtatcaaccaaaacattatggaccagaaatcctttgatcacacangagaataccatagcatcgttgtgtgg

SEQ ID NO: 11803 - DNA, 443 bp, Zea mays
  unsure (1)..(443): unsure at all n locations
taagcttgaaccagccaataagaagcacaagatagaatctcagagaaaggtgcaacatgttggagtacaaagacccttcatcaagtccaaaaggtctcatgtactgatctgcatttcttaagaagaccttcagcttaaagattgccctcacaatgacgccatggtcatatcatgtgttatcaaagggttcttggttcacaatgtcctcgtagacacgtgtagtgcagcagacattatcttcgcanaagcctttatacaaatgccagagcaggatgacaaaatacatgatgcaacacaccctctgcgtggctttggaggaaaatagatagtggcactcggaaaaataacaatgccaatcaccttctgctatgttcacaacaccagaacagagcaagttgtatttgacattgtagacatggattatccttacaatgccatcattg

SEQ ID NO: 11804 - DNA, 424 bp, Zea mays
  unsure (1)..(424): unsure at all n locations
acggaccttaaatctcagcttctaagggagagcacattntaggattaacaaatgttcattttgagaaagatagtatntgtagcgcatgtcaagcagggatgcaagttgtggctcatcatccacacaagaacatcatgacgactgacaggccgcttgagctactccacatggatctattcggcttgatcgcttatataagcatcgacgagagtaagtactgtcttgttattgtggatgattattctcgcttcactctgggtattctttgcaggaaaaatctcaaacccaagagactttaaagagattcttgagacgagctcaaaatgagtctggattgaaaatcaaaaagattagaagcgacaatggaacaaagttcaagaactctctgtgacggagacctccaagtaattaggcccacctacag

SEQ ID NO: 11805 - DNA, 487 bp, Zea mays
  unsure (1)..(487): unsure at all n locations
agcttagaaaaatctggtatgaatcggcggttatatccactcagtccaaggaaacttcggacctgatgaacagtggtcgggggtttccactccaaaatgtccttgactttgctgggatctaccgcaatccccctggcagacagtacatgtcccagaaacagaatttcctccagccaaaacgcgcatttgttgaacttgacatataactgatgttctctcaagtgcgttaacacgatccgtaagtgttgtgcatgctcctcttcattcttggaatatattaaaatatcgtctatgaagaccaccacaaacgtgtccaactcgggcatgaataccgagttcatcaaatacgtgaagagagcaggagcatntgtctatccgaaagacattaccagatattcaaataatccataccgcgtagtgaatgcggtctttggtatattctctggccgaatacggatctggtgatagcccgatctgagatcaatct

SEQ ID NO: 11806 - DNA, 437 bp, Zea mays
  unsure (1)..(437): unsure at all n locations
ctaagggagaacacgtgatatgtctaaccaatgtttctttcgtaanagatagaccttgtgcagcttgtcaagcatgtaaacaagtgggaggagcgcatcacagcaagaatgtgatgaccacatcaagacctctggagctactacatatggacctcttcggacccgtcgcctacctaagcataagaggaagtaagtatggtctagttattgttgatgactnttcccgcttcacttgggtgttctttttgcaggataagtctgaaacccaagggaccctcaagcacttcctaatgagagctcaaaatgagtttgagctcaaggtgaagaagataagaagcgacaacgtgtctgagttcaagaaccttcaagtggaggagttccttgaggatgaatggatctagcgcgagttctgcgatccctacacaccacaacaaaat

SEQ ID NO: 11807 - DNA, 471 bp, Zea mays
  unsure (1)..(471): unsure at all n locations
agcttatcaagattcaaagactctnnttgcatgataacttactatgagtggatccttaagaattcattttacttgacaggttaagtagttacctgcatctagatttctgtctattctagatcaagtacttggcctatactagtcgtcttttatcatcccttcagttcacttgtcactacgtgtaggtcagtgaccaagtcttcatgcctgagaagtaacggcgatccgaatcaattaatacccagctagggatctccaaccacatgacatatgtagcacttaacctttgcatatgtcaactcgcacccgggtttctcaagaccaatatgggttcacgccaaacgataacacagatactccaccgtctagcctcttgccacagagggtacatgctactctcgccatctctccactcccatagtgtggtagcctttctggtataggtccagtcgaggcanagcttacccatga

SEQ ID NO: 11808 - DNA, 468 bp, Zea mays
  unsure (1)..(468): unsure at all n locations
tcaactcttcgaaccatgtctagatatttntcaagcttctgatctttagccttgcaactcttatcgatgtggcccgaaacaacctgngaatcagttttaagaatggcccttctgattcccattgcttttagcttccgaagacccaaaagcagggcttcgtactcggtaatattgtttgtacaattgaaatcgagtcttgccgcataacaagttttaactgtggatggcgagaccaacacagcagctgctcctgccccgaaggttccccaagacccatcgcaaaacactgtccatacttcggcatctttatttgtttcttcatcctgagcccctggcgtccagtcagcaatgaagtctgctaacgcctgngactggatcgaagatctattgcacataatcaatgcaaattcattgagctctgcagcccattttccaaatccgccagtagcttctctatttctcataata

SEQ ID NO: 11809 - DNA, 380 bp, Zea mays
  unsure (1)..(380): unsure at all n locations
ccttcgcctcatataccactcgcttccaacggangtgtggaacgcacaaatgacaaaatcttcacagctgtcaagaagatgctcctcgacgataaaagggcaagtgggccgatttgtacctgaagcggtctgggcattaaacacgactgagtgcanggcgactgggttcacccctttccgccttctatatggatcggaggccatgaccccgcaagaaataaaacatgggtcatcacggacagtcccgtcagccgttcccgacgtggacgagatcacttcgaaagacctcatcgacggagaccgcgtcttcgccctacaggctctaaacaaataccaagcccaaacaaaagcatggcgcgaccacacagtcatcccgagtg

SEQ ID NO: 11810 - DNA, 295 bp, Zea mays
ttgaggggagcacgatgtatatgtatagagctcgcagtagttgcagagtgcaagttgccgtctgcagatcgacgctgagtgaggcatatatggggttgacagacacatcgatggatcgatccgatgcatgcatctctggcaagacagaattataaacaccgcggctgccacatctctaagcaccggaataagccatccagccagctagacccggcccgcgttcaccaatcaacagggcatataacatacaagttggacaagaggactgcggtgcaagcagctatgacgactgatc

SEQ ID NO: 11811 - DNA, 493 bp, Zea mays
  unsure (1)..(493): unsure at all n locations
caagcttcatacaaccagtaatactgaatgatctccagtaattatcagtaatgacgaacaatatttagtcattaccgaaaattgctaagtgttcttcaataattactggttaggtgaagcttcacctanggtgacaaatagtgtttccctatatataaaggtatgtaacctatgaacttcggcacatggttaactagttatttcataattttcatcgtgtgatgccatatgagctagggcagacttangatatctccagcagcctacatatcctaccctatctcattttctattttaaactccaccatgtaaatagtataatatatagtgcaaaaaagagtttgcatgtccatttagttagctagagatgaccttagagcaccgatcaaaacgaaagaatgatactctgtactagaaaaaaaatcaaccatccatatatggngggaagtcatatccaattcnggacagaagttctcccctcattagtttactc

SEQ ID NO: 11812 - DNA, 495 bp, Zea mays
tactccctctaggaagggccattcattatcgccaagatcttgatgcccggaacatacaagctggccaatgaacaatgcgaggtctacagcaacgcttggaacatcgaacaactacgtcgcttctatccttaaaatgtttcaagtcgttcatgttcctcgctcttacgcgcttaaataaagtctaactatcaaggaagggtcagccttgcctcggccaagcccgaccctcccttgtgggctagaaggggggacccccctctgcgtcaaaattattcttcggagaagttttctaccgagaaaagttttctacagagaacaacttttgtgctttcgactatatcgatagcagggtcctgcgaacgggtgagagagcacgtaagtggctaggccgactgagccgacggactcctacgcctccaggataccgatacctcactcatcaccttccacgaaaagaactcacgctcggataagcaatctactaccgaacaagtc

SEQ ID NO: 11813 - DNA, 402 bp, Zea mays
  unsure (1)..(402): unsure at all n locations
agctagtagcgatggaaggatccatctctcacaaccattcttgagaggctagagaagttggatcaagcagggggggcgataggaatcgatagacccctagaaatgccttagatggtggtgcatcaagcgaacacatgtatgatgactacgctgcagatatcgaggatgataataggatatgtactcaccatcaccgccagcatcaccctaatcgttcacaccgacgagaggtatgagatgacaatgattctctatgtaaaatcaagtttatcatgcctcctttngatggtaaatatgacccagatgcatatctcactatggaactagcagtagaccaaaaacttgcacgccatgattttcttgaaacanatgtgttaaggctactactagagagttactgat

SEQ ID NO: 11814 - DNA, 335 bp, Zea mays
  unsure (1)..(335): unsure at all n locations
ntgcaaatatatgctaccgcccaacttaatgatcttaatgtcactcatgaattggtattaatgttccaaattggcaattatgacattaacctgatggttaaaacaatattacttcttattaattggaacatggagtgaccacccaggataacagtgcaaccacgagtgctatcatggctctggctntggtaattagctttatatgcttagtgcctggcaaccttacctgaaatatgggcaagagggggagcggtaggtgttggcagcccacgttaacatggggacgtattcttgtctaaaggtacctcacccaggggggccaccaccatcgtctt

SEQ ID NO: 11815 - DNA, 434 bp, Zea mays
  unsure (1)..(434): unsure at all n locations
tcgacccggatcttaagtcactgcagctgcagcttgtatacctaanatgtgtaaagtgatactatattggatctccttatattgtgtgccatctctgcatcataaaaaaagagcatacatattattaagagtgattaattaaaaaaaatgatactaaaataaaagaaagtgcatcatattgggaatttgtttgtgcatttaatgaaaagagtaataccactaatagaaataaattagtgacaaaattaagggtttaatacctaatntgagaatntgaaaaaagggagttacaaagagaagaagagagagaaaatactctatgaggacaataaaaatataaataaatatatatatataaaaacatatactattattacactanggaaatgaagttaacatatggccaatggtgaaattcatagcaagatccacat

SEQ ID NO: 11816 - DNA, 427 bp, Zea mays
  unsure (1)..(427): unsure at all n locations
ngaatagtctgtagaaaaaactcttgtaataatttgtgttaagaatgatgntaattaaatttacttcgtggaccttgtccataccttgtaatatattcttacctttccatcaatgtgtaaagtgctttgatttgaacgaaattagcatttttgagccgaaggcgaaaaataccttcccttcttttcgtacacagcgaagcataaaactgcttctttttcttttttccgaagccttctatttagaaccgaagtaactgtttatgctatgatgatgatgatcctatgtatgtctaaatggatgtttatgaatgcaaatgtatgatgtaatgtaccgtgcaaatgaatgtccaaacccacacatacaaagccataaccaaagccgtcgttcccttatgaagaaccaaagtctctctgccattttattttt

SEQ ID NO: 11817 - DNA, 457 bp, Zea mays
  unsure (1)..(457): unsure at all n locations
atagcgtgggaaatatttttcaacccaaaccctcgtatatatacgcaaaacaccactgaccgatggggcccacaatgcagaatgtttcgctattctagtgaagggaaggtgtttttaagaccttcagctaaaagccttcgttcttttcacagtctgaatttgttacaaagaaacaaactaatactgtgaggggctactgttgaagccttcctctttcgaaggtcattaataacatagctaactatttgcttcttgcatattactgaatactacaggagcttcgtaaccagaagagcttctgcataacaaaagagaagtacaacgaagcacgtttcatcgagcaggcttcatcagagtgaaacaaggagacgatgcaaggagaagatgtngctcaagttattanattcanatggcgatattgtccttgtgatatcttgtaaacttttatatgtattat

SEQ ID NO: 11818 - DNA, 353 bp, Zea mays
  unsure (1)..(353): unsure at all n locations
atggtcccaacaatagccccttcaccgtgctagatccgttttcgtaacgagcttgatccgcgaaaaaattctcttatgcttcgggaagccgaaggtccgaaaaacaccttccctgagctcgttgtcgagaaacgatatagtttccgagcgcggagcggtcccaccatgcaggttcactttctcggtttttgcggcccaccgttcagtgggtgcgagcgactgtttgtccggtgtaaaaatcttgacgattcaccttcttacctttggagaaacgaggccccgatgcaacatgataatggggagccccacgcacactgctttggctgaattttgagtgatntcagatcatattg

SEQ ID NO: 11819 - DNA, 442 bp, Zea mays
  unsure (1)..(442): unsure at all n locations
gcttctnagggagaacacattntaagactaacaaatgttcatttagagaaagacaagagttgtagcgcatgccaagccgggaagcaagttggcactcttcatccacacaagaacattatgacaagtgacaggccactggaactccttcacatggatctattcggcccgatcgcttacataagcatcggcgggagtaagtactgtctagttattggggatgaattttctcgcttcacttgggtgttctttntgcaagacaaatctcaaacccaagagaccttatagggattcttgagacgggctcaaaatgagttcgacttaaggatcaagaaaattagaagcgacaacgggacggagttcaagaactctcatattgaaggcttccttgaggaggaaggcatcaagcatgagttctcttctctctacactccacaacaaaatg

SEQ ID NO: 11820 - DNA, 427 bp, Zea mays
taattaatgattctcgaacttatttatattttacacatagcaataatatacatggatatgtctctttatctggccaacacattttcttattgtgccaagctagtgtacacccaggtttatggaccccaagacccgggcgcgaacaaaatcaccaggtgtgctgggaccaagtctcacacatatgatgaatcatggcacaggatcgaatgtcacatctttactatataataggagttctgtacaaaataaataattacattataaggagacaactgtccagcgaccctaagttgactgggagacgacgacctatacctcttacgaacacatctgagcatactccaagcgccatatactgcggtacctgttcatgaccatgtggggtgtgagacagcaacaatgagctcacatacgttcatagctcaac

SEQ ID NO: 11821 - DNA, 424 bp, Zea mays
ctaggccaaagaaagttcggacttgatgtacagaggttagaggtttccactctcaaatattattgactttgctgggatctaccgcaatccccttagcagataatacatgtcccagaaattggatctcctccagccaaaacgtgcacttactgaacttagcatataattggtgctcccttaagcgcgttaatacgatccgtatatgcgaaacatgctcctcttcattcttataatatatcaagatatcatcaatgaataccaccacgaatttatccaacttggcatgaataccgagttcataagatatgtgaagtgggcaagagcatctgttagtccgaaagacataaccagatattcaaataattcatacccggtagcgaatgccgtcttgggtatatcttctggtcggataccgatctgatga

SEQ ID NO: 11822 - DNA, 375 bp, Zea mays
atcaagcttctttttgtgggactcatcgggaattctgaatttcagaattctgatattcagaccttgagccaaagatcagggatgttcaccttgatgcctaactcgaatcctaatggccccattgacaaaattgtgtgtaactaacccctctgtcgtgtgccacaagatggcattgggacgcgagccctagacacgacaaaacctcggatttgcctcgggtttaggcagggagacagaccagatttcctggctccatatctctgcaaccagtatgcaaaatactatggcacccacacaacaatggtagcttgtatggaggagaagaggtttcttgcactgaccaaggcgagagcaggctccgatgagcgaccacac

SEQ ID NO: 11823 - DNA, 67 bp, Zea mays
actgtgcttttatatctgggctacttttggctacttcactatattctacatatgcatcttgatctat

SEQ ID NO: 11824 - DNA, 471 bp, Zea mays
  unsure (1)..(471): unsure at all n locations
agctagtgaaccatcacatcttctaatgacagacacatctatattcgtaaatagacagttataccccatatgacataattgactaacagatagcaagttatatccaagactctccactaganacacattagagatagaatgctcattggagattgcnaatttacctagcccttttaccttgccttgattcccgtcaccgaatataattgaatcttgggaatccttattcttgacgtaggaggtgaacatcttcttcttccccgtcatatggtttgtgcatccgctgtcgataatccagcttgaacccccggatgcataaacctgcaaggcataattaagcttgggacttaggtacccaactcttgttgggtcctacaaagttagtcacaattgtcttaaggacccaaatgcaagtattatcaccctttgcatttgccctaacttctagcaacaccttttatccttttacaa

SEQ ID NO: 11825 - DNA, 447 bp, Zea mays
  unsure (1)..(447): unsure at all n locations
gctttcttagcttgttatcatagaantattagttgtattgatttatcacttccgctgtatntgaaagctatactctttaccagcaagaacttaattnttatactccgataattgttcatcttgttctaaccactaatcaaaggatctagttgggggataaagttttaattttcaagtttcgcctatccaccccccccccctctaagcgacttacacagtcctactttaattggatatactgacgctcggctattatctgatccccataatgccagatcacaaaccagtttttgtattttacagggtggaactgctatctcttgganatcatccaaaccaactttggtagctacctccactaatcattctgaaattattgcattatatgaagcctctaaagagtgtacttggcctcgcagaatgataaaccacataacatagtcatgt

SEQ ID NO: 11826 - DNA, 486 bp, Zea mays
  unsure (1)..(486): unsure at all n locations
ctcgcatctttgaactagctcggctgattattctttggcgtctgtcaatataatcctgaccttgaaaccttcccgactaatggtctggatgctgcatgtactccgcactggcctgcatggacttccttcagaagtttgttcccggtggacgggagaacgcacttcatgaggacgcctgacgcgcccctccggtatatatacctcccaatgagtgtataatgagctgattgtctggcaatgcgctctgccgagttcttgtcatccggctcttcttcattctttatatacttaataatcgggtgcctccagtcatcagagtctgactcgggttggtctatgatgttgcactcttctatntgatccgtcgagatgctcggctgattgatntcttgcatgaagaccccgggcgggactttgagtcgaccggatccgagcttggacagtacatcagccgccgtgttccgatctctttctatatgatggaac

SEQ ID NO: 11827 - DNA, 369 bp, Zea mays
  unsure (1)..(369): unsure at all n locations
gagcttgtcccgctgtccttcaaccgcattctaactttgctcctgcaatccatgaagaacaaatactgtataagccgctaccacatctatattaaagccctagcatactacagcaaacaagccgtctaacgagacaaaatcacaagaatcttcctatcctctaagttgtttagggtgtagccactagatcatatatatggtgatccaaaaacactattttgtattgcctacgatgtgggataaataagaccgctagaggcagccttataaagctcgatgctgacgcctatagtagagtaaagtacttatccgtttgcaaattagtttaactttttatatgttttctttttntatccaactgtatcattg

SEQ ID NO: 11828 - DNA, 328 bp, Zea mays
  unsure (1)..(328): unsure at all n locations
atactaagcttctnagggagaacacgtgataggttcgactaatgtgcatttcgtatatgatagaccttgtgcagcttgtcaagcaggttaacaagtgggaggagcgcatcacaacaagaatgtgatgaccacttcaagacccctggagttactacatatggacctcttcggacccgtcgccaatctaagcataggaggaagtaagtatgggctaaatattgttgatgaactttcccgcttcacttgggtattctttntgcaagataaatctgaaacccaatggaccctcaagcgcttnctaaagagagctcaaaatgagttcgagctc

SEQ ID NO: 11829 - DNA, 436 bp, Zea mays
  unsure (1)..(436): unsure at all n locations
agnctgactggttcatggctgggatctgtgtctttcgtccgttgttcaacgggtgtgatcagatcacacctaataaaatctgagtcgttgacacttgatcgtgtggacaaagtcgcgtaccaattcatgcgcatcactgataagatatgtgcggtctgatgatgatcgaatgactaggattggtcgatacctcttcggcgggtgattttcataaagaacgcctactctttttcgtatctaactcgccatccacataggtaaatgtatccttgcatctaagtccttagttttacgctttanaccctattctctcggaattgtgtgcccaacgcccctagaccttagtaattcatgtaaataaatctcgaagagtgattcttagtagaaaaataaactcataatcttgcatagatcatatattctttgtgttactctg

SEQ ID NO: 11830 - DNA, 372 bp, Zea mays
  unsure (1)..(372): unsure at all n locations
acagattctgnatggttcctgggaaccttattggttgtgcagctgccattttaattgcaccttccaaagtcagaacatgctacgcaatgaaacttgattttagttgtacgaataatattgctgaatacgaagctctgcttttgggtcttcggaagttgaaagcaatggggataagaagggcggtcctcaaaactgattcccaagttattttatgccatgttgacaaaagttgcaaagcaagagatccgaagcttgaaaaatatttggatacagttcgaagacttgaagcctccttcgaagggttttctgttaagaatattccacgaggagaaaatgaacacgctgatctactagccaagtcagcggcacagt

SEQ ID NO: 11831 - DNA, 450 bp, Zea mays
tcccggatccttgagtcaccgcagctgcagctataactgttccgaagatttagatctcataactatcatacatcactcacagtgtgacgctgtttggagaaaactaaatgtctgatgagccctgaagctgctactatctagttttttttttttgggtctgtctcacagtagaagtaaaaaaaggttatttctgtgggagttcttatcttatccgatgttgcccttattgacaactttgtttttttagggggagtctgacaagttcctggctgagcagcagttgctacctcacaactttgaggtgacgttgcgcatgcagcctggaccctggatacgaccactcgtacaatttcatcgcgacgttcgtggacgatcacattgcgcaccatgctcagtttctcaagagcccctgactgcggaactcttcttctgtgaaatgtgtctcgtgag

SEQ ID NO: 11832 - DNA, 390 bp, Zea mays
  unsure (1)..(390): unsure at all n locations
tatctgcgcatagcttcgtaatgatcttttccttcgtcacaatcgccttccgtcccactcaagcttcgtcttgaccataatcttatatactcgtaatccaattccgaagatacctgctcacacatttcacttggaaaacattgttaaatcatgttgntgaggaccttcggaagccgaaggcccccaacaggggtgaataggtgatcctgtaaaatcaaacactaaatagccacaaaacttagttatagaagtgttagtgcgattaagtagttttgaggcgagttcttgtggacaaaacaatcacagagaaagcaacacangagacacgccgatttatcctgtggttcggccaagtaacacttgcctacttncatgtngtggcgtcctaat

SEQ ID NO: 11833 - DNA, 340 bp, Zea mays
agcttcttcttgtcgtcatcaaccttgacgtataaccattccgatttccagcctgccggccacttgcttctatagctgatgacaagaaactttgtggttttccgataagcaaaattatagcaaccaaagttatcatgcaatccatcttttctagccttcgtctgataatgcagctcatgaactctacaaaagctgtctgcaaacggcttcaccgcctggcttcggagggcccagatatatacgctaatcctaacgataacgttaggagtcagctgatgaaagtatatcccaaacctcttcaatacatctgcaataatcccatgcagggggaatctcaacc

SEQ ID NO: 11834 - DNA, 451 bp, Zea mays
  unsure (1)..(451): unsure at all n locations
ctcagcttggtggcggaccaggcattaagggatgatcctattataggcgctgaaaagctcaggcgtctgttagaacaagctgagtcgaaggtgtattgcggggctttngcccttaagagatatctaattctaaccaggatttcgctcgagccaacaatgtgtttgcgccttcagtgcgacttcatgtcgataatgaatcaccccaaagcacccttcagatatttgcgaatccgggtaaagcagttggaaaagggagtgtacgtcacattgaagcatcagatttgaacacgctaatgctatatatgtatagcaatattgacagcacacaagaggcgttcgagtaagtnttcctcatagttacgtccattttctcatctcataaattctatagngtggaatctccatgtttggaatatgaccaacatgnttgatgaagaatgttggaatctac

SEQ ID NO: 11835 - DNA, 353 bp, Zea mays
  unsure (1)..(353): unsure at all n locations
ctggccgccgtcgtcaccggctggtttctttcgtttaagcctcggtctgcgtgcgggagcttcttctggtcgagcgggttaccaccgggtacttgtctcggtggattgcgtggcggtcgacctcgactagcttgtcggagctgctctgaccgccgtgggccgcacgctctcgtctttgtagtcctctgcaccggcgccgcaagtgagattccccccataaggtttgccttgccctcgcccacgtacagacgtattntattctgagattaacgctgtcgcgatgggatttatcccgactccggcgatgctccaccgtagccttgtgggcggcgccgccgtcgctgtacagtgtt

SEQ ID NO: 11836 - DNA, 336 bp, Zea mays
aggacacatgcgtctcctttagggtctttctttggaaagtgcttcttcgcccggattgtgaagaggccctagaaaacctcacaaaaatattcttatatgaagaaagcacaatctcttcagaagggttatgcagacaaactgttaaggacctcggatttccttgaaagggactacatctacttgaaggactcaccaatgaatggagtatcacgtttccgcgctaaagggaagcttgaccatgatatattggaccttctcttatcttggaagatatgggccagaggcattccaactccaactacgcaaaacattgactgctgtgcatattgtgttaca

SEQ ID NO: 11837 - DNA, 173 bp, Zea mays
tgcagctgttgggtaccctgggtaaatggtggtgctcagctgggccacagaaggaaacatgagctggtgggcttatcattcaaattcttaccttaaatccgaccagaaacctgaaattgtactaaaatttgatgtctgaagaaaggttagatgatacaatatggttaatgctg

SEQ ID NO: 11838 - DNA, 247 bp, Zea mays
actgccgaggcaagacagattgaactgccgaaggtgcctatagacgagccaaccgaagctcaagaagaggcggccaaaaagccagggctagaaaaaacaatagtgttgccagaaatcttgagcccaccggcagaagcagaattgtcgaaggttgcaaaggctcccgcaataactcccaagaggagaagaatggctagcgtactagacgctgtcatggaaacaacaagggcattaactcctgctccta

SEQ ID NO: 11839 - DNA, 229 bp, Zea mays
  unsure (1)..(229): unsure at all n locations
attcgaaaaagatagaccctgtgcagcatgtcaagccaggtaacaggtgggaggagcacatcacagcaagaatgtgatgaccacatcaaggcccctggagctgctacatatggacctcctcggacccgtcgcctatctaagcataagaggaagtaagtatggtctagttattgttgatgactnttcccgcatcacttgggtgttctttntgcaggataagtctgaaacc

SEQ ID NO: 11840 - DNA, 396 bp, Zea mays
atcctctgagtcacctgcaagctgcaagctttgttccagtgcactcaagatcatgtataataccttcacgcgtatgtccgaaagttcttactactaagggcacacgcgccaacggtgcctaatgaaattgttattgaggccatgactaaagggcttctgccaggacctatagcccaatacttcgccaggaaaccctctcagaccctggagaaactgcttcagaagatggatgaatatatccgagcagataatgactctcggcatagaaaggaggaagcttacaggttctccgaaatgaccaggggcttcggagggagaatccaccctaggcacgtcagatctatccattctactcagaatgacgataggggaagtcaacaacaaagcccgcagtat

SEQ ID NO: 11841 - DNA, 449 bp, Zea mays
agctagcacgcattgtagcagccgccaactcgttctggcttcttattgtcgacggcgccgcctggggcacctccacatgcaccaccctcagcgtagactctcgcaccggcctgagcgcctccacacgccttgcgcggcttgtcacgtatgtagcctccagtaaaggaggactcctccttgttcttgtcacactggcaaaacttccactgctcccgagagagatgtatcttcccacccatagtgataggcccagagagagcctgtggttcgtcctcgtctaccaccttgaagcgaccaatcgcctcttctatcgtcatcgtggagaggtctatcagagactcaatcgagcgagcaatgtgcttgtactcttcggggatgcaacagaagaccttctcaacagctctctactcatcgtaagtgtcgttgcgaactgaccatcttctgaacag

SEQ ID NO: 11842 - DNA, 480 bp, Zea mays
  unsure (1)..(480): unsure at all n locations
agcttctaaagggagagcacattntaagattaacaaatgttctatttgagaaagacaggatttgtagcgcatcaagcagggaagcaagttggtgtccatcatccacacaagaacatcatgacgactgacaggccacttgagctactccatatggacccattcggcccgatagcttacataagcatcggcgggagtaagtattgtcttgtaattgtggatgattattctcgcttcacttgggtgttctttttgcaggaaaaatctcaaacccaagagaccttaaagggattcttgagacgggctcaaaatgagtttggcttaaggatcaaaaagattagaagcgacaatgagacagagttcaagaactctcanattgaaggctntcttgaggaggagggcatcaagcatgagttctcnttctcctacacaccacaacaaaatggtgtagtggagaggaagaatagaactctacttgacatg

SEQ ID NO: 11843 - DNA, 467 bp, Zea mays
  unsure (1)..(467): unsure at all n locations
gccttttatctcagcctcacccccccacccgcgagaccttttcccggttctttcttatcattatgaatgcgatatcgaatgtcatacttgatgcatattcactttatttgttcccttgtatgatgtactgtttgtttcccaatttgaatggatgtatgtatgtatgcttgcaatcgcatagagaacgatccagtcgaagagcccgaggaactcgcatgagaagcccctgagcagcagtcggttggtggaggcaagtgtcccttgacctatctccgtcctattcattatataattcacctcccgctttacacatttatgcctaaggatngactagctntgttaaccatgtccttgtttacctatntgggttggattattattgtttagctntatgctatttgctcaaactctaatcaatgaacatgatgagattatctatgattacgctgtttcccttctcttattat

SEQ ID NO: 11844 - DNA, 338 bp, Zea mays
  unsure (1)..(338): unsure at all n locations
agaacacgtcataagtctaactaatgttcaattcnaaaaagatagaccttgtgcagcttgtcaagcaaggaaacaggtgggaggctctcatcacaccaaaaatgtgatgacgacttcaagacccttggagatgctgcatatggacctttttggacccgtcgcctatctgagcataagaagaagtaagtatgggttagttattgttgatgactnttcccgcttcacttgggtgttctttttgcaagaaaagtccgaaacccaaaggactctcaaacgcttcctcaagagagctcataatgagnttgagctcaaagtgaagaagataaggagcgacaacg

SEQ ID NO: 11845 - DNA, 487 bp, Zea mays
  unsure (1)..(487): unsure at all n locations
agcttgcacccaggtacattggtccattcctggtgcttgagcaatgtggaccagaggcataccgactccaactacccgaaacattgtctgctgtgcataatgtgttccatgtgtcacaattgaagaagtgtcttcggattcccgatcgaaccattgaagtgacagatgttgtccttgaaccggacctgacatattctgagcaccctattcgagtcttggatcaaaaggacagggttacccgaagaanaaccctcaaattctataagatacagtggaaccagcattctgaagatgaggctacatgggaaactcaagactttntagataagaatttcccaggctttttagcctcttgtaaactgtaaagcctgcatagctgtgtaacaaataagtgacccccacatcacccttgcctcgtaccaaaaataaagaaataaaagtatgccgtgtttccttttcattacttaccctaagacttttaatctcg

SEQ ID NO: 11846 - DNA, 415 bp, Zea mays
  unsure (1)..(415): unsure at all n locations
gtggagaagtattgagtcgctttggttttagtgactgtgatcctgctccaacaccttatgaccctagtgtgctattgagaaagaatcgaagaatagcaagggatcaattgacatactcccagatcattggctcgctcatgtaccttgcaagtgcaacacggctagacatctcttatgctgtgagtaagctaagtcggtttgtgtcgaaaccaggagatgatcactagtgtgctcttgagagagtgttgcggtatttgaaaggtactatgacatacggtattcattatactggaaacccaaaagtgctggaaggatattgntagctctgggcataaaactcgagcccaaagcccgataatcgaaatacctgagcccgtacccgtttagcccgaaacccggtacccgaataatttca

SEQ ID NO: 11847 - DNA, 457 bp, Zea mays
  unsure (1)..(457): unsure at all n locations
caagcttgtgcctcgttttacgcttaaccgcttgagaaaatgatcatgtctacacaaagggaccatgtggatcctcttctcgaggaaatccctaccacatccactggtgacaaaatggacccccaaagtcctcgacctcaccatgaagattgccgagaaaatgtttctcaagatgaaagaggaagatgcaaagaaaaggggcgaataagaagaatcaagaagaaaggccgaagaagacaaaggaaagggaagaattgaatacaacgatgacttggtagaacttttggtgtcaaaggtgatgagcaaggtaagtctcaccaccgaaaggtcatccaccaaaagtaaaggtaacgaattcaataaagttcaatttgattattctagaaattttattcccaacttctcttcggcgccacttggaaagtaccaactcttagtgagtngaactatgatgagt

SEQ ID NO: 11848 - DNA, 322 bp, Zea mays
tatcatgctcccaattcgtatgctactgcactgtgtcattgtgaatgcaccgggactgcttcaaatcctctggtgcttgtagaccgagctctatgacggtgtttgggctcaattaatgatccccagtggagtgccaagcgtagaattatgtgtataccaaattcgagcatggattattatgtattgcgaccggtaaaagctctgcggagcagccactccgtcgctcgtggtcggggacccggtcttacgaagtataaagaagagaggggtttaagtgcacatgtcagagacacaagtgaatatggaataaggattctttact

SEQ ID NO: 11849 - DNA, 426 bp, Zea mays
agcttatcaatcaatcaaaacaatttgatctagataagctagaactgaattcgaagcttaaagccgaagtccagaccagctcagaattgaagaaagcattaataagccttcaagacaaatgcttgaactttggcaataattgtattggacgattaaagaagatattttactctgttggagccagcagtgggaaatttaacccttcggcggaaaatttaccccacgccttcgatcatattgaagctgaaatcgaagagcttgacgaagttatagccgggcacggcgacttctgtgcctgagtagcttctcggagtaccgctgctgcatttctgaaggccggctgcgatcatggaaaggttgtcaacaggcccaacttcaccttatcttcatcaatcctggatgatatgcccgacctcgcccgaagta

SEQ ID NO: 11850 - DNA, 408 bp, Zea mays
tttgcttcctcatttctttatctccgatggtctgtaatgtctgcaagacaggtgagacgttcctggtcaagtaaagaaagataccgagcttgtcaagtgacttatgaacatctacatggttgtctgagggccgttggacaaggacaactgtaggtgggcctaattacttgggagggtccgtcacagctggtatcggagcgtagcccttctttgcagatattatgaggcatcttcaaaaggaatttcaaaagtcttacctaacaatcttttctcttcttacctaagtattctgaagagtctatcttaaagaccacataggaagagtgcaacgtatagaaggttgaatcgactaacgttgattctgtaattatacatgcatcatgctagcactatactaataacattttc

SEQ ID NO: 11851 - DNA, 485 bp, Zea mays
  unsure (1)..(485): unsure at all n locations
agctngaccatcaccggtatatatatatatacactaaactattgatgctacacacatctggtcgctcaaatacgcgcgtatgctatgtataatggcattgcagcgcagaaattaatgacgaggcagtgaggtaagcacgcatgttccactagagtacagtacggtgcattattaattcgccacagaatgcttccgcgcatgcccctagctactaatcatgaacagtcgtatagaagatattaatctctttgtttaccttggcttttgaagtgggcaacagagtgataaagcggcgcgccggccggaccagacgaccgtccggagacaactactactagacacacacgggaaggagctaacagggacgaagccagaataatttgccactgnggtccactacaattcatgatactaataacttanggtggaaatatataatgccatacataacattaacaattcataaagcaataaccaagaactat

SEQ ID NO: 11852 - DNA, 431 bp, Zea mays
gcttatgtgtcatactacttctacttgttccgattagttaacgatgttgtactgggcagtccgggtgctgcaagccaccgacggtgtgcgggtacgcgtacgcgagcccgacggcgtggacgagcccggcggcggacgcggactgcgtggcgtggagcaacgaccccgacctgctctgctacgcctgcgcctcatgcaaggccggcgtgctgggcggcttgcacgagcagtggcgcaaggccaccatcgcgctcatcttcgtctacgtcgtcagctgcagcgcgttccgtaacgcgcagaccgaggacctcttccgccgctacaaatggggaaattattaacgatctctcccactgatctactgcgtacgtacgtacacgccgacttgaaacgggtgaaagtgcgctttctgttctggccgtctttttata

SEQ ID NO: 11853 - DNA, 375 bp, Zea mays
  unsure (1)..(375): unsure at all n locations
agcttgtggaggaccagatcaccgaagcttataagtttctggatgagaagtggtcacccaagttccgttaatgaagcaccagaagactaatcaaggaaggaatccatgtggataagttcgcaagaagaaagtttgtgtgttggcatcgatgcttcttcaataagctagctgccaagcgaaagccagaagcctaaagatgatctttgagtagctagaatcagcgtttgcaatcggcaaccagatgctcctcanaggtcgagatttgttgaagctctatctcctcgaagagtctgcaaagtgaagatatgtagctgaagtaaagctatacccataacctttctaagccgaatctcgaggacgagattcattttaagt

SEQ ID NO: 11854 - DNA, 492 bp, Zea mays
  unsure (1)..(492): unsure at all n locations
tcgccattagcgcttaaaatattccggtgtggggcttgtggatagcttgcttctgctaccttagtgcagcctctgctntgccgtcctaaacccctaccgagaagcacgtgtctaaaggcttttttttaaagagtgaattcattctagatttctagatcaggtgatgtatcataagtttattatataattntggtagaataaacttattccttatattattattaattatagcctatgaggaataaaatagggattaattaatttattttattctataaaccacacaaaaaagtgagaagaacatgaatacatccttccttctttatttacgttagacatcatgtatacctaaggtgccagtacctaatcttcggagcccctgttcgaaatggcaggattttctatgttccagcagcgagaacaaaacaacttacgggctagttggatacttatagcgtggttgggttgataataagatagtctattatctct

SEQ ID NO: 11855 - DNA, 380 bp, Zea mays
  unsure (1)..(380): unsure at all n locations
gcttctgcctatcgataatgcatggctactttcgaaagagaacagacaacgtaatagaccggccgaaaagctcggaacggaggagttggtttaattgatgtttcaagggaagaagagaacggaggcgttgattactcccatgtttaagtacgaacaanaaggggcaaaaagaanaaggccaacttaacttaactagcgccgcttctgctaccaccaccacgcgcaccacgattctccatgaacatgtgtggttggttggcagtaatggtagtgtggtgtggtggcaccaaggccatagcacagtctatcgttctacagcagagaacccactcggcaatcaagcacagcagttcgatttgttagggaattattaaaacgta

SEQ ID NO: 11856 - DNA, 336 bp, Zea mays
  unsure (1)..(336): unsure at all n locations
ctgctattaattntcttctcattcttcaggggatgtcaaattgatctgtgagactaatcttggattggtctcccaatgttgtctgactaaacatgttttcaaggtgaacaagcagcagtatcttgcaaatgttgccctgaaaataaatgtgaaggtatgtagttgcgctaactcttctaatattgattttaacaccgattctcctcttaaagttatcatacttttaaggttgggggaaggaatactgtgctttgtgatgctntggcaaggagaatcccccttgtcagtgacatagcgactattatctttagtgctgatgtgacccatccccatcct

SEQ ID NO: 11857 - DNA, 424 bp, Zea mays
agctttgagactagagatagaatcatgacatatagacaattcagaggataatacgtcatttttcttaacttctagagtaatagatttttgaacactaatgaacttatcatgttcctcatagagaatatcttcttgcttttctagaagcatatccttttcattaagagcatcaattaattcatttattttgtctattttacatctatctaatcctttaaataaatcactataatctatttcatcatcaaaggattcctcatcgctagaagaagaatacttaagagtatctcgaatacataccttcgtttctttagccacaaggcacgtgtggcattcgttggagaagagagaagacttgtcgaaagccgaagcagctagtccttcatcatcggagtcggatgaagaacagtcggagcaccactcc

SEQ ID NO: 11858 - DNA, 418 bp, Zea mays
agcttagagaaatctggtatgaatctgcgattatacccagctagtctaagaaaactccggacttggtgaacagttgttgggggtttccactccagaatatctttgactttgctaggatctaccgcaattcctttagctgataatacgtgccccaaaaactgaatttcttccagccagaacgcgcacttgctgaacttggcatatagctggagttcccttaggcgcgtcaatacaattcgtaaatgctgagcatggtcttcttcattcttggaatatatcaagatatcatcaatgaagactaccacgaatttgtccaattcgggcatgaataccgagttcattagataagtgaaatgggcaggagcatttgtgagcccgaacgacattaccaggtatttcaacaatccatatcgcgtat

SEQ ID NO: 11859 - DNA, 244 bp, Zea mays
atgttcatgtatcaatataacagaagctaccctcgttcctcttaggatgcagatgtttgattatccaaatattgaagctagctccaaatttatatcattggcatgtcaccatggtggtataagatgtcttaattgcatcttcagggacttccaaatgctggaaaggcaacacttctatcagctataacacttgctagaccagacattggtgattatccattcactacattaatgcccaatcttg

SEQ ID NO: 11860 - DNA, 303 bp, Zea mays
  unsure (1)..(303): unsure at all n locations
tgttgntgtaggtgatgaaacagctgagttctgccttttctgctccaaggtggtgcccaagaaagaggaagaacactaaacttatttggggaggaatgtttgcctcccggtgatataataataagttccgcactcgaacacctcggtatgtaataagtactctttctatattttaatatgagtggtaaatatatttatggtatccttttcgctcattctctactccgattatgtgtaatgtctgcgtgatgggtaagcgctcttggcgattgatgaaatcagataccgacttgcaagtcatat

SEQ ID NO: 11861 - DNA, 271 bp, Zea mays
aactaagtaaagcttgtcgtctagaatacccttaaaagctagtgaaccatcacatcttctaaagacagacacatctacatttgtaaatagacaattatattccatattgcataattgactaacagataacaaattatatcccagagactcaactcaaaacacattagagatagagtgctcattagatattgcaatattacctaacccttttaccttgcattgattcccatcaccgaatattattgaatcttgggaatccttattcttgacg

SEQ ID NO: 11862 - DNA, 125 bp, Zea mays
tagaacataaacaccacagcgttggtactcaatgatctatctgccatacttcatacatcacgggtagattgctgaatgggagatatctcctcactggtatctttatagaaattcaaccaaaacct

SEQ ID NO: 11863 - DNA, 253 bp, Zea mays
  unsure (1)..(253): unsure at all n locations
ttcctctaaaatacttgcatgtcgaatgaggtgtaaacggacgatgaaaataataagagatttttatatcttaaggcaaataacagaactaaaagggttggaggcattgcagaaagactagtgcagctcanaacaaagaatgcttatcatttaacttgagcttattggtacttgatttataacttactaccagcgataattacatttgcgcatttttgtattgcattccttataaggcgaaatattttcacaa

SEQ ID NO: 11864 - DNA, 365 bp, Zea mays
  unsure (1)..(365): unsure at all n locations
gcttaaactagggatgcaaccaaatatttgtgggcagaattctatttgagcaggcaaaacangtggcaagagagcgtgccatataaattgtggcgagcccctatttatacacccattatgtcggaaactggagggtcccgcttgtcaatgactggtgctattctangcaaaggaaggtgtattttcggaccttcggctcatagccttcgtccatttcgcaatataaatttatctttacagcaaattaatattgcgaggggctactgttgagggccttcngcttccgaaggtcctcaaaaatgtaattgactatgttctccaaaagatatatgtgaacacgtaccttctaagtcaagttgcgagta

SEQ ID NO: 11865 - DNA, 438 bp, Zea mays
  unsure (1)..(438): unsure at all n locations
gatcatcgatcggacctaagcactgagcggcangctggaaattcttatccaacatggcaagtcgggatgcctagccacccaattggcttagggttaagcaagtgtcaagttcagctttggtttcattaaaatcaactaaatatagctaaccctctaacactcccttaaatgctattgaatcatcacttcttctaaagacagtgacacctatatctgtaaatagatagttgtagcccattttgcataattgagaaacagaaagcaaattgtaatccaaagaatatacaagaaaaaaactttggaaatagaatggtcaggtgatatagaaaatttacccaaacctttgatcaaaccttgatttccatccccgaatgtgatagctcgttggggaatcttcattttctcataggaggagaacattctnttcttccctgtcat

SEQ ID NO: 11866 - DNA, 311 bp, Zea mays
cccatgttagtcttagcgagtaagcaagtgtcgagttcaactctattaaaatcaactaagtatagctgaccctctaacactcccttaaatgctactgaatcatcacttcttctaaagacagtaacacctatatctattaaaagacaagtggaacccattttgcatatatgagaaacagaaagcaagttgtaatctaaagaatctacaagaaaaacattggaaatagaatggtcacgtgatatagcaattttaccaagtcctttgaccaaaccttgatttccatcctccaatgtgataactctttggggatc

SEQ ID NO: 11867 - DNA, 171 bp, Zea mays
ataaagggcatgctttgcatttctcacaggctgtgtcctgtgcctataaataaagaacagtattacgctactggttacgcactctggcagatgacatcgcatctttcagaatacattctttgccaaggcataggtatcattgtattcaatgattctatatactaatgaata

SEQ ID NO: 11868 - DNA, 421 bp, Zea mays
  unsure (1)..(421): unsure at all n locations
accttcgacttgtgaatattccttggccacaagttgacctctgttcctatgtaccacaccatgctcatcttgcttgttgtggaagacccacttggttcctacaacaatttggttaggacgtggaactaagtgccatacctcattcctcgtgaagatgttgagcttctcttgcatcgccaacacccaatccgaatcttgaagtgcttcctctaacctgtgtggttaatagaggaaacaaaagagttatgttcacaaatatgagcaacacgagatcgagtgggtaccnccttatgaatatncgcgaggatggtggtcatggngtgatctcgttggatcgcttggtggactctcgggtgaggcnggcttggatcttgtcattcttcttgcttgntatgggatctccccttgtcattgtctctct

SEQ ID NO: 11869 - DNA, 349 bp, Zea mays
  unsure (1)..(349): unsure at all n locations
acttcttgattaagatgttcctaaagcaataagtgaagcaatcgacatgatacaggataagggtaatgattcaattaatcatgttatntgcactaataannncnctacgccctctaaaagtaacaagagaagaggaatacggagatgcttcaagtgcaaggcattangccacctcatcgcatcttgttcatacaaagacaaggacgaagggattaggagatgttttggatgcaacaacaaggaccacatgatcactttatgtctgatcatgaagaaatanagatgtgcattctccaagatgactctcaccaaggaaaatgaaanacagcaagcgtcatgtcaagttgag

SEQ ID NO: 11870 - DNA, 267 bp, Zea mays
  unsure (1)..(267): unsure at all n locations
tcttcttcgngagtttctgtcagcgaagaagactgctaacgcctgcgactgaattgaggatctatgcacatagtcaatggtgaattcaataaattctgtagcccatttcccattacttncagtagcttctctattcctcatgatgtcctttacaggctgtgacgaaggaacaattatgccatatgatngaaagtaatgcccaagctttctggaggccaataacataacatataacacccttttcaatttcttataaattttctttga

SEQ ID NO: 11871 - DNA, 438 bp, Zea mays
  unsure (1)..(438): unsure at all n locations
cactatagagcatgcttctagcanatttaaatttttcatttntctaagtcatgctcattgatcttagcactaagttgagctatgtgatcattntgttgtttaactaaagctaggtgatcatgaatagcatcaacattaatatctttacatctagtgcaaatggtaacatgctcaacgatagatgtagaagggttgcaagtatttaattcaacaatcttagcatgtaaaatagcattctcatctctaatattagaaatagaaacattgcaaacatttaaatatttagccttagcaattaatttttcattctcacttttaaggctagagagagaatgcattcaattgtcaatcttagcaatcanantagcattatcatttctaagggtgacaagagaatcatcactatcannttaattgtaaccttangcatcaattatc

SEQ ID NO: 11872 - DNA, 241 bp, Zea mays
  unsure (1)..(241): unsure at all n locations
acaccatactcatcttgcttggtgcggaagacccatttggttcctacaacattttggttatgacgtggaactaaatgccatacctcatttctcgtgaagntgttgagctcctcttgcattgctagcacccaatccgaattntgaagtgcttcctctaccctgtgtggctcaatagaggaaacaaaagagtaatgttcacaaaatgagcaacacgagatcgagtagttacccccttatgaat

SEQ ID NO: 11873 - DNA, 321 bp, Zea mays
  unsure (1)..(321): unsure at all n locations
cgcaacgttccacgccacatcgggatcaatcagaaagcgccgtcagcaaatcgacaacagtatgtntgtgtggaacaagatcggccgggcgaggtggcggcgatgatggaacatatggccccccgcgctttctagtggccgacgccggggctgggcaccgagccgagcatccggctgcggggagaagacgacgacgatgcctccttctcaacggtggtggtggtgagcggcggcggctgcggcaacaatantgcgagcgggtgcggtctttcttgcaccgacgacgacgctgtggatccggcacagccactacagctcgtc

SEQ ID NO: 11874 - DNA, 369 bp, Zea mays
  unsure (1)..(369): unsure at all n locations
tcaagtctagctacgggtgcataggtttcaccaaaatccaaacctttgacttgngagtatcctttggccacaagtcgagctttgntccttgtcatcacaccatgctcatcttgcttgttgcggaaaacccatttggttccaacaacattntggttaggacgtggaactaaatgccatacctcattcctagtgaagttgttgagatcctcttgcatcgccaccacccaatctgaatcttgtagtgcttcctctaccatgtgtggctcaatagaggaaacaaaagagtaatgctcacaaaaatgtgcaacacgagatctagtagttaccctcttatgaatgtcgccaaggatggtgtcgacagggtgatct

SEQ ID NO: 11875 - DNA, 376 bp, Zea mays
  unsure (1)..(376): unsure at all n locations
gcttatagatactctgagatggccagnggcttctgaggattattccaccccaggcatgtcaggtcaatccataataccagcccaactaatgataggggaagccaacccaaaggcaactgcacatcttccaatcatcagggccgcaacaaagttccttcaggccaccagctccaagaggcaaggggggcagaagcttcggaggaagatacggagatcagcccacgagactgttntgtttgttctgcggtgaagacaaatgccacaccacaagaacgtgccaagtcacgattctaagcagaaagagattgcgaagctgaagcacggcagaatcagccgaagaaagtcctacatactgcttcatgctattctccctacg

SEQ ID NO: 11876 - DNA, 294 bp, Zea mays
  unsure (1)..(294): unsure at all n locations
caaagcgagtgaaaaagcttggatcaaacttgacaagtcttatttntaagctnttagcacttaaattcttacttttcatgcaattgttggntcttgaaatatgcatgagggtctgcacttagggggagtattcaaaactcaaattactcataaaaacccctagtgcaaggccaaaatgcaaatntcactattttgcctatttctctnnaaaatatctagcctatggcanaatattttgaaaattatgagaaaatatatgagtgtgccaatacctgtctcaacaagtgggtattt

SEQ ID NO: 11877 - DNA, 281 bp, Zea mays
  unsure (1)..(281): unsure at all n locations
tgcaagctttatatacataacacaacatagaagaccgctactcttatacacaacgattcatatanaaccgcttcgtcggaacctttcttttacatatcgaatcataacaaaccatctatctcgatatttctctgtgccgaagcaaccatttaggaacacaaatgctatgaatgaatgcttatgcatgccaatgccatgatgtaatgtgcaaatgattgtccgaagcgtattgtccaagccacagttatccatcattttcttacgagcaaacacacgtcagc

SEQ ID NO: 11878 - DNA, 243 bp, Zea mays
agctggtgccaatcgagaagcagaagtctttgtttgttcttggtgtcaaatgtttgcgcgtgtcaactgtgagctcggacgggactccgaatcggcaaacaatgttttgccagaagaatttctgggcggtcttcgatgttatcgaggatactgtcctcgcctcgatccacttggtaaaatactcgacggcgacgaaggtgaacttgaggttcccttgggccgtgggtagcggcccgacaatgt

SEQ ID NO: 11879 - DNA, 96 bp, Zea mays
tccaaaatcaggttataaagggggcccgtcccaaaaggcaaaatctgggcttgggtttaaagtattaagtggaaaaagctacgttacagtgtaaaa

SEQ ID NO: 11880 - DNA, 504 bp, Zea mays
  unsure (1)..(504): unsure at all n locations
gcttttgctgtgctgctggactagtgtagcttccgttctttattcatggtggaaaaagtgacgttaaacaagttttagtgagttcacggctgccacagcagataagcatgatttagtccatctcttaaatcatggtgtggacctttgttcttgaatatttgtcgttcactagtttattttcgaactaaactgcgacaaataaaaaaaagaacggagggagtattngactggtaacttcaccagcaactgttatgcaaatcaatacttggtgatcaccanatctgagcagctgattagatacaatctatggtcctatatgcagagtagccagagcatgttgaaactgaccctcaactgtacaagcattcatgtaaaccttttacctttntcttcttctacatggacgcgttcatgaacaattgcaagctcacagtaagataagactctatttggcatccagttattatatgttgttatgcacattctgaaactaacacatacata

SEQ ID NO: 11881 - DNA, 449 bp, Zea mays
  unsure (1)..(449): unsure at all n locations
gctcagctngacgccattcgtcttatatgtgcaatggttataagacttgatgtaaatatgtagccactttctcaaatattggcagaaatgaagcaaccaaattaagaatcttgcaaacaggacacctcttctgatcagggccattattgcttgctggtccattcggccaggaaggctccacgaaagatttggagtaaaaatggaatatatgaagctaaaaataaacaaggtcactactgccatttggtcaggctcaagtgctgatccgctactatttaacgaacacccaaacaaacctgatgcagcatcaattaagatggcgttgtcaaatctgaaaagagtcctccaaagaaaagaatatccctaggctcattaatgaatgaacagttcatgtattgcanatcgtactcatttctncttgattgaacatgcgtaatcatactcatttc

SEQ ID NO: 11882 - DNA, 268 bp, Zea mays
ctctatggcactctaccaaccagaccccgtagccgagcttttcgtgctaggatcgatccgaagacttgttgcagctgcgcgctgtctaggttatctacatcgtgtgcaagtgcaaggaggagattctaacgccacaagatctgactatggagtgatgaagcgaacggagctcatcagatggtatgccttatttgtagagaagagataagagactagtggtagtcggctcaacgacaattttgttcatttgtacactacctaatactca

SEQ ID NO: 11883 - DNA, 322 bp, Zea mays
  unsure (1)..(322): unsure at all n locations
agaaagacaggatttgcagcgcatgccangcggtgaaacaagttggagtccatcatccacacaagaacatcatgacgaccgacaggccgcttgagctactccacatggatctattcggcccgattgcttacataagcatcggcgggagtaagtattgtcttgtaatagtggatgattattctcgcttcactcgggtattctttttgcaggaaaaatctcaaacccaagagaccttanagggattcttgagacgggctcanaatgagttcggcttgaggatcaagaaaattagaagcgacaacgggacggagttcaagaactc

SEQ ID NO: 11884 - DNA, 378 bp, Zea mays
  unsure (1)..(378): unsure at all n locations
gacatcttatccccttcttataccacctgccgcatgcaagctatccgtaggggtgatgtgttagtcttaagctatgcttgtggggtatttatatgcttcctacagtattatatgtgtggcgatcatatggactaacgtttctgctgcgatgaaataactggcttctatagtgnaatagatagccatgtggctaatggtgctttaagattgctctaaattggtatcttatattaaattggtatcttaatggtgaatagtagtacgttgatatttctgtgatatatccacccatttgaatgagtgttaactctgagtatgtgcatttcgtgattatagcatcaaggtttgattcttgacacaatgcatcctaaaaagtgc

SEQ ID NO: 11885 - DNA, 410 bp, Zea mays
  unsure (1)..(410): unsure at all n locations
gctttctcaccatgtatagcatacttaatgaaactttttattatgatgtnaattaatacgaaagcggtggtcatcaagcagactgttgaccttctgaccagtcagcactaaagtaggtcggctgcctttctggtagacttgattaagttgtctttagaagcattggaaactaggcttcaagagctctccaaaaagtacttatgggccttcatagcttttgggaattaaaagatatgactgtttcttctggacggatctgtagcactggactgactcggacatagctcttcttgttgattcgcccttgatatgttttcgcattcctctttggtgaaactaaataatatcaacatacacgacttatgtagcataaagttctcattagtgtttaattgaaatcataaagtagc

SEQ ID NO: 11886 - DNA, 427 bp, Zea mays
  unsure (1)..(427): unsure at all n locations
agcttatctgctntattaatcccggcctcttncgatcgttctctcacttcatattagcttccaagaagtgcaaggtgggcaagcaagcatttctttgcattatccacagcaagttgcctccttgcgctgcctacagnggtaacgacatgggtactcgttggtttccgagtaatagcgggatatgaagccgccccgctcttaatttggtggttttagattgattntatatatgagatagggactctaaaatatatnattaaatattgaaccatttatctttagaaaatatcttggacggagccgttttctctatggaacgttctctctctcgaacggagtcacttcattctaaccggcttcacaatcaaacattaccttagatgacgacgaagtgacgagaaaagtgatcacttatcgtgcgtgcatt

SEQ ID NO: 11887 - DNA, 393 bp, Zea mays
  unsure (1)..(393): unsure at all n locations
ctgcagctgggccatggagaacagaaatcttgagntatggctgtncaaatgcttgccattgtcaactgtgagttctgacgggactccgatgcggaaacaatgttttgccagaagaacttctgggcagtcttcgatgttatcgtggatacagccctcgcctcgatccacttggtaaaatactcgacggcgacgaaggtgaacttgaggttcccctgtgccatgggtaggggcccgacaatgtccaggccccagcgctgaagggccacgtgtgggcgattagctttgtgaattgcgaagagcttcccgagcgtggagaaaatttctggcaggcttcgcaggaccttgtgacccgatttgcggcgcagatcatggcaggccagtagaaaccttgac

SEQ ID NO: 11888 - DNA, 325 bp, Zea mays
  unsure (1)..(325): unsure at all n locations
caacatctgctatctcatcaactgtagcccataccagtaacttggcctttcgcatgctgtggactggatatgattggacctttcaagaaagctcaaggnggatacactcatgtattggtagcaattgacaacatcactaaatggattgagatcaagcccattgcttcttttacctctgctaaagccgtggagattatacaagacataatattcagattctgaataccaaacaacatcattactgacttaggattccacttcacaagtcagagttctttacttctgcgagcaaaagcatttattcatatatgcatctgagcacatt

SEQ ID NO: 11889 - DNA, 409 bp, Zea mays
  unsure (1)..(409): unsure at all n locations
agcntttatntacttcctacatgcntttaatgtctttctttttctgtggtgatgccaaagggggagaaagttatgggccaaagcaatgaaaactatatcaaacaccaaacaccaccaatttaaaattttatatctacaaatggctttttaagtggntttggttatttggtccaaaaataggaagtaagttgtaaggaaaatggaccccgggccttttggctaattgagttttggtgtttgatgaacaacacaatccgtgaactaataaggtntctaagtgttgtgtttgtagttcacaggatgcgaagaggattggaccaacgcaatgaggatgcaacacctcanatgaagacataaaaagatgcatagaagtccaagactcaagaacaaaagaagcccatagaaatca

SEQ ID NO: 11890 - DNA, 479 bp, Zea mays
  unsure (1)..(479): unsure at all n locations
agcttctaaagggagaacacattntaggattaacaaatgttcattntgagaaagacagggtttgtagcgcatgccangcgggaaagcaagttggaacccatcattcacacaagaacatcatgacgaccgacaggccgcttgagctactccacatggatctattcggcccgattgcttacataagcatcggcgggagtaagtattgtcttgtaatagtggatgattattctcgcttcacttgggtattctttttacaggaaaaatctcanacccaagagaccctaaagggagtcttgagacgggctcaaaatgagttcggcttaaggatcaagaaaataagaagcgacaacgggacggagttcaagaactctcaaattgaaggttntcttgaggagganggcatcaagcatgagttctcttcttcctacactccacaacaaaatggtgtagtggagaggaagaatcaactctattggaca

SEQ ID NO: 11891 - DNA, 376 bp, Zea mays
  unsure (1)..(376): unsure at all n locations
accttattcatggagtcgatggtttaaggtcgggctntgcgtggatctgtggctcangcgggacaatatcggcagtttagggtttaggttgctggaagttaacgcgctagtggttggggttctggtgcgaattgggtgctcgggatgttaggtttggacggctgagcttccattgagcggcgtggaggatgctgaangagtgcagaggtccagctcaagtgcttcttttatagttcgtttgctgaaattgtggatgcaatttgcacccgtagttntgtactccccgtcccnattaaaattcatttagatgacagattctacatacttatgatgtgtatacctattgaattaacataaaaccgaagctaaacaatct

SEQ ID NO: 11892 - DNA, 231 bp, Zea mays
  unsure (1)..(231): unsure at all n locations
gctctgaccctgcttgcagaagtttctctgttatttgttatattataagtggcgataaagngttaggtgactatccaggttctcaccgccatatgaaacttttgcatcatgtcaattgctgtgggaatgctcgcggagatcacttgtatgtaccctatccaacacagggcttaccgatcagggatcgacnatctggtggtgcttctgatcggaggaattccgatggtcatg

SEQ ID NO: 11893 - DNA, 432 bp, Zea mays
  unsure (1)..(432): unsure at all n locations
cttcatccccacatgtgctaagcggctatgtcctaccagcccatgctagtcttagcaattaagcatgcatctagaccggcctcttctnttgcaaaatcaactaagtaaagcttgccgtctaatacacccttaaaggctagtgaaccatcacttcttctaaagacagacacatctacatttgtaaaaagacaattatatcccatattgcatagttgactaacagatagcaaattgtaaccaagagactcaanctataacacattggagatagagtgctcattagaaattgcaattntacccaactcttttaccttgccttgattcccatcaccgaatataattgaatcttgggaatccttattcttgacgtaggaggtgaacatcttcttctcccccgtcatatggttggtgcatccgctgtcgataatctag

SEQ ID NO: 11894 - DNA, 451 bp, Zea mays
  unsure (1)..(451): unsure at all n locations
cccctgcgagacctttccccatttctttctaactctggtttatgcaatatcgcatgtcatattctatgcatgtttaatctatttggtctcttgtatggggtactgtntggttcctaatttcaatggatgaatgtatgtatgtttgcactcgcatagagaacgatctggttgaagagcccgaagaactcgcaggagaagcccctgagcagcagtcggttggtggaggcaagtgtcccttgacctatctctgtcctattcattctttaattcacctcccgcattacacanttatacctaangggattactaacttttgtatccatgtccttngttacctatttgggttggattatttattgttagcttatgctattgctcaactctaatcaatgaacatgatgagaattatcaatgatacgcttgtttcccctcttttattatgatgttatac

SEQ ID NO: 11895 - DNA, 423 bp, Zea mays
  unsure (1)..(423): unsure at all n locations
atttataccctgccggntatcccgaacacaaaattangagaattcactctagcaagtctcactctggctctaagcatgcttttatgtataagagtgaggcatctagttctaggcaatccactcatgttaaattgcctaanaagaaatctcctatagcatcaaatgaacctaatatttcatttaagacttttgatgcttcttatgtgctcactaacanatcaggcaaaatagttgccaaatatgttatgggcaaacacaagggctcaaagacttgtgtttgggacccaatgtgcttgtttaatgtcaaggacccaaacgttgtgtactaaaaaaagcctaaattgttgatgttatgctccgggctcaggtggacatgatacggtgacaaccactgaagggagaangatgtctctctatagaaac

SEQ ID NO: 11896 - DNA, 352 bp, Zea mays
  unsure (1)..(352): unsure at all n locations
aatgccgaaaaggcacttcctactacctctgtcattgaaaaatgcaaacagcagacttcatattnttcctatgntcttcataacaaaacattaactattccaagggttggggtgctccctgngtccttaattaaatcacctttcttatttcctttaactttaaacacaatgtgaaataaatggcaaactctaccttaatgangtgtacagagacgtntatcattnttaaacaggttagtaggtggtcataaacttctccaaattntcttaactccagttaaatagtgcaactaattttcttcccatatttatcttttggcaaatcagatttaatcaaaactctaaagtttct

SEQ ID NO: 11897 - DNA, 448 bp, Zea mays
  unsure (1)..(448): unsure at all n locations
gcttgccggtcttctgctgagcacgtccctaaactttttctctataccgcggcccaagcgtgacttgcgaccacgtcccttgccttgngatgcttgtttgctggntctaattttccaagacgacgagatgtacgtacactccactggtgaaggcgacaacggcagttttctctatgtagatttgtacatttcactcttttatatagagtatggaccatgaaaccatgattgggtgttcgttcatctgagctcattttaaagtgtttggtacgcatctaggctactgacgttgtgtatgggcagtcagtgcgtacctttgctacatatttgtctttcattcaccattgacacgcacagatgaatgatggtattaggtgtcgacattgcaacagaaatatttaagggtactgctgatgtataacttacaataatgagaagattccaggca

SEQ ID NO: 11898 - DNA, 383 bp, Zea mays
  unsure (1)..(383): unsure at all n locations
atgccactggagcaccaacattngaaaccttaccgccgaggatcatttcaagtcggcttaccaagtctacagaaggaattctcctattggtaacccgagttgagtctgccagccctcgatacagatatgccggataggccctatcttttagtggctgaatgttcttaaaaacaaagtcagtgaccaccgcttcagcagttagacctctctctttcagcaatccaacttcaaacaacaacacaccttgctcaggcacttcctgatccgtgggagactcatgccaactcggagtgcgaacgtctagctgtctttctgaccgggaagggagagaatntccataattatcaactattaaccactctagacgccaccccttaatacta

SEQ ID NO: 11899 - DNA, 198 bp, Zea mays
ggagtggtggccaaaaagcgtgcaaaatgaggttgcggtatggccgtatttatacgctcggtacgttgaaagatgaaaggccccacttgtcattgaatgttgctattctatcacagggaaggtgttgtttcggaccttcggcgtaaagccttcgtccatatcgcaatctaaatttattatttcaaacaaattaatatt

SEQ ID NO: 11900 - DNA, 461 bp, Zea mays
  unsure (1)..(461): unsure at all n locations
agcttgcacagtatgtccatgcagntctaactttggctactttaaacttgngaaactatatccattattttcaccaccttgtccttgttgtgcaactccacttacaatgataatgatatatttcaggaagcaagtaaagacgttgggcaagtactttgtgtttagctntntctggggcttctttcaggggttctacactgcaggggatgagtgtggattcaaaaattttccaacattgggccttgaagcttataacaataggtcagaactgtgaactatcctacatatgacacttgctgagtataatgtccaatatgtgaaatattttatactaaatccatctggtgagagcttgtgaattcatctgtggcatctcttgttatactgcacaagtaanacaacagttatttatgtcaagcatctgaacttcatatntgtgtacatatggacaaaatcaatct

SEQ ID NO: 11901 - DNA, 522 bp, Zea mays
  unsure (1)..(522): unsure at all n locations
gcttaatatatggaggacatatcctgtgcaatcactcattttgatgcttgcgtgcaatcaaactatccagagcatccaattcagatccaatgataaggngttaaaagtaaaataggtactatgttttaggtgaaagagattaaatataaaataacagtcatcattagatctagatcggatgcaccagatcgcttgattgcatggntgcaccaggataagtgattgcataggatattttccctaatatatgagtcatgtcggggtctcaagttaagctcacaggctgatctatcacggcttatttaactaagcactatcgaagcctactaaatngtggtggacccagcccaatatatattctggattttctgtttatgtatatataggntntaaatatggctggaccacgtgttgacatgtatatatagtctataattagagatatactnttgcgggtcttataantanggatatnacttttgcggacatgtgtatgtcaagcccgcccacatgtgacatgta

SEQ ID NO: 11902 - DNA, 420 bp, Zea mays
  unsure (1)..(420): unsure at all n locations
ctgcagcttggcttacttcagctaccacatatagtgccttctcacaacccctgaaggacataatgaggaacagagaagctacagtaagggccggaaaatgggctgcagaactcaatgaattcaccattgattacgtccatagatcttcaatctagtccctagcgttagcagacttcattgttgatcggacgccagaggctcangacaaagaaagaataagcgatgccgaagcttggacattantttgtgatgggtctttggggactttctgcgcaggtgcagctgcgcgtctatgtgcaccatctaaagtcagaacctgttatgcagtaaaattggactttggctgcataaataatattgcatagtacgaagcccttcttttggggattcagaattaatattgcaccatctaaaggcaat

SEQ ID NO: 11903 - DNA, 506 bp, Zea mays
  unsure (1)..(506): unsure at all n locations
gcttcgcagnttgagacccaactgggtgctactcagtttgatgataattacgaaagacaacagcatatccgtacagtccttgagacctttcccgacgaatcggatgtggtttcagatcaacaggtaatttgtccaacgacaatactatntttactcattatacgtacatgtatgcatacttctttntagcagtatgcgaaccacactnttttttgtcaacaggatttctgttttgatgttcgaaacataagtttgaggaacacaaatatcacacctcaaaccacatcagcttgcacctgcttgccaaatttacgtgacaccggaaaaaatggttgtacagccatgtatatgtataatacatttactatcatacaacacagtatactattatataccttggagagagggcaattgaacagaagaatggacacaatgcagtggccagtnttgacaaccccactctcatgcagatgatacatacatatacaaatgctttatgaataact

SEQ ID NO: 11904 - DNA, 448 bp, Zea mays
  unsure (1)..(448): unsure at all n locations
ttacttcttcatattgaagttattaatcatttcttataagcaagncaatatgagaacatgtatagcaaaggtatgaagtagattctaatggataagtgcattaatgagaaggagattgaatgcatatcttagccaatttaagtttaataaagaatctattttttcacaaagatataattagagtgaacaatcattgatgggaattaaattaaagagatgagttcccgtacctttgctttgactnnttcttcttttgggtgaagagtaccctttgaggcttgtggctntaaccttgcactttctctcttgtagatttcataagtaggctcaagagaaatgttaatagcaacataagcactagtttccctttttggtattatttttgataaggaatgaanagtgaattactaaagcatgggaaactntaaatatgaactagattattcct

SEQ ID NO: 11905 - DNA, 497 bp, Zea mays
  unsure (1)..(497): unsure at all n locations
ttcgcttcagtctatcatacgcagnccaacggtgtcgtggagcgtgccaatgggaaaatatgcacagctgtcaaaaagatgctcctccatgaaaaaaaaggcagatgggcctgattattaccggaggcagtctgggcgctaaacacaactgagtgcagggcgaccgggttcactcctttccgccttctatacggatcggaggcaatgaccccgcaagaaataaagcatgggtccccgtgtacagttccgtcagccgttcccgacgtggacgagccaacttcaaaagatctcattgacggagaccgggtctttgccctacaggcgctaaacaaataccaagcccagaccatagcatggcgcgaccacgcagtcattccgatggagttcagcgagggggacctcgtacttcgtcgaacagctcggacggagtccaagggcaagttggagcccaagtgggagggcccctcatagtcaagtaaaagcttccccagcgctac

SEQ ID NO: 11906 - DNA, 269 bp, Zea mays
atccaaacactatattctctatagccctgggcccacatgttaggggccagtccctatgtgcatgccccccttcaactataaaaggggaggcatgcgacgttacacacacacgccatctcagactcgctagctcatacaaagcctcaagcaatacatctcacaatggagattggtattactcttcggcggccccaaccaactttaatacccctgtgttcttgtacactacttcttctcttcatcgatcaagcgaaacgcctaagcccctt

SEQ ID NO: 11907 - DNA, 416 bp, Zea mays
gcttgtatatgttaaagtcgtgtcaaatatcttatgccactatctctggggtttgcgttagacatacaaagatattaataacttgcacaccttgttctcttgaccctttagtataaatccatcaaggtgtgccatatagagtttctcattgaagtctccataaattagttgatagtgatagcattctcttttaacgtcctccatgtgccctagtgtggcggacatctgatggacaagaagatcatacgagacagcttagaaaaatagtacttgaatagttgcattctagcaagagatgagtaagtatcaacgaaatcttcacattctgtccgagtatatagtctttagccaccagtatagctagctctgtacttctcatttgtatcattagacttgaacttcttttacacatttac

SEQ ID NO: 11908 - DNA, 378 bp, Zea mays
  unsure (1)..(378): unsure at all n locations
aatgcaacgggttgagcttctgatgtggtggcatcatcaagctcgttgatcttcctcgatccttcgatcatgcattcaaaactcacaaaattcccgataactttctcgggggtcattntggtatatctaggattaccacggattaattgaacttgtgtagggttaaggaaaataagtgatcttagaataaccttaaccacctcgtggtcatcccactttacgcttccgaggtgcgcgcttggtcaccaaggtctgagccgattgacatgtgttgtggctcctcccctttgcaagccggaaccgaccgagctcccnctcaatcgtttcccgcttggtgatcttggtgagctcatcaccttcatgcgcggtcttgagtaa

SEQ ID NO: 11909 - DNA, 344 bp, Zea mays
  unsure (1)..(344): unsure at all n locations
tttcttctatggctntgaatgcgaggggttgcacatcangtgtggaggtggcgccttgctccaagttgacaatgtgtttggagtctttgatcataagttcaaagctcacaaacttgccaatcaccttctcgagagactgagagcacctagagggggggggtgaataggtgatcctgtaaacttcaaaacttaagccacanaactttgattaagtggtatcacagttaatgccaagtggctagagagaagatcttgcacaatatgataatcacaaggagtntcaacacagagaagacacagtgatttatcccgtggttcggccaagtacaaaacttgcctactcc

SEQ ID NO: 11910 - DNA, 202 bp, Zea mays
  unsure (1)..(202): unsure at all n locations
ttctgggtgaccccatatttcttcgagctctgccgctctcccttgagctggtggctaaagagctctgtgatgtctcaagaatggaagngtgtatgcctctaagctggttccttgtatcttctactgagctgggattatctacatgcctaggggtctcctcaagccctatcatctaaaatcataacttctccttcttgtcgaa

SEQ ID NO: 11911 - DNA, 353 bp, Zea mays
  unsure (1)..(353): unsure at all n locations
cgaaatacaaaccttcgacttgtgaatatcccttggccataagtcgggctttgttccttgtcaccacaccatgctcatcttgcttgttgcggaagacccacttggttcctacaacattttgttaggacgtggaacaagatgccatacctcattcctcgtgaagttggtgagttcctcttgcattgccaacacccaatccgaatctcttaatacgtcttccaccctgtatggctcaatagaagacacacaagagtaatgttcacaaaaatgagcgacacgagatcgagtggtacctccttagaatatcgcnaggatggagtacggcggatctattgattgttgtggactttggg

SEQ ID NO: 11912 - DNA, 361 bp, Zea mays
  unsure (1)..(361): unsure at all n locations
tgtctggaaacatgtcgttgaccaagtcaccttcaccaatatggatgcatactcaacctttatcttgtgacaggtccatccatgggtggtcggtntgaagctacaccaatgttcccgattgtcgctgttgtaagaatgccctgagcctaccttcancttcacatccatccaagtatctattactgcagcaacaaccatgtctcctaaggcactcggctcaataatgacgcccttaaagagctggatttcttcacataacccactggtagaacagcccacacacaaactgaaactgccttctacttcagatatgtgtactttctatcgtcgctcaactgctagncaagacgtgatacagtat

SEQ ID NO: 11913 - DNA, 370 bp, Zea mays
  unsure (1)..(370): unsure at all n locations
agaaacgattcgagctccgagcgcgtagcgaccccaccttgcagagttactgttcggtctctgcggtccaccacgcagcgagtgcgagcaggtgtccgcctggtgtaaaaattctggcgcttcgccttctctcctgcagcactatataaacagacgagtaggtgtgaagttaccacagcattcattgctatttgcactgttntgctgccaaaaattttaaccatcgccgaagcttgtctgtcggaatcgaacgaagctccagtgtgaagcctgcttcgtcagagaaaacttcggaagaagaaagtattaaatttccacatattcataattaaatggccagagtgcgttctactgccangggtgaacgtga

SEQ ID NO: 11914 - DNA, 342 bp, Zea mays
  unsure (1)..(342): unsure at all n locations
cattgagccaatggcttaccccacntggctctccaatgtgtgaatttactctcgtggaagtcacggtcatacgaaagtcacggtcatactaagttaaatttactctgttggaagggcacgaccaataatttcatgacagggcagactaatggtgaatatagggagccaactcatattcagaatggcacaatttctatacatgtatatcagcactgggaatttatcagaaaagtaaaccattcttaccagacgacacaatttccacagaccaaagcaatgcaagcattcctacctacatgacatgggagaatattganggattcatggctattaagaatacat

SEQ ID NO: 11915 - DNA, 285 bp, Zea mays
  unsure (1)..(285): unsure at all n locations
acccgtctgtttatatagtggtgcangtgtgaaggtgaatcgtcaagtcgcccgtacccgctcaacagtcacccgcacccactgaacggtggaccacggtgtgtgagagatgaatcgccagatcgcgagtacccgctacatggtggggccacctcgcgctcggattatgttaatcgtttcccggcaacgagctcaagaaaggtgtntttcggaccttcggcattccgaagcctacgacaatttttcacggatcaagcttcgttacgaaaacgatctatcaccgcg

SEQ ID NO: 11916 - DNA, 467 bp, Zea mays
  unsure (1)..(467): unsure at all n locations
gcttgacattcctaactgatacactgtatacaactgttcattgtctcctaacatgtagacaagtccatgtgttcagatttcacaaattcatttgctaataaaaaggagaattaaacttgaaaatatactggattaccagtgcccagcagaggtcttgttaatgggatcacatttattcaccaagcatgaactaaaaattaattgtattataccatctgttaaaagattctcattccttcttcaatgcccttaaactggttgtgatccaagtacatcagaacccaatccatttcagaagacatgaaactctaccagtgaagacacgaatgttcactcgtgaacaaaagtatgagggttatattctttaacaaccttcttaagttccanaagaaatatgcacggatatttcaacacaagtctagtaggttgtgggtcatgggcaatgatatcaattcaatactatatat

SEQ ID NO: 11917 - DNA, 415 bp, Zea mays
  unsure (1)..(415): unsure at all n locations
cctctaagcacctgcgggtgaagcttggagatcttatttcacatgtgctattcggcgatgccagagccagcccatgtgagtcttagcgattaagcaagtgtcaagttcagctctattgaaatctactaagtatagctgaccctctaacactctcttagatgctattgaatcatcacttcttctaaagacagtgacacctacatcagtaaatagacagttgtagcccattcgacataattgggaaacggagagcaagttataatctaaagaatcaacaagaaaaacattggaaatggaatggtcaggagatatagctaatttacctcaaaccttaaccaaaccttggtttcatccccgaatgtgatagctcgttgcggatcttgattntctcataggaggagaacatcttcttctt

SEQ ID NO: 11918 - DNA, 147 bp, Zea mays
  unsure (1)..(147): unsure at all n locations
tgcaccttatctgaccgcgctctcatcgacaggccgaagtgaccgcagtcacttcgcccctccactgaccgacctgacaggaaaacnagcaccgctgccctgcttcgactgctgtgccacccgctagggtgaggctgacagtaacca

SEQ ID NO: 11919 - DNA, 418 bp, Zea mays
  unsure (1)..(418): unsure at all n locations
gaagataatgagtatcctaaccatgtgtataaactctctaaggcgctntatgggctcaagcaagccccaagagcatggtatgaatgccttagagagtttcttatcactaatggcttcaaggttggaaaggcctatcctacactcttcactaaaactcttgaaaatgacttgttngtatgccaaatnntatgtgatgatattnatattggttctactaacgagtctacatgtgaagaatntagtaggatcatgacacanaaattcgagatgtctatgatggnggagttgaagtatttcttaggatttcaagtgaagtaactccaagaaggcaccttcctaagccaaacgaagtatactcaagatatttctaagcaagttgggatgaaggatgccaaacccatcaagacactcatgggaa

SEQ ID NO: 11920 - DNA, 277 bp, Zea mays
  unsure (1)..(277): unsure at all n locations
ctgatcacgacgcgcacacagattgtctncgacgtggttcgtaccggccatggccggtgacggcggctactgccaactaccggggaggcattacttacctatgacagcctcggaacatacaataattggacctaaacaccccgagaacgacccggccacgagcacagcggaaaccgcggcgtcgatcttatgttctcaantaaccacggcccgaattggtcaagcggatgctaccgngagctttaccggcctacatagctgctagaacaatagtgga

SEQ ID NO: 11921 - DNA, 426 bp, Zea mays
  unsure (1)..(426): unsure at all n locations
cttagtagatttactatagagaatgatgatctagatgtttgttacttgctaanactaacagggggtggctctggcatcgccgcctagcacatgttggtatgaaaaaccttcataagattctaaagggagaacatgtgttaggattaaccgatgtctattttgagaaagacagacattgtgcggcatgccaaatagggaaacaagtggaaacgactcatgcaagcaagaatgtgatgacaatgtcaagaccatcagagattcttcatatggttctcttcgggcccgttgcttatccttaacttcggggggagtaagtatgggcttgtgattattgattactattcacgcttcacttgngtattcttttggtaggataaatctaanacctcagaaaccctcaagcgcttcttaaagcgggctaaaaat

SEQ ID NO: 11922 - DNA, 355 bp, Zea mays
cagcaatatggtggagaaaagatgtatgcagcttttttcttgattcacagcggctgcggtaccttattgtaagcaccacttgttcttgcagtcttaaattggcaggataatctacaaacaagcgtatttttacttatacctcattgctcttagctgtgtacgcggaatggaacagcggaatgagtctagggctttggatatatataaactgactgatatgtagggagaaagagtgttctgcccttactttacaaaagttactgttatgtgggctaaatagggctgaattgagggatatttatttaacttactgttcggcctatcacagggggtctgttgacccccccccccccct

SEQ ID NO: 11923 - DNA, 402 bp, Zea mays
  unsure (1)..(402): unsure at all n locations
agcgattcagaatgttcggaacataatgatattggttcaatgtaatctcattctcaccattaatcaattntatgtttagtataatatttgcctctcccaaatccttcatatcaaaattntgagacaagaatgatttcagatcgtttatcacatcaatactagttccaaaaatcagtatgtcatccacatacaaacacaatactagtcccttaccacccaaaaaatcgatagtacacaccaagtggtaggcttcgtttaccacaaagtctggtgatgtcaaagttctatcgaacttctcatgcctttgctttggcgcctgctttanngccatacacgaatttcttaatctacacaccatgttcttctatccaactatcacaaattcatctgggtgattcatat

SEQ ID NO: 11924 - DNA, 254 bp, Zea mays
  unsure (1)..(254): unsure at all n locations
gcaagcttctaaagggagagcacattntaggactaaccaatgttcatttctagaatatacatggttgtagcgcatgtcaagcaagaaagcaagttggtgcccatcatccacacaagaacatcatgatgaccgacaggccgctggagctacttcacatggatttattcggcctgatagcctacataagcatccgcgggaagaaagattgccttgtattgtggatgactattcttgcttcacttgggtattctttt

SEQ ID NO: 11925 - DNA, 218 bp, Zea mays
  unsure (1)..(218): unsure at all n locations
attaatacttctgagccatacagcgaaaacacctttccttctttgcgtacacagccgaagcatataaattaaaccttcctttcggaacccgaagcaaagtttgtatgttatgctgatgatgatcctatgcatgtctaagngaatggttatgaatgcaaatcgcatgatgtattgcatcgtgcanatgaatgtncaaatacatattcgaagccataatc

SEQ ID NO: 11926 - DNA, 318 bp, Zea mays
  unsure (1)..(318): unsure at all n locations
gcttatgccacccccaccaaagatgaagtctccttcgaagaggatgatgatgtgacatggtggcacaacagtagctgcaaggagccttgaaaaggctaaaagtacctttggnggtacttaaggatcctaatgtcgcctagagggggtgaataggccaatataaaacttttaactctattcaactcaacttacttgattntatcggtagcagcagattaatgtttttgtccaactaagtacatgtacttcacaaacacttaaaccaaatatacaataagaagggggagtaatgtaaatatacaaggggacaagacacac

SEQ ID NO: 11927 - DNA, 389 bp, Zea mays
  unsure (1)..(389): unsure at all n locations
gctgtgaattgtcttctatagaagcatanaatctgatcacccctaatatgaaatttgatggcacggcctcggtacgccaacaagggaagaaattaaatgcatgaacccaaattacacagagtttaagttcccacaaatcanagcacacccatggcacaaggtgctcaaatctttctacattttgttacaatactctaagaanactgttactgtngngttactaatttactntttgtacattntatctttcaggtattccacanaaggatgccgccagaagctgctgatctggtctctcggctactccagtacttcccaaatctgagatgcactgctgtaagtgcatgccattgtacattatacatgatggaaatacncctggtgacttt

SEQ ID NO: 11928 - DNA, 266 bp, Zea mays
  unsure (1)..(266): unsure at all n locations
atctgctcatatgcgacatccaattaacgtataacctggntatttcgggtgagctggcccaaacagcaataggttttatggcataatgtgttgatgtatggatcatacttctgtcaacaaatcagcataaacaaagtattgtaactgcataaaggtgtgatagattgcatagtatacatttgtgtctccatttaactataaatttataatgaattggtatttgataaatcaagcaattggcaaaataataatgtgaactctatcta

SEQ ID NO: 11929 - DNA, 93 bp, Zea mays
accggtcctcccgggggctggggccacttaatctgtcactgaggccggcgatctctagccagatgcacccccatgtacgaaaaggcgacgcgc

SEQ ID NO: 11930 - DNA, 123 bp, Zea mays
tcacgtcgcgacctagcacgagctgcactagagatttactctgatgacctgtcgtggtgttaatgaatgacctttggttttgtgggctcacagaaacgacagcgtgctgcacagtaactgatg

SEQ ID NO: 11931 - DNA, 439 bp, Zea mays
  unsure (1)..(439): unsure at all n locations
ctgcagcttaaggctttacctttacacaaaggatgtatagggaactatatgagtattctctaccaagatcaaaagaaataagaccacacatgaaagtggtatggccttttgtccaatggaatgacagatgttggttgatctctctacaaacaacaagaaactggtttaaggaatgagtccacagaagatcacacatcagtgtagtttcacaatggatcatgaccagagacttctataccaacatgcgccaagcagcataatcctgtgtgtacattcacaggaggctctcagtttcgccgcggtaccataagttcttaaccatgacactattacanaactggcaccaataatggatccacgtgataagaacgattngcgtaaagatacatattgatataatctcataatggattatgactactaactgtgatacaagcgt

SEQ ID NO: 11932 - DNA, 302 bp, Zea mays
ccccccgcgattctcgagctggaacaacatgactaatgtattttatcgaacaacaagccagcaacaacatatgcttgctaaaacttccttacagataaactataaatatgcaaacgaataagacgtatacggtaccgagataaaacggaggcgaactccgcggagtatccgttacctaccaatctagtaaacattcatcacgtatcaaataatatactacattagtccgtaattgtacactacactgcaataatagaattattaacacaaatactacaggcaaatacaccgcaacagacaca

SEQ ID NO: 11933 - DNA, 430 bp, Zea mays
  unsure (1)..(430): unsure at all n locations
agacaggatttgtagcgcatgtcaggcagcgaagcaagttggtgttcatcatccacacaagaacatcatgacgactgacaggccactcgagctcctacacatggacctattcggcccgatagcttacataagcatcggcaggagtaagtactggctagttattgtggatgattattctcgcttcacttgggtgttctttctgcaggaaaaatctcatacccaagagaccttatagggattcttgagacgggctcanaacgagttctgcttaaggattaagaaaataagaagcgacaacgggacggagttcaagaactcacaaatcgaatgctctcttgaggtggagggcatcaagcatgaagtctctttctcctacacgccacaacaaaatggtgtagtggagaggaagaatcgaaactctattgacatg

SEQ ID NO: 11934 - DNA, 512 bp, Zea mays
  unsure (1)..(512): unsure at all n locations
agcttcttgtagctgctgccaaaaatgggaggtgaactgngntcctctatctgacactatcttcttcggcacaccatgaaggcagactattcgggacatgtataactcagctaatgttgctccggggtatgttgtcttcacaggtataaaatgggccacctttgttaagcggtccacaaccacccagatggaatcatagccggcccgggaacgaggtangccaactataagatccatcccgatctcatcccactttcactgaagaatntgcaatggctgcaactgtccggcgggcctctgatgctctgctttggttctttgacagctatcacaaatggcgacatattctgcgatctctcttttcatgccataccacccaacgctctttttagatcctgatacatcttttcacttctagggtggatggagtaggctgtctcatgagcttccttatgatcaactccgaatatgtttgatgtcgggacacacacgcggtcttgagcatatactcc

SEQ ID NO: 11935 - DNA, 360 bp, Zea mays
  unsure (1)..(360): unsure at all n locations
agctntaccaaatggacgtgaaaagtgccttcctcaatggaccaatcattgaagaggtctatgttgagcaacctctcgactttgaagatagtgaataccctaaccatgtctataaactctctaaggcgctttatgggctcaagcaagccccaagagcatggtatgaatgcctaagagaattccttatcactaatggcttcaaagtcggaaaagtcgatcctacactctttactaaaaccattgcaaatgatttgtttgatgccaaatttatgttgatgatatcatatttgggtctactaacaaatctacttgtgaagagttagtagaataatgattcanaaattcgagatgtctatgatg

SEQ ID NO: 11936 - DNA, 350 bp, Zea mays
  unsure (1)..(350): unsure at all n locations
gcttctanagggagaacacgtgataggggtgactaacgtgcatttctataaagatagaccttgtgcagctggtcaagcaggtaaacaagtgggaggagcacatcacagcaagaacgtgatgaccacttcaagacccctggagctgctgcatatgggcctcttcggacctgtcgcctatctgagcataggagggagtaagtatggtctagttattgtagatgaattttcccgcttcacttgggtgttctttttgcaggataaatccgaaacccaaaggactctcaaacgctttctcaggagaagctcaaaatgagtttgagctcaaagtgaaaagataagaagcgacaacg

SEQ ID NO: 11937 - DNA, 237 bp, Zea mays
  unsure (1)..(237): unsure at all n locations
gtcatattctatgcacatttaatctacgtgttctcttgtatggtgtactgtttgttcctaatttgaatggatgaatgtatgtatgtttgcactcgcatagagaacgatccggttgaagagcccgaagaactcgcacgagaagcccctgagcagcagtccgttggtggaggcaagtgtnccttgacctatctctgtcctatacatactntaattcaccttcctcattacacatttatg

SEQ ID NO: 11938 - DNA, 381 bp, Zea mays
  unsure (1)..(381): unsure at all n locations
gccgggaggttgttctacatacactagttcactaatcttaccatttagaanagcactctntacatccatttggtagagctggatattatgtgcacaagcataagcaagaagaatccgtattgcttctaatcttgccacgagagcaaatgtctccccaaaatctaatccctcaattcgagtatatccttgtgcaactaatcttgccttgtttcttactaccacaccatcttcattgtgcttggtgcgaaacaaccatttngtaccaataacattgtggttctttggtctctcaacaagctcccaaacttcatttcgagcgaagttattaattcttcatgcattgcattcacccaatcaacatcaagtagagcttcatctaca

SEQ ID NO: 11939 - DNA, 292 bp, Zea mays
  unsure (1)..(292): unsure at all n locations
gtgagtatcctaaccatgtctataggctctctaaggcgctttatgggctcaagcaagccccaagagcatggtatgaatgcctaagagatttccttattgctaatggcttcaaagtcggcaaggccgatcctactttatttactaaaactcttgcaaatgatntgttcgtatgccaaatttatgttgatgatattatatttgggtctactaacgaatctgcatgtgagggaattagtaggatcatgacacaaaaattcgagatgtcaatgatggnggaagtgaagtacttctt

SEQ ID NO: 11940 - DNA, 165 bp, Zea mays
tctttatttgcttcttttcctgacccctggcgtccagacagcgatgaagtctgctaacgcctgggactggatcaaggatctatgtacataatcaatgttgaattcgttaagttccacagcccactttccaatccttccagtagcttctctgttcctcataatatc

SEQ ID NO: 11941 - DNA, 330 bp, Zea mays
  unsure (1)..(330): unsure at all n locations
gctcaaattgagcttaaacttcgcttttctttcttactttgttatttcttaatcangatattatctttgtctgcagcttcatttctcagcttgaatacttctgaccgaagattgccgagggctatctagcagctttcatcttcaacattcttctgcgccctcaaagcgttgctaataactaaagccctgcaaaaagataggatcagcacgagaatcaatgcagatattattttaagtcatactccgaccttagactgtgacgcaagtgctgcaagcatcttcacatgcggaaagcagcttcaacttagaattcatattttggctctccac

SEQ ID NO: 11942 - DNA, 543 bp, Zea mays
  unsure (1)..(543): unsure at all n locations
gaccgcgatctctgagtcacctgcngcagcaagcttgccatacctgtcanagcaacagcacatgccagcacagcagctacagaccataccagtaacttggcccttcgcatgctggngattggatatgattggacctttcaagaaagctcaagggggatatacccatgtattggnggcaattgacaaattcactaaatggatagagttccagcccattgcttctttaacctctgctaaagccgtggaattcataccaagcataatattcagattcgggataacaaacattatcattactgacttgggatccaacttcaccagctcagaattctttgacttctgcgagcanaagagcattcagatcaagtacgcatccgtagcacatccaagagccaacaggcangttgagcgagcaacngaatgatattgaggcctcangaaaggtcttcatanaatgaaaatcgcggaaatgatagagactgcttatgtgttggagctgaaaccaactaccggcctgattgacactctttttatggtatggcg

SEQ ID NO: 11943 - DNA, 420 bp, Zea mays
  unsure (1)..(420): unsure at all n locations
gtcgattggaagcctacttggtgtanactcctccttcttctattccattgcttngaatgcgatgggttgcacctcgggtgtagaggtggcgccttgctccaagttgacgatagtgttggagtctttgatcattagctcanagctcacaaattngccactaacctcctcgagatacattagtttatatttaggatccccatgtattaatngaacttgagtaggattgtgaaatacgagggatctaagaataaccttgaccatttcatggtcgtcccacttggtgcttctganggtgcgcactttggtgaccatcgtctttgagccggtgtacatggcttgtggctcttccnctttgttgaggacgaatcgaccgagcttcccctcgatcgtctcacgcttagtgatcttggtcacctcgtc

SEQ ID NO: 11944 - DNA, 86 bp, Zea mays
actgagacatatcactatgactgactactgtgcgtatgccaaattgcgactttgtggaaattgccaattcaatataaagtgagact

SEQ ID NO: 11945 - DNA, 250 bp, Zea mays
  unsure (1)..(250): unsure at all n locations
gtacacgggtcactttgctcatgaatgtaaatctttcatttaatatgcatgatactattaagtatgtactatatgcactaaccgcatactatcagggatgatatgatcatgcacatcacaatgatacctttgctatgttggagtatacaacagacaagaatctntccatttagttctcctatagcactgcgaagctcaattgaatagcttggcaacaccaactatcaataaaaactcattcttcaccagt

SEQ ID NO: 11946 - DNA, 372 bp, Zea mays
  unsure (1)..(372): unsure at all n locations
gcgatccttgagtcacctgaagctgcagcttgtcacgggggttnttttttcttttcggcgcgcgatgtgtggtttttcttgcagccgcagatcaggcaacagggggagcacgagtgcctgcaccgggacatgatggtcgggttcggcaagtggagctggagcccgctgcagctggagaacccgttcgccgacgcctactccgacgatggccacggggcggggaaggtgcacctgtggcacggcgccgaggacctcatcgtgccggtcagcctgtccaggtacatcagccagaagctgccgtgggtcgtctaccacgagctccccaagtcgggacatctcttcccgatcgccgaggggatggctgacatcatt

SEQ ID NO: 11947 - DNA, 236 bp, Zea mays
  unsure (1)..(236): unsure at all n locations
gcaagctttanagggagaacacgtgatatgtctaaccaatgttcatntctataaagatagaccttgtgcagcttgtcaagcagggaaacaggtgggaggctctcatcacaccacaaatgtgatgacaacatcaagacctctggagctgctgcatatggacctcttcggacctgtcgcctatctgagcatatgaggaagtaagtatggtctagttattggtgatgacttttcccgct

SEQ ID NO: 11948 - DNA, 343 bp, Zea mays
  unsure (1)..(343): unsure at all n locations
gcttatcataatcactccacctaaacttatcacccctgtgagagaatgtgtgatttatgagcctgtgagaagccccttctcaaaacaggtgtggattccaaaatcngtcccaacatctctagtgatcccctttctagagcctctcagccatccaaaaataaagcccgcttccacaaacaaattccacctaagagatangtgaggtaccattgtgagtattgtgagagggatgggcatctggcttctttttgctttatgaggaagaaagatgagtggcangtttctgagttgagcangaagaacatgaactgtccctctcatggtgttcatgctcagcctattc

SEQ ID NO: 11949 - DNA, 448 bp, Zea mays
  unsure (1)..(448): unsure at all n locations
cttcatccccacatgtgctaagcggcgatgtcatagacagcccatgctagtcttagctattaagcatgcatctagaccggcctcttctattgcaacatcaactaaataaagattgccgtctaatacacccttataagctagtgaaccatcacttcttctaaagacagacacatctacatttgtaaatagacagttataccccatgttgcataattgactaacagatagcagattataacccagagactctactataaacacattagatatagagtgctcattagaaatggcaattttacctagcccttttaccttggctatgatcccatcaccgaatataattgaatcttgagaatacttattcttgacgtaggaggtgaacatcttcttcntccccgtcatatggtgtgtgcatccgctgtctataatccagcttgaaccccggatg

SEQ ID NO: 11950 - DNA, 322 bp, Zea mays
  unsure (1)..(322): unsure at all n locations
gcttctaaagggagaacacgtgatatgtttgactaacgngcaattcttattatatagaccttgtgcagctngtcaagcaggtaaacaagtgggaggagcacatcacagcaagaatgtgatgaccacttcaagacctctggagctgctgcatatggacctcttcggacccgtcgcctatctgagcataggaggaagtaagtatggtctagntattggtgatgactnttcccgcttcacttgggtgttctttttgcaggataagtctgaaacccaagggaaccctcaagcgcttctaaggagagctcannaatgagttgagctc

SEQ ID NO: 11951 - DNA, 305 bp, Zea mays
gcaagcttatgaagattcttcattccaacatgggctagtcagcggtgccatagccaacccaagttagtcttagcaaccaagcaagtgtcgagttcagctctatcaaaatctaccaagtatagctgaccctctaacactcccttgaatgctattgaatcatcacttcttctaaagacagtaacacctacatcagtaaatagacagttgtagcccatttgacataattgggatacggaaagcaaattgtaatctaaagaatctacaagaaaaacattggaaatagtatggtcaggtgatatagcaat

SEQ ID NO: 11952 - DNA, 281 bp, Zea mays
tcttcactatgaacaagagatatattgagcactgctctttcaagaaattctacctaaggtgctcttattgtctcaaagaatacttctgaaggtaaaggcagcccctgtgccgctgacttggctagcagatcaacgtgctcattttttcctcgtggaatattcttgacagaaaacccttcgaaagaagcttcaagccttcgaactgtatccaggtatttctcaagcttccggtctcttgctttacaactcttgtcaacatgaccagaaataacttgggaatc

SEQ ID NO: 11953 - DNA, 298 bp, Zea mays
  unsure (1)..(298): unsure at all n locations
atcctcgaatcaacgatgtcaccactgccgcgctggaagatccatcgatatgaatctgctgtgaacgaactgaaggtatgcaccaagcctgcctggtgcctacacgtggctgccccggatctgtcaatagatcatcgtctgcagcgattgagttcaccccttgcactatcgcttaagatcaatgcaagcaattgatcccgaaacatcacctgtngtctacctgtacatgatgtagaagacatgcttgaaacccttttaagttagtgaaatggtgcgatttattcatggacatatattc

SEQ ID NO: 11954 - DNA, 382 bp, Zea mays
  unsure (1)..(382): unsure at all n locations
ctgcagcttncncagcatttntgagcccctcatgcatccgaagatagtaatatgtgcgactttgggttatgaagctaagtttcggctcatcttccttcttcatctagatttggtggtagcctgagtaacaatctagtagactcatgagctctgacgaagctgctacatctactagagaatctatccttggcaatgggaactncatctttggacaagctttcttaatatctgtaaaatcaatgcacattctccatttaccattggccttcttcaccataacagtattagctagccactctgngtatttgacctctctaataactccagcgctaagaagcctctttacttcgttctgagcaccttcagctnttgcatcagacat

SEQ ID NO: 11955 - DNA, 398 bp, Zea mays
  unsure (1)..(398): unsure at all n locations
tgtcttactctctgcagtnactttttttattctctttatgctctngctgattctgggaatatataaggatatcatcaatgaacaccactacgaacttgtcgaggtagttcatgaacacactgttcatcaaatacatgaagtaagctggcgcattcgtcaaaccaaatgacatgaccacgaactcatatagctcatatttggtgataaacgctgtctttggtatgttccaaagccggattctgagctgatggtaacctgacctcagatctatctttgagaacacctcgactcctctcaactgatctaataagacttcaattctgggcagcgtgcacttattctcgatggtaacttcattcaaggatctgtagtccatgcacattctctttgttacgact

SEQ ID NO: 11956 - DNA, 393 bp, Zea mays
ttgagctgccgctggtaagatgcgccttgtgtgatcctcacatattttgtcgagtatgaatgcctacggcctcgggaatcttcttcaaccccgtcattaaaaactgatgcttctccttttggcaaagcattgcactcaatgatccttctctttggacgctttcaacgttcgggggttctgctagactgcctaaagttcgtcaacccttaacatgctcaagacatgattggcctgtgcgctggcctatacgataacttgactaccctgaggattttgggcctggtcctgaataactgacatgctgtttcctgaccctgaactgtatactatcttactctgcagagtatgtctgccaaagaaactagctacaccttacgcatcaacattcctatg

SEQ ID NO: 11957 - DNA, 293 bp, Zea mays
  unsure (1)..(293): unsure at all n locations
accgaaatccaaaccttcggactatgagtatccctcggccacaagtcgggctttgttccttgtcaccacaccatgctcatcttgcttggtgaggaagacccacttggttcctacaacattttgaatangacgtggaactaaatgtcatacctcgctccttgtgaaattgttgagctcctcttgcatcgccaccacccaatctgaatcttgaagtgcttcctctaccttgtgtggctcaatagaggaaacanaagacaaatngtcacaaaaatgagcaacatgatatcgagtag

SEQ ID NO: 11958 - DNA, 462 bp, Zea mays
  unsure (1)..(462): unsure at all n locations
gcagcttgatgtctcttggaatgttgaatataccttagtaccaattatttattatatgtgtatgcgcatgatgagtntagtacaaatccatcggtgcactggtgtaagctgaggtttatttgcgcgtgtaaagtaataatgtgactaatacttanaactnttagtcgatagtagaaaattgctttggcttatatagagaggtggtgacatgccaaagtagtcatcgcttcctctatatcttgagtagcgcaatacgcggtatgtgttcatgaattgggaagaagcacatgatggttcgagtttagaatagtggttacgggcatatgattggggatgtggacatactggaaatgatgtatatcatgtgtgctatgtggtctaattcatatatagctccgcagatgtgatacgctagtgtgtcagtatactgtaatattactagtatgtcacagatgtgtgagc

SEQ ID NO: 11959 - DNA, 177 bp, Zea mays
atacttcccataacgagcgctccgttccctgatgcccattcagaatgctagcaacttagcaagggggtggatgtaccggcctagctactgcgcaagcaatatcagccaaagccacctgagattttatactacaccagcagccagtaccacgagtcgagacaacattcctttctggct

SEQ ID NO: 11960 - DNA, 339 bp, Zea mays
  unsure (1)..(339): unsure at all n locations
ctgcagctaaaaactacaattagcagtttgtgcgcngagctcttatctgagtaatcaaaagcagatggcaaagaaagcgtaccaaatgacattgcggtgtgctcttatttatacatctggcgtattgagaacaggagggccccgcttgacattgactgtttctattctagcaagaggaaggtgttttttcggaccttcggcttanggccttcgtccatatcgcaatctgaatttattattctaacaaattaatattgcgaggggctactgttgggggccttctgcttncgaaggtcctcanaaacatgatttgacaatgtttctggagtataatacatg

SEQ ID NO: 11961 - DNA, 306 bp, Zea mays
  unsure (1)..(306): unsure at all n locations
atcattctgaccattctgatgatagccaacaatcatagcagtccaggcaatgacatctcgattggtcataatggcgaagatttcccttgcctgctttgtgtcccaagcttgacatagccttccangagagccgtgaaggagattacattcaaatcagcgagcactggcttgtccatgatcctccttgcagtctcaacacttccggattttgcataggtngagatgagagcattcataatctgactgctgcacggcattccagttctcaagatgtaagagtgcatctgctttcccatcttcagcata

SEQ ID NO: 11962 - DNA, 323 bp, Zea mays
  unsure (1)..(323): unsure at all n locations
gcttctatgtatatatntcgtattaagtacaagaaccatctctagttatctatggntctagatntatcgcggtcttgcagtcgggattgccataaaggtggtgtccacgctgaggtgagcggtacgggtgctgagtcccgacgggagcggtggaaccaccatccagatgacaacgttccgcgcgctcacgccgcagcagggcgatctcagcacgagccctactcagctcatctaatgcatggtccagctccgtgtttagcacggcggctaggttgactgtgctgctcaacctaggattgccctaccgacaggtgagacaatca

SEQ ID NO: 11963 - DNA, 386 bp, Zea mays
  unsure (1)..(386): unsure at all n locations
agatagtaatatgtgcgacttggggttatgaagctagtgttcggctcatctttcttcttcatctagatttggtggtagcctgagtaacaatctagtagactcatgagctctgacgaagctgctacatctactatagaatctatccttggcaatgggaactcatcttttggacaagctttcttaatatctgtaaaatcaatgcacattctccatttaccattggccttcttcaccataacagtattagctagccactctgggtattngacctctctaataactccagcgctaagaagcctctgtacttcgttctgagcaccttcagctttgtcatcagacattttctanagcctttgtttcttggcctgaaagatggaccacattga

SEQ ID NO: 11964 - DNA, 246 bp, Zea mays
catttacatgtcttctccagagcttggttggactatactccctaccctatactgtgcatgatgctatacatgcataagttgtaactcatatttgtacttatgcataagggaaggcagtctaatcaaatcatgtcttgcacctctatttgtcacaagcattttgcgaagtagaacatctctattaacgggaaatttctttgtctctaaaggaggagaatattctttctaaaggagaacactcattta

SEQ ID NO: 11965 - DNA, 344 bp, Zea mays
  unsure (1)..(344): unsure at all n locations
gcttctgtatatacatgaattattatatgaaacaaagccttgttgtatataacagtaccataacaactttggctgctacagcttcgtctctcggtccggggcaagctgtcccgtaccaacctttctgaagagatgtgcccgggattggatgacagnaatggtttatgtgaagaatgacttatcagcacgagaagacatcaaaggtataattatgcgtcctatttggcaaagcttcggccttcggaggccgaaggttgaaatgaacgaagccgccgaagagtgccaaagagccttcggcgttgtctgctcttttataggaacaagggacttagtacaagagcata

SEQ ID NO: 11966 - DNA, 360 bp, Zea mays
  unsure (1)..(360): unsure at all n locations
cattgcatatttaaaatacttgtattgcatctanggcttgtcttatctatttgagataaccgccaacagagcgagtganaaagcttggatcaaacttgacaagtcttagttttaagcttttagcacttaaattcttactgttcatgcaattgttggntcttgaaatatgcatgaggttctgcacttanggggagtattcaaaactcanattactcatanaaacccctagtgcaaggccaaaatgcanatttcactatttgcctattntctcntaaaattatctagcctatggcanaatattntgaaaattatgagaaaatatatgagtgtgccaatacctgtctcaacaagtgttatttt

SEQ ID NO: 11967 - DNA, 410 bp, Zea mays
  unsure (1)..(410): unsure at all n locations
agctngctgctntgaccttataaccatgacagtcacacctcacctcctatattaaggttcccatgtgtacttgcacttaanacatacctaagaataactagagtaagtattttgaggacgctttggtcaagggaggtcccccaacagtagctactcacggtattagttcgctttttcataacgaactcagatcgcgaaacaaatgaaggcctcgtatcgaaggtccgaanacaccttccttgatctcgttagctaaaatgaattcttttaaaataggtctttgtaaaatcatgtcatgagggtccactcgcaatggtgggttaaaattgaatnttaatttcgctcattttgctttataaacatatcgactttgatgcatgtagacacaatattctcttgcttttgcatcc

SEQ ID NO: 11968 - DNA, 443 bp, Zea mays
  unsure (1)..(443): unsure at all n locations
ctttattgaagatatgaacagaactttcttctcttcttcattctatacccatacttgaatgtcttcactcatcatctttccttttaggcctcacggaaacttgtgctggatctttcgtctcgctaccaaatcaaatgtccatgataggaactggtggccccccagtgccaaacatcgatgttcgtctggagtcggtcccagaaatgggttatgatgcacttgcgagcaaacctcgtggagagatatgcatcangggagaaacattattctcangatactacaagcgtgaagaaccttacaaggangtcctcattgatggatggntccacactggtagtgtgttgcccgtctactgctctgttttacatagtgatcactattcatgacacacattngtagtagtaaaattccatgtagaaatcagggttccatcatataccatg

SEQ ID NO: 11969 - DNA, 367 bp, Zea mays
  unsure (1)..(367): unsure at all n locations
gtttattgaagaatgacattaaattcaattggtcttctaagtgtaatgaagcctttgagcaattgaagacactattgaccactgctccggtattggctcaaccggacatcactaaacctttngatgtatattgtgatgcatctggcagtgggctcggctgtgtactgatgcaagagggccgagtaattgcgtatgcttcaaggcagntgcgccgacatgaggagcattacccaactcatgatctggagctagctgctgtggntcatgccctgaagaatnggcgtcactatctgctgggaaatatctgtcatatatatacagatcataanagnnttgagtacatcttcacctagtcagaattaaatat

SEQ ID NO: 11970 - DNA, 336 bp, Zea mays
  unsure (1)..(336): unsure at all n locations
tttgtatagcagagcacgggcatatacctatatatnctttaatgtatgtaaatattcttaacctttaaaagatactaacaagcaggtataacgaatattaatgtttctacattttaatatattatatcattatatggtgaatccgtagcaacgcacgggcatacacctagttacattaaatacctgatgggtcaatagcgtttaataatgttgtgcttataactgagatgtgttgaactgtgcttaaaaccgagatgctttacttgtgttcccctgcaaaccctcgtttgtgctaaatgtcatgtactccgtaataaaaatggaatgcatgaattc

SEQ ID NO: 11971 - DNA, 211 bp, Zea mays
  unsure (1)..(211): unsure at all n locations
gcttcctatggcgcccgaggctggacttagctgctgccagcctcactctgtctagtggcacagcagtcggagcgacgtangcggcgcctgtttcttgtcaggtcggtcagtggagcggcgaagtgactgccgtcatttcggctctgtcgactgaagatcgtgcgtcaggataaggtgtcaggcgatccttgcattanatgctcttgtgata

SEQ ID NO: 11972 - DNA, 374 bp, Zea mays
  unsure (1)..(374): unsure at all n locations
catgagagcaaagagcgacccatggttngcanaatatttgtttcgtgtcggtggtggaactgaggaagtgaacaacgatggtgatgttcgtctttcagatgacgtatgtgcgccatataccggtgatgaccgcgaccttgacagattgatagatgacatttaccccagtctaaacgaaaacatgtctaatacaagctacatcactttcagagcaatattgactactcggaacgattgggttgatatgataaatatgaggatgatcgatcgttccaacgggagcagatgatgtaccatagctttgacaccgcggtggacgatcctaataactattatccatcggaatnctaaacacgctgactcctaatggacta

SEQ ID NO: 11973 - DNA, 341 bp, Zea mays
  unsure (1)..(341): unsure at all n locations
caccccatttcgacctncttcagtacccaaacataataagagctattgatcaatcctagcctctgccacaatgcattctagtcattctagtgagatccgagcacgattttgagatgtcctaagtattctgttagaatgtgttcttgagatcttctttcttgtgttgtgtggatgcattntcctcttgtgtggtactctcctctatggtttgctgtactttggtggtgaacttattcgcattggtacggctggaagagactccaacgtgtggagatttcttgcgaggggattgatattgatataagaaagaccgtgcacttcaggtaatcattagatcactt

SEQ ID NO: 11974 - DNA, 356 bp, Zea mays
  unsure (1)..(356): unsure at all n locations
cccatatttggcttagcaattaagaaagtatcgagttcagctctattaacatcaactaagtatagctgaccctctaatactcccttaaatgctattgaatcatcacttcttctataaatagtaacacctatatccgtgaaaagacangtgtaacccattttgcataattaagatacagaaagcaaattgaatctaaagaatctacaagaaaaacatttgaaatagaatggtcaggtgatatatgcaatttaccaagtcattcgaccaaaccttganttccatccncgaatgtgatagctctttggggatcttcgtttttctcgtaggagaacattcttttctcccctgtcatgtga

SEQ ID NO: 11975 - DNA, 341 bp, Zea mays
  unsure (1)..(341): unsure at all n locations
tgcagcttcgcatgatatagaaagggaaccgacttaaagggaaaggttatttatacctcgatggattactatagagtcattagccaatgtaagggcatgagtgtaatttacatgggctgcgttccgtgcctataaatagatgaacagtgctcccgtactgttcacgcggactctggatttgcttttgcgtcacgcttgtacntttgccttctttcaagccgaaggtacatttgtaacttgatatcatttctatttttccatgataataaaatagaaatgagctgagcatgatacataaatgtccatgttatctttcacatttcatgtgagtctcttttcat

SEQ ID NO: 11976 - DNA, 364 bp, Zea mays
  unsure (1)..(364): unsure at all n locations
taatataccaattgtctctagcctagctacgggtgcataggtttcaccgaaatccaaaccttcgactgngagtatccttggcacaagtcgagctttgttccttgtcaccacaccatgctcatcttgcttgttgcggaagacccacttggttcctacaacaatttgattanggcgtggaactaaatgccatacctcgttcctaatgaagttgttgagctcctcttgcatcgccaccacccaatccgaatcttgaagtngcttctctaccctgtgtggctcaatagaggaaacacaagagtaatgctcacaaaaatgtgcaacacgagatctagtggctacccccttatgaatgtcgccgaggatg

SEQ ID NO: 11977 - DNA, 444 bp, Zea mays
  unsure (1)..(444): unsure at all n locations
agctntatatgcactgagaaaattcttgacgacaccaccagtattgatacctgcccggcgagctacgccgactcaaccggctgaagaattgctgatgtatatctcttgcacgactcacgtggtaagcactgcgttggtagtcgagcgagtggaagaagggcatgcctatccggtacaacatcctgtttacttcatcagtgaagttctaggtccctcgaagaanaaatatcctcaggttcagaagctattatatgcagtacttctaactgcccgcaagctgcgtcactactttgacgaccacaaagtcatagtagttactgggtntccaataggggacattcttcacaacaaggaagccattggccgaatagccaagtgggcttgcgagttangatcccatgatatcgagttccgacctcgcactggcatcanaactcaagcact

SEQ ID NO: 11978 - DNA, 392 bp, Zea mays
  unsure (1)..(392): unsure at all n locations
cgaatgtttgtattttctattaaacctatgcacccatagctaggctagagtcaattcgaatattatttgcatatgctacttaccatggctctaagttatatcaaatgaatgtaaaaagcgcctttctcaatggtcctatcaaagaagaggtgtatttgagcaacctcccggctgtgaagatattgagtatgcttcacatgtctataagctctcanaggcgctntatggactcaaacaagccccaagagcatggtatgaatgcctgagagactctcttgtcactaatattattatagtcggaaaagctgaccctgctctcttcactataacaattgacacagacttggtatatgctaaatttatgttgatgatattattttgnatctactaac

SEQ ID NO: 11979 - DNA, 379 bp, Zea mays
  unsure (1)..(379): unsure at all n locations
agcttctatagggagaacacgtgataggttngactaacgtgctattcttataagatagaccttgtgcagcttgtcaagcaggtaaacaagtgggaggagcacatcgcagcaagaatgtgatgaccacctcaagaccgctggagctgctgcatatggacctcttcggacccgtcgcctatctgagcatangaggaagtaagtatgggctagttattgttgatgactcttcccgcttcacttgggtattctttttgcaggataagtctgagacccaaggaaccctcaagcgcttcctaaggagagctcacaacgagtttgacctcaaggtgaagaagataaggagcgacaacggatccgaattcaagaaccttcaagtgga

SEQ ID NO: 11980 - DNA, 262 bp, Zea mays
gcaagccccaatatacttcatctccaaagttcttagtttatcaaagaaaaattatacagaattggagaaggtgctgtattgctgtttgatggcttcgaggaagcttcgacactattttcaagcatacaatataattggtccttcttcacaaccattgaaggatattatgagaaacagagaagctactggaagggttggaaaatgggctgcggaacttattgagttttgcattgattatgtgcatagatcttcgattcagtcc

SEQ ID NO: 11981 - DNA, 110 bp, Zea mays
agcttataccacagataagtattgaagtgcagatatacaggcgaattatattatagtcacgataccatacagaacagagcaccactacatgaattcacttaattcccgtc

SEQ ID NO: 11982 - DNA, 341 bp, Zea mays
  unsure (1)..(341): unsure at all n locations
gctngaagttccttgcngatgatcttggggttgagactattggtgatcttctaagttntacagaggaanaattacaagagcagtatggagtaaatactgggtaattatgttcatgctttattaatgtgttattatttggcttaccttgattaatgtagacataagattatagtgaagatatgatatcacattntaaagagtcaagatttgttattcccttaggagtttagcagattatttaacttttataagttaatagttagtttgttgagcanaaacatgcttctttgcatacanttatttagtatcatgtcaaatactcactaactcatcttgtaagc

SEQ ID NO: 11983 - DNA, 443 bp, Zea mays
  unsure (1)..(443): unsure at all n locations
tcttcttgatgtatcatacttggatgtaaataaagcttttttatctatcaaatgatgtgatcacacttggttctgcagttccgtgcaaagaagagtatcagacgatgtgtgttgcactactgatgagcttctcacacatgcaaatgggagaaccaatagaccagttaatgtaagacatctaagagcatccgcaatagctcctaggacatatcttccaataaacagctattagaatgtctataaaagatctttatccttacaaagagtccatactccaaccgctccatttatagagttgttggctcgaggaatcaaaccatttcacatcgaagtggtgcatcatgagttcatttctcanatgtggtggagtgactacattcctcatattagtacagaataactaactataaggaatgangcggtaatggatcaactcattctat

SEQ ID NO: 11984 - DNA, 184 bp, Zea mays
  unsure (1)..(184): unsure at all n locations
acagcgccagctgcgccactccgactgcagtgccactcgacagagtgagtctgacaggcagtcangccttgccaaaggcgccatatgagactccgctccgcccgacctcagggctcggactcgggctaagacccggaagacggcgaactccgctccgcccgaccccagtgctcggactctggct

SEQ ID NO: 11985 - DNA, 439 bp, Zea mays
  unsure (1)..(439): unsure at all n locations
atggctcaaganattataagggagaagtgaanaaggtattcacgacgctcgaaatgtagcagaggccgctgagaaaagtgcggatctcgagagacgaataggtattgactactaagtcttgactctatgttgcaattatatgattntggacttatttacactttgtaacacagccgcactatcttctcccctagagcccgccgagccattggcggaccccaacgcanagggggatgacgaaattagaaaaatgcgcgaagctattatggataaggttgttgaccaactactaaacgaagctgcggaagtagtcttaagagaagactagctgctattgtaaagacattgagaatgaatattcgctgacagagtgtgtatatcttataccttgaatgtaaatataagtgcttgaattaattcttacgagcattaacttacg

SEQ ID NO: 11986 - DNA, 351 bp, Zea mays
  unsure (1)..(351): unsure at all n locations
agctngcacttacgaccaaaccgacgcacatccatataattaatgtgtaacaatagggtaagcaagtaaccagtggacgaataattttgtattggtcatatcgtgatgttgttgactgtgatgttgtgcctatggatgcttgtaatattctgctaggtagaccatggcaatttgattcagattgtatgcatcatggtagatcaaatcaatattctctcatacaccatgataagaaaattattttgcttcccatgtcccctgaggctattgtgcgtgatgatgttgctaaagctaccaaagctaanactgagaacaacaagaatattaaagctgntggtaataacacagatg

SEQ ID NO: 11987 - DNA, 331 bp, Zea mays
  unsure (1)..(331): unsure at all n locations
caacatctaccagcacagtttctgtatatcataccagtaacttggtcattcgcatgctgtgcactggatatgattggacctttcaagaaagctcaaggaggatacactcatgtactggtagcaatcgacaaattcactaaatggatagagttcaaacccattgcttctttaacctcagctaaggtcgtggaattcatacaagacataatattcaggtgtggaatatcgaacagtatcataaccgacctgcgatccaacttcacaagttcagagntcttcgatgtctgcgagcaaaanagcattcagatcaagtatgcttcggtagcacacc

SEQ ID NO: 11988 - DNA, 281 bp, Zea mays
ataggtactacatcgcaatccgataattgaatgtaaatgtgcccttgggccatttctaagtattttgatgattaagtgtccaacacaagtgcttaagtgataaactatgccaaagtgtggataaggtgcaaatcaatataaaggtatgattctagacttagtacattggttttgtgtactaacatgtttgtctaagtgctagaatcagagaaaaatcaattggaaaagcatggctcgaagcagccaatagtctgctcagtctgggtacaccggacagtgtc

SEQ ID NO: 11989 - DNA, 390 bp, Zea mays
  unsure (1)..(390): unsure at all n locations
ttaagcgactgaggctgcagcttaattaccggtccaggtgtccttctttgtaagtgtatggaactgcctcggaaaggcactctctgccgagtgtaacactcggcaaaatgactagagacctcatttttatttggtttcattattatatccaaacaaataaaacgtatatcatcacatatacattatagagttcacagaatcatcatatacatcataaagaccacatatctcacaaagaccacaaatctcacaagtttttcacaaacatcactaagttcagaccaagtattaccaacatcaacaagtttcataaacataggtattaccaacactcacaaacataagtatcacaaggttcacaaacatagttntcacaattcaccactaagt

SEQ ID NO: 11990 - DNA, 417 bp, Zea mays
  unsure (1)..(417): unsure at all n locations
agcttcttgtagctgctgccaaanatgagatgtgaactgcgttcctctatcggacactatcttcttcggcacaccatgaaggcagactatccgtgacatgtataactcagctaacgttgctccggtgtatgttgtcttcacaggtatgaaatgggccacctttgttaagcggtccacaaccacccagatggaatcatagccggcccgggtacgaggtaggccaactataaaatccatcccgatctcatcccacttncactgaggaatccgcaatggctgaacaatccagcgggtctctgatgctctgctntggntctttgacagctatcacagatggcgacatattctgcgatctctcttttcatgccataccaccanaacctgncttttaaatcctgatacatcttctcactccct

SEQ ID NO: 11991 - DNA, 513 bp, Zea mays
agcttcaaaagcgcagactgagacaaaactgaccgaagccgaagctgcttaatagccatgccgagaccgaagctgggccttcagagcccgccaaggagatatccttggaaaccggagaaaaggaaaaggaaaaagaagttgtataacaaattatggctgaaaaaactgccactcctactcccgaagcatcttccgaagattctgaatatattggacgacacgcttcgggaaaagattatctaaagaagagaattttgaagctaaacactatgcccaaaaactgaagtatctgaaaggggccttagtgttcaatggcccagaccaagataacttcttatactgcctcccagacaacaaaaaattatccgtctgccgggagatggctaaaagtaagggggtctcaaagctggaaactggtctttgcgctgtgacgaaggacgatcttgcacataaccctccatataacaatctaaagggatgaaaaatggctatttggaaggtgaaaaattttga

SEQ ID NO: 11992 - DNA, 455 bp, Zea mays
taacataatacttttaaaatttttaattttataattgaccggcactttagtagctacccttcttaatttgtccggttcaacttcatggctctcctttacctatttcatttcaacattaaagttcagcaaaagcacttgtcttggtgtgaacttctttgctttaaacttttagattttattactcattgttcctttaagctttatatcttctttcttttcctcaatcaacttctggacttcttttctactctcaataaagactttttctataatgttgagtgttttttttttttttgtcacaatcaaaccaaaacctttatacattataaccaacctttataattttcttttttggcaacttccccctaaatatttttctgattattactgccttactcaaaattatcctctttgaaataaaaaaaaaattgagttatataacaatttaacaattt

SEQ ID NO: 11993 - DNA, 667 bp, Zea mays
cagcatgcagccttaaaatgcaccagactggaaaaaagaaacacgaggccattattgtaaaaccacttagccaaaaaaaagaacaatccactactattggaaagaagaacttcgagcttcaagcaactgaaggcttattggcggaagccgaagctaaaataacagaaccgaacacgaagcttctctgcccatctgaacagttgaacaaaaaaacagaacaaatgcaaaacttgaagccgaaggtcaacaaaattcagatttgaaaaaactattggcgggccttcaagaaaaatggttggaaattagcaacaaatgtattcaaagactgagaaaaatcttcactcaattggagctagcaggggaaaaaattcacccccggcagctgaaagaattaaccaaaagacttttcgaacataattgaagggtgaaaattgatgaacttgacgaaattataaccgggcacggtgacttctgcgcctgggtaacttctggggcactggtgcggctttcctaaaaagatggctgcaaacatggaaaaaaatggcaaaaggccccaaattcactttatcacccataaattctagaagacaattccgaacctcgcccgaaaaaattctaaaaaaaatcgaaaaaagaaattgacaaaaaggcggccaaaaaaaggtgg

SEQ ID NO: 11994 - DNA, 678 bp, Zea mays
agcttaagaagccggtccagggcaaccctctgatatgactcctcaacaaatgggttcttccccttcacgaacctttccccaatattaccatatgtcagccgggatttatcgaacccaaaacggggcttggtttccttgaagtggaggggcttttttatgccagtaaaggttgagttggattcaaaaagcacaaacttggacacataaggactaagctcattccagcggatctccaggatatcaagctcattgctgaagagtacagcattcaagacacgacccgggaagtcacggacttttccaaccatgtaacttgcacaggttctccatggtgacgttctcatggtaagagggagggattgtcttgaagggcttgggaggagatttccagatgggccgcaagaagtatgtgaccttctgaccatgcgcatatatcattaggattagaattggcacaccaatcaagaggaccataagtgcccttaaatcaaatccccggagagcgcactttaaccttgacatcgtcagaactgtctttgacacaagctgcagtgaatttatcaaactatttaagaaatcaaacaagccatagtggacaaaaagaaattttgggaagaacactactaaactatttaaaattctaacatacacatgtattagccccgctctttaccctga

SEQ ID NO: 11995 - DNA, 627 bp, Zea mays
agcttaacgacgatgaatgtctttaaactggaattgaaggaaatgaagcccccttttactgaatctttcaaaaaataccaagactctggggcgacatcctatgagcagcttgatcgacaagtgctaaacttgttacacgcatggacgtactggaggctcgttccccaccaccaacttcagccccagctcactctcctgtggacgacgacgacaacgatgacgacgatgatgacgatgtttatgcaccgctgcggcaacgcctcgcacgtaatcgacaaggtatgggaggtaatggtagacgtcgtcatcataatcctgaacgagaccatgatccatttgctaagattaagttctctattccaccgttcatgggttcttatgatgctgaagcttacttagactttggagatgacggtagaacaaaaatttaattcccatcttgttttttgagcagcataaggttagataagcccctagtgaatttagagattttgctatcatttgggggaatgaacttgttaacgcacgtgctgcaccaccaacattgaatgcgttaaaagaggagatgcgagctcgctttgttcccccttcttatagacatgatctttcaaaaaaaatgcaacgctt

SEQ ID NO: 11996 - DNA, 639 bp, Zea mays
  unsure (1)..(639): unsure at all n locations
agcctgcagcctaccaacctgatgcctcaggaaaaacaaaaaatcccgaaaaaaggctgacaaacagcgtggcgcggncaactggtagctcggacagcactccgaaacggccaaacaaatgatctgccagaaaaaattatgggcaacccaatgatgagatagtggaaacaaccctcgctgcaaaccatttggggaagtaatccacggctacgaaggcgaacttaaaggtcccccgagcggagggcaggggcccgacaaaggccaagcctcaaccgccggagaggccatgcatgggcaatcaacttggtatattgtgagggggtgcccgaccaaagagaaaactgctggcaggcttcgcaagaccccgcgactcgatttgcggcgcaaaacattgcgggccagtaaaacccttgccggaacaccttggcagccaaggcccatggccctgcgtgcgaaccacacctgccactgtggacttcccggaagaacagcatgccctcaatttaaatgaaccatttaaacttggccgaatgacccctttcttgaaaagaagggcctcaaacagagccaaaacccggcttccaagtccgaagcgctttgccccactgacggcaaatggaagataaaacccccggcaga

SEQ ID NO: 11997 - DNA, 645 bp, Zea mays
cagcatgcaagctttagttgtggtgcccccatggtcaaaggtgacaatctggtttgatttgcctgggatttctacttgatccaatctattcatatcagggatcaaatttcttgagttttctggtgcatcaacaactctgtgtgcatttggctcggtaacagtggagctgtggcgtgttctttttctctttggtggttcttttgccttaccaagaacgatttgattagggcgtttattgtaagctctttcccttcctcttttcggaacatgctccacagcagattgtgcaactggagacagatcttgttcatcatctttagatgatgtagaaacaggaacatcctcaaaaccatacacatcatactcattactgctgctatttgtgtctgcaatcctctcctctggcatactgcgctgaataatctccgatacgccattgtccattctgtgaacaaggctttcttttttctgtagaactcccagccaaatcaggctttcttttgcagtcattttatcctgcaaacaactttgatttcctacaagattccttatcttatcaaaattgggaaacatgtgcttgattacacctttaaagcacaccaacctttcagaacttcttaaaaaaatgtggtttcttgtaaagag

SEQ ID NO: 11998 - DNA, 575 bp, Zea mays
agcttgtgagcagtacaagtttagaagggagaaagctgcttcgccgaccagccgaagcccatgcttttatgtgaggacatagcagagcagaaggtgctattgggatcccaactgtctgaagaacaggagaaaaccttgataaggtttctgttcaacaacaaagatgtttttgcatggtcagccaatgatctttgtggagttaacagggatgttattgaacattcgctcaatgttgacccatcctttagacccagaaagtagaggctttggaagatgtctgatgacaaggccgaaggtgctcagaatgaagtaaaaaggctccttagtgccggagttatcagagaggtaaaatacccagagtggctggctaacactgttatggtaaaaaaggccaatggtaaatggagaatgtgtattgattttactgatctcaacaaggcctgtccgaaggacgagtttccattgccaaggatagattctctaatcgatgcagcaacttcatcagagcttatgagtcttctggattggtattcacgctatcattaaatttggatgaaggaagatgagccaaaaac

SEQ ID NO: 11999 - DNA, 658 bp, Zea mays
aacctccaaatactactggcaaattaaaaactgaatcggcttggggccactactaccaaaagaaactgaccggcctgcaaatctgatcgagaggccaactctgttaggagcattggttcaaaagtaccccaaccggtcgtcccacgtttaacatttcaagggggcataattttttgactccagaattgggaggaaacaatgagaggaaatttctccgggtggggaacgaacaatgctgcattcatgctccaaaaaaaactgcgagccctcaaaatttcgagaaacggaattgggtcatgtggaaagccaaaggaaaagccacgatcggatgaaggagacatcgagaagactaggatagtaagtagttatcgaaatatatttgaacgggtcaaactgaaattttaagactgagccgaagaccatgtatgaatctatgtatagttcaactagaatattactgcgcatgcaaattttctgccgactagatccggcaatctgccgtatcaaagggaaaaaccagggaaattgccgaaaaaaattgctccctaaagaatgggtcggcagcaataaggaaaaaaaatccatgaaaaaaaaccaccaaaggggaattaaatggcacttcaattttctgaaaggatttcccccctaagggaaaatt

SEQ ID NO: 12000 - DNA, 613 bp, Zea mays
agctttctccctttttggcctgtcacgaccactagcatgtcattgtgtcgctgcttttctttcttctttcttttcttgggttgttcattggtgccgccatcgacctctttgtcgcgtttagccctcttcttgcggtggtcgaagattgcccccaccgcatcttcgcccaacacatgacaagttgcgatatctaggagttccttcatggttcatgggttttacgccccaacttatgtaccagagtctcgctcgtggtttccgagataaatgcgctgacaatgttagcatgacgaggttaatcagctcgttgtactatcgcaagaagtgtcagatgtaatccctcaaggtctcatctgacttctgacagtagtttttaaggtcccatgggttgcctgggcgtgcgtacatgccttgaaaattttcgacgaaaatttcctcaagatcagccttgctctggatacatccgggcctcaggttctccagccatgcttgggccgagtcccccaaatatagggggaggttctggattgtaaattcatcattgtttgctcctcctgcttggcaccctagtccacaatatcctacctagaggctagggttcgattctcgggag

SEQ ID NO: 12001 - DNA, 653 bp, Zea mays
agcttggcgagggaatgaaaagatacagttgtgatacgttctatcggtgtaatatgtatccatatataggtaactattatacgatgagctattaaattggccgtagacgatatgtaaacaagatagagctagtagttggctctgttagtagccatgcagctaggctagttgacgtaataaaccaaacaggccagccctaaatctgaacagccagctaaaaattatatatgcccttcgaaaccgaatggagggatattgccttgaaaaaaaatacgtgagagaatattttaattcagtaaatagaaaatatgagacatcatgataaagacagacaaagcaaacatgtacagtgagtgaaaaatatatatctaaagtaatgttgcagataatgaattccatgaccaaaacaacaaaacctacattcctattctctatatacagcttgaatattgagctaatgtaaactgttaaattaatatcgctagatgtattaactaaaattaatatcattaagaatactaaaattaatacaattagtcatagcaaaataacatttatatattattgggtcatattaaaaccaatatcattgggcatcaaataatttaaactggtaaagtgaaaggtgggtattttttaaaaagtttcaaaaa

SEQ ID NO: 12002 - DNA, 643 bp, Zea mays
tcaagcttctaaagggagaacacattttaagattaacaaatgttcatgttgtttaaaaacaggatttgtagcgcatgccaagcagggaagcaagttagtactcaccatccacataagaacatcatgacgaccgacagaccactggagctcctacacatggatctattcggcccgattgcttacataagcatcgacgggagtaagtactgtctagttattgtgggtgattattctcgcttcacttgtgtgttctttttgcaggaaaaatctcacacccaagagaccttaaagggattcttgagacgggctcaaaacgagttcggcttaaggatcaagaagattagaagcaacaacgggacggagttcaagaactcacaaatcgaaggctttcttgaggaggagggcattaagcatgagttctcctctccctacacgccacaacaaaatggtgtagtggagaggaagaatcgaactctattggacatggcaagaaccatgctcgatgagtacaaaacttcggatcggttttgggccgatgcggtcaacaccgcttgcttcgccatcaaccggttgtatttacaccgaattcttcaggaaacattatacgaacttctaatcggtaaaagcccaatattttatattt

SEQ ID NO: 12003 - DNA, 675 bp, Zea mays
agcttatgaagattcttcatcccaacgtgggctatacggcgatgccagatttctacccatgttatgtctctagcaatttaatgcaaggtggtcgcagttgatgctctattacaaatcaactaagtctagctgaccctctaacactcccttaaatgctactgaatcatcacttctaaaggacagtaacacctaaatctataaaaagacagttggagcccattttgcataattgagaaacagaaagcaaattgtaatctaaagaatctgcaagaaaaacattggaaatagaatggtcagcagatatagcaattttaccaagtcctttgaccaaaccttgatttccatcccagaatgtgatagctctttggggatcatggtttttctcgtaggaggagaacattcttttctcccctgtcatggtggttgtgcacgcgctatcaatgatccaacttgagctccggatgcataaacctacaaaacaagtttaggtcttgttcttatgtaccgaaacggtcttaggtcctttcacattagaaacaagcaccttgggtacccaaacacaagtttttgagcccttgtgtttggccccaacatatttggcaactactttgcctgaattggttagtaaaacatatgaagccttcaaaagtcttaaatgaaatggtatgatcattt

SEQ ID NO: 12004 - DNA, 654 bp, Zea mays
agcttcaccacgcgaccaaatccgctccccttctgatcttttcaccctcccggcactatcctgcccgagaccaacatgaatcgctgcgatcagcacgaatccttgcgcagaggtcaccggcggctagggggactgaacctgagatctttctgtggcactataccatcagaacgacattcagagcgcctgacaaagcaatttgcaacgcccagatctccaattttcatgtgataacgtgctaatccacctttagcaaagatgggggcctataatccagctctaatcttgctatagccaccatacttcaattctcactaaatcacacttgaaatagccctcaaacttgggcctacgttattgtcagtccagtttcagagctgtactcgactgacagaccaacttcaggtctgtttttctcccactttcatgtaacactagggcttaattacttaaaaaaatttgttctccttacataactctacaaatttgctacattgaccaaaagcaaaatccccaagaattctgaaatatagagcttaaaagttgacccccattcactgaattcagatttaagcatatgaggttcatgggggactttctgcacataagaccaaactttatcatttgacttggaaatcctaaaaaataaaaaga

SEQ ID NO: 12005 - DNA, 571 bp, Zea mays
agcttctaaagggagaacacgtgataggtctaactaatgttactttcgaaaaagatagaccttgtgcagcttggcaagcagggaaacaggtgggaagctctcatcatgccaaaaatgtgatgacaacatcaagacccctggagttacttcatatggacctcttcggacccgtcgcctatcagagcataggaggaagtaagtatggtcttgttatagttgatttttcccgcttcacttgggtattctttttgcaggataaatctgaaacccaagggaccctcaagcgcttcctaaagagagctcaaaacgagtttgagctcaaggtgaagaagataagaagcgacaatgggtccgaattcaagaaccttcaagtggaggagtatcttgaggaggaaggaatcaagcacgagttctccgctccctacacaccacagcaaaatggtgtggtagagaggaagaataggacgcttataaacatggcgaggacgatgcttggagagttcaagacccccgaatgcttttggtcggaacctgtgaatacggcttgccacgccatcaaccgggtctacct

SEQ ID NO: 12006 - DNA, 555 bp, Zea mays
agcttcggtacactacgacttcattctcttcaggtgcggacaagtcttctccccttcgtcggccctcacaatggacaaatcccggaaataccttcctctcatgttgacaagatgattctctttgatagttgatttaccataaactgaatgacttggtcgccagggacgatcttcggagtcttcaccaccgctgtctacatcataactgtcgctgtcatcagtatcctcaaacaaaccttctagaatctccttggtgattttttctgtgttggtcttcgacatcgctataagaaaccccaagtttttctcttcgtcaagactcagcttcatctcagcagcagccttcttatctccagacatcttcggaagcactaaaaaactgttttcaaagccgaaacttcaaaactaaaaagctcagcaaatcttagtgcacaaaagctaaaagtcgagtcaacgagagcagatggcaagagagcgtgccaaatgagtttgcggtatgactgtatttatacgcccaatgcgttgaaaattgaaaggccccgcttgtcaatgaat

SEQ ID NO: 12007 - DNA, 582 bp, Zea mays
agcttgccgtctagtatacccttaaaagctagtgaaccatcacatcttttaaagacagacacatctacatttggaaacaaacaggtatatcccatattgcataattgactaacagatagcaaattatatccaagagactctactaaaaacacattagagatagagtgctcatttgagatttcaattttacctaacccttttaccttgccttgattcccatcaccgaatattattgaatcttgggaatctttactcttgacgtaggaagtgaacattttcttctcccccgtcatatggtttgtgcatccgctatcaataatccagcttgaacccccggatgcataaacctgcaaggcaaaattaggcttgggtcttaggtacccaactcatgttgggtcctgcaaggttagcacaaatattcttaaggacccaaatgcaaggtttggcttccttgcatcttgcccctaattttctagcaactattttcctatcctttctacaaatagcaaaagaggcctttaaagcatgatatattgtagaaggttcattaattttcctaagaacattaacgacatttcttct

SEQ ID NO: 12008 - DNA, 662 bp, Zea mays
agcttggtacctggcagaggtacatcttttccgatgttgaatccatcatggccatgatggatccaccatcaaattttattttcgaaaacaaccctcccacttttccaaacatcttttgtaaaacaaatccttttgtttttctagagcaatactaagcatagaaaaacctttttgtaaaaatagggtttcaaggaaggtaatcaagttcaaggaaggtaatgcaagaattgttttatcaagcaactcctatcacctaatgcagcaagcaagtgagaaagattttaaaaacatcaagggaggtggcaaatgcaccggggcttgccttcgttagtaggtgagtcaggctcggacccgcagatgtcgaagtagagccaagtccctacctgaaattccaaaagtgggggtgtcttctcttcagtcacttcactctctttttcggttctaaaaataaccatataggtgtatattatataagaatgaatgccatgtaatgctcatgaaagtgcatagaatataaagggttattaactaagtcttgaatacaacttttccttccggaactccgagaacctaggggtttccggagtcagtaaaggatttcaaaaggcaggggtgggggttttgggttttaattattaaacaagtttccaaataaaaccaaa

SEQ ID NO: 12009 - DNA, 559 bp, Zea mays
agcttcatgtagttgctgccaaaaatgagaagggaactgggtgcctctgtctaatactatcttctttggaacgccatgcaagcacacaatccgagacatgtatagttcggccaacactgcactattgtaggtggtcttgactggtatgaaatgggctgcctttgtcaaatggtccactactacccagatggagtcataaccagtacgagtgcgagacaaaccaacaataaagtccatcccgatctcatcccatttccactgaggaatctgcaatggctgcaacaaacctgtgggcttctgatgttctgccttaatcctctaacaactgtcgcatacaaccacatactatgttatctcccttttcatactgtaccaccagaatcttttctttaggtcttggtacatcttctcgctaccagggtgtatagaatatgctatctcatgagcttccctaagaatcagttcccggatcaatttgatgtcgggaacacacaacctatccttgaaccataccactccttttgcatgttcaccgaaatccttgccttttttatctatg

SEQ ID NO: 12010 - DNA, 666 bp, Zea mays
agcttgacaatgaggagatggcgctcatcatcaagagctttcaccaaatcctcaaacaaaggagggggaaggactacaaaccctgctccaaaagggtgtgctacaaatatggtaagcccggtcattttattgcaaaatgtccaatgtcaagtaaagtgacagggacgacgacaagaaggggaaaaggagaagaagaggtactacaagaagaagggcggcgatgcccacatatgtatggaatgggactctgatgagagatccaccgactcctccgacgatgaggacgccaccaacatcgccgtcaacaagggcctcctcttccccaacgtcagccacaaatgtttcatggctaaggacggcaagaaaaagaaggtacactctagagccacccccaaatatacaacatctagtgaaaatgaagatgatttacttactctttttgccaacctcagcatggaacaaaataaaaaaataaatgaattaatagaaactattcatgagaaggatgaactcttggataaccaagaggacttccttattaaagactacaaaaaacatgttaaattgaaaaatgcttatgctcaaaaaatatagaaatgtgaaaatttattttaagagcttagcatgtgtcatgattcaatttctagtcttaaaaatgaaaatact

SEQ ID NO: 12011 - DNA, 579 bp, Zea mays
  unsure (1)..(579): unsure at all n locations
agcttgaagctgacattagcagctaccgacgacagcatatcgtcggtttcttattctattctaattttaaggtaaagttttttcctcaactttttattattttacaatgaagcaaagatttctgatgaaggttattttgcacagagtatgctgctaagcaaagccttgagaatgcaacaggacctcgaagataagaagaataaggttataattgaaggtttggaaaataaaatcaaagatcatgaagctgctcttgaaaagaaagattttcttcttcaaacaatggagggttcattagtagaagcccaagccgaaattaccaaattaaacagtaaactcctcctaaaatcagatagcttcgagcaagaaaagaagaattttaatgtgaagcttgaagccgaagttgaaaaaagttctaatttgcaaaaatccttgaaagagcttcaagacaaatgcttaaacttcggcaatcggtgcgtgcaacggctgaaataagtcttcaactcagtgaatgccagctttaaaaaatttgaacctttcggttgaaagacctgncaaacaccttcgaacatattgagg

SEQ ID NO: 12012 - DNA, 495 bp, Zea mays
agcttgctacaagccttcttcttttttttctccatagcaggaaccttactggaacactaccccacttaaaaaaatgagggtagatctcttgaatcttggggatttgaactccttaaagaacctcataacaagggtgttatggggccttcttctgctgttgctgcttgaacaggctgcggagaaatgactgacacagggttgattctgggacaaccttcttctcatcttctcttcgctatcttcttttctcttctcacttttcactgcctctttctttctctttgctcttcccactggaggattctatcaaagagtattaccatcatacactggaagaaaccaaagactatgaaccatgtgcaacagtctttaacccaagaatcaccaagcatcgtgatcttaggggcgagggagtggaaaatggagttgcttgctatttggcaggggggtctatctagagtgggctttgctttgagccagatgggagttgaggga

SEQ ID NO: 12013 - DNA, 576 bp, Zea mays
agcttgacaaagccatttatggtctgaagcacgctcctatagcccggtattccagactcaatgacaaactattgccgctaggttttcaagcatccaaaggagacacctctctgttcttttacattaaggaaggcatcaccatcttcttgcttgtatatgtcaatgacataattgttgcaagttcatctcaagatgttgtctcagctttgctcaacgatctgaaaactgattttgcactaaaagaccttggcccactacattattttcttggaataaaaatgcagaaagtagataatggtattcacctctcgcagaaaaagtatgcctcagatgttcttagtcgagttggtatgataaattgcaagcctaccactacaccactctctacttgagaaaaattaagccttcacaatggtgaaccccttgggcctgaagattaaacacggtatagaagcataataagtgccctacaatatctaactttgacttcgccggaacttacttatgcagagaaacaaatgtgccaatattttgcattcacctacaacagaccactggacagcaatcaagccgatt

SEQ ID NO: 12014 - DNA, 632 bp, Zea mays
agctttccagattgtatttaaacttccaaatcggatatgatatgtatccgtggtggcaaaaacgaaccagagatgtttttggtgatggtggatttcgtggtgaccaaaacgtggtagaactcaaaactctaaaggaataaactaagaccagcaactcgacacaaccgatgcaaccaaaaactcaacaagccctaactaagtagtactagtaaatgctcaatggtttataggattgcggtaaaactaatctactattttttggctttttctggactataggagataagaaaacagcgaagaaaagtaaatctctcaccgataaaccttgctctgattaccaactgatgtgcacccgttgggtgattgcccgatctttcgatgagaaggtgtggaataactcgattgggggaggagacgacgttcacgggccgactacagcctttcaaagacgctgcgccttagcaaccgatacaccacctcctatggctgtcacgatcttgtggagcgtgacaccctggccactatggcactcgtcctgcaagcaatcgaagaactagcaagaacaagtggaacaagtactgaattaccagatctaaatgtagggttaaaaatcaaactacaatatggtgggg

SEQ ID NO: 12015 - DNA, 605 bp, Zea mays
agctttcttcggcgccatagcgaaggtttatgatcgccgaaggtgttcaaaactcatagagtggaagtgagttcaccggaggtgggcgccaatgttggggacttgttctcaaatgctatgaattaagaacaaggcaacacaagaagtgttaaacgttaaagtccttcgtccttcgaagcattacttcccttaggacataatgattttcggacgaaggttatgaaggacataccttcataaattcaacatataataatgaagaaggaatcatatgagacacaaaaaatagcataaaccattatgtattatcatcaacttatttctgtattattattatagaaaggtagatataatatcaaattacaaatgtaccttctgcttgaaagaaggcgaaagtacaagcgtgacacaaaagcaaatgctaaatcagcgtgtccagtacgggggtacttttcacctatttataggcacgggacgcagcccatataaaattacatccatgccctttacatttggtagtaattctatagtaatccaccgaagtctgaatagccttttcatctttaaattggtttccttttctgctaccacgccgaagcttttct

SEQ ID NO: 12016 - DNA, 651 bp, Zea mays
  unsure (1)..(651): unsure at all n locations
agcttgacaatgaggagatggcgctcatcatcaagagcttccgtcaaatcctctaacaaagaaaggggaaagactacaaaccccgttccaaaagggtgtgctacaaatgtggtaagcccggtcattttatcgctaaatgtcctatgtctaatgatagtgacaggggcgatgaccagaagggaaagagaaaggagaagaagagatactacaagaagaagggcggcgatgcccacgtgtgtcgggaatgggacttcgatgagagctccaccgactcctcctccgacgagaacgccgcanacatcgccgtcaacaagggactccacttccccaacgtcgtccacaaatgcttcatggcaaaggatggcaaaaagaagaaggtaaaatctagagcctccactaaatatacaacatctaatgatgagggtagctctagtgatgatgaagatgatttgcttactctttttgccaaccttaacatgtaacaaaaggaaaaatggaataaattaataggtgctattcatgagaaagatgaactcttggatagccaagaagaatttcttattaaagaaaataaaaagcatgttaaagtgaagaatgcttatgctcaggaagtagagaaaaatgaaattttgaactaaggagcttaacatt

SEQ ID NO: 12017 - DNA, 696 bp, Zea mays
ctctgagtcgacctgtcagcatgcaagcttcggctatggttaattttttggcagcaaaacagtgcaataacaatgaatgcttgggtaacttcacacctacccgtctgtttatatagtgccacaggtgggaaggtgaatcgtcaaaatctcccgcaccgaacaaacagttacccgcactcgctgaatggtgggccacagggtccgagagggtgaatcgctagggcgctcgtaaatgctgcaagatggagccacctcgagcgcggattattttaatcgtttctcgccaacaaactcaaggaaagtgtttttcggatcttcggcatcccgaagcctagaagactttttcatggatcaagctcgttacgaaaaacgatctatcaccgtgaaggggctactgttgggggtattcttcgtaaccaaagatcctaaagaaagagaacaccttcggcagatcctatcagaagcagcgccgaagctatcacctataaagcttcggcacggtgacagttctcaaaacgaaagggtgaaccgactttaagatgaaatgactttaaagacccgcaatgttttgtttcattattatagtcgattgtaaaggggcataaatgtaattttacaataggttggccctgtccctataatagatgaacagtacccctggactgttcacagcaatcctgtacttgtgatacatta

SEQ ID NO: 12018 - DNA, 676 bp, Zea mays
agcttaatacccctaaaagattgtctaattttgttaaggataaagctcccatggtctaagatatacgagggctatattttatatcctgttgggtatcccgaatataagattaggagaattcattctaagaaaactcactctggctctcatcatgctttttatgtataaaagagaggcatctaattctaggcaatccactcatgttaaattgccaaaaaaaaaaactcctattgcatcaaatgaacctaatgtttcatttaagacttttgatgcttcttatgtgctcactaacaaatcaggcaaaagaattgcccaatatgttgggggcaaacacaaaggttcaaaaacttgtgtttgggtacctaaagggcttggttctaatgttaaaggacccaagactggttggggtacctaagaacaaagcctaaacttggtttgtaagtttatgccatccgcgggctcaagttggatcattgatagcgggtgcacaaaccacatgacttgggagaaaaggatgttcttctcctacaagaaaaaagaagaatcctaaaaaacttttcacatttcggggatggaaaacaaaggtttggtcaaaggacttggaaaaattgctatattacctggaccttttattttcaaggtttttcttggaaaattccctaaatataaactggct

SEQ ID NO: 12019 - DNA, 515 bp, Zea mays
  unsure (1)..(515): unsure at all n locations
gacccaaancaccagagccgcagcttcatattgtctgagatgggaaacaaaagaagatctttattattttcaaacaaacccaactggggttcaagaggacgcgaatatttcggtggccacaacatcctgaaaaatgtgacttcagggggaccaaccaagaaaggttactcggggtacatttcccgcccaccgaggaaacaaagccaacccagaaaaaatcgagggtattataaagaaaggagccacacggccacagaagaaagagcaaaaactcaccggatgcatgacggctttgagcaaatacatatcaaggctgggagaaaaaagcctaccattctataaagtggtcaagaaagcggacgaaattcaagggacttcagaagcacaggaggctttataggcactgagaaaaatgttgaccaccccaccagagccgaaaccgccggggcgatccacaccaactgaaccaactgaagaatagctgagggataggaccggcccaactaaagggggag

SEQ ID NO: 12020 - DNA, 607 bp, Zea mays
agcttgaagggcaagtcaaaaagcaagccccaatatactttgtatccgaagttcttagtttatcaaataaaaattatacagaattggagaaggtgttgtatgatgttttgatggcttccaggaaacttcagcactattttcaagcatacaatataattgtcccttcttcacaaccattgaaggatattatgagaaatagagaagctactggtagggttggaaaatgggatgcggaactcaatgagttctgcattgattatgtacatagatcttcgattcagtcccaagcgttagcagacttcattgctgactggatgccaggggctcaggaagaagaagcgagtaaagatgccgaagtttggacagtattctgcgatggttcttggggaaccttcggggcaagagcagccgctgtgttggttgcaccctccaaagttaaaacttgctacgcagcaagacttgatttcagttgcacaaataacattgctgagtacgaagctttgctcttgggtcttcggaagttaaaggcaatgggaattagaagggccggtcttaaaactgattcctaggttaatttttgtcatattgacaagaattgtaaagcaag

SEQ ID NO: 12021 - DNA, 622 bp, Zea mays
agcttggtccactcctttgctaagctcgtcactaagcttctaacaaatatattggctagtcaccttgacaatatggtatctcagaatcaaagtgattttattaaggacagatccattcttgacaattttatgcttgttcaacagacaaccattatgctccaccaaaaaaattgtgcaaggatacttcttaaattggatatcaccaaagcgtttgattctgtctcatggccgtttctcctcgaagttatgaagcatttgggctttgggcaaatttgatgtgatattatcaacactcttcttgcatctgcttcttctcaagttcttcttaatggtgcgccaaggcaaaaaattctccatagaaagggtcttcggcagggtgatcctctctccccaatgcttttcatcctggttatggatgttttgtgctacctaacaaaaaaggcacctgctgtgggattgttggagccgttatcaggaaatttagaccactcttcgatatctctttatgctgatgatgtggaaatttttcttcacccggtgacattttgatgttgtgaacaccatggatattccttaaaaattttggaaaagctttttgggctttgaaacaaaaatggaaaaa

SEQ ID NO: 12022 - DNA, 597 bp, Zea mays
agctttggctatggttaaaatttttaacagcacaacagtgcaatggctttgaatgttgtggtaactcctcaccaacccgtttgtttatatagcactgcaggaggagaaggcgaaccgccataccgctcgcactggctgaacggtggaccgtctggcgtccagaatattataatcgtttctcggtaacgagctcagggaaggtgtttttcggaccttcgacattccgaagcctttgtgtttttcgcggatcgagctcgttacaaaaaacgatctagcactgcgaaggggctactgttgggggtcttctttcccaccaaaggtcctcaaggcaaaaacaccttcggcaagatactacaggcatacgcaacatgaagatacaacccgaagatgatgcagacaaaagccgaagccatgactgaaggagcttcggcttagcattataatgaaggcgaaagacgatacaaacttaaggaggaaaacactatctagtccttaatagttcacattatgattacaattagttatcaaggacatgaatgtaattttgtccgggttgcatcacgtgcctataaatagatgaacagtccccccgtacta

SEQ ID NO: 12023 - DNA, 666 bp, Zea mays
agcttgtgaaggttcttcatccccacatgtgctaagcggcgatgccatagccagcccatgctagtcttagctattaagcatgcatctagaccggcctcttcttttgcaaaatctactaaataaagtttgccgtctaatacacccttaaaagctagtgaaccatcacttcttctaaagacagacacatctacattagtgaatagacaattatatcccatgctgcacaattgactaacagatagtaaattgtagccaagagactctactaaaaacacattggaaatagaatgctcaatggaaattgcaattttacctaacccttttaccttgccttgattcccatcaccgaatatgattgaatcttgggaatctttattcttgacgtaggaggtgaacattttcttctcccccgtcatatggtttgtgcatccgctgtcgataatccagcttgaacccccggatgcataaacctgcaaggcaaatttaggcttgggtcttaggtacccaactcatgttgggtcctacaaggttagcacaaatcttcttagggacccaaatgcaagttttatcacctttgcatttagcccctaacttcctagcaaatatctttctattctttctacaaattgcaaaggaagcattcaaagtttgattattgtaaaaaat

SEQ ID NO: 12024 - DNA, 626 bp, Zea mays
aacttaataactacaacaattggactagaattcattaaagatgggagtttttgactcaccggaacggaggaagggccctatcgcgctggctcaatcgaactcggggaagggaaaaaggagtggccgacgccggtgtggaggaaaagggagctcacgcggtccttttataggtgcccgtggcggggaaaggggcgagcaccgacgagcttgccacggcggtgatggtggcacacagtggcaacgacgggacgactcgggcagggggggacgggatggctcggctggcgcaaggggacagaaacgcaaggcgccaaccgggctggcgagcgatttaatggcgagacaacggggcggtggcgaccggcggcgatcgcgtctctagcccggtcacgggcgcaaggaaagtgctgacaaaccggacccccttggcagagagaaaaattgccagggaaccaaggtgaatgccgctgatgggtggggccgggctggcaaccgcacaaggggaggggaacccggtccccccggccaatgggcccccaaggtggggggttacacaaaaaaactacctcatcttctggcctattgtccagtaatggtaaaaaaaaaacaccccattctgaaaaaaa

SEQ ID NO: 12025 - DNA, 662 bp, Zea mays
agcttcggaaaatcacaacttcattctcctcgggggcagggacgttgttgtctccaccagccctcacaatagacatatcccgaaaataccttcccctcatgttttcgagatgactctgtttgatggtcgattttccggagattgaatgacttggcctccagggccgatccttagaatcttcgtccccactttccacatcatagctatcactgtcaccagtatcttcagacaagccctccagtatctctttagtaatcttctctgtatttgtttttgccatcgactcgacaaatccagcaatatagggatccacagtcttcttctcctcaaaaagcttctcctcttcagtcagctttgtctcggcagcaaccttcttgtcttgagacattttttcttcagaaatgatgaaaacgcgacttttaaaccgaagctcagagagcttgaaaaactagcaagcactagtgagcaagatctataaaattgagaaactaaagcaaatggcacaagcagcgtatcaaatgtagttggtgtgagttcttatttatatgcccagtgcgctccaatttggagggccccgactgtcattgactgttgctattctagcaaaaggaaggtggttttttcggacctttcgcttaaggccttcggtcatgtcgtagtct

SEQ ID NO: 12026 - DNA, 675 bp, Zea mays
  unsure (1)..(675): unsure at all n locations
agcttgtgagaatatgttctagtttacaagctcaaaaacttgcttgcacccaccttataagttaaaggaatttgcagtgcaatttactatgaaaaatataaatttgataacgcggggaaggaggggaacaatgcaatgaatgtacgtatttaatctacatttatcgttactatcctacttcacacagcaaaacaaagctgaggtgaatgaaaacttaaataactacttcaatacgagcaatataattaaaataaaaggtaaagcagaataaagaactcagaaacatcctagcaggacataacaaagaaaagtattacctatcatattggtgttgaagaggtgccagccatagaggtggcataggcatcaccatgtcatacccatcagaactcagggctaaaactggatccaacttctgtgaatcattcccaggtactgatttataatctgataaagttcttgaaggatgtggtgatctctgaattgtctttaaagtctcctcattgcttctaactatgtttgcctgttcagataaggataatttatcangatagggaatgcagggagagagaaatcaaagataccatgtagccttcagataaatatagacgatcacaatatatgaagagctataaatcgagggactttacaattgtaagaagatattgggatatc

SEQ ID NO: 12027 - DNA, 660 bp, Zea mays
agctcgtgaacaatacaaattcagaagggagaaagcagcttcagcagatcagccgaagcctatgctcttatgggaggacatagcagagcagaaggtgctgttaggctctcaactatccgaagagcaggaagaaaccctgataaggtttttgttcaataacaaagatgtttttgcatggtcagccaatgatctatgcggagttaatagggatgttattgagcactcgctcaatgtcgatccatccttcagacccagaaagcaaaggcttcggaagatgtcagatgataaggccgaaagtgctcgcaacgaaatcaaaagactcctcagggcaggagttattagagaagtaaaggacccagaatggctggctaacactggtatgggaaaaaaggccaatgggaagtggcgaatgtgcatcgattttacagaacttaacaaggcttggtccgaaggaggaattcccactaccaaggataaacctctttaggtgaggcaacagcttcgtcagagcccatgagtctggtaaactgctattcccgctaacacccaaattgggatgaaaaagggagaaggagccgaagaccaacctcatcaactccagggggacaaattggcaatctcgggagcccgaagggctcaaaaaacgccggaggaaggttt

SEQ ID NO: 12028 - DNA, 555 bp, Zea mays
agcttctcctgaacaagtgttgtactcaccgctgagtgcgaagctgccacatatttcaacagaagagcccctggcgttggtggagttagtgttgttaggtctatcaaatattgcttcagctcttcgaaggctctctactggactgggccccattgaaaaaacttcggctgacttcagcacttcgaaaaatgggaaatttctctctgctgatctagatatgaatctgttgagagatgccagtcttcctgttaatctttgagcccccttctttgtacttggtggttccattcgaaagatagcttccattttatttggattatcctcaatcccttttgttgaaactaggcatccaagaaatttccctttcttcaccccgaagacacatttttttggattcaactttaaaccggcctgtctaaaattagcgaaggtctcctgcagatcagtaatgtgattctcttgcttcgggctttttacaatgatatcatcaacataagttagcacatttctgcctatctgagattgaataaccttcgctgtcattctgctgaagct

SEQ ID NO: 12029 - DNA, 665 bp, Zea mays
agcttcatgcatttctgtttgacacctacatatgcaacttcatcagcattcatctactgggaatgcctctacatccatcctgagttttctttaattcagaaaagtagaccgactttggatacagcactgactccaaaatataaatttcacagagacgtacaagcgccaaagtgtttacttaacaaaaagaagaaactgaaagtgctactaacagaatggtcatacaccatattcttcagagcaatatagaaactgctgtaaaaactattggccgaagttggcatgttactgcacaaacacttaagagtagcattcacttgcaagaggggggcattttctcaaaaaatgtatgctctttttgccacagctacattatatgatatacaagatattcaaagagaatctctggcaacttcagatatgacaagctacattatatcagtgttatcctaaacgctaaacgggaaacagtcggtcattctctgtttagcatttaatcagactacacgggcgtttaaacggactaaaaacgggttatacgggattaaacggcataaacagccaacacagttagctactgagcagcgtttaaacagcgtgtaaacggtctaaacggccggttaggataaaatagccttatatacactgttcttttaaaccataaa

SEQ ID NO: 12030 - DNA, 589 bp, Zea mays
agcttgtgaagattcttcattccaacatgggcaagtcggctatgccatatccaaccgaaagggaaataggctcacaccttttcctaaatgattttggtggctgaattgcccaacacaaataattggactaactagtttgctctagattataagttctacaggtgccaaaggttcacaataaaccaataaaaagtccaagaaagggttcaagtaaaaaggagcaaagcaaccgaaggctgtcctgatctggcgcaccggactgtctggtgtgccaccggacagtgtccggtgcaccagggaaaatcactttgaactgctcagcttcgggaatttggggaggccgctctgctataattcaccggactggctggtgtaacacccggactgtccggtgtagcaccagactgtccggggtgccaagcggagcaatggctacaagcgccaacggtcgtctgcaacactacaatgaatagtgctgactgagcgcgcaaagtcggagcacgcgtcaaaaggcgcaccggacagtgaacaggacctgtccggtgcaccaccggaactgtccgtggccccattgtcaaaagctccaacg

SEQ ID NO: 12031 - DNA, 646 bp, Zea mays
acctgcagcctgcaagcttgacaatgaggaaatggcgctcatcatcaagagctttcaccaaattctcatacaaaggagggggaaggactacaaaccctgctccaaaagggtgtgctacaaatatggtaagccccgtcattttattgcaaaatgtccaatgtcaagtaaagtgacagggacgaccacaagaaagggaaaaggagaagaaaaggtactacaaaaagaagggcggcgatgcccacatatgtagggaatgggactctgatgagagatccaccgactcctccgacgatgaggaccccaccaacatctccgtcaacaagggcctcctctttcccaacgtcagccacaaatgtttcatggctaaggacggcaagaaaaaaaaagtacactctagagccccccccaatatacaacatctattgaaaatgaagatgatttacttactctttttgccaacctcaccatggaacaaaataaaaaattaaatgaattaatagaaccctttcatgagaaggatgaactcttggataaccaaaaagacttccttattaaaaactacaaaaaacatgttaaattgaaaaaagctttatctccagaagtatagaaatgggaaaatttattcttagagcttaacatgggcaag

SEQ ID NO: 12032 - DNA, 669 bp, Zea mays
agcttctcctgtccggaataatctacggtattccggacaatccatttattatagttatagatgaaccttgggcacctgtgtaacatataatctaaagcaaactatttagtccaattgtttgggttgggcgattcaaccaccaaaattaattagggactaggtgtaagcctaattccctttcaatctccccctttttggtgattgatgccaacacaaaccaaagcaaatatggaagtgcataattgaactagtttgcataatgtacgtgcaaaggttgcttggaattgagccaatataaatacttacaagatatgcatggattgtttcttacttataacattttggaccacgcttgcaccacatgttttgtttttgcaaactcttttgtaaatacttttcaaaggtcttttgcaaatagtcaaaggcaaatgaaaaagattttgagaagcattttcaagaattgaaattttctccccctgtttaaaatgcttttcctttaactaaacaaaactccccctaaagagaaccccctcctaagggtcaaagagggttctgaaataacaatttggaaatactctcccccttttgaacacaatagggatgccaaatggaaaatccaccacttggaaaatttgaaaatggggggggggcggaccctttaggttgggg

SEQ ID NO: 12033 - DNA, 642 bp, Zea mays
agctttgggcacccatctgaatttaggtcagcttatcacccgcagtcttatggtcagaccgaaagaaccaatcggattcttgaagacatggtgagagcctggagcgttgcaagatcagtccggatgggataacgagattgccctatgtagaagtttccctataacaacagttaccaggccagttaggaaatgtcaccatttcaggcgctctatggaaagaggtgcagaactccgatgcaatgggatcagcctggaaaaaggcaagtgtgtgggccagacattttgcttgaaaccgaagagaacattaagatgggcccagagaatctgaagatagcgcaatcgaaaacgcgaagctatgcggacacaagaagaagaaagccgagtttcaaagccgggactttgcctatctgcaaagcgccaccgaacagaggaatcaagaaggtccggagtcaaaggcaagctaaccccccgcttcactggtccgcatcaaaatctcgcaagacgtggaagaactggccgtatcagaaaagatcggccaaaaaaatcggccggatggcaatgaagaccttcagggggtctcattagaaaaagcgctggcgtggcccaaaacaacaagggccaagggaagggcctgaagcccaa

SEQ ID NO: 12034 - DNA, 508 bp, Zea mays
agcttcggcaatttttcttgaaggagcacgactcaaaggttttgttgtttttaacacgacatctagcacaattggcatccttctcctcttaggaggtgcgacagaacccttttgtgccttcggcactggtacctctgttgaagggctcaaaatctctagcatttttggtatttcttcaaattttgacccttcagccttatccttatcagccttcgtctcaactagctcaactgaagggatctttggcaatatagccggctcttcaagcctttgcatgggaggaacaatttcttttgttttggtagccgaagaagctcctttgctaaattcaaggatcaccaccggttcgatgtaacgcgaccggtgagtaaaaaccctcatcttcttgcccttcggctcaactgtgaaggctgaagcggcaacctttctagaaacaataatctttctttttacccattgccctcgcagcgggtaacaatagtcagggtatacgaagctaatagcatcg

SEQ ID NO: 12035 - DNA, 585 bp, Zea mays
agcttctccaccatgtcgctgctagccaagttgttgcagctacctccatcaatgatcaaacgacatgaacgctccttaatgacacactttgtttgaaacaacgtatgtcgctgattctgctctgccttctccatttgtgcactaagcacacgctgtacaatgaggctctcataatgctctgcatcatctgcaccaatctgttcttcgggtggttccttagtgcctacatcatcagccgcaagcaaagcaagtgtagcttcatccaaatcactagcagaggaatacccaccatcgtcttttaccaccaaaacacgctgattaggacaataacgctgcacgtgtccatagcccttgcatcgataacacagaacatctcttgttctacctgtggaagctactgaagaggcactacctgcgggtttctgggcagatttggttgctgaatttgtggaagatgcacgtggtttgtcgctggaagaaggcgggggtgctggtcgacttggcgagggagttggggctaatgtacggccggtcatggatgtattcctgcgctgttgccatgggggaaattttcctgcagaaaca

SEQ ID NO: 12036 - DNA, 667 bp, Zea mays
agcttaacaaaagaagtttctagaatcaagaatattgagctcatgcctaaatctgttaaaattttgtccatcaaggggcttgggaaagatatcggctaaatgatctttagtattaatgtaagaaatctcgatatcccccttttgttggtgatccctaacaaaatgataccgaatggctatgtgcttagtgcggctatgctcgacgggattgtcggccatcttaattgcactctcattatcacatagcaaagggactttggttaatttgtaaccgtagtcccgcagggtttgcctcatccaaagcaattgcgcgcaacaatgtcctgcggcgatgtactcggcttccgcggtggaaagagcgacggaattttgcttctttgaagcccaagacaccccggatcttcccaagaactggcaagtcccccaagggctcttcctattgattttggcccctggccaatcggcatccgaataacccatcaaaacaaacgtggatccccgaaggtaccaaagcccaaacttagggggataaacccaaatatctcagaattcgttttaccggccgtaaaggggggattccttaagggtcggattggaaatcttgcacacattccaacgggaaagcataatgtccgggcccaaaggcccataaattaagccatgaacc

SEQ ID NO: 12037 - DNA, 672 bp, Zea mays
  unsure (1)..(672): unsure at all n locations
agcctgatgtatataacaaatgaaggaagattaggtctctactgtacaaaactattttatatttggagtgtgtaatgttgaattgaatatgtaaattattgcagtttatttctttgcgatgcatgaaatttacacacataccgttttgagccttcggcgaaaaaatgccttcccttcttttcatgctttgtaaagaaaaagatccatactttgttaagaaagatatccattctttgtaaagagagatcccttcttgtgacaaggttgataaaactgtatttcccgaaacttacttcgtgccttagcacttttttattttgatgaagcatttgccgaagatcagcttcgtatccaattctcgtgttattgatgcaatatgatgtatgatgtgatgttatgcgaaatgatgtgatgatatgatgacaaatgatgaggatgccgaaaacacacacccacacgcccacactggaacacacaagctttgcatccccttaggaacgacttttgagcttcttcaccttctatttcggtgatataagttctgcatccccttaagaatgtcttttgaacttcttcgccttctatttcggnggtataagttctgcatccccttaggaacgatttttgaacttcttcgccttatatttcggcgggatttggctctgcattccc

SEQ ID NO: 12038 - DNA, 589 bp, Zea mays
agcttgccttccccttagtctatcatccgcagtcccacgggggttgggggtaccgcttttcttgtggaaaaatcttcacaggctgtcaaaaagatgctcatcgatgaaaaaagggccgatggaccgatttgttaccccgggcaatctgggcactaaacacgactgaatgcagggcgaccgggtttactcctttccgccttctatacggatcggaggccatgaccccacaagaaataaaacatgggtccccgtgaacagtttcgtcagccgtccccgacgtggacgagccaacttcaaacgatctcattgacggagaccgagtcttctccctacaagccctaaacaaatatcaagcccagacaaaagcatggcgcgaccacgcagtcatccccagggaattcaccgaagggacctcgtactcgtccgaacagctcggacagagtccaggggcaagctggaccccaagtgggagggcccctttatagtcaagacgaaagcttcccccagcgcttacaggctcacaacgccaaacggcgaagacccggagcactcctggaacattgacaaccccccgcaattttttgtttga

SEQ ID NO: 12039 - DNA, 605 bp, Zea mays
  unsure (1)..(605): unsure at all n locations
agcttgtggcgccctcgggcgtcttgccacagccgaagtaccaagtctcccacctggaagcctcggggccgaacccttcgggcgtggtagcatcgcagggactgctgatatcgcgccgagtatagtagggccacgtcccgagcctcttcgagctggtccagtgaatcttctcggctggtctggttgcttcggtcgtcgtacgcctttgtcctcggggaaccgtattctaagtctgtgggtaagacagcctcggccccatagactagaaagaacggcgagaaccccgtggctcggcttggcgtcgtcctcagactccagaccaccgagggtagctctttcatccaccacttgccaaacttgttgaggtcggtgtagatcctcgatttaagtccctgcaaaatcataccattggcacgctccacctgcccattcgtcatggggtgagctacggcggcccagtccacatagatgtggtggtcctcacagaagtccaggaacttcttcctagtgaactgcgtgccattgtcggtgatgatggagttcgggaccccaaagcaatggatgatggttgtgaagaacgccaccgnctgctcggacctgatgct

SEQ ID NO: 12040 - DNA, 618 bp, Zea mays
agctttatcaaatgtacgtgaagagtgccttccttaatggaccaatcatttaatttgtctacgttgagcaacctcccggctttgaagatagtgagtaccctaaccatgtatataaactctccaaggcgctttatgggctcaagcaagccccaagagcatggtatgaatgccttagagattttcttatcactaatggattcaaagtcggaaaggccgatcctacactctttaccaaaacacttgaaaatgatttgtttgtatgccaaatttatgttgatgatattatatttgggtctactaacgaatctacatgtgaagagtttagtaggatcatgacacaaaaattcgagatgtctatgataggggagttgaagtatttcttaggatttcaagtgaagcaactccaagagggcaccttcctaagccaaacgaagtatactcaagatattctaagcaagtttgggatgaaggatgccaaacccatcaagacacccatgggaaccaatgggcatctcgacctcgacacggaaagtaagtttgtggatcaaaaggtataccggtcgatgatagggtctttactctatttatgcgcatctcgaacggaaattatgctttctg

SEQ ID NO: 12041 - DNA, 649 bp, Zea mays
agcttggaaaaatctggtatgaatcggcggtaatagccagctagtctttgaaacttcggacttgatgtacagtggttgggggtttccactccaaaatatccttgactttgctgcgatccaccgcaatccccttggcagataatacatgtcccagaaattggatttcttccagctagaatgcgcacttactgaacatagcatataattggtgttctcttaagcgcgtcaacacgatccgtaagtgctgggcatgctcctcttcattcttggaatatatcaagatatcgtcaatgaataccaccacaaacttatctagttcgggcatgaataccgagttcataagataggtgaagtgggcaggagcatttgttagtccgaaagacataaccaagtattcaaataaaccataccgcgtagtgtatgcggtctttggtatatcttcgggccggatatagatctgatgatagcccgatctgaggtcaatcttggagaagatcctcgctccagttaattgatcaaatagaatgtcaatccatgggagaggttacttatttttgatggtaacctcattagggggtctataatccacacacatccggagtgtttggtccttctttttaacaaagatggttggacaaccccaaggtga

SEQ ID NO: 12042 - DNA, 661 bp, Zea mays
  unsure (1)..(661): unsure at all n locations
agcttaatgcccataaaagattttctaattttgttaagggtaaagcttttatggtttaggataatgagggctatattttatatcatgctaattatcctgagcacaaaattaggagaattcatactagaaaacctcataatgtttctcaccatgcttttatttataagaatgaggcttctagctctaggcattccactcatgttaaaatgcctaaaaggaaaactcctgctgcatcaaatgagcctaacatttcatttaagacttttaatgcatcttatgttttaactaacaaatcagggaaagtagttgccaaatatgttgggggcaaacacaagggctcaaagacttgtgtttgggtacccaaggtgcttgtttctaatacgaaaggacccaagactgtttgggtacctaagaacaaggcctaaattgttttgcaggtttatacatccgggggctcaagttggataattgatagcggatgcacaaaccacatgacaggggagaaaagaatgttctcctcttacgagaaaaaagaagatccccaaagagctatcacattncgggatggaaatcaaggtttggtcaaaggattgngtaaaattgctatatcttctgaccattctatttccaatgtttttcttgtagattctgtttgctttct

SEQ ID NO: 12043 - DNA, 660 bp, Zea mays
agcttcttgaccaaatctaaactcaccaaattgttacagcatcctccttcaataataacacgagcacgtcgatccttgatgatgaagaaagtctggaacaaattatggcgctgctgctgctgcccggaggtctctagctgagcactgaggatacgctgcacaatgatgttccagaaatttgctatggcagcatcaccatcaatggcagcatcatctctggcatcatcacttgtaacaccatcatcctccacattcgacgcactaatgtagccatcgtccgtagcaatgtacgtccgttggctaggacaatccttcttcacgtgaccaagcccatggcagcggtggcactgaatgctcgaaatgcgtccactggaaggcgctgctgaatctggtttcttggcaggtacctgaaaagtagatgtacctgcggtgggagcggaagacgaaggtcgtgtgtgcgctggaggagtccgaggtgtgcgaggtgtcatctttggcaaggggggtggcgccaaaggtactttgggatcgatgctgtgactgatatcgtccctgcactttcttctctgcaagcatagcaaactagaacaacttggtgacagtgtcaaaatctttataatcaaaaatattctgtatttcacgcctcaaacccgaataaaa

SEQ ID NO: 12044 - DNA, 636 bp, Zea mays
agctttgaaggatttccggtgtttagtaatagaggcggacggtcagatttatatgtatttagggctaaaggaattgagtatttaagatcccactcaatactcataatgatcatgcctagcttttcgatcaaaaggtcggtacatgcatacaactagaccaagtatattttctcctatataactctagcacccttaattctagtttatttatgataacattaaagagtgtcaaccatctgtaactataatttgtatcactcttctcatttgggtgacaattatattgtaatgacctccgatgagaatgggtaaagtttttgaattgcaagcttaaactagctcagttaaaattgctctttatgtttattctaagttgcatcatagactgccataagtatccactctaaaccacccttcctatttttaagcttatacttcatttagaaattgccatggaagatagctcctatatcatatgtgtcaaggtcgatgacacccataaggattccccctaaccttcctctaagtgcaacatagatctagaagttcttttgagcactaagattatttagaggcccatctatgaattttggtcttgctatttctaaaaacaactataaaattttgccccttcat

SEQ ID NO: 12045 - DNA, 647 bp, Zea mays
agcttgtgaaggttcttcatctccacatgtgctaagcggcgatgccttttccagtccatgctagtcttagcaattaagcatgcatctagaccggcctcctcttttgcaaaatcaactaagtaaagtttgtcgtctaatacacccttaaaagctagtgaaccatcacttcttctaaagacggacacatctacatttgtgaataaacaattatatcccatattgcataattgactaacagataacaaattatatccaagagactcaactaaaaacacattagatatagagtgctcggatgaaatagcaattttacctaacccttttaccttgccttgattcccatcaccgaatattattgaatcttgggaatccttgtttttgacgtaggaggtgaacatcttcttctcccccgtcatatggtttgtgcatccgctgtcgataatccagcttgaacccccggatgcataaacctgcaaggcaaatttaggcttgggtcttaggtacccaactcatgttgggtcctacaaggttagcacaaatattcttagggacccaaatgcaagttttgtctcccttgcattttgcccctaaatttctagcaactattttcctatcctttctacaaatagcaaaggaagcatttaaag

SEQ ID NO: 12046 - DNA, 537 bp, Zea mays
agcttgaagccatcgtaagtagcataagcaaggaatatacttatttactcaagcctaactatgggggcataagtttcatcaaagtccaaaccttcgacttgtgaataacctttagccacaagtcgggctttgtttcttgtcactacaccatgctcatcttgcttgttgcgaaatacccacttggtacctacaaaattttgattaagacatggaactaaatgtcatacctcattcctcgtgaaattgttgagttcctcttgcataaacactacccaatccggatctcttagtgcatcctccaccctgtatggctcaatagtggacacaaaagagtaatgttcacaaaaatgtgcaatccgagatctagtggttacccccttatgaatgtcaccaaagatggaattgacggggtgatctctttgaattgcttggtggactcttgggtgggggcggctttgatccctaattccttggatcatcttccttatcttcattatcttcatctcccccttgaacattgaattcctcttgaggggg

SEQ ID NO: 12047 - DNA, 620 bp, Zea mays
agcttgtctggtggctttcaacgtcatgtgcagctacatcatcaccatagacctgggtcaagagcatatagcttttaaggtatggccccttgttagtgattggaaaataccgaaagagactgatgctagctcgagttagaatgctgggaaaggtggcttggtgtatctgagatgtacctatcgttataggaatcaatttggtgaaccggacgatgagtggcttgaggctatcgaagcaactagtgatgagatgttgggggcctacaccaaggctgaggacgaagctatgaataccgcctttggtgcctgagggaagggaagattgaatagggttcttgatgtcattgaattcgtttatgaaagtcaccttgaggggggtgaataggcgaaacctgaaaaatataaactttgaacacgaacttcacccggggttaggattagaaataagtaataacgaaatcggagtgcagaagagagttcttcttgctatgagttgctcaatcaatgtggatgactttgggagctaactcaaaaattgtgaacaagagaacttaaagagaggggaaaggaagtatcaaatcgtaggataatgatcaacacaaatgaacaccatgatttgt

SEQ ID NO: 12048 - DNA, 668 bp, Zea mays
  unsure (1)..(668): unsure at all n locations
agcttttaccgntatttaaaaagagctccataaacaaggtttctatactctatttggtattttggttcgaacatgtatacaacgttacattattcttcaaatcttatttaaaattagaaatctttaatttaaggcatggttaaaataatatatgacacatgcagtgaaatttaagttcttaacataactgatacattagacatttaccaaacccaccaattcattcgtaggacactggtaaggtctttcaatatgacacatttgtacatttgcaagttatagttcaggtgggtaagatttgcatgttggcggaaccctttgtggtcagtacaatttgtgatataaagagaaccaaatggtatctcactctgcccctaatggctaaatatggaaagcaagttgagaagattggtccttcctggtgcactgtaaaaaaagtcaaaagagcatgaaaaaacaaaaaaactaaaactagaaatgaaagggaggagttggcattaggacactagatcaagcggcacccctttgggcgccctatccaacaccacggtttacaaaaccgtttaacctacaaaaactgctacccaccggtaacggtttaccgtcagtaaaccgggggaaaccgataaaaacccaccgggttgactaaatcaaatcaatttgaattc

SEQ ID NO: 12049 - DNA, 601 bp, Zea mays
agcttgctaaaaatcttttcatccagggcttggtgaatatatcaactaattagttttgggtgctaacataggcaatttcgatatcccccttttgttgttgatctcttagaaagtgataccggatgtctatgtgctttgtgtggctgtgttcaacaggattaaccgccatgcagattgcactctcattgtcacataggagaggaactttgctcaacttgtagccataatccctaagggtttgcctcatccagagtaattgtgcacaacaatgtcctgcaacaacatactcggctttggcggtatatagagctactgaattttatatctttgaagtccaagacaccagggatctccccagaaactgacaagtccctgatgtactctttctatcaatattacatccgacataatcagcatcagaatactcgattagatcaaaggtaaaatcccttggggtaccatagcccaaacttaggagtgtaaactaaacatcttatcattcttttcaaggcccaaagtggatttccttaagattggcctaaaaccttgcacacatgcatactgaaaagcataatattcgatcgggaagcccaataaataa

SEQ ID NO: 12050 - DNA, 641 bp, Zea mays
agcttgtgaagccaatcacaagtttgttgaagaatgacattaagttcaattggttttttaattgtaatgaaacttttgagcaactgaagacactattgaccactgctccggtattggctaaccggacatcaccaagccttttgatggttattgggatgcatctgacagtgggctcggctgtgtactgatgcaagaaggccgagtaattgcgtatgcttcaaggcagttgcgccgacatgaggagcactatccaactcatgatctagagctagctgctgtggtttatgccctaaagatttggcgtcactatctgctgggaaataattgtcacatatatacagatcataaaagtttgaagtatatcttcacccagtcagaggtaaatatgaggcaaagacgatggcttgagctcattaaagactatgaactggagatccattatcacccaggcaaagccaatgtggtggcagatgcgttgaatcgtaagacttcctgccactgtcttatggcgaagacctccgagaacactttgggtcaagaaatggaaaaacttaaacctgggaatcatccaacagaggactctaaatcaactaaagcttgagtcaatcattttgcaaaggataaatgatgctcaaaaagaa

SEQ ID NO: 12051 - DNA, 609 bp, Zea mays
agcttgtggagtttacaactgttttgtgttgctgctatttttcaattcagagtttttatttttgacaaaagcattgtgacatgtattttagtttagagaaaataaaaaatagcaatgcagatgtatatggacttgggggtttgattattcatggtgcagctgcaacttgaggtcgacagcagcagcaacattgtatattaagaaatttgatagagtacaatagttttttgagagtatattaagaaatgaacatatctatctatacacaaacactagcactcacataacacaggtatgtgctttcccgctgaccgcgaatgtgtgtactttgtactacaatcaggtaacaccatataggttggctgtttgatcttcaagtagatcctatatcacagtagttactggcactttctacttgatgagtgtgacttctagtttgaatccacagacaactccttcagatttgacaaaaaatatgaacatcttgaaccttgatttggggtataactttattgaaaggagttcatatttgaaggtttgcacataccactgtttggcaatgaatccattatgaattatttttggactaacaaatcacttttttcattt

SEQ ID NO: 12052 - DNA, 677 bp, Zea mays
acccgcaggcatgcaagcttaaagccatggtaagtagtataggcaagtaatatacgaattgttttatgcccagctacaggcgcataggtttcaccgaaatcctaaccttcgacttgtgaatatcccttggcctacaagatcgggcctttggtttcttgtaaccacaccatgctcatcttgcttgttatggaagacccatttggttcctaccacattttggttaggacgtggaacaatatgccatacctcattcctcgtgaaattgttgagttcctcttgcattgccaacacccaatccaaatcccttaatgcatcttctaccctgtatggctcaatagaagacacaaaggagtaatggtcacaaaaatgagcaacacgagatcgagtagttacccccttatgaatatcgctgaagatggagttcaaggggtgaactccgttgaattggttggtgggactctggggtggggcggtcttgccccctcatcaacctccttggcttgatcattaacatctccccctggaacaatgggcccctcttgagggggctcctcttggtattcattttcatcatcttgagcctggacctcatcttgagttgggggaaaatgcttgcatgggaaaatgatgggtgatcttgggcttggggggggcttttcggaatcccttaggacaca

SEQ ID NO: 12053 - DNA, 608 bp, Zea mays
agcttcctccagtattcttaagcccctcagcatccgaagataacaatatgttccactaagggttatgaagctggttttcggctcatcctctttcttcatccaaatttgatggtagcctgaataacaatctagcagactcataagctctgacgaagctgctgcgtcaactagggaatctatccttggcaatagaaactcatccttcggacaagccttgttgagatcagtaaaatcaatacacatcctccatttgtcattggccttttttaccataacagtgttagccagccattctggatacttcacttctctgatgactccggcgctaaagagtctttttacttcatttcgagcaccttcggccttgtcatcagacatcttccgaagcctctgctttctgggtctgaaggatggatcaacattgagcgagtgttcaatatcatccctgttgacgccacagacatcgttagccgaccatgcaaagacatctttgttgttgaatagaaaccttatcagggttttctcttgttcctcagacaattgagatcctaacagcaccttttgctctgcgatatcttcgcataaaagcatgggttttggttgatcgg

SEQ ID NO: 12054 - DNA, 653 bp, Zea mays
agcttttcaacttacagctgactaacattgcatgccttggttgctgtttgctgttatctctagcagacgggtgggtaattatttatctactccagagcatcactcatccgagttaaatgtctctgctaaccttttaaaccaccactttaagagatataccaaaggaactcataatccaatggccatcgtctttcagaatgtatcctgttcttggtctagcagttctgttgctgagctgaacatagttctcagagatatatctttgcagctacaaaaagggctctttattgcaattgtaggcgaggtaaccttttcctcaacgaacataggtatttgcaagaatctcatcacttgcacagaagccagatgctcttcaaaaagggattagcccaagtgatgctgcattcacactgggaattgctccagctttagcaaaggaacatcttctaaatgcataaaacaaaggtgtgtgtggctgcaactttcaagtattttgcaagctacgtgtatgacctgaaaattaaactgactgtctatttctctcaggcctgttgtgcaaaaatgttaattcagatggattcccgctttttaacaatttatttaatgacattgagcccccaaatatccactcgtaaaaaaatcacagccctgcc

SEQ ID NO: 12055 - DNA, 594 bp, Zea mays
  unsure (1)..(594): unsure at all n locations
agcttcatacccgtgttacctgctgttgagcaccatnntgagtgcgctttactgtccggccctggggccaaacggtccgcggtccggacagtccgcgcatatgggccggacggtccgcgcaggcgcagaacaaattaaggttccgagcttcttgctatgtttgttggcgaaaatctcgggataagctcggaaattagtttgtaaagggtccagcccccctcctctataaatagagaggtatacggccgatttgtaatcatcaatcgaatcaaacacttctatttcgcattttatcctaggagtagttctagtctagtttaggtttagcctctcgatccccaaattcttcggctctcttcgactctatgccgattagaggagtctaggtcggccggcccgagcctagacaacccctaggatctctcctccccgacggggtccctcccgggagcgaaatccaggcgccgtctgcgatctcctggcggccctgcgcatgggattcacgccatccaagcataccttttaattatatcaaatgttaatacaatggggaggctatgacttaaaacaaggacaatgctgatgtatcggcat

SEQ ID NO: 12056 - DNA, 635 bp, Zea mays
tagcttcacggctcctcggggaagctgtccacaggctcggttgtagtgtttgtctctggaaatggctgtccaaggtggccggcgcttgggtggctcgggcgggtagcataaagctcgctggagctaaaggtggtgtctggccagcgaaagtgagtgcgaagtgaggtgaggcgtgtctgggggtggtcttaaaggcgtgggcgagcacgaccgaagggtggcactgacacgcgctcggggcttgcgcgggcgagcgccagtgcgcgctctggcgtctgggcacggcgtctagcacgaggccgcgcagagaaaggtcaagttcaagagcgattagtcccttacgttaagagaacggctctgataccaattgagagcacctagaggggggtgaataagtgatcctgtaaaaattcaacaactaataaccacaatcttggttataaaaatgttagtgcaatagaaccaagtggctatggagcgagctcttgcgaatacacaagtaatcacagaaaagcaatcacaagagacacgcgagtttatcccgtggttcggccaagtaatacttgcctacttccacgttgtggtgttccaatggacgagggttgcactcaacccctttcagtgatccaatgatc

SEQ ID NO: 12057 - DNA, 644 bp, Zea mays
agcttgctcgacactggacggaagtccaagcgcatgccgtggaacggttactgaccgagcgacgacgaccatgcatatgcatggcgtgcgggggcatcgctgtcagtgcatgcatggaagcaggaacgaatagtcggcacgcacacagacgacgagtcgacgacgacgacgacaacgatgcggccggcggcggcgactgactgcgtgcggtttgtaattgactggtgcgctatcgttgtgttgtttgttcgccgccgccgccgtcgttttctggcgctgcggtgccgccggtccgtgcatggctatagctcgcgtggcgtgcgtacgtatctctctcccgactcccgactctctgtggccggccgggggtctgcggtctaccatgcccatgttaccgtgcaattaggaaatatacagggaataatgtcttgatttgtgccttcgactaaacaggttagagagctgaatgtcaaagacacatctccatggacgaaccgaagacctgaaaacaaggggggacaacggggtttatttataaaaggtctccattttacagtgaaaaaaaaggggggaccaacccccgaaattaggaacgggcagggaggaggaaaagggaaggctaactgcagctaactaggggagaa

SEQ ID NO: 12058 - DNA, 596 bp, Zea mays
agcttctcatgtcaggaataatctatggtattctggacagtcgatttataatagttgtagatgaacttatgcacctatgaaatgatcaactaggcaaactggttagtccacaaggtttgtgatgtacgtcaaacaccaaaatcgactataaaaaatattgagactatttccctttcacaaacgacatggagatgtagcagaacgtaccaaagggggtgatgaatgttgtagcatgctggtatgcctccttcatagcgatttggtggtagcctgagtaggcatctaggaaggagaggagttcacacctagcggtggaatctacgacctggtcaatatgtgggagaggaaaaggatcctttgggcatgccttgttctaccccgtgtaatcaacacacatcctccggctcccattcttctttttttacgagaacgaggttcgcaacccacactgggtggataatctatttcacaatcccggccaccaagagtttttcgatttcctcaccaatggccttgagcttcttgtcatcaaaacggtgtagccgctgagcgactagactcgatgtaagtcggatattcaatgagtgctcggcaag

SEQ ID NO: 12059 - DNA, 673 bp, Zea mays
agcttttgctaatgatagacttgccagtattttgagagaggaagaaattcgtcacttccagttggctaaagtcaaacacctccttgaaggggacgataacacaaaatatttccatttagtggctaacggcaagcaccgaagacaaaaaatttattctttggaaaatgatgacggcacctgtattgttgatgaggaagagcttaaaaatcacataacaaattactacaaaaacctctttgggaagccaaatgcaacatcgatcgaacttgatgaatctattatccatgacatacctcaagtttcggattcagagaatgaaattttaactgctaattttactatggatgaagttaaaaaggtggtattcaatatggaacataataaggctcctggccctgatggctttccagctgagtttttatcaagttttctgggaagttattaagtatgatttgtttgcgttgtttgaggactttcataaaaattctttaccggttcacagcttaaattttggagttattactctaatcccaaagaaagacaacgcaactaaaatccaggactacagacctatttgcttacttaatgtttcattcaaaatcatcactaaagttcttacaaatcgaataggtctagtagcagacagaattgtcagccccactcagacaacttt

SEQ ID NO: 12060 - DNA, 662 bp, Zea mays
  unsure (1)..(662): unsure at all n locations
agcttacccatgacgaggcatgtgaccagttaaagggtcctcggtcatcaagcctacattgacatggnccttaatcgactcatacggagacactacaccgaggctcctttctcgtgcaagtcaaccgcccggtctcagcttaatcattttaacccaaggtttggtacctggcagaggtacatcttttccgatgttgaacccatcatggccatgatggatccaccatcaagttttattttcaaaaacatccctcccactttgcaacatcatcttttgtaaaaacaaaacatttgtttagctagagcatgactaagcataggaaaaaccttttgtaaaatagggattcaaaggaaggtaatcaaattcaaggaaggaaatgcaggaattgttttagcactcaactcctataacctaatgcatcaagcaagtgagaaagattttaaaagaatcaaagaggtggcaaatgcaccggggcttgccttgtttttactggtgaatcaggctcagacccgcagatgtcaaaatagaaacagttgtctgcctgatgttccttacgtggtggtggtggtgtcctttcttcttcaacttcaacttcttcttcgtttgctatatatagccaagtataataatgaatgctcatgtagtgctcatgaagatccaaa

SEQ ID NO: 12061 - DNA, 628 bp, Zea mays
agcttgtgaaggttcttcatccccacatgtgctaaacggcgaagccacatccagcccatgctattcttagcaattaagcatgcatctagaccggcctcctcttttgcaaaatcaactaaataaagtttgccgtctaatacacccttaaaagctagtgaaccatcacttcttctaaagacagacacatctatatttgtgaaaagacaattatatcccatattgcataattgactaacagataacaaattatatccaagagactcaactaaaaacacattagatatagagtgctcggatgaaatagcaattttacctaacccttttaccttgccttgattcccatcaccgaatattattgaatcttgggaatccttgtttttgacgtaagaggtgaacattttcttctcccccgtcatatggtttgtgcatccgctgtcgataatccagcttgaacccccggatgcattaaacctgcaaggcaaatttaggcttgggtcttaggtacccaactcatgtttggtcctacaagggtagcacaaatatccttagggacccaaatgcaagttttggcctccttgcatcttgcccctaaatttttagcaactatcttcctatcctttctacaaat

SEQ ID NO: 12062 - DNA, 531 bp, Zea mays
agcttttacatataaaaattcccaaatggccactgaaatcaccagtttggaacattatatgttactaaatttcaactctcatcaaaattgacaaactataccacaccctcactagagtgcaaaaatcaacagtgaccataggagcaggtgaagataattgtttaagggtgggcggcaagataagagataaatacatatacactatgatgaaatgcagcatacagcagaggcaagcgccgtcgcccatggcgttctgctgcggggttgccctgtccgtacccattgcttttccatagatatgcatgtaccacaccactgcagagagctaataaatgtatgtcatgtcgctagctagctaaatgccatgtccatcagtcattgcatcatatacacgtcgttgcgctcataatcgtcatcaatgatcaagctagtactcagctctttactccaccttctccccccccccccccccttaacaagcaattgggctccatccaatctattgcaatatcctgaagaatgtacatgctg

SEQ ID NO: 12063 - DNA, 549 bp, Zea mays
agcttcctggcaacagcctccgtctccacctccgctgcaacaaggccagcagccttaagggagccagtatgctccacaccaaagggacttcagagagcagtccgaagctcgtacagtcaacagcactgtgccagagtcaaagcacatctattgacaaatattctaccttaatagcaatcttttttattcagttttattttctgtaataaaggacattgtttaggtttcatgtaaatagtttcgttgattcccacaaggaaaatatattttcttcacaggcttaaatcgttgaagtttaaagacttgtgataacaaagaggaccttcgaactatcgaaaattcttcgaagcaacaaaaagtctttctaaggaacgcagagtaagtttgctgaagtcataaaaaagtcgttccaaagggagcgcagtgtaagttttctgctccaaagtcgttccaaagggaatgcagagcatacagcgaaaagtcaacgctgataccgcctaagtaaaaggcgaagcgcgaaaagtcaacgcgaataccgctgaaagtaaa

SEQ ID NO: 12064 - DNA, 664 bp, Zea mays
agcttctaaagggagagcacattttaggactaaccaatgtttattttgagaaagacagggtttggagcgcatgccaagcaggaaagcaaggtggtgctcatcatccacacaagaacatcatgacgaccgacaggccgcttgaactactccacatggatctattcggcccgattgcctacataagcatcggcgggagtaagtattgtcttggaatagtggatgattattctcgcttcacttgggtattctttttgcaggaaaaatctcaaacccaagagaccttaaagggattcttgagacgggctcaaaatgagttcggcttaaggatcaagaaaattagaagcgacaacgggacggagttcaagaactcacaaattgaaggcttccttgaggaggagggcatcaagcatgagttctcttctccctacaccccttaacaaaatggtgtaatggagaggaagaatcgaactctattggacatggctagaaccatgcttgatgagtacaagacttcggatcggttttgggcggaggcggtcaacaaccgttgctacgccattaaacgggtgtatctacaccgaatccttaagaagacaatctatgaactcctaaccgggaaaaagcccaatatttcaaattttagagctttgggagccaaatgttt

SEQ ID NO: 12065 - DNA, 646 bp, Zea mays
agcttgctacatgccttcttttttttctccaaagcaggaactttactggaacacttccccacttaaaaagaatgagggtagaactcttgaatcttggggatttgaactccctgaagtacctcataacaagggtgttacagggccttcttctgctgttgctgcttgaccaagcttcagaaagatgactgtcacagggttgattctgggagaaccttcttcttatcttctcttcactatcttcttttcactgaccctttctttctctttgctcttcccactggaggattctatcaaaaagtattaccatcacacattggaggaaaccaaagattattgaaccatgtacaacagtcttcaacccaagaatcaccaagcattgtgatcttaagggcgagggagtgggaaatggggttgcttgcgatttggcagaggggggtttatctggagtgtgctttgcttttagtgagatgggagttgagggagctggtgggaggttttataggcgactgtgggtgctccggtgcggagtggggattatggaacaatgacacgaagcaacaagtgccatggaaaggggggccggtgtttctggcgggaaatggcaatgatgggtgcgccttcaaaagggggtggggcaatggtggtg

SEQ ID NO: 12066 - DNA, 654 bp, Zea mays
  unsure (1)..(654): unsure at all n locations
agcttaaaaaaaatcagaaaggcattagaaaataatgaacaatgatttatattatttttcctagnttacttatataacagagaacctaagaaaaatacagagaccattaatttggaccagttttaaattaaaatgatttatttagccttatatagactgaaaatcaattattagagtggcaaaactataaccaaaataattaataaaaatccagtggacttacaccccccagagccccactacaaaaataaagagcacctcagcccaactttttaagtgaggaaaataaatataaagtgttaataaggcattttccaaataattcttgaataacccttaatgatgcaataatgagcaaccaaaattttgctaagaccataatgtgatgatctaccagagaaaaatgcaaacccatgaaaaagaagcaaactcatacctattgctaataatttaaaagaaaggtcacttaattcaaataatgcataccacccctttccttaagcaaatagaagccaaacttcagaatgattgctcttgccaaaataataacccagaaaaaaataacctcgggggttggagggttttaaaaaaaaggggaagaaaaaaagccccattttgacaaagaaaactggaaaaaaccggaaaaaaaaatta

SEQ ID NO: 12067 - DNA, 578 bp, Zea mays
agcttttagttttgaagcttcggctttgaaaatagctttttagcgtctttcttatagtccgaagataagaagactgctgctgagacgaagctgagcctcgacgaagagaaaaatttggggtttcttatagcgatgtcaaagaccaacacagaaaaaatcacccaggagattctggaaggtttgtctgaggatactggtgacagtgacagctatgatgtggacaggggtggtgaagactccgaagatcgtccatggcgaccaagccattcagtttatagtaaatcaactatcaaagagaatcatcttatcaacatgagaggaaggtattttcgggatttgtccattgtgagggccgacgaaggggaaaaaacttgcccacaccctgaagagaatgaagtcgtagtgtaccgaagctttttgaaagctggactgcgatttcctctaagcagcttcgttgtggaggggctgaaaatattcgaaatctatctccatcaacttacccccgaggcaattataaagctgaatatcttcggggggggccgggagaagccaaggcctgaaacccgacgtaaaaagcc

SEQ ID NO: 12068 - DNA, 624 bp, Zea mays
  unsure (1)..(624): unsure at all n locations
agctttaggggagtgcttttgtaccaatggnagtaattggttagtatctgatgaacttcatgagaaatatgacatcattatatggttgtatttggtagcacctgatgcaatttttttgaattggccaagtagtgtggtctcgtgcccataatagaatagtgacacttagttgatgttttgttattctttttcagatgtgaagaccaagtaggagaacaactcatggggcgtaagcagattttctagaagaggagagcagcacttgatgactttgataggttcaaagtcatgctggcaaaggtcgaggtcaagaacctcgctatcaaatgtttagttcgtgttggcactgtttatattgctcgctcacacctttttctttatgtaaaaacagaggggtggtgctatcaggcaagagctcgccaagttgaagaagacacccatgacttaatggttatcttttagtggatgtcatgttagaagtttttggttctaagttggatcagcaatttcgattgagtggcgataaagaacgaaacactaatatgttccctgggaataccatttaaacttatcaaccatgggtgggcctctaaatattttatcgggattgatttttatttttta

SEQ ID NO: 12069 - DNA, 551 bp, Zea mays
aacttaatactatgacatgaccaagatgtgaatcctatactactccgtgtctgggataagaaaggtgtacttgatcctctgctggatagggctcgctgtccaacataggaaaaaaattttctgtagcccgactgcaaaccaagatgttttcggtcccttccacagacgatgaatgtacctttgtgcatatactacctctgggcggacatggcatatttacctaccttaaataactatctttcccgacacttaacttgcattacattttctcactgggagtccgttcaaaacacaattttacccaacccttttctgtacaccttatatcataagtcttttcatatgccatttaacgtatgattttttatcacttgtgaattgaatatctatgtttcggcccttattattgtttctcattctgtggcaaagcatctttcttgattccactcttgtttaatcctttaggcatattttcgaatctggtgctatgctcctaaacctttgttgggccctccaggttcatcctactgtcttttaacatccacatccct

SEQ ID NO: 12070 - DNA, 581 bp, Zea mays
agcttctaaagggagaacatgtgataggtctaaccaatgttcatttctaaaaagatagaccttgtgcagcttgtcaagcagggaaacaggtgggaggagcgcatcacagcaagaatgtgatgaccacttcaagacccctggagctgctgcatatggacctcttcggacccgtcgcctatctaagcatagggggaagtaagtatggtctagttattgttgatgacttttcccgcttcacttgggtgttctttttgcaggataagtctgaaacccaagggaccctcaagcgcttcctcaggagggctcaaaatgagtttgagctcaaagtgaaaaagataaggagcgacaacgggtccgagttcaagaaccttcaagtggaggagttccttgaagaagaagggatcaagcacgagttctccgctccctacacaccacagcaaaatggtgtggtagagaggaagaacaggacgctcatcgacatggcgaggacgatgctaggagagttcaagacccccgagtgcttttggacggaagccgtgaacacggcttgccacgccatcaacagggtctaccttcatcgc

SEQ ID NO: 12071 - DNA, 659 bp, Zea mays
agcttgtgaaggttctgcatccccacatgtgctaagcggggatgccacagccaactcatgctagtcttaacaattaagcatgcatctagaccgacctcctcttttgcaaaatcagctaaataaagtttgccgtctaatacacccttaaaagctagtgaaccatcacttcttctaatgacagacacatctacatttgtgaatagacaattatatcccatattgcataattgactaacagataacaaattatatccaagagactcaactaaaaacacattagatatatagtgctcggatgaaatagcaattttacctaacccttttaccttgccttgattcccatcgccgaatattattgaatcttgggaatccttgtttttgacgtaagaggtgaacatcttcttctcccccgtcatatggtttgtgcatccgctgtcgataatccagcttgaacccccggatgcataaacctgcaaggcaaatttaggcttgggtcttaggtacccaactcttgttgggtcctacaagggtagtcacaattgtcttaaggacccaaatgcaagttttatctcccttgcatcttgcccctaattttctagcaactatcttcctatcctttctacaaatagcaaaggaaagttttaaagcctgatatattg

SEQ ID NO: 12072 - DNA, 657 bp, Zea mays
  unsure (1)..(657): unsure at all n locations
agcttcggaaaccccatacttttagccatctcccggcagacagataattctttgttttctgggagacagnataagaagtcatcttcgtctgcgccattgaacactaaggcccccttcggatacttcagtgtctcgggcatagtgattagcttcaaaaatctcttctttagataatctcttccccgaagcatgtcatacaatataatcacgtattttggaagatgcttcgggggcagcagtgccagtttcttcactcaaaatttgttctgctatttctggtttttcggcttccaaggatttcaccttggcgggctctgaaggcccggcttcagtttcagactgtggctttgaagcttcggcgtcaaaagtttcagtgtgcacttcagaagttttagcaattttctttggagttgtgcttgaagatttaattgtatctaaaacatttagcacattaaccatcccttttccttttaggggtcactgctggacccttatggctttttgttgcctcagtttttgccgaaagactcaagacttctgatgtctttacttcctcaaccctcggttcttctatttttttagtcactggcacttcggctagcacttcaatatttggcaggggagctggctctttagcttcagtggccgaaggagtcc

SEQ ID NO: 12073 - DNA, 630 bp, Zea mays
agcttttactccagatgctatcctaaaagggggctttagaatgctcgtcaccttttctatactcggagcaatacatacaattcagcaaataattataatattacaccaaagcataagtacaaactgcgtaagaatattctacgtggcggtgctacgagatcgtaggttttaaaaccattaaaatcggagttaaaacgaagaagttatgggtaaaataatatttttaggcgcaataaatctaataaatgttgcatttaaactaatcatggattaaattgaaatttttgaggtgatattaatcactttaacaattatttataataaacgtagggtacaactataaattatattaactatagtgccgagctaattaacataaattaaacaaatatttaactaactaaataattaaaacatgtgggattaaaacaatgtcattactacgtacgcaaagttaatatgaacctaacgtaatttgaacaaattgaaaacaaaatatttgactaagaagataccggatttttaataatttagtgaggctatacaacaataggtgacatgacaagaactgaatgggtaagatcggtttggtaaaaaggggaaatttttggttataaaaacatgacctag

SEQ ID NO: 12074 - DNA, 634 bp, Zea mays
agctttatcaaatggacgtgaaaagtgccttcctcaacggaccaatcaaggaattagtctatgttgagcaacctcccggctttgaaaatagtgagtatcctaatcacatatataaactctctaaggcgctttatgggctcaagcaagccccaagagcatgggatgaatgcctaaaatattttcttatcactaatggcttcaaagtcggaaaggtcgatcctactttatttactaaaactcttgacaatgatttgtttgtatgccaaaaatatgttgatgatatcatatttgggtctactaacgaatctacatgtgaagaatttaataggatcatgacacagaaattcgaagaggcaatgatggggggagtgaaatatttcttaggaattcaagtgaaacaactccaagagggcaccttcattagccaaacgaagtatactcaagacattctaagcaaatttggggaagaaaggtgccaagcccatcaagacacccatgggaaccaatgggcatctcgacctcgacacggaaagtaaaatccgtagaacaaaaaggataccgggcgatgataaggtcactactctatttatgggcatttcgaccggatattatgctttccggatgcatgggggca

SEQ ID NO: 12075 - DNA, 424 bp, Zea mays
agcttataaaaatctggtatgaatctgcgataatacccagctagtccaagaaaactccggacttggtgaacagttgttgggggtttccactccagaatatctttgaccttgctaggatctaccgcaattcctttagccgataacacgtgccccaaaaattgaatttcttccagccagaacgcgcacttactgaacttggcatatagctgatgttccctgaagcgcgtcaatacaatccgtagatgctgaacatggtcctcttcattcttagaatatatcaagatatcgtcgatgaagactaccacgaatttgtccaactcgggcatgaacactgagttcatcaagtaagtgaagtgggcaggagcatttgtgagcccgaaagacatttccaagtattcaaacaatccataccgggtagtaaacg

SEQ ID NO: 12076 - DNA, 657 bp, Zea mays
agcttcggcatgttcgcagaaaaaggaaccgacttaaagatgaaaatgtcatttggacctcgatagaatgctatagaattatcaccaaatgtaaagggcatgtatgtaattttgtatgggttgtaccccgtgcctataaataggtgaacagtatccccgtactgttcacgctgacttggcatttgcttttgcgtcacgcttgtactttctaccttctttcaggaccgaaggtacatttgtaatttgaaatcatttctatttttccatgttaataaaatagaaatgattctatgatgatgtttatattatatttcatgctttatatgaatccttcgtcattacttgttatgtttacgaaagtatgtctcttatgaccttcgtccgaaactcattatttcctgaagggacataatgcttcgaaggacgaagggactttaacacttaatactttctatgttgccttgttcttaactctcagcatttgagaacaagtccccaacagttagcacaataaaatcaagtggctaaggagagctcttgtgaaccacaattgacacaatgagaacaagcccaagagacacagagatttatcccgtggttcggccaaatacaatacttgcctagtccacattggggcgtcccaatggacgaaagttg

SEQ ID NO: 12077 - DNA, 640 bp, Zea mays
agccctgggaactatgcccgtatccaagttgcctgagccattactatttgcacttgccaaaagcccccaggcctgatcgaccacgaccaacacccaacataagactcacctagttatttagccaagaccagagccatgatagttctcatggtagcactatattcctgggggggcactccatgttccaattaatatgtaataatccttgtggaaccatcgggttaacaacaataatgtaaacttaccattttggaacattaaaatcataagcgggagtgactgcataaagataagatgcagcaatagcatagctacgaagggaaaaaataaaacccagggctgatcaagggaaaaggttggaaaggttatctaaataggtaaacccacaaaatatgcatatatatccaaaagaataaactttattaaatgtattgcttgggatcaaacagagtatgcagagggagaaagccactcgccctgcttattgaaaacttgaggttcttccacgtataggcaaaagaacttggaaccttaactactagagcaacccctaaatatcacacaaaccaaccaggaagaaccaacccccctcaataacctacccccattccccatacgggaagcctaaaagaaagcccaa

SEQ ID NO: 12078 - DNA, 687 bp, Zea mays
  unsure (1)..(687): unsure at all n locations
gaactctaatcgaccgcagctgcaatcttctggcacagcctccgctccacctccgtgcaacaggctttctccaanaaggagccagatactccacaccaaaaggacttcaaagagcaacccaaaactcgtacagacaatagcactgtgccagaaccaaagcacatctatagacaaatatcctaccttaataacaaactttttcatacaacactaatttctggaataaaggacattgtttaggctccgtgaaattaaattcgttaattcctacaaaaaatatgtagatatctccacaggcttaaattgatcgaaacccaaagacttgtgataataagaaagaccttccaactaataaaaattcttcgaaccaacaaaaagtcgttctaacgaacgcagaataagtttgaccaaatcataaaaaagccgccccgaagggagcgcacagtaagttttctgctccaaagccgttccaaaaggaatgcagagcatacacccaaaagtccacgcctgataccgcctaagtaaaaagcgaaaaacccccaaaaaccgttcctaagggaaagcaaaagcttaccacgaaaagtcaaccctgaatcccgctgaagtaaaaggccaagaaactcctaagggaggcctaaacccaaaaagcaaaccctgaattcccaaaaaaaataatgggtttaaccc

SEQ ID NO: 12079 - DNA, 665 bp, Zea mays
agcttggaggcatcgatgggtgttctactcaatgtagactcctcctttttctcctccgtcgccttaaatgcgaccggttgagcttcggacgtggagggaccgtcaagctcgttgatcttctttgagcctttgatcatcaattcaaagctcacaaaattcccgattacttcctcgggagtcattagtgtatatctaggatttccacggatcaattgaacttgggtagggttaaggaaaacaagtgatctaagaataaccttaaccacttcgtggtcatcccattttttgctcccgaggttgcgcacttggttcaccaaagttttgagccggttgtacatgtcttgtggctcctccccttggcgaagtcggaagcgaccgagctccccctcgatcgtttcccgcttggtgattttggtcacctcgtctccttcgtgtgcggtctttagcgtgtcccaaatttctttagcacctttcaacccttgcaccttattatactcctctcgacttagagaagcgaggagtatagttgaggcttgggaattgaagtgttgaatttgggcccacttgccctcatataaactttcatcccctacggatggtacctgtacaccaaactcaacaacatcccatatatttttggggagtgagggtaagggaaaaaccca

SEQ ID NO: 12080 - DNA, 663 bp, Zea mays
agcttatgaagattcttcatcccaacatgggctaatcggcggtgccttatccaacccatgttagtcttagcaattaagcatgtgtcaagttcagctctatcaaaatctactaagtatagctgaccctctaacacacccttaaatgctattgaatcatcacttcttctaaagacagtgacacctatatcagtgaaaagacagttgtaacccattttgcataattgagatacagaaagcaaattgtaatctaatgaatcaacaagaaaaacatttgaaatggagtggtcaggtgaaatagcaattttacccaaacctttgaccaaaccttgatttccatccccgaatgtgatcgctttttggggatcttggtttttctcgtaggaggagaacatccttttctcccctgtcatgtggtttgtgcacccgctgtcgagtatccaacttgagcccccggatgcataaacctacaaaacaagtttagttcttgactttaggtacccaaatggttttgggtcctttggaattagacacaagaactttgggtacccaaacacaaatttttgaccccttgtgcttgcccccaacatatttggcaactacttttgccgatttgttaatcaatacataaaatgcatcaaaaattttgaatgaaatgtcatgatc

SEQ ID NO: 12081 - DNA, 662 bp, Zea mays
agcttcaacccgcgatcaaatccacccccttgctgatcttttcaccctttcggtactatcctgcccgagttctacacgaatcactgcaatccgcgcgaatccttgcgcggagggtgccaatggcgaagttcactgaatctgaacctatccaatcactgtaccattggaaccgttcatcaaaacgcctgacagagcaaattaaaagccttggttctccaatttttgtttgacaactttataagccctctgtaacaaagatggtggtctatatatcaactacaattcgactatagagaccttgcccatttacttattccctcaagctaaaatcgaatccaatgttcatcccaagccactgtcagtaaaattttattttcagagaggactgacagcccgacttaaagtccattttactccgaatattacatgaccccaaggcttattcacttaagaaaagctttactcctacagtagctctactagggttgaccctaagcaaattcctcatgaactgaaagatatagggttcccaaaggtggttctatgcactggttttcagacttaagcataaggaaggacggggggacctttttgcaaataagcccaaacttcatcatttggcatgcaaatcctcaaagggaaaaacacatagttagagatgt

SEQ ID NO: 12082 - DNA, 535 bp, Zea mays
agcttgaaaacagtagtggctggtttttgggacatattttttcaatgtttcaacagctgcctgatcaggggggcattcgttagtttaaaatggggtcttgcatttaacattgcgctgttccacactaaggaagctttcctttgttcaatcatggggggtgtataatcatatcctttcctatgatcaagatagaggacagaccaaagcgtggtggtctttggaggtgtgttgttgacgtcctgctatgccctacgacagtgattactgttgcaccacaccagcagcattgttgcagcatatatagcagtcatacttacgataatctaacattctcccccttaatcacacaagccttactatcataaattcatttatcaataaaataacaagtccagacatagagaatcagtgaatcacaatagccaattaagtaccattgaaccctgatgagtataatacatcattctatttcaaaataaacttttttttgacattatgggccaatgctacacatatgtctcgctttttttcaaaa

SEQ ID NO: 12083 - DNA, 281 bp, Zea mays
actgagcatcaacttctaaggaaaccatttggacattttttcattgaaagacagttgtgcctgccgctggaacggttggtcatatcaacatacatatacgactgcggcatctgctctgcctggactattcgcacgtgctacttagcatcgcgggagtaagactgtctagaatcgatgatgactattctcactccacttagggagtcttatagcacgaaaaatcttatactcaagagacctttgaggaattcttgatagcagcttataacgagttcccctaa

SEQ ID NO: 12084 - DNA, 391 bp, Zea mays
  unsure (1)..(391): unsure at all n locations
gcttgcttcggccgaatggtcttttatatcttcataggataaggcggcttcggattgtgctaagaattntacatggtcacagcctttcctctccaaaatggtagcaatccccctggcacccgaaaaggcgcatatgtctcctcgaatatttaaaatttcttaaaaagcttcagcttcgtggctgatccatccaattgggccttcggggtcaccccttataaagttctcatcacttgagaatgcgccaacactggcgaagctggtttttattgtcttaacacattccatagattnttcatagcatcttttcttggatgcacgaagctcttcaacgcttttttccaaatgattngcccattgttcactggatttctcgtttgtttcttcaagt

SEQ ID NO: 12085 - DNA, 297 bp, Zea mays
actgctcatagggaactttttattggagatccccccagtgaaatcttccaatgttaggcaaatgaccttaagagcccctgcgatgggtcagatccgtctggatccttcttcgagaaacaccccacaaggcctaattgagttttcttgggtgaatatccagatccattaagggccttgatgaatgctcggtcgatgcaatgagtcggccataaagcccctgcagcatcacgaataaacctcgctgtgcacctttgtaaagggaaaggaaaatgatgactccaccaccttctctgggaa

SEQ ID NO: 12086 - DNA, 452 bp, Zea mays
  unsure (1)..(452): unsure at all n locations
agcttgtggaagctcacaactcatctattgtgcatgaagttgtggtggtcaccgaggatgttggggtcacttgtgacttacttgatagtcctacaagtgaaccactacctactaactctatgtgtgataaatgcaaaatttctcttatcaatgataatattgctcttgatgaatcaaaaatcgttgctgagaatgaagtgttagtagatagtgtaaatgctctaactcatgatctagagaaggcatatggtggaaaggctaaattggatttcatattgngaagtcaaaggtgctcacttaatcgtgagggtcttggatatgttcccaagaaaggaaagaatgcttttataaagcanaagatattatttgtgaaagaatgtgacaaagtgtgtcacaagtgtcacaagaagggacacattaagaagaattgtcctaagctcaagaatgtatca

SEQ ID NO: 12087 - DNA, 329 bp, Zea mays
  unsure (1)..(329): unsure at all n locations
tctcattttcgggctgacctcttcttaatctcgagacgacatcccgtaaaggggctagatctgtaacaccctgaattctggggtataaaatttctctttctaatatccaccagacttagttggtacactgtgttttccttgcttaccattctcttacctaaatagtgaagagtactctctggtttatataattgcaagctgagtaaaataaaacccaatagggtcatgattgttgcacgacacgctgggacatcttttcttttcgaatgtcgatctattctagntgtgcattcacgtaatccgcatatttgtgttctgaagttgaattc

SEQ ID NO: 12088 - DNA, 388 bp, Zea mays
  unsure (1)..(388): unsure at all n locations
taagtagcatatgcaagtttattgtgaatcgattctactctagctacaggtgcataggtttcaccgaaatccacacctttgactcgtgaatatcccttggccacaagtcgggctttgttccttgtcaccacaccatgctcatcttgcttgttgcggaaaacccacttggttcctacaacattttggttaggacgccgaactaaatgtcatacttcattcctagtgaagatgttgagctcctcttgcatcgccaccagccaatccaaatcttgaagtgcttcctctatcctgtgtggctcaatagaggaaacanaacatactacgagcttgtggcgggctttcgccgtcaccactccttcttggcgtgatctcccgacattacttcgag

SEQ ID NO: 12089 - DNA, 243 bp, Zea mays
ttaagtacactcttaaatttgaagatacatttattgagccagacgatgagtggttgaaaagcattgacaatttaagtgatgagctgcttgggacatactcgaaggccgaagatactgcaatgtcagcagccttcggaggccgaaaaaagattacgctgaatcgggtatctgatgccactcggtttgtctaccctgactattgctaccccattcgaaggcagaagatgaaaaataccaccctct

SEQ ID NO: 12090 - DNA, 315 bp, Zea mays
  unsure (1)..(315): unsure at all n locations
agctngcccttcaagcgactcgtaaaggcaactgaggaatcctcccttctaaggatcttcacatccacatcggaaaatagacaattataacccattccacagagttgtgaaacaaacatcaaattgtagcttaaagaatctactagtaaaacttttgaaagtgattgttggtcagagataggaattttaccaataccaatcaccttactcttgccactatctccaaacacaatttcttgtgcttcttgagttagttgtaaggaatgaaacatgtctttctccccagtcatgtgaattgacatccactgtcaagca

SEQ ID NO: 12091 - DNA, 428 bp, Zea mays
ctacatcgcaatccgcattatctaaatacataccaatggagaaatgcactcgtaccatgtgtgttaccttaaccttgcctgaatcattgatccactgaatgtggtatggatgtggccgcggacgtgtggtcaagccaagcttcttgaccaaatctgaactcaccaaattattgcagcttccaccatcaataataacacgtccacgccgattctcgatggaaaagaaagtctggaacaaattatggtggttgtgcttctctgatgatttacgctgagaattaagaacacactgcaccatgatgcttcgaaggttcaccgtaacatcagcaccaagcatggcatcatcattagcagcaacatcactggagtcatcatcgtcatcctcaccgtcggaagcactaatgtagccatcatccgtagcaatgtat

SEQ ID NO: 12092 - DNA, 314 bp, Zea mays
tttcttctctgtccagtcgcttccggtcaacagcagctgcgcgcgcaaatttcttttggtcacagccacactctactaccgtgtgcgcagccttttatttttgtgtccggtcgctgtctgccgttttgacagctcacgcaataactttcttgtgaccggccgctgtgtgtcggggaccatatataggggtaccctcaagacgcctaattctcagctggtaacacccatcagcataaagctgcagaggcctgatgggtgctattaaatcaaggatcagtccatacgagtgactcgatcacgcttcatccgagcct

SEQ ID NO: 12093 - DNA, 406 bp, Zea mays
agcttataaccatggtaagtagcatatgcaagtaatatgcgaattgattcaagcctagctacgggtgcataggtttcaccgaaatccaaaccttcgacttgtgaatatcccttggccacaagtcgggctttattccttgtcaccacaccatgctcatcttgtttgttgcggaagacccacttggttcctacaacattttggttaggacgtggaactaaatgccatacctctgtccttgtgaagttgatgagctcctctttcattgtccaacaccaatcggaatcccttaatgcatcttctaccctatatggctcaatggaagatacaaaggagtaatgttcacaaaaatgagcaacacgagatcgagtagtacccccttatgaatatcgccgaggatggagttcac

SEQ ID NO: 12094 - DNA, 317 bp, Zea mays
agctttctcgactaagtcggtgactgggcctcatggacgggtgaaagtacgcgtaagcggcaggccgaccgagcctagggattcccacgcctctgggatacagatacctcactcgtcccttccgcgaaaagcaactctcgctcacacaaacatccctgttaccgacagaattcagatgctcgaaacaagaggaaaatagacgcagcttctcaagcgcggcgagggtgtgtttctctggtcttcacgctgaaaggagccgtagcaccctctgcatcgacgacgtcttcagcaaagcccgacccagcctcgggcggcga

SEQ ID NO: 12095 - DNA, 407 bp, Zea mays
aacagatgtttctatagactttgctacataagattctagagagaacttcgtatataatggtaaagaaacttatgtaaacttgtgcgtacctcgtaatatatctttttccctttgtccgagtacgatctgctttgctgtggacgaaattttcttttttgagccgaaggcgaaaaacaccttcccttcttttcgtacacaacgaagcatgaaaaattcttctttcagtttttctccgaggctatatcctcattgccgaagcatctgccttttctgtatgatatgatgacaatgatcctatgtatgtctaaatgaatgtttatgaatgcaaatgtcatgatgtaatgtatcgtgcaaatgaatgttcgaatatatatattcaaagccataatcatagcctttactccctt

SEQ ID NO: 12096 - DNA, 447 bp, Zea mays
  unsure (1)..(447): unsure at all n locations
atggacgtgaagagtgccttcctcaatatatcaatcaaggaagaggtctatgttgagcaacctcccggctntgaagaaagtgagtaccctaaccatgtctataaactctctaaggcgctttatgggctcaagcaagccctaagagcatggtatgaatgcctaagagattntcttatcgctaatggcttcaaagtcggaaaagccgatcctactctctttactaaaacaattgcaaatgatttgtttgtatgccaaatttatgttgatgatatcatatttgggtctactaacaaatctacttgtgaagagtttagtaggatcatgattcanaaatttgagatgtctatgatggcggagttgaagtatttcttatgatttcaagtcaaacaactccaagtgggcaccttcattagccaaacgaagtacattcaagacatactcaccaag

SEQ ID NO: 12097 - DNA, 352 bp, Zea mays
  unsure (1)..(352): unsure at all n locations
ttaaactagcttaaaccattagttctggatttttagaaaatagataataatcccaaaattgcccaaactttttatgtgagctntacacattatttagaagccatgggagagtttggtttgatttgaacattggtgataactagaacccaaaacccctacccctgccctttgaactcctttaccgactccagaaaccctaagttctcggagttccgtgaaggaaagttgtattcaagacttagttaataaacttttattatctacgcactctcatgagcattacatggcattcattcttatatatatacctatatggntatcattagaaaacgaagaagagagtgaagtgact

SEQ ID NO: 12098 - DNA, 466 bp, Zea mays
  unsure (1)..(466): unsure at all n locations
cttaagcactgagctgagcttatgaaatcttaaccacagggctttctttgtgctataccaacccatggtagtcggagcaagtaagcatgtgtcgagttcacctctatcaaaatctaccaagtatagctgaccctctaacacaccgataaatgctattgaatcatcacttcttctaaagactgcgacacctacattagtaaatagacacgtggacccatttgacataattgagagacagaaagcaaactgggatctaatgaggctacaagaaaaacattggaaatagaatggtcacgagatatagcaattctacccaatcctntgaccaaaccttgatttccatccccgaatgtgatagctctttggggatcttggctttctcataggaagagaacattttcttcctccctgtcatgtggtttgggcaccgctgcgatgatccacttgagccccggatgcattacct

SEQ ID NO: 12099 - DNA, 299 bp, Zea mays
  unsure (1)..(299): unsure at all n locations
aaccagacctgaagaccttcccaaccagagtcctagatgctacgtgtatcccgcattgcctagcgtggacctcatctagtagttgctntccattagccgaaagaatgcaatttatgaggactcctgtcgcggccttatgtatagtggttccccaatgagagtataatgagttgactgccttgcaatgcgctctgctgcatatttgtcatccggctcctcctcgttctttatatatctgatgattggctccctccagtcatcagaatctgactctagttggctcagaatattgaactctt

SEQ ID NO: 12100 - DNA, 462 bp, Zea mays
  unsure (1)..(462): unsure at all n locations
catgcaagctttaagcgtaaattcaacagcatgggtatcttgtttaagagtgttcattgtctctcttanggaacctgtggactgatttcaacgacatgtgtatttactggaggactaaatgttgtaacagtcacataaaataattgaaatgttctagcctcttgatgagtataatccaagattccattgtctgttgtctctcgtataatttcccaagaatttacacaattaaacaacatatactctaagggctaaacaaattttcccaaagcccaatcgttcaccacataattttttctgcataccccaatcgtccaccacagcagaacaagcatgacagggtcaaagtcacaaatgtgggtatangcgtgcagcataactatcgtctaacatcaacgggccgcccgttgcacaatactgatgccataataataaatcagcttcaatgcttangacacttga

SEQ ID NO: 12101 - DNA, 384 bp, Zea mays
  unsure (1)..(384): unsure at all n locations
agctntgttccagtgcacgcaagatcactataatatctctccaggcgtatgtccgaagattcttgcgtctgagggcacaagcaccaacagtgcccaatgaaattgtcattgaggccatgatcaaggggcttcggccaggacctacgacccaatacttcgccaggaaaccccctcagaccctggagaaattgcttcaaaagatggatgaatacatccgcgctgataatgactttcgtcaaagaagggaggaagcttacaggttcttcgagatgaccaggggcttcggaggtagaatccacccaaggcacgtcagatcaattcattccacccagaatgatgacagaggaagtcagcaacagaggccacaatattcctcgcaagctt

SEQ ID NO: 12102 - DNA, 476 bp, Zea mays
agcttgtcagtgaacataattaggggtaccctcaaggctcctaattctcagctggtaacccccatcagcacgaagctgcaaaggcctgatgggtgcgattaagtcagggatcagtccattcgagggacacgatcacgcctcacccgagcctaacctcggacaagggcagccgaccccggaggatttccgtctcgcccgaggccccccttcagcggcgaacatattcccggctcgcccgaggccctgccttcgctaagaagcaaccctgaccaaatcgtcgcaccgaccgaccaagtcgcaggagcatttaaggcaaaggtggcctgacatccttatcctggcgcccccccccgccggcagagccgaagtgaccgccgtcacttcgccgctccactgaccggcctgacagaaggacaacgccgcctacgccacaccgactgcagtgccattggacagagtaagactgacaggcagtc

SEQ ID NO: 12103 - DNA, 434 bp, Zea mays
agcttctagggatcgaagatcaagcgttggctttcatgtgatcaagctctctgagttctatgaggctgaagatcctgagcatctgtttggtgaaggcaagtgtcctctgacccattatgtcccattcacttttaatgcactgtcccgcattacttaattgaaacctaaggattgactagctttctatttaccttatccttgtttaccttttgggttatcatggttagcattatgctattgctttactttaatcaatgaacatgatgtgactatttatgatactgttatcctgatgatgttgatgatcttgtgatactctagggggctcaggctgtttcctgagtacctctccgtaaggacctgttcgttgagcgaccacccgggataacagtgcaaccatgagggtggaatggggtgcccttagctatataatt

SEQ ID NO: 12104 - DNA, 369 bp, Zea mays
  unsure (1)..(369): unsure at all n locations
gcttctaaagggagaacacattntaggattatctaatgttcattttgagaaagacaggatttgtagcgcatgtcatgcacggaagcaagttggagtccatcatccgcacaagaacatcatgacgaccgacaggccgctngagctactccacatggatctattcggcccgattgcttacataagcatcggcgggagtaagtattgtcttgtaatagtggatgattattctcgcttcacttgggtattctctttacaggaaaaatctcaaacccaagagaccttaaagggattcttgagacgggctcaaaatgagttcggcttaaggatcaagaaaataagaagcgacaactggacggagttcaagaactc

SEQ ID NO: 12105 - DNA, 382 bp, Zea mays
  unsure (1)..(382): unsure at all n locations
agctntaccaaatggacgtgaagagtgcttttctcaatggaccaatcaaggaagaggtctatgttgagcaacctcccggctttgaagacagtgagtatcctaatcatgtctataggctctctaaggcgctttatgggctcaagcaagccccaagagcgtggtatgaatgccttagagatttccttattgctaatggcttcaaagtcggcaaggccgatcctactttgttcactaaaactcttgacaatgaattgttcgtatgccaaatttatgttgatgatatcatatttgggtctactaacgaatctacatgtgaagaatttagtaggatcatgacacagaaattcgagatgtctatgatggnnggagtgaagtattttct

SEQ ID NO: 12106 - DNA, 364 bp, Zea mays
  unsure (1)..(364): unsure at all n locations
tgcagcttgtatatgtgactggataataattagtggcatgatttcttanaagaacttctgtacaaaatcagctgttttgtgagtcgtctaattcatttatctgtctgcaattagaaagtatagcatggaacaaacctgtcttcttaaacgcctaagagtcttaaccaacaggtcagggtttctatgaattccaacccaacaaccattgacaaaaaatttatcaccttgtggaatgacagctggcgatatctcctgaacaaaatgagtacacagtaaaacaaaatattgtaataacttatatcaaaacaaaaccacaaggttcgagatggtatagtaaccaaatgaaaatgcatgtacacactga

SEQ ID NO: 12107 - DNA, 362 bp, Zea mays
  unsure (1)..(362): unsure at all n locations
agcttccatgtgctcttcgtatatgtgatctggatggtctaaatttaacttgaaaagatgtgctatggtccatattatattggctcgaactcctttatttaatatccaaatatactttctgcataacagtagttgttattatcgggccttgttcatgggaaaaataatcagnggaagctgatcttgtgtgatctggatggtttatgatttacttgaagggaagtgactgcatttgtgttctaaaccagtgagcaagtgatctgaaatatatccatccatagaccctagaaccccctcttaaaatactaaagaaatcaaaatctgattagaatgcctgtgctgaattcatgtgttagtttgat

SEQ ID NO: 12108 - DNA, 165 bp, Zea mays
ctgcaccggccatgaaacaaacctttttcttgttctacgctgccgggcactgtaatctgacgtctcgaactgcaacatcgtttgcaaagaattttcggcagctctgatgtcattgcggagacagccccttcctcgaccatttgccgaagatacgacagcgaccaa

SEQ ID NO: 12109 - DNA, 422 bp, Zea mays
gcttcctctagttattggaagcacagagctcctaatatacaatatacaatatacaatatatatatatatatatatatactcttgagtcctcttttcctgtcgatatagacatatatatacaaactatatttatatattaatcaatgaatgtatgtttagtctaaaacaaattatattttgggatagaaggagtattaccattcagttatgttctctaatggtttcttgattgaatctacctaaaggttgagatcataagccttaaggcttagatgctccgggcctatttgtttaagatcgaagcaagtttgtttggcgctctatatctttacaggtgtctaaagcgaacactccttctctgcacctcggtaaaaaagaaaaggcatgcttctatatcatttgcctacaatgataggcaacta

SEQ ID NO: 12110 - DNA, 442 bp, Zea mays
  unsure (1)..(442): unsure at all n locations
agcttctaaaggagaacacgtgatagggttgactaacgtgcatttcgaataagatagaccttgtgcagcttgtcaagcaggcaaacaagtgggaggagcacatcacagcaagaatgtgatgaccacttcaagacccctggagctgctgcatatggacctcttcggacccgtcgcctatctgagtataggaggaagtaagtatggtctagttattggtgatgacttttcccgcttcacttgggtgttcttnttgcatgataagtctgaaacccaagggaccctcaagcgcttcctcaggagagctcaaaatgagtttgagctcaaggtgaagaagataagaagcgacaacgggtccgagttcaagaaccttcaagtggaggagttccttgaagaagaanggatcaagcacgaagtcttcgctccctacacaccacaacaaaat

SEQ ID NO: 12111 - DNA, 472 bp, Zea mays
  unsure (1)..(472): unsure at all n locations
cacggatcaagctcgtacattaaacgatctagcaccgcgatagggctacggttgtgggtatgcttcgtagccgaagatcctataaagaacaccttcgaaaggtcttctcagaagcaagcgccgaagctattatctgtacagcttcggcacaaagacaaatctcaagatgaatgatcgaaccgacttaaagatgaattgacataaagacccatgatngtttgtgtcattattgtagttgattgtaaaggacataaatgtaatcttgcgcttggtgcatcctgtgcctataaataggtgaacagtattctggtactggtcacgcgatccggtaatcacggacacatcacgcctagtactttgctttcattcaagccgaaagtacacttgtaacttaatgtcatttctatttttccgtgttaataanatagaaatgatctaatactaatatataaatgttggcgtatcttttgat

SEQ ID NO: 12112 - DNA, 434 bp, Zea mays
catgcaagcttattcttgagccataatttagtcggcgtgaaggctctatcatcttgtgccatctcgagcctatgtaataattcctttgccaaagctaattgggatcttacaggtcccacctgcttctaactccatccctgcaatcttttagttgtcacatttaatttcttcccaaggatcagtaaaggacacctgtcagcctcaacagagctccatgttgactggacagtcttatgaaaaccttctatcttggccaaaaagactcaaaatgaaatatttgtttcccatacatattatccctaagggccaaaagagtaaggggcagtggtcacaatcctgagatgctgcactatggagaagcacactatggaaaattactttccaattcactgaacagaacactctgtccaccttaaccaggacagggttatctt

SEQ ID NO: 12113 - DNA, 309 bp, Zea mays
  unsure (1)..(309): unsure at all n locations
agctcttcgaaagctggacttcgatnttctctgatcaactttgttgtaaaggtgctgaaaatatttgaagtctatcttcaccaacttacccccgaagcaatcataaggctgaatatcttcgtgtgggccgtgaaaagccaaggtctggaacctgatgcaaaaagtttctgcaatatacacgaattatcatacgagacaaaaccttggggtaacgaacagtatcacaataattttggctgctacagtttcgtttctcggtctgggtcaagctgtcccgtgccaacctttctgaagagatggcccggtgtc

SEQ ID NO: 12114 - DNA, 417 bp, Zea mays
  unsure (1)..(417): unsure at all n locations
gcagcttgctcaagaagacgcctcattccacttctctatagacgaggaaaccaaccagactgttattgaaggaatgggaaaactgcatcttgatatcattgtagacagactaaagagggagttcaaggttagtattctgactagctgcatttatgcagttgcatgcgctgtatgtttctttaattctattctatatangaaattattattcggtcattagctgttgtcgagtcagagttttgtacctgtcacattacctttacttcttttatgcaaacgatctgtgcaggttgaagcaaacgttggagctccacaagtcaactaccgtgaaagtatcttcaaagttgcggagatacaatatgtccacaataagcaatctggtggatctgggcagtttgcagacattattgtgcgttt

SEQ ID NO: 12115 - DNA, 419 bp, Zea mays
  unsure (1)..(419): unsure at all n locations
ggatcctaagcactgagcatcagctgcttagtctactactgtgtttggtgaaaaaaacgcnaagagacaagtgcctcgaaggatgctggggctgtgggttgatgtaccatcctgaagtaagctcgtcgtgacttgcgagttgcgacaccccaagccctcaacagcattgttggatgctcaatctacggatttggccgtatccacaactcattggacataaattgtgatttcgcatcattctgtacatcattaactcatctgtgtatatgggagggcacggttggatgtatgtatctaaggcgctcctatgaagacaaatagtttgcatccctatattcagatgcgcattctgctatgtacgtgtggactcagctctcctgtgatactcatatgaatatcaaatgtntgaactggtccgt

SEQ ID NO: 12116 - DNA, 214 bp, Zea mays
ttccatctatattatggattgcctttgagtctgtccaacttccttcgggccttgtagcagatttcttgctttcatggataacaataagcccttggtccgaaagtatcttcatgcacagatatgcaggatgaaagattgcttcgaaagcattaagagaaccacgaccaataattgcctttgtaagatattccatgtcaacaaatgtaaacacaac

SEQ ID NO: 12117 - DNA, 340 bp, Zea mays
  unsure (1)..(340): unsure at all n locations
gagtgccttcgaatgcactctataaagagactgtcaaaggggcccattagtgctcccgttgacgagagctaatctggcactcgacaaacatagagcctttgtcgagtgcctcctaatgcacttggcaaaggaactggcaaaggggcccacgggggcatctttaccgagcgttagtacaactgacacttggcaaagagggagcctttgccgattgtcatggaggacactcagcaaagtctcagtcaccatcatttggcgccatgacagcgactnttctttgccgattactatgttgcactcgacaaagtctttgtcgagtgcccgacaaaaagtactcaac

SEQ ID NO: 12118 - DNA, 312 bp, Zea mays
catgcttgtacctgtcagcagtcaagtaaaacatgtattctatttctttggcatttaagcagctttgcccctcatggtccatatgatgcaacaacttgcaaaggagctggaagttgacactatcttgtttcaagaatatctgtcaccatcctacacaatagtgaaccaatatcataataacgcaaactaaaaataaccagatctcagatctgaggtatcgtgatactagctagtagttactcgcctttttgagctctctttgttgcatgggtgttgcttcttcatctgaattcataagttgtagatgttcta

SEQ ID NO: 12119 - DNA, 352 bp, Zea mays
  unsure (1)..(352): unsure at all n locations
gcttaatcctgagaagtgtgtcttccgagtgccccgttgcatgctcctanggttcatcgtctctgagcgaggcatcgaggccaacccggagaagatcgcggccatcaccagcatggggcctatcaaggacttaaaaggggtacagagagtcatgggatgcctcgctggcctgagccgcttcatctcacgcctcggcgaaagaggtcttgccctgtaccgccttttaaggaaagccgagtgtttcgtttggacccctgaggccgatgaagccctcggcaacctaaaggcgctccttacataggcgccagtcttggtgccgccggcggacggataaaccctcttggtctacgtc

SEQ ID NO: 12120 - DNA, 478 bp, Zea mays
agcttcagcagaatgacagcgaaagttctccattctcttatatgcaagaatgcgctaacttatggtgatgatatcattggaaaaagcacgaagcaagataaccacattgctgatttacaggagaccttcgctaatcttagacacgctgggctatagctgaatccagaaaaatgtgtcttcggcgtaaagaaagggaatattcttggttgcctagtttcaacaaagagaattgaggctaacccaagtaaaatcgaagctatacttcgaatggaaccaccaagtacaaaaaaggtggctcaaagattgacaggaaggctggcatctctcaacagattcatatccagatcagcagagagaaacttaccattcttcgaagtgctgaagtcagccgaagtctttcaatggggaccaatccagcagaaagccttcgaagagctgaagtaatatttgatagatctaacaacattaacttcaccta

SEQ ID NO: 12121 - DNA, 403 bp, Zea mays
  unsure (1)..(403): unsure at all n locations
gcttgtcttttttttcctgtctatggtttacaaaatattttttctgaataatggttacattttacaccattgaacacctacacaaactattggcaagctggtctgattggaggggtttcaatggcctttntcctagcggcatcccagtttgagggccaacctagtggcaaacatgcaatttgcatgacgataaaacctcaatgaataacaataataagtggactacaaaaactgaaacattcaagcaggcacaagaagcaaacaaaaagactaagaaattaaaaataaacaataactagaaaggctgagcacacaccatatcattgatctcagcttctggcaaagtgtttccatctgcgaacatgctccatacaaccttgctaaattttatagaaatccgcat

SEQ ID NO: 12122 - DNA, 390 bp, Zea mays
  unsure (1)..(390): unsure at all n locations
agcttanagccatggtaagtagcataggccaataatatacgaattgactcaagcctagctatgggtgcataggtttcaccgaaatccaaaccttcgacttgggagtatcctttggccacaagtcgagctttgttccttgtcaccacaccatgctcatcttgcttgttgcggaagacccatttggttcctacaacattttgattatgacgtggaaccaaatgccatacctcattcctagtgaagttgttgagctcctcttgcatcgccaccacccaatccgaatcttgaagggcttcctctaccctatgtggctcaatagagaaaacaaacgagtatgttcacaaaaatgtgcaacacgagatctagtgggtacccccttatggatgtcgt

SEQ ID NO: 12123 - DNA, 374 bp, Zea mays
  unsure (1)..(374): unsure at all n locations
gcttcngcatgtcccactctntcaaagttggtaacactctgaaagccaagaattcttgcactaagtccctagtgccgatatgctccgcaataactctaaattcagccagagcaatttggcttggactccctggtgtcatgttgcactggggtctggtctctccgaagattaattctagcggattctggaccaacttctccttttcttcgtcaactttgacgtanaaccactcagacttccagcctgctggccacttgctacgatagctgatcactggaaattttgtactcttgcgataggcaaaattgtagcagccaaagttttcatgcagcccatcttctctagccttggtctgataatgaagctcgtgcact

SEQ ID NO: 12124 - DNA, 220 bp, Zea mays
agcttacaatataattttgacaaagaatatttaataatctttatgtacatatgattattgaaagcaaatttcctatactttaaagccggttcgaaacggcttctgtccaacgttcacgtcactttttttaccttcaccgatcgatctatgatcagtggccgattgcggacactacacatctcatccttctgtcgtacgagcgcaccacgaagctccatgc

SEQ ID NO: 12125 - DNA, 439 bp, Zea mays
tcacaacaacaccacccgtgttagtggcagtcaaaacattttcagttggattcatcacaccgacggataatccaataccaagcacgtccacgatgagctgctcgttgataaattgctcagcgaaaaagggctatgtagccatgggcagaccggctgcaacaacctccagagtggagccccattcatagagcgccatgaagcccgcactggctggatgggccaggatggccacctctagcgcccaaccgcgcaccaccaagcacttgcttcctgcgatgccgtgtgcatcggtgttctcgcatagccaatccttgatgttgtcgggcagggagtcagccgtcttgatgagccagagcacaagcgaggggcatgaggcatacgccatgccgagctgaatgggtggcatgcgcctggcactactgaagctcacatacaccac

SEQ ID NO: 12126 - DNA, 408 bp, Zea mays
gcttgcacttactaccaaaccgcacccttatttatatcatattcaatggcttaacaatagtggtaagggcaaggtaaccaagctggtacgaatcaattttgctattggttcatatcgcgatgctgttgactgtgatgttgtgcctatggatgctttgcatattctgctacgtacaccatggcaattttagtcacattgtatgcatcatgggacatcaaatcaatattctctcatataccatgataagaaaataattttgcttcccatgtccactgaggctattgtgcgtgatgatgttgctgaaactacccaagctcaaacttggaacaacatgaatatttatgttgttggtataacaaagatgggatacaattgataggacattgcttgcttgcaacaaaaactgat

SEQ ID NO: 12127 - DNA, 347 bp, Zea mays
cttcggcggtatgacgcaactcacagcttgccgaatgtcaaatgagttcaccggaggtgggcaccaatgttggggacttgttctcaaatgctatgaattaagaacaagacaacacaaaatattaatggttaaagaccttcgtccttcgaagcattatctcccttatgatataatgatcttcaaacgaagggtatgaaggacataccttcatcatctcagtatataataatgaaagtgagagcatatgaaacatgagaagcatcatgaataatcagatgacatcattaatataacatcatgaatgaatataaacaatattgaattacatttatacctttggcttgaca

SEQ ID NO: 12128 - DNA, 358 bp, Zea mays
  unsure (1)..(358): unsure at all n locations
agcttgtgaagattcttcatcccaacatgggctagtcggcgatgacagagccaacccatattagtcttagcaattaagcaagtatcgagttcagctctattgaaatcaactaagtatagctgaccctctaatactcccttaaatgctactgaatcatcacttcttctaaagatagtaacacctatatccgtaaaaagacagttgtaacccattttgcataattgagaaacaaaaagcacattgtaatctaaagaatctacaagaaaaacattggagatgaaatggtcaggtgatatagcaattttaccaagtcctttgaccaaaccttgatttccatccncgaatgtgatagctcttt

SEQ ID NO: 12129 - DNA, 136 bp, Zea mays
actggacgacttagacgagtgatttaaaattttgatacagtatgaaaaagtatcctgctacgaacgtgatcttcccgaactcaatgcggtctggctgtcaatgcatcgccgagtatacttgcgagagatgcagatg

SEQ ID NO: 12130 - DNA, 467 bp, Zea mays
  unsure (1)..(467): unsure at all n locations
gcttctaaagggagaacacgtgatacgtntgtcttatgtgcaattcgaaaaagatagaccttgcgcagcttgtcaagcaggtaaacaagtgggaggagcacatcacagcaagaatgtgatgaccacttcaagacccctgtagtggctgcatatggacctcttcggacctgtcgcctatctgagcatagggggaagtaagcatggtttagttattgttgatgaacttttccgcttcacttgggtgttctttttgcaggataagtctgatacccaagagaccctcaagcgcttcctcatgagagctcaaaatgagtttgagctcaaggtgaagaagattatgagcgacaacgggtccgagttcaagaaccttcaagtggaggagttccttgaggaggaagggatcaagcacgagttctccgctccctacacaccacagcaaaatggtgtggtatagaggaagaacatga

SEQ ID NO: 12131 - DNA, 499 bp, Zea mays
  unsure (1)..(499): unsure at all n locations
gtcacctgcggcatgcaagcttgncttcgcctcagtatatcacccacaatctatcttgtcatggagcgcgccaatggcaaaattgtcacggccatcaagaaaatgcttctcgacaacaagaagggtaaatgggccgacctgctacccgaagcagtatgggcgctgaacacaaccgagtgtcgggcgactgggttcactcccttccgcctactatatgggtcggaggccatgaccccgcaggaaataaaacatcagtcaccgcggacaagcacttcagccatccccaacgtagacgaaccaacttccaaggatctcatcgacggagaccgtgtcttcgccctgcaagccctcaacaaataccaagctcaaaaaaaagcatggcgcgaccacacagtcgttccaagagaattaacgaagggacctcgtactcgtncnacaactcgacagagcacgggaaagtggaccaagtgggaggtccttattgcaagacaagcgtccc

SEQ ID NO: 12132 - DNA, 456 bp, Zea mays
  unsure (1)..(456): unsure at all n locations
agctnncagctaccttcttactcacgccgncattctctatccgagagcgagcatggcgcactcgctcggcgcctgcttctcgccggccgacgcccggcgccaggtccgcatttcttggacttattcttgccttgacctggtaactagcttggtctacgaggctgccactggttcttgaaacctgatgcgaggagcgcgccgccgtcagagattcgcggcgcttggttcgtgatttgtctggtttctgggctggctcgcttacatgggatcatggatggatggactgatcactgatgccgcancccgagcttctggtgatgctgggatgctttgtcggttcgattcacgtgcttgactgtgaatagaatcgagctcactcaacagcttaagaacttctctgagagcattgcttccgtgcttgattcagggggatcttcttttgaaacgtccctaacg

SEQ ID NO: 12133 - DNA, 359 bp, Zea mays
gcttagtgcaagcgtgtggaatggaaagacaactaatcttatgtgtatgtatggcttgagtgaagggcaaggtggaacggagggaaaacgggaggatgcgcgcggctactggcggcaaggctgttcggccttgcgtctgggctgaaaacgaggtgttcgccatggcgcacgggccgaaaacagaggctcgggcacgaactctaaaataagctaaattcaagcatgtggaaagacaccgaacatacagtgtatgtctttggtgaagggcacagtggaacggagggaaaacgacacggaggcacgcggcgacgggcggcatggctgttcagcctttgcgttgggctgaaaacgaggcgttc

SEQ ID NO: 12134 - DNA, 433 bp, Zea mays
  unsure (1)..(433): unsure at all n locations
ttaagtcacctgcggcgtgcagcttattctccctagctcttggtggcaaaatattcatgcatgtgcgaaccattgtattctgtatcgtggcgattttgagaacgcatcaagatgcccagcttgcaatgtcagtcgatacaagaagagctactatcaagactgtgtaaaaaaattcccgaagaaaaataaaaacaagaaatccactattggacctgaaagtgacgatgacacttttgatgacatggatgggaaaaagaagtcaaagaacccagctctggtgatgtggtatcttccagtaattgatcgcttaaaacatttgttctcaaaccctatggaggctgagcttatgcgttggcatgctgaatatcgcaagcagaataacanacagattcgacaccctgctgatgcatcacaatggaaaaatttcgatctt

SEQ ID NO: 12135 - DNA, 431 bp, Zea mays
  unsure (1)..(431): unsure at all n locations
agcttgtgttcatagctgatggatattcttcttctactataatggtgngcaagatgaagcaagttttcattatgtctccaatgtgttctagagaccaaccatatgtaggatcacggactacagcccatcgcttctgcagcactccaaaagttcgtttgatgtcttttctagcggattcttgaatggtggcaaagtgttgggtcctaacatcatactgatgacggattgtcttcacaaacgttggccagtctggataaataccatctgctaggtaatatcccatgttgtacatgtgtccattgacggagaaagtaactggtggactttcaccggtccgatggatctcaaaaagggttgaacactaaagaacgttgatgtcgttacagctatcggacatgccaaagtatgcatgccatatccagaggtcatac

SEQ ID NO: 12136 - DNA, 340 bp, Zea mays
  unsure (1)..(340): unsure at all n locations
ccacatgtgcttagcggcgatgccacaaccagcccatgctagtcttagctattaagcatgcatctagatcggccttctcttttgcaaaatcaactaaataaagtttgccggctaatacacccttaaatgctagtgaatcatcacttcttctaaagacagacacatctacatttgtaaatagacagttataccccatgttgcataattgactaacagatagcaaattatatccaagagactctactaaaaacacattagagatagagtgctcattataaattgcaattntacctaacccttttaccttggcttgattcccatcaccgaatataattgaatc

SEQ ID NO: 12137 - DNA, 422 bp, Zea mays
  unsure (1)..(422): unsure at all n locations
atgcaaataagtgcattaccccttccctcatgtgccatttctcgatcaagatagaacttccaccattaaggccaaagctagcgaaggatcccccataattattggcatgtgggaacattccaccatgagagaaaccccttccatagaagtcagttgtggatcccaaaccatagaacgactcttggtgaagcgatggttgaaattgggggagaaacagataaatatcagaaggaagatctacaggtaaataaattcagttatttatgaaactgtatattcctatcttttatttcttcagaagaaaaacggagaggaaaaaaagagaacatattagcaacacaaagcctattatagcctngatgcaatgctgaactaaaccgatgctctaaaaaagccaatgcagttgaactgatgatgctact

SEQ ID NO: 12138 - DNA, 402 bp, Zea mays
agcttctgagagactgctaccttcctaaagggttcagaacaccgtcgatgcttctcgaaatcatatataggaacatttgcaggttgagcacgtttcatctgcaccatgcattccgagccattggcaatcttgccattatcatttgtggccttcgccagtatgtcatcggacccacaaatcatatgacacagacggtcccaccagtcatagacacgggatggcataataacagacagccaaatttgagagtggcaaaacagcaaaattctcatgcattccataagttgttctgtatcaaatgcatctgcaagccaagaataccgtccatttcacgtgtcaacaattcaattcagctcagatagctaccacaagcagggaacacgaaacagaaaatgcagtact

SEQ ID NO: 12139 - DNA, 402 bp, Zea mays
  unsure (1)..(402): unsure at all n locations
agcttaaccttgtaacaaggataagctgtctttgttccaaatgtggatagtccttaagcctcgttgaaatccttaagggtaaatgcttgaaatggttataacatgctttcgcaagtgcataaactgtcatgagcatcacacttatactatgacacaatgcacttcactttctctatgatatagatatgatctcattaacttaactatgtgcacttggcatttaaggctaaaatttgtattcctctcaaggcacatatntatggggagcaatctatattatatagaactatgaatatgcttaattgatatatctcttgatcatatctctttatgtctacgactaatgtgctttcaagtgatttctatgctaagtcgtagattgaaagggaaatggactattcg

SEQ ID NO: 12140 - DNA, 467 bp, Zea mays
  unsure (1)..(467): unsure at all n locations
agcttgtacacagaanacatgacactttatgagagaaggtgagttattattagtgaagagctaacttatagcaagtaactaactattagtgattacaggtactaaggctatgaccagcagatcgtacatatggtcatgcaaaacaccgttttgtattgtagattgcattgtttataaagtggagtttgaaatgagagaaggatgattaagctgttggagatagcttaagggatgagctacgaaaacgtgaatagcaaatagcaggctatatggaaaacagcttttcatgccttcttacgttacatccaagcatacgacaagggaaccaaatgcgacttcaagtctgagtgttcatgggtgatgactagatttgccaatcaaaccaatagcatctgacatgcacacttgacatcaagcanggcaccatatccaagaactttgagtgtaactgtatatatattatctat

SEQ ID NO: 12141 - DNA, 322 bp, Zea mays
  unsure (1)..(322): unsure at all n locations
tctgcccatggtgctgcgtcaccctatcttggcccaatgggtcgtgtatcaaggtatgtccattagggacgcatcctatggttgcagcacgaccccaatacccttgtggtcgtctcccatggttataaaccccctaaccgccaccaagaacagcgggttttgttagatcaagtttagctctcgcttcctgcttgtagcgcgcgtgcttgctcaatcgctcgtcttcctgtcttttgaaccncaccatattggacgtttgattttgaaacctacatttagatctggtaattcaatacttgtctacttgtccttgctattttcg

SEQ ID NO: 12142 - DNA, 353 bp, Zea mays
  unsure (1)..(353): unsure at all n locations
agcttgagcagngactggcttcgtctgaaacccttggttatttgtgataagcatgtccttcagctattgccatgatgtgattgttcccggccgaagagaggaataccaagtctgtgcaacattttttactgccatgacgaaggagttcgccatgactgcagtattgccaccatataaagaatatggttgcttccgagctcatcagaaattgcttcggatctgagtgttcgtcgtacatggggagctgaggtggttcgtaagacaggggccaaggtggatcctgcagttcagctgacagaggagaagcatcgtcaaaggcaaaatttgcatggaggaaactcctataccagtca

SEQ ID NO: 12143 - DNA, 452 bp, Zea mays
  unsure (1)..(452): unsure at all n locations
ctcccatggntcacgataatgagggttacattntatatcctgctaattatcttgagcataaaattagaaagattcatgctaagaaatctcattctgttcctcaccatgcttttatgtataagaatgaagcttctagttctaggcattccactcataataaaatgcctaaaaggaaaacttccactgcatcaaatgaacataacatttcatttaaaacttttgatgcatcatatatgcttactaacaaatcaggcaaagtagttgccaaatatgttgggggcaaacacaaaagctccaaaacttgtgtntgggtacccaaggtgcttgtttctaacgtgagaggacccaagactggttgggtacctaagaacaaggcctaaaaatgtnttgtanngttatgcatctggaggcttcaagtggataatcgatagcggatgcacaaaccacatgac

SEQ ID NO: 12144 - DNA, 397 bp, Zea mays
  unsure (1)..(397): unsure at all n locations
gttgcaagccaatgcaccggttgactgagaagtattttcaattcagctagagccgcatccgaagaaaccatcctctctgccgaagatatacccggggcactcgaatgtattgaaaaggaggttgatatccttgatgaagtcataatcggtcatgaagacttctgtgcgctggtagcttctcgtggtatagctaccgccttcataaaagccagatgtaatcacacgagagctgtcaataggctaaatttcaatctttcatcatcggatctggttgacattccaactgaagcccgaagcatacggaatagatttattactcanatttgggctaagggcaggcgtgaattgactagaaacaaagcccggaagttgctaacacaatatggaatttatcttt

SEQ ID NO: 12145 - DNA, 387 bp, Zea mays
  unsure (1)..(387): unsure at all n locations
gcttctaaagggagagcacattttacgattaacatatgttctatttgagaaagacatgcattgtagcgcatgccatgcggggaagcaagttggtgctcatcatccacacaagaatatcatgacgactgacaggccactggagcttcttcacatggatcttttccgcccgattgcttacataagcatcggcgggagtaagtactggctaantattggggatgattattctcgcttcacttgggtattctttttgcaggaataatctcatacccaagagaccttaaagggattcttgagacgagctcaaaatgagttcagcttaaggatcaagatgaatagaagcgataatgggacggaggtcaagaactctcaaattgaacgcttcct

SEQ ID NO: 12146 - DNA, 336 bp, Zea mays
  unsure (1)..(336): unsure at all n locations
agctngccaagccctcggacccgaccggacttcttcgtatgcccgagatcgacctcaccggacttcagtcttccgctgccgcgcgtggactgagctatccagtgagtctccgaccaatcccttgcgctcatgtcttctctgacatcccgtggacctccctgacccatctgattgaactatctcgccgtgaccaggccggtctcctcgccgccgacgagcatccccgcctgcgcgcgtggaccgaccgactccagccatcttcgacggcgtnccgcacaccattgtgatccccgagaccttcccttcgtcctcgaccacttcaccggagcaatctcg

SEQ ID NO: 12147 - DNA, 368 bp, Zea mays
  unsure (1)..(368): unsure at all n locations
agcttgtgctgtgtgtaagcctaaatgacttgtgtccttctctctacgtcgcatgcctccccttttatagttcaaggagggcatgtacaagggttctgagccccgacacgtggacctagggacaaatggaaggatggaacaattgcttgccatgcccatgtaatcttcgtacgccctgacacctgagatttgcgttgtctcggtgcgcaaggggaagcttcttgtataagggatgagcacagtgcactgcgcagcacgggcacactgtctcgacaatggactggacaggtgcgccgtctgcatggcggccctggcgccgcctgccagcggaatggacaggacgcaataaatgccgtggnggcacatca

SEQ ID NO: 12148 - DNA, 449 bp, Zea mays
  unsure (1)..(449): unsure at all n locations
gtcaccttctgctgttttgttaagccaaagcttaagaaacatcagtgctctttttactttataccaaacacgctcgtaatatttctaactaaagatccaaggtgccaggtccatcatcctctttttatctataacagaacaaattatgaagtgtcacatactcgcatattaaaaaggtgttcgcaggtcgctatgattttcatttatgcttgagtataaagtataaaacacaaatatattatgttagttaagtgggtgtgaatgtgggtttggatccaacaatcacagttagagtatgcataattttaacttttntaccatntaaatgtggnggagtgaaactggtgcttttataataccacatcttagggctngtccgacagtaatgtttcttaaaccatggntttaaaatagtagattttgcgattgtatgacatacaataattatg

SEQ ID NO: 12149 - DNA, 366 bp, Zea mays
agcttatatatatatatatctcttacataccttattatgacatgtaactgtgttggcatcttgcatcccatcgctagcattacttttattcaactcttcttcctggtacaaaataacatgttacttatgcataatttatattacaaatagtataacactaaaacatctgccatattattaccttgtcttcctcattatcactaacatctggtgactcattacatacaatatctggctccaatcggcttagaacgacatcgagctcattcaacacattcatcgccttatcgtaccctgcttttacatacacgcctgacgaactactttcataggtgtcggtaacaacattttctggctgtatgattt

SEQ ID NO: 12150 - DNA, 225 bp, Zea mays
  unsure (1)..(225): unsure at all n locations
tctacagattattgcagccgtgccggggcacttcagtatctcactctcactcggccaaacattgcatatgcagtacagcagatctggcttcacatgcacgacccttgagagcctcaacttgttgcactgaaacgcattcttctgtacgtccgtggcactcttcatctggcttgttgcttcgtcttctgccagaccgagctangggttactcaaagctgattgggc

SEQ ID NO: 12151 - DNA, 339 bp, Zea mays
ccctctggatcccgcctatccggcgtggtctcacgaattagtatgtgggttcacaggtcgacagccgcagccagtccgccgggaagcgcgcgcgcaccgacggtaggttgctcttgctccgccgcctcgttatctcactctccgtatctatctataagttgcatctgagtgaattcccctcggcgtgggacaataaacctccttctcaggcagccggcgtgaggacgactgggtttgccccagctgcaagaacgttaacttcgcctttcgcaccacttgcaacatgcgcaactgcaaccagtccaggccagcagatcacacgggacatgatggtttcac

SEQ ID NO: 12152 - DNA, 473 bp, Zea mays
  unsure (1)..(473): unsure at all n locations
agcttgtggcgccctcgggcgtcttgtcgcagtctaattaccaagtctcccactnggaagcctcggggccaaacccttcaagcatggtagcgtcgcagggactgctgataccgcgccgagtgtagtaaggtcacgtctcgagcctcttccagctggtccaacgagttttctcggttggtctggttgctttggtcgtcgtaagcctttgtcctgngggaaccatattctaagtccgtgggtaggatggcctcggccccatagactagaaagaacggtgagaaactcgtggctcggctcggcgtcgtcctcagactccaaaccaccgagggtagttcctttatccatcgcttgccaaacttgttgaggtcgttgtagatccttggctttagtccctgcanaatcatanccgtggcgcgctccacctacccatttgtcattgngtgagctacngcggcacagtccacacggatatg

SEQ ID NO: 12153 - DNA, 481 bp, Zea mays
  unsure (1)..(481): unsure at all n locations
tgcaagcttaccagatgatagtngacaattccagattatatctttcagtataaacatatttgcagacttggatggaagttgaaaattttttagttttataagaaccttgccttttgatcggcagcgtcgatctggcacaccccacaacacacaatgaaatttgcggtgtcagtataggttgtcttcctgcatgttgcatgtcaaacagaacaatcgataatttagtggcagcccataattagcttatagctaggaggccactggtgtggcatagaaccaaactaaaattagcatatttctgatgtttcataatcgagattntggagacttgtttttttcataattggcagccaatgcgactatgtaagaagtgtacccatgcaagaaacanagtgaaagtctagggtgatctgcacaacggacagcagtacacctcatcagagaatcagattaactggtgatagtatggatatattctagt

SEQ ID NO: 12154 - DNA, 373 bp, Zea mays
tgcaagcttgtgaagaggcttcatacccacatgtgcttatctgcgaagccacacccagcccatgctgtgtcttatcaattaagcatgcatctataccggcctcttcttttgcaaaatcaactatagtaaaggttgtcgtctaatacacccttaaaagctagtgaaccatcacttcttctaaagacagacacatctacatttgtgaatagacaattatatcccatattgcataattgactaacagataacaacatatatccaagagactcaactataaacacattagatatagagtgctcggatgaaatagcaattttacctaacccttttaccttgccttgattcccgccaccgaatattattgaatcttggg

SEQ ID NO: 12155 - DNA, 430 bp, Zea mays
agcttctgacttgtgggcccgcctgtgtgtcctttgcattccggacatctactgttccttgtgcggtgtgccggagtgggcgcgcctgccatctgcgcgcgcagagcgcgcattaaatgcgcggcagagagccgttggcgcggagacgaccgttgcttcggagatgcaccggacagtccggtgcacaccggacagtccggtgaattatagcggacgagccgttggcttttcccgaagctggcgagttcctgaggccgacctcccatggcgcaccggacactgtccggtgtacaccggacagtccggtgaattatagcggagtcgcctctggaaattcccgaaggtggcgagttggcgttagagtcctctggtgcaccggacactgtccggtggcgcaccggacactgtccgatgtacaccggacagtccg

SEQ ID NO: 12156 - DNA, 351 bp, Zea mays
  unsure (1)..(351): unsure at all n locations
atgaaactccaggccgataaaggttgttctgagcgtngaatttagattggggacatggtattcttgaaggtgcaaccttatgtgcaaacgtcagtcgcacgccgctcctcacagaagctatcatttcgttactttggaccctaccgtgtgctatcacgtgtgggaaccatggcctacaaacttgaccttctggcgtcatcttctgtacaccctatattccatgtttcccagctgaaaaaggccatttctccgatgacccaagtaacagctgtgcctcccaatacctctgatggcttccaagtacctatgcagatcctccagaggcgagtggtctcccgtggagttcgtact

SEQ ID NO: 12157 - DNA, 405 bp, Zea mays
  unsure (1)..(405): unsure at all n locations
agcttctgcttttagaaacnagtttttatcgctttctaagatgtctgaagctgctaagaaggctgctgctgagatgaagctgagtcttgatgaagagaagaacctatggtttcttatagcgatgtcgaagtccaacacagaatagattaccaaggaaattctggaggggctgtctgaagatactggtgacagtgaaagttatgatatggacagcggnggcgaagactccgaagatcgcccctggcgaccaagccattcagtttatggtaagtcaactatcaaagagaatcatcttgttaatatgagaggaaggtatttccgggatctgtctattgtgagggcggacgaacgggaataaacttgtccacaccctgaagaacatgaagttgtggtgtaccgaagctt

SEQ ID NO: 12158 - DNA, 322 bp, Zea mays
  unsure (1)..(322): unsure at all n locations
ggtgagcacatgttattaactatagttggcatgtattacttgggatcgtgaggatcaaaggggttaatggtgggaattctagtttggtgccaagtgcagtttcagaacctgaaacgtgattctattgtgctgaattttcagaaaaactatgtaatcctcttgaccttggaaccattaaattcttcaatcttggacttttgggggataatcattacataaaacctgaagatccattgtangaggacatttctcatgaagaaagatctcccagtcttcattttaaattcggagaaaaggttattccaagtcacttggntagata

SEQ ID NO: 12159 - DNA, 353 bp, Zea mays
agcttgtctgtcggaatcgaacgaatctccagtttgaagcctgcttcgtcagaaaaaacttcggaagaagaaagtgttaaatttccacatattcataattaaatggccagagtgcgttctactgccagggttgaacgtgagggaggcgaaactgaagcttcggagactgttcccatctccgaagccatgcaacgatccgggctggtagtttctgaagagatccctagtgaagatgcagaacaagcgcaacaagcacctgccggagtagaagaagacgttattgaggaaactgatcccgaagacgattatcgtattgccatgccaagtaagcccagccacttggactttggaaa

SEQ ID NO: 12160 - DNA, 293 bp, Zea mays
ctaagcaatttctattctctaaacaaacaacacgggagctacaggaaaatgagaaacatactacacaactgtgatatctacgaactattctgctatgctagtagaaaagtgcaaataataactcttacgctcgggtccaagtgcgcttcttatcaaccacgggaggatggactgaggaaaccctgcaaggacgggtcaacattgcataccatagatgaacccatttcgaactcaattctgttacaacactgatggaaattgggatcagacatattataagccggatgactgga

SEQ ID NO: 12161 - DNA, 291 bp, Zea mays
tcaatatataaaaaataaagattactttgttgcttattcgcctaatgatctactgaccataattcatcagatatacattaaggcaactttctttaaaaaactattagaggacgagatctatatagatcaataagaagtgttcataacaaaacgatcaaataggcattgtgtgtaaattattaaagtgcttgtacagcctgaaacaagcacctaattaatgaaatgaatgggttgatagaactctaacattttgtggctttattgtgaataaactagcaatatgtgtactat

SEQ ID NO: 12162 - DNA, 436 bp, Zea mays
agcttgtaattccacccattcagggcttgttcgattagaagtggattgagggggactggagaggattaaatcccttcctagtcaaaacttaatagaaagggattcaatccccctcaatcctctccggtttgggtgaaaccgaacatgccctcattggtatatgccgatcagaccaagaacattacattaataattcaagaacttgggtagtaataccgtttgtgatattagccttttacaaagtacacagattcatatcattaatgatgagaactcatataagcctccaggttgaattacattgacaacatatgacatagcaaacagtaggtatgcttgtacttgttgagcaggccttatggtatcgagctaatatgtacaattatagtcttaaggtcttagtatctgcagggatatatcacagcactgcataatc

SEQ ID NO: 12163 - DNA, 457 bp, Zea mays
  unsure (1)..(457): unsure at all n locations
agctngatggttagaatgacatcagcctctcccatatctttcatctcgaanatgctcgatagaagattttaacttcctcaatcacattgagatttgatccaaagatcaagatgtcatcaacataaagacacagcataacagactcacccccaccatatcgatagtatacacacgtgtcagattcatttacaacaaagccagctgttgtaagagtnatatcaaacttttcatgccattgcttaggtgcttgttttaggccatacaatgattttatcaacctgcacaccttgttctcttgaccatctgcaatgaacccttctggctgatccatatagatctcctcatccaactctccatttaggaaagttgtcttaacatccatctgatgaatgataagaccataagaggctgccacggctattaatgtgcgaatggtagtcaatcgagccactggtga

SEQ ID NO: 12164 - DNA, 432 bp, Zea mays
agcttgcattaaattcttgcttatcttgttcaaactgttcagattggtagagaagcttcgtgttcagttctgttattttagcttcggcttccgccaatgtggcggaactgcccgaattattccaacttaagtgcccaagccccgccttagaggctagaccacacttaaatgggaataacccgtcaatccctcggatctagtccgacacggccactgacaggatcaagtaccacaatctcactcgaaggtgagtcacagagcaaatacaataaagcataaaaccatacatgtcacaatgttaaattattacatcaccatcatcatcatcggagtttttgcaaaagtaaccatcattgttcgaaatgcagcggaataaaactaacagcaattaaatagagagatgggaaagcctgtcccatcactcctcatgct

SEQ ID NO: 12165 - DNA, 465 bp, Zea mays
  unsure (1)..(465): unsure at all n locations
agcttgaagccatggtaagtagcatangcaagtaaaatgcgaattgtctcaagcctagctacgggtgcataggtttcaccgaaatccaaaccttcgacttgtgaatatcccttggccacaagtcgggctttgttccttgtcaccacaccatgctcatcttgtttgctgcggaaaaaccacttggttcctacaacattntggttaggacgtggaactaaangccatacctcattccttgtgaagttgttgagctcctcttgcatcgccaacacccaatccgaattccttaatgcatcttctaccctatatggctcaatagaagacacaaaggagtaatgtttacaaaaatgagcaacacgagatcgagtagttacccccttatgaatatcgccgaggatggagttcacagggtgatctcgttgtattgcttggtggactctcgggtgtggtggtcttggatcctca

SEQ ID NO: 12166 - DNA, 390 bp, Zea mays
  unsure (1)..(390): unsure at all n locations
agcttggacctangaactatccattgacttgatccagatctcattngaatccttaanattaaagtttattctaataatcataagcaagataatttaagcgtaaacatctttgatcttcctcggaaacatttttcttattatagctagaaggtataatactcttgtttggaatttgttctaattgcgggtctatggtntaaaagcatntatcacactagtacacgatgaagcataagtagaaaaatcggaaagtaaaatctcaagagttaccgtattgttctccttcgggggtgtcttcttgttcttttgggattttctccgagccatcacttcgagttgttagactcaatatgaaagtgcctagatctggtaccaatttcctaagtcgct

SEQ ID NO: 12167 - DNA, 412 bp, Zea mays
  unsure (1)..(412): unsure at all n locations
agctnggcttgaccacacgagagcatccccactcttatcacattcaatggtttaacaacagcggtaagttcaaggtaacaaaaacaacaagggtgcatttttctattggctcttaccatgactttgctgatttctatgtggtgactatggatgcttgctctcttttactgggacgtccttgggagtttgatactgatgctattcaccatggtagatctaataaatatacttttatgcacaanggaaagaaaatngtgttgcttcctatgactcccactgagattgtccactttgaacatgagaaaaagactaatgctaagcanaaaggtgttttgaactctgaaaatcagcaacctattaagtaaaaactcctactttgctagccactaaatctgatcttgatgagttacat

SEQ ID NO: 12168 - DNA, 336 bp, Zea mays
agcttataacaacgtggccaagtatgaggtccttgtgaatggcctacgcattgtcgtagagctaggcgtccaacgttttgacgtatgagggactctcagctcttcgtaggacaagtaatgaaggagtctaaatgtcatgaccccaagatggtggcatgctgtcgggaggtatgccgactgaagaaccaattcaatggccttgagctaaatcacatccctcggcgagataacaaagtggcggacacccttgcaaagatggcattgggacgaacgaccgtcctgccggggtcgttgcaaccaaccttttttggtcaatcgtctgatacgacgagtcct

SEQ ID NO: 12169 - DNA, 378 bp, Zea mays
  unsure (1)..(378): unsure at all n locations
agcttgaaaatatctggatatggttcgaagagttgaagcttccttcgtagggttntctgtcaaaaatatccctcgaggacaaaatgagcatgctgatttgctagctaggtcagcagcacaggggctgcctttaccttcggatgttttcttcgaaacaataaaagcaccttcggtggaacttcttgaaagagcangccttaatatatctcctgtttttagcgaagattggagaaccgagatcatctcttaccttcagggtaaattcctttcagatgacgaagcttataacaagaggatagaggcaagagctcgtccatatgtcataatagaaggggaattgtacaagcatggagttggtgctnccgtactcaaatgtta

SEQ ID NO: 12170 - DNA, 355 bp, Zea mays
  unsure (1)..(355): unsure at all n locations
agcttgtgcanagtccactctaactaatctttttataaacccgacctcgctgcaacatgacacccgaaggtccaacacaacaagcaatgaatgaattcagaattattgcagagcatatcagtacaagggacctggttcaggagtttttggctttcaaagtttttcccagtttgaaagaatgggaaatgccgaagctaaagggggagaagaaagaggtgaacttgtacgtttaccttactatttcaagtttaagaaatactttaaaacgccttgccaagagtggctagacacaattgaagtaatgtgcaatgaaatacttggcaattattccaaaaaagaagatcaattgatgact

SEQ ID NO: 12171 - DNA, 434 bp, Zea mays
  unsure (1)..(434): unsure at all n locations
agcttgacttccttcgccttgagacaccggaatgtcacttcaaggtcggagaggaggtcggaagccttccgagtcttgacgacgatgtcatcgacgtatgcctcgaccgtgcgaccgatgtgttcgccgaacacatggttcatgcaccgctggtacgtcgcacctgcattcctcaagccgaacggcatggtgacatancagtacatgccgaacggcgtgatgaaagaagtcgcgagctggtcggactctttcatccggatctggtgataccctgagtaggcatcgaggaaggacagggtttcgcacccagtagtggaatccacgatttggtcgatgcgaggcagagggtanggaaccttcggacatgcttttgtgagaccagtgtagtctacacacatnnncgcatttccccctttctttctcacaagcacagg

SEQ ID NO: 12172 - DNA, 445 bp, Zea mays
agcttctgttatataattaatttgtgtgagttttcttaattatcattgataattagcgggtgaagaaagagacatgaatcagtaagtcatgtaactaatgacacggtgtgcaatttgtgtgcaacttcataggaaggtatggaaatagtgtttttaagcaccttttgaggagcttaaaaaattcaatgaaattggcatctagtttcagttttttttaaactagagctcgtggagctgtacctgtttgacacaagaagctatataaacctcaaattcttaaagtgaagctctccaaagagggcctaactcactcaaattaatactactattatagaagctgaagtttatgcgtaagttaaacactcttgaatcacccttaatcaatctgctaaaattgtttcgtggtgaagctggaaactgctctcaatatatcgacaaacaaaat

SEQ ID NO: 12173 - DNA, 423 bp, Zea mays
  unsure (1)..(423): unsure at all n locations
agcttggncgttttattgctaactggactgactattatattgancattatcaanggaacaagagggagaagaagaagaattataagaaggcacagggcgaagctcatctcggcaaggagtgggattcggactgctcctcgtccgactccgacaatgaaggactcgccgccactgtcttcaacaagtcattcctcttcctcaacgagcatcacacatgccttatggcaagggagaagaaggtgagtactcaagactccacttatacttcttctagtgataatgagtctagtgatgatgatgacatatattattcatgcttgttcaagggcttagatagatctaagatagataacactaatgaattgattgatgccttgaatgattagaataggcttttagaacagcaagaggatgatgcttgga

SEQ ID NO: 12174 - DNA, 242 bp, Zea mays
ccaagaaccacaaacttgcgcgaaacgccgcccagcacgggcacggcaacccaagacaagccgccgccggcccacaagacaccccgacaaacaccggggaaaaacggaaaggggagaaaccccacaggacggcacgaaaccaccaaaaaaagatccggacaccagaccggaggcaaaaaacgcccgacggcaacccaagagcccagaagccagcgaacccccccccccaaagggagaagaaa

SEQ ID NO: 12175 - DNA, 480 bp, Zea mays
  unsure (1)..(480): unsure at all n locations
cctgcngcatgcaagcttcataactcccagnagtacatatgggcaccttcggatgcctgattggctcaagaatgctggaggaagcttcagcagaatgacagccaaggtccttcactctcaaataggcaggaatgtgccgacttatgttgatgacatcatagtaaaaagcacaaagcaagacaatcatattgctgacttgcaagagacgtttgccaatttcaggcaagctggtcttaagctaaatctagaaaagtgtgtttttggagtaaagaagggcaagttccttggctgtctggtatcaacgaagggaatcgaagctaacccaagtaagatcgaagctatcctttgatggagccgacaaattcaaaaaagggggctcaacgattggcaggaaggctggcatcgttaaatagaattatatcaagatcaatagaaaggaatatgccattctttgaaatactgaagtcagccaaagttttc

SEQ ID NO: 12176 - DNA, 470 bp, Zea mays
  unsure (1)..(470): unsure at all n locations
agcttcttttcgtcatcgatgagcaacgccaactcgagcgcctcctgccagtggtgtttattcggggtttccaagtaagaaacatggattcatctttggcgttggtttataaaaatgactcacaagtcagagccatggaaaaatattatggagaataaatgtcacacatataaaaaataatttaagttgaaaacattattcaaacaaaagaaattgcatgcaagtctcttttttaaatactactccctccatctaaaaatataattcaggaatctcgttgataattatctactactacacattatgtaaaggtagcaggtgggctttgggagagatgtagtatatatttttactgtagcaaatattgacataaacacatatgtggtgtagtggtagctacaaacatatttgcttgagagatgagatttgcggngaggggagaatgagaaagacagtacggcgagagaggg

SEQ ID NO: 12177 - DNA, 288 bp, Zea mays
  unsure (1)..(288): unsure at all n locations
cccatgttagtcttagcaattaagcaagtgtcgagttcagctctattaaaatcaactaagtatagctgaccctctaacactcccttaaatgctactgaatcatcacttcttctaaagacagtaacacctatatccgtaaaaagacangtgtaacccatcttacataattgagaaacagaaagcaagttgtaatctaaagaatctacaagaaaaacattggaaatagaatggtcaggagatatagcaattttaccaagtcctttgaccaaaccttgatttccatccccg

SEQ ID NO: 12178 - DNA, 376 bp, Zea mays
  unsure (1)..(376): unsure at all n locations
gcttctaaaggagaacacattttgtgactaacaaatgttcattttgagaaagacagggtttgtagcgcatgtcaagcacgaaagcaagttggtgttcatcatccacacaagaacatcatgacgactgacaggccactcgagctactccacatggacctattcggcgcgatcgcttacataagcatcagcgggagtaagtattgtctagttattgtggatgattattctcgcttcacttgggtattctctttgcaggataaatctcaaacccaatagaccttanagggattcttgagacgggctcaaaatgaagtcggcttaaggatcaaaaagattagaagcgaccacgggacggagttcaagaactcataaatag

SEQ ID NO: 12179 - DNA, 439 bp, Zea mays
  unsure (1)..(439): unsure at all n locations
agcttgtgaagattcttcatcccaacatgggctattcggcggtgccagagccaacccatgttagtcttagcaattaagcaagtgtcgagttcagctctatcaaaatctaccaggtatagctgaccctccaacactcccttaaatgctattgaatcatcacttcttctaaagacagtgacacctacatcagtaaaaagacagttgtagcccatttgacataattgagaaacagaaagcaagttgtaatctaaagaatctacaagaaaaacattggaaatggaatggtcaggagatatagcaattttaccaagacctttgaccaaaccttgatttccatccncgaatgtgatagctcgttggggatctttggttttctcatatgaggagaacatcctcttctcccctgtcatgtggtttgtgcacccgctgtcgagtattc

SEQ ID NO: 12180 - DNA, 253 bp, Zea mays
tctcaattcctgcgtgaatgagcgtgtattgtatgggttctgaattccataacaagttcaactctcttggcacagttattccactcccatccaatccaatgtgtactgtgtaataaccggatcatgcccttaactgttgtaacttgtcttatactgtactaagacacacaaccctctgaatggagtcacatgcctttgttataaataccttatgccctcgattcatgtatgaagttttggtttacaaactcaa

SEQ ID NO: 12181 - DNA, 304 bp, Zea mays
cagctgaaagatgcaacttaatcttgagaatcttattgtaaagaaaaagaagatgcatatgtgagcatttaatctcatgcatatttatcaaggacaaccacttgttagaaatattataactaatgtccttgttccggctggcgcaacggcggaccagatcttggcgaagaatacgcttggagcgcctttattccctccaagcctccatgatggaagccgaggactcgacaaccgtagcccgatttgccacccgcgtgactggggacgatgacacccttgagtgcccttatgttgcctattcatt

SEQ ID NO: 12182 - DNA, 438 bp, Zea mays
  unsure (1)..(438): unsure at all n locations
gcatgcaagcttcgtaagggagaacacgtgatacgcttgactaacatacaattttttataatatacaccttgcgcagctggtcaagcacgcaaacaagtgggaggagcgcatcacaacctgaatgtgatgaccacttcaagacccctggagatgctgcatatggacctcttcggacccgacgcctatctaagcatagggggaagtaagtatggtctagntattgtcgatgacttttcccgcttcacttaggtgttctttttgcaggataagtctgaaacccaagggaccctcaagcgcttcctaaggagagctcataatgaagttgagctcaaggtgaagaagataatgagcgacaacgggtccgagttaagaaatttcaagtggacgagttccttgatgaggaatggatcaagcacgagttctccgctccctacaca

SEQ ID NO: 12183 - DNA, 451 bp, Zea mays
  unsure (1)..(451): unsure at all n locations
agcttttaaaggagaacacgtgataggtctaactaatgttactttctaaaaagatagaccttgtgtagcttgtcaagcagggaaacaggtgggaagctctcatcatgccaaaaatgtgatgacaacatcaagacccctggagttacttcatatggacctcttcggacccgtcgcctatctaagcataggaggaagtaagtatggtcttgttatagttgatgatttttcccgcttcacttgggtanttcttttgcaggataaatctgaaacccaagggaccctcaagcgctttctaaggagagctcanaacttgtttgagctcaaggtgaagaagataaggagcgacaatgggtccgaattcaagaaccttcaagtggaggagtatcttgaggaggaaggaataaagcacaagttctccgcttcctacacaccacagcaaaatggtgtggta

SEQ ID NO: 12184 - DNA, 433 bp, Zea mays
agcttctaaagggagaacacgtgataggtttgactaacgtgcaatttttaaaagatagaccttgtgcagcttgtcaagcaggtaaacaagtgggaggagcacatcacagcaagaatgtgatgaccacttcaagacctctggagctgctgcatatggacctcttcggacccgtcgcctatctgagcataggaggaagtaagtatggtctagttattggtgatgacttttcccacttcacttgggtgttctttttgcaggataagtctgaaacccaagggaccctcaagcgcttcctaaggagagctcaaaatgagtttgagctcaaggtgaagaagataagaagcgacaatgggtccgagttcaagaaccttcaagtggaggagttccttgaggaggaggggatcaagcacgagttcttcgcttcctacacacc

SEQ ID NO: 12185 - DNA, 317 bp, Zea mays
  unsure (1)..(317): unsure at all n locations
agcttatgaaggttcttcatcccaacaagggctagtcggcggggccatcattttaactatgttagtcttagcaattaagcaagtgtcgagttcagctttatcaaaatctactaagtatagctgaccctctaacagtcatgtcggtgtttcgagaccagggggtccctaagccgacgagtgagtgtgccgcgtgccccancccatatgggtcgagcgtgtgggcgagcgcgacagggggaaagcgaggtggccggagactggcgtgagaaaggtggaaatcccgcggccttcatgttcgtcccgcgcccaggtcgggt

SEQ ID NO: 12186 - DNA, 366 bp, Zea mays
  unsure (1)..(366): unsure at all n locations
agctttcacgtgttcgacgcgagctggcatcctgtggcgcgctcagagcacgcccgtgcgcgaacccncgcgcgttcgcgggcgcccgtgaccacgcccgcgccacggctataaagcccgccccagtgcttggctggcttccccgttaccttctccgtacctcgccggacttgcccgagccagccattaactccggcgaccttcccgcgacccgccagtgccgcccgagagcaaccaccgtggccagcccctctcccgtcctcctccgttcgatccaagccctcagatagcttcctggtgaggccgtgagacttgctcaagcttgacccggggaccctcgtcaccggaatagcccattcgcgctca

SEQ ID NO: 12187 - DNA, 291 bp, Zea mays
  unsure (1)..(291): unsure at all n locations
gtataacttctcgaataattgctataacgatataatcaatctgattattgatctcatnccatcaaaccataagatgccaaaagacttataccagtctaaaaaaaatgtgtcccgtcttgggatgaaatataagaagattgatgtgtgcgaagataattgcatgttgttctggaaggaatatgaagcggccactcattgtcagaaatgcggtaaatcaaaatatgccgaggtactaaaagaggatggagctacttttgctacaaaagtggcagtaaacaagctcgatatatg

SEQ ID NO: 12188 - DNA, 403 bp, Zea mays
agcttatgaagattcttcatcccaacatgggcttgtctgcgatgccagagccaacccatgttagtcttagcaattaagcaagtatcgagttcagctctattaaaatcaattaagtatagttgaccctctaatactcccttaaatgctactgaatcatcatttcttctaaagacagtaacacctatatccgtaaaaagacaattgtagcccaatttgcataattgggaaactgaaagcaagttgtaatctaaagaatctacaagaaaaacattggaaatggaatggtcagtgatatagcaattttaccaagtcctttgaccaaaccttgatttcatccccaaatgtgatagctctttgggatcatgatattctcgaggaagagaacatcttttctcctagcatg

SEQ ID NO: 12189 - DNA, 269 bp, Zea mays
  unsure (1)..(269): unsure at all n locations
agcttccccatccctccatatatttaccgntattcatttcctctgcacttcgaacaatgatggttacttttgcaaaaactccgatgatgatgatggtgatgtaataattaaacactctggcatgtatggttttatgctatattgtatttgctatgtgactcaccttcgagtgagattgtggtacttgatcctgtcagtggccgtgtcggactaaatccgagggattgacgggttattcccatttaaggcttgttcggntaggccaatcc

SEQ ID NO: 12190 - DNA, 393 bp, Zea mays
agctttaccttgattcccaacaaacaagcattttctttagagtcttttctttagtcgggtaagtctcgctgagtaattgcgtactcaggggtttattcccattgttgctgcaggagagactattaacacttttgagttttgctaaaacccacactagaggcttctacttttgcttatgtttattatgtgtgtactgtgggaagatagcttcttcccaggtgttgtaataagttagcacttgaatctaccctgagcatgtcataataatacctactacttggtttgtatactttaaaagtttgctaatgtacattatcttattataaagtcttccgctcaactcctgtatttaaaagttatgttcttattggggtattggactacttgcaacta

SEQ ID NO: 12191 - DNA, 344 bp, Zea mays
  unsure (1)..(344): unsure at all n locations
agcttacatgtgttatgnngggtccatgncgatactataagaatgagagagaatactcgtcatatgcaccggttcaactccacttgctgcanaagtgatttcatgcctaacagtattttttggaccaggcatggagaaatatggattctagaggacaaagaagaggagttcgatgacacaattgttcaccccgaaggcactgcttaattctttcttgaattactctaggctcaagaataactacctcaagtcgtacatgtatccaaccaatgtttcttctgataagatgcttcatctcaccaggaccttcaacttgcaagctggatcatttcgttcacgtacct

SEQ ID NO: 12192 - DNA, 426 bp, Zea mays
  unsure (1)..(426): unsure at all n locations
gctggatgatctgatcaagtattatgatcttatgagagatgctccccacgcggacgtcatctaacaacactgacttagtgttatcccaggcaagccccggtgcatntgccacctccttgttggtttaaaacttttatcacttatatgctgcattaggtgataggagttgagtgatgaaacagttgatgcattgccattccttgggaattgattatcctccttgatacctgttttacaaaaagaactaatgaggcatagcctcgcctagagaattaaaacatgtttctttttaaaagaatgatgtgtgacactgggtatgggtttgttttatgaaaaaggactcgtaatggtgagcgcatcattgaaagggaaatgtgcccttgggccattctaatattttgtagattagtgtcaacacaagtgcct

SEQ ID NO: 12193 - DNA, 442 bp, Zea mays
catgaagcttctaagggagaacacgtgatagggttgactaacatacaattcgaaaaagatagaccttgtgcagcttgtcaagcaggtaaacaggtgggaggagcgcatcacagcaagaatgtgatgaccacttcaagacccctggagatgctgcatatggacctcttcggacccgtcgcctatctaagcatagggggaagtaagtatgggctagttattgttgatgacttttcccgcttcacttaggtgttctttttgcaggataagtctgaaacccaagggaccctcaagcgcttcctaaggagagctcaaaatgagtttgagctcaaggtgaagaagataaggagcgacaacgggtccgagttcaagaatcttcaagtggaggagttccttgaggaggaagggatcaagcacgagttctccgctccctacacaccacagc

SEQ ID NO: 12194 - DNA, 394 bp, Zea mays
ctgccgcatgaagctatggagtgtaaaacaacctcatttattagagccttacctagcgggtcgtcactgacgggccgttcttcacggtgcggccgacctatatatgtgaaaatggcgacgcgacgttcactaatggaattgaggggcgaggcttggggctatactgccataaggggttctagttttactgcgcacaatcaatttgggaagagggggctgaggcatcgcgaatttttgattcggatcgacttacggtgcgcgtggagtacataccttgctgcagatcatgggctatttatagccgcgctggaccgactagcactggacatgcacaccgtgagtcagctcgatgaagactagtgcttaagcgcgtggcgcgctaccgctatagctc

SEQ ID NO: 12195 - DNA, 409 bp, Zea mays
  unsure (1)..(409): unsure at all n locations
agctntaatgcctctccaaaccttgcactatcattagtcttgnacatttgtgtgggggnctatgaanaaagggtgccaccagttttccttgactagataggtttgtatcggatacgaactgcagaaagggttggttaacttaaacaaagtcagcttaatgtgtaaggactttgaggcataaggttgggagccgagacatagagatgtcacccaacaacaggagtcatatatatgatatgattagcaaggagttgcttaccgatctaccttgtcttctagcggtgatgctaaagctcactagtagacttgttagttgtgggttctgaatcactaagtatcaatcgagggatattgatttagtgggagtagactattaaatgtttaatatgatctactctgtcatggatat

SEQ ID NO: 12196 - DNA, 443 bp, Zea mays
  unsure (1)..(443): unsure at all n locations
agcttctaaagggagagcacattntgggactaacaaatgtgcacttttataaagacaggatttgtagcgcatgccaagcagggaagcaagttggtgttcatcatccacataagaacatcttgacgactgataggccactcaagctcctccacatggacttattcggcccgatcgcttatataagcatcgacaggagtaagtactgtctagttattgtggatgactattctcgcttcacttgggtattctttttacaggaaaaatctcaaacccaagagactttgaaaggattcttgagatgggctcaaaatgagttcggcttgaggatcaagaagataagaagcgacaatgggacggagttcaagaactcataaatagaaggctttcttgaggaggaggggatcaagcatgagttctcttctccctacacgccacaacaaaat

SEQ ID NO: 12197 - DNA, 450 bp, Zea mays
agcttcgaggtaccaagtgcacgggagaaggtcttgatgctgatgaacccaaagccataggtgaagaagaaggcttgcaaagtcaagggtgatcgagttgagaacagctacgacacatcaaggatcactacataaggacgtgacttacaaccaatgaagaaacatctctagttatgtggtgtaagtcataaggctcaagatcaagctctaagaagatgtgcacaaggtcactataagaagaagcagtgtcaaaaccaaaactggaggcagcccaaaagagctaagtttaccttgatctttagtttgggttggtcctatgtttggagatgttctatgtgacctttgcaggatgttggagctaaataatgtcaatctagatcaagcaagttgacttgatgatttatgagtccaacatcaaagctcaagcatgttaaatgctatagatataat

SEQ ID NO: 12198 - DNA, 411 bp, Zea mays
  unsure (1)..(411): unsure at all n locations
agcttctatgccaaagattttataaagttaattggtggntatntagntgggagtttctaaaggttaatgtcaaaaaggcactttctactaccttggtatttgaaaaatgtcaaacaacagatttcatatttttcctatgttcttaataacaaaacattaattaccccaaggtttggggtgttttcatcttggggttatttntctaggatttcttaagatttccttgttttcttaaaataaaaggtatcccaattattntatactaaaccagggtataataaatttttctagtgaactatactgaataagtagactaacaaaaatatgggtgctccctggttctttatttaaacacttatcgatattttccctaactttatgctaaaaaggatttaaatggtaaaccctacc

SEQ ID NO: 12199 - DNA, 410 bp, Zea mays
  unsure (1)..(410): unsure at all n locations
agctntaccgcattgaagcatgagcgcttccccttggctntggtcttgcttgtgtgtcccttgcgatctttaagcaccgtcttgaatcttttgatgatgagagccatctcttcatcattaagtccggccgcctcaatctgtgccaccttgctaggtagcgcctccttgcttcgtgttgccttgagagcaagaggttgcggctcgttgatcggaccattcaaggcgtcgtccacgtatctcgcctcctcgatcatcattcgcccgctaacgaatttcccaagaacttcttcgggcgacatcttggtgtacctgggattttcacgaatattgttcactaaatgaggatcaagaacggtaaatgaccttatcattaggcggacgacgtcgtggtccgtccatcgcgtgctccc

SEQ ID NO: 12200 - DNA, 330 bp, Zea mays
  unsure (1)..(330): unsure at all n locations
gaaagtgaaagattggtccaaatagtatggtatatcatgacctttatcaattcttggagcatgtggataacttcttttttaatcatatccttggatgagccttcttcccaaggtatttatatgttgaggagcatctttctttctctctttatatangccatacttttgcatgcttttcatatgtcgtttaggcatctctctctttccacatatcacctttatttatctcttagaatacaatgactttattgatggggatcttttcggcgaatgcaatgcttgaaatgaatctcttgcattcttgtactccacaagatggaagaagacaac

SEQ ID NO: 12201 - DNA, 369 bp, Zea mays
  unsure (1)..(369): unsure at all n locations
agctngccagaaagtttctccccgctcgggcaacccttcgcagttcaccaagctgattgcccacacatggccacttcaacgttgggggctggacattctcgggccactacctacagctcaagggaacctcaagttcaccttcgtcgccatcgaatattttaccaagtggatcgaagccagggtagtatccacaataacgtcgaagactacccagaagttcttctggcaaaacattgtttgccgattcggagtcccgtccgagctcacagtcgacaatggcaaatagtttgatagccaggacttcagggacttctacttctccatcggcaccaagcttgccttcgcctcggtataccacccgcaatctaa

SEQ ID NO: 12202 - DNA, 400 bp, Zea mays
  unsure (1)..(400): unsure at all n locations
agcttctacctatctnccggcagacggatatctctttattatccaggagatagtataaaaaatcttcttccccactaccattgaacactaatgcccccttcgggtatttcaattttcgggcataatgttgagcttctcgttcttcttcctaagaaagtccctttcctgaagcatggcagatgatgtaatcaatgctctcttttaaagcttcgggagcagcaggaatggcaaccttttcaaacgaaatttgctctgtggccttttcttctgttgccttttcttcaaattccgcaggcttcgtctcagcaggcactgagggccccgcctcggtttcagcctcggttggtgtagcttcaacatctatttgcttagtattagctttgggttgctttttgcagct

SEQ ID NO: 12203 - DNA, 358 bp, Zea mays
agcttgatgggttacttctatagagtgcatcatgtggtcaaccacaaaaatctaaagcatgtatgtgatcagtagcaggatgttcgagaaaaaaaaaagaacgtgtttttaactgaattaatccagaaccaggtcaattgactatgaacaaaacaccaaagggtcgacttgcattctgcttgtctgtaactaagcgtcatatggactcaggattcaaagggctaacagatggaactggcatactaatagctgccaaaattcttgttttgctaacttactagatgtaagtactgcaggcaaaaaaaaagatcctagagaaaacgagcagctcgactcgtgcaaactgacaagaacgtgc

SEQ ID NO: 12204 - DNA, 462 bp, Zea mays
  unsure (1)..(462): unsure at all n locations
tgcacaatttctnccnctttttcataaatctcaaaaaaagatataaagaatattattggtagaaagattaatcaagatttgaacacactatcatgaaaaaggtccttgtatggcacaaaggtaatggagaagtgtcataagtgatgtacctttgtgtttcaccttttcaaaggggtgttccacacttgtgttgtatttagagttcattntgcaatctcttgttggcataattgtgacataggtgcaagatatcaaatgaatattgtcatactaattgaaagataaatcttgatacctggagtctagatgtcacctagcattttcttatcataacaagaggcagcatgaaaattgcacaagtatggattatacaactagtgatcatgtatgaaaaatatcaattgaaaaacaccaactgatacaatttgatagataagcagatcactaatagcatattacact

SEQ ID NO: 12205 - DNA, 411 bp, Zea mays
  unsure (1)..(411): unsure at all n locations
agctntaatacacaaattctccccctttgacatttaacaccaaanactatactcaatcatgaacataggatgatatcgagggacagcagggtgtcaaggaggaaaaacgactatcaaaactcccccttacttattgaacatatgcactatcaacatcttggtaagatacatatatgcgcaaagattaatacttccttttgtacctttaccatgttgtagtgtacttcccatcttgaaagtatttaatttctcgagagcttctccacacttgtgcctgattctttctcctaactttntcttgttgctaaaacaccaaacttagaacaagttatagtattgggcacaagaagaaacttctatttcaatgattgtccaaagatgtcaattgaagcanactatcacatctatcaa

SEQ ID NO: 12206 - DNA, 401 bp, Zea mays
  unsure (1)..(401): unsure at all n locations
agctntaccttgattcccaaaagccagcatattcttgagagtctttttccttagacgggtaagacttgcgaaagtacacttcgtactcagggttttcgaacccatgttgttgcaggtactagatttgtgctgctgtggatggtgttaagcgccggtgggcacgaccttcttataagtataagtaactcttctatacttattgaggatggtcacttaagctagcatatatttcaaacttataaataatttataacatttcaaagtttatttctttgaatcactttgtaaccactctgataaacataatgtaaatntgttgtaacttgtaaccttttgtaataaagaaattctgctgcanaatgttggtgtgtgatttgtgtttacttaatcttgcgatcctg

SEQ ID NO: 12207 - DNA, 430 bp, Zea mays
  unsure (1)..(430): unsure at all n locations
catgcaactctaagggaagccatttangataatctagtcattttttataaacgggttgtagncatgccaagcggaaagcaaatggtgctcacattcacatagaacatcatgacgactgacggccactggagctcctaacatggatctatttggcccgatagcttacataagcatcgacgggagtaagtattgnctagttattgggaatgaatattctcgcttcacttgggtattctcttttgcaggaaaaatctcatacccaagaaactttaaagggattcttgagaccggctcaaaataagttcggcttaaggatcaagaaaattataagcgacaacgggacggagttcaagaactcacaaatcgaaggctttcttgaagaggagggcatcaagcatgagttctcttctccctacaccccacaacaaaa

SEQ ID NO: 12208 - DNA, 452 bp, Zea mays
agcttagcctcggtcggaccaataccagaaaggccggtccgcaatgggagtggagagatggcgagagtagcttgtaccctccgtggcaagagactggaaggtggggtgctgtactctcggaaacatggcgggcaccatggcgagggtaacgtgtaccaaccaggccaacggctggaaggtggggtgctgtactctcggaaacatggcgggcaccatggcgagggtaacgtgtaccaaccaggccaatggctggacggtggagtactgtgctctcggttggcggggacccgttctggtcttgagaaacccgtgggcgagttgacatatgcaagggttaagtgctacatatgtcgtgtggttggagatccccagctgggtattaatcgaatcggatcgccgaacttctcggatatgaagactggatcttcgaccctcatcgtagataacaagtg

SEQ ID NO: 12209 - DNA, 440 bp, Zea mays
  unsure (1)..(440): unsure at all n locations
gcttaatgtcgcgaacctaagaacggagtctcgcgattgtttatgggaggaaggcttgtcgacggtgtaatgcggctctaccgtggagggagcactccggcgaggaattcctgatgatctgtttatccttgcacccaaaatctttgcctcttgtcttccttacatccccacaaagcacccaggcacaaaaccggacctcgaacggcgacgctcctcaatcccgcccatggcggtggtgcttttccttcggtgcgctccgcgattccctcggtgccctcggatttgtgtgctctcaacgtttgngtggccgaggaggaggtgggaggggtcctatatatactcctagaggacgagcaggcgccaggtctgctggaatggtgtggtgcggtgagctcngttgcgcctaacgtgagttgggtataggacggatctgacggtgg

SEQ ID NO: 12210 - DNA, 425 bp, Zea mays
  unsure (1)..(425): unsure at all n locations
agcttactcctccctgtgaagggccattcattatcgccaagattntgaagcccggaacatacaagctggccaacgatcaaggcgaggtctacaacaacgcttggaacatccaacacctacgtcgcttttacccttaaaaatgtttcaagtcatttatgtacctcgctttctttacataaataaagtctaaccatcaaggaaggatcatccttgcctcgacaaagcctgaccctccctcgggggcttgaaggggggaaccccctctgcgtcaaaattttcctcggaaaggtctttcgccagaaaatctttcgcgcttttcgactgcttcgataacagaatcctaaagacgagcgagagagaccttgaacgcaatgtcgatcgagccgagggactcctacacctccggatacgtatacctcactcat

SEQ ID NO: 12211 - DNA, 400 bp, Zea mays
  unsure (1)..(400): unsure at all n locations
agcttcccccagcgcttacatgctcacaacgctctttggcgtattatctgtagcactcctggaacatcgacaaccttcgcaaatttnttgtttgatccatttagggctgatttcgcccttgtaattcaccgcaaacaatcttgtaccggcccgcactcttttcctcccggggggtgaggtttttaacgaggcggagccatgtaatatatgtgagaaaaatcccccgcaaaaacatgtgtcgaaaaaagaccgcgacaacggtcttcggcattcgaccaattcgaagtcaccgcgaggctaagcgctagccaccctcgcgtgcgacaagtccgcgcagaagtcgcttaatggtgcagctggactaagcacaacaagtgcgaaaaaatccgatgtctatcgc

SEQ ID NO: 12212 - DNA, 352 bp, Zea mays
agcttggacagtattctgcgatgggtcctgggtttatcttctgggcaggtgcagctgccgttttaattgcaccttccaaagtcagaacatgctacgcagtgaaacttgattttagttgtacaaataatattgttgaatacgaagctttgcttttgggtcttcggaagttgaaagcaatggggataagaagggcggtcctcaaaactgattcccaattatttctggccatgttgacaaaagttgcaaagcaagagatccgaagcttgaaaaatatttggatatatgttgaagacttgaagccttcttcgaagggttttctgttaagaatattccacgaggagaaaatgaacac

SEQ ID NO: 12213 - DNA, 437 bp, Zea mays
  unsure (1)..(437): unsure at all n locations
agcttgcttctaaaataaatgtaatttatgtattctcttccgcatttctttatctccgatgttctgtaatgtctgcaagacgggtgaaacgttcctggtaaggtaagaaaagataccgaacttgtcaagtgacttatgaacatctacagggtgtctgatgtctgttagacaaggacaactgtaggtgggcctaattacttgggaggttccgtcacaaagacctaccttaatcacctcatgccagtaaaagggaaagaaagtaaccaagactcaaaacaccttatcttgagcaaaaagggaaccaacatgagataagtaagaacattgtctgaactatattatcataacatggaccactaataaaagttgagcagaccaaactacttacnattctagtanggtagtataccatgaaggtttgcaaaatgccaacaagt

SEQ ID NO: 12214 - DNA, 455 bp, Zea mays
  unsure (1)..(455): unsure at all n locations
ctactctcctggaagggccttcatcatcgcaagacttgaacctatttatacaagctggccaacgatcaaggcaaggtctacagcaacgcttggaacatccaacagctacgtcgcttttacccttaaaatgtttcaagtcgtttatgtacctcgctttctttacataaataaagtctaaccatcaaggaaagatcagccttgcctcggcaaagcccgaccctccctcgggggctagaaggggggaaccccctctgcgtcaaaattttcctcagaaaggtcttttgccagaacgtctttcacgcttttcgactacttcgataacagaatcctaaagacgagtgagagagaccttgaacgacaaggccgatcgagccggnggacacctacgcctnncggatacgaatacctcactcatcaccttccgtgaaaataactcacgctcggataagcgattc

SEQ ID NO: 12215 - DNA, 424 bp, Zea mays
  unsure (1)..(424): unsure at all n locations
atgaagattcttcatcccaacatgggctattctgcggtgccattgttctttccatgntagtcttagcaattaaacatgtgtcgagctcagctctatcaaaatctactaagtatagctgaccctctaacacacccttaaatgctattgaatcatcacttcttctaaagacagtgacacctatatcagtaaaaagacagttgtagcccatttgacataattgggaaacagaaagcaagttgtaatctaatgaatcaacaagaaaaacattggaaatggaatggtcaggtgaaatagcaattntacccaaacctttgaccaacccttgatttccatccccaaatgtgatagctcgctgggggtcattgttcttctcatatgaagagaacataccttttctcccggtcatgtggnttgtgcacccgct

SEQ ID NO: 12216 - DNA, 464 bp, Zea mays
  unsure (1)..(464): unsure at all n locations
gctnaccacttcaccacgaacacggcgcactattcttcttcacctatcgngcctttgttgcctcaccggcgacctcgccgccgcgggagcccgccacctcaccgtggaccggccgcctaagcccccactggccaaattgaccccaccaccccgaccacctataaccggatcattggcggagaaccactgtcggaacaccgacgggcggntcttcctccctgtggatggaccatcgttctccccctggcgtcgtttccctctccctcgctggcatgtgggcccacgcccacggngccgtctccgcgccgtcgtgcgcgctcggctgggtcaaaatccccccccggtccgtttaaccgagaaatacttttctttttcctttttctctctgtgtcccattttcttatatatatacacatattgatagtttatgcaccagaaatagtccaaatattctttaagtcaca

SEQ ID NO: 12217 - DNA, 430 bp, Zea mays
  unsure (1)..(430): unsure at all n locations
agctntctcgactaagtcggggacagggcctcatggacgggtgaaagtacgtgtaagcggcaaggccgaccgagccgagggattcccacgcctctgggatacggatacctcactcgtcccttccgcgagaagtaactctcgctcacacaaacatccctgttaccgacggagtccagatgctcgaaacaagaggaaaaaagacgcagcttcgcaagcgcggcgagggtgtgttttctggcctcggcggccgcagaaggcacacgccacaagatgatctgatcctgcaggctcgggtcttcacgctgaagggagccgtagcaccctcggcatcgacggcgtcttcagctacgtccgacccagcctcggacggcggcgcggtccagggacccctccgggaatccggcccgagcaggcggctcggccggtaccc

SEQ ID NO: 12218 - DNA, 438 bp, Zea mays
  unsure (1)..(438): unsure at all n locations
tgcaagcttctaaagggagagcacatgttangactatctaatgttcatttttttatagacaagaattgcagcgcatgtcaagcaggaaagcaggttggagttcatcatccacacaagaacatcatgacgactaacaggccgctcgagctactcacatggatctattcgacccgatagcttacataagcatcggtgggagtaagaactgtcttgctattgcggatgaatattctcgcttcactcgggtattctttctgcaggaaaaatctcaaacccaatagaccttaaagagattttcttaagacgggctcaaaatgagttccgattgagaatcaaaaagataaaaagcggcaatgggatggagctcaacaattcacaaattgaaggttntcttgaggaagaaggcatcaagcatgagttctcttctttctacacctc

SEQ ID NO: 12219 - DNA, 444 bp, Zea mays
agcttcggcatgacagcataaaatgggaacctttcttttatatgaaaaggcaaattagacctcgaagaattactatagaattattagcaaatgtaaagggcatgaatgtaattctacatgggttgcttcccttgcctataaatagatgaacagtaatcctgtactgttcaggggaactgggcattcgccttttgcatcacgcttgtacccttgctttccttcaaaccaaaggtacatctataatttgtaattatggatatggtaatgcaaataaaaataagtcgatgatgatgtttatattatttttcgtatttcgtgtatgaattcttcctcattatttatcatgcttacgaaagttttccttcataaccttcgtccggaattcatatatccgaaggaaataatgtttcgaaggacgagggacttacatttacactcttcatg

SEQ ID NO: 12220 - DNA, 333 bp, Zea mays
  unsure (1)..(333): unsure at all n locations
gcacaacaagcgctcacggccccaagaaggcaacggcagcacatgcctaatgcaccccaacagccgccacagtgccgcagactgccgatagattatcaaactcgcaaggcgcgtcagcaagcggcacgagcagtcctctaaggaccgctcaccgcctcgttgctggcttcacaaagaagaaggccgacgaaaggctgcggatgtgggggggcangacctcggctaccagtcgcccgagagaaaccttaaggatgttntcaccgaagaaaaccgactcggcaacgacgacgaccgccgcaagaagtgtatgtcatgtaccgcggaagctgggag

SEQ ID NO: 12221 - DNA, 409 bp, Zea mays
  unsure (1)..(409): unsure at all n locations
agcttatgaagattctttattctacatgggctattcggcggngcaagagccaacccaagttagtcttaacaaccaagccagtgtcgagttcatctctatcaaaatctaccaagtatagctgaccctctaacactcccttaaatgctattgaatcatcacttcttctaaagacagcgacacctgcatcagtaaatggacagttgtaacctatttgacatagttgcgaaacggaaagcaaattgtaatctaaagaatttacaagaaaaacattggaaatagtatgggcaggtgatatatcaattttacccaatcctttgaccaaaccttgatatccatccccgaatgtgatagctcgatggggatcttggttttcttatatgaggagaacatcttcttttcccagtcatgt

SEQ ID NO: 12222 - DNA, 420 bp, Zea mays
agcttgtgaaggttcttcatccccacatgtgctaagcggcgatgccacaaccagcccatgctagtcttagcaattaagcatgcatctagaccggcctcttcttttgcaaaatcaactaagtaaagcttgccgtctaatacacccttaaaggctagtgaaccatcacttcttctaaagacagacacatctacatttgtaaaaagacaattatatcccatattgcatagttgactaacagatagcaaattgtaaccaagagactcaactaaaaacacattggagatagagtgctcattagaaattgcaattttacctaacccttttaccttgccttgattcccatcaccgaatataattgaatcttgggaatccttattcttgacgtaggaggtgaacatcttcttctcccccgtcatatgg

SEQ ID NO: 12223 - DNA, 391 bp, Zea mays
  unsure (1)..(391): unsure at all n locations
agcttataggttttctgagatgactaggggcttcttangaagactccaccctacgcatgtcagatcaatccacaattccactcaaagtgatgtcagaggaagccagtttcagaggccacaacatagctcacaatcttcagggcaacagcaaagctcttttatgccaccagctccaaggggcagaggcgacaggggcttcnaagaaagatatgaggatcaacccacaaaactctattgcttattttgtggtgaagacaagggccacactacaagaacatgccaggtcaccattcataagcaaaaagagttgccaaagcagaagcgcgacagaatcatccgaagcagggtttacatactgcttcgtgctactctccctacataccagaatatg

SEQ ID NO: 12224 - DNA, 275 bp, Zea mays
taacacgctctctgaagtgcgtgagccttgatgagcatcgcgtttatgacatattgcacttcacaatttctatgatatagatatgttctcattgacctcattatgtgcatttggcatttaaggccaaattatgtattcctctcaaggcacatatttatggggagcaatctatattgatataattataaaaagcttcgtgacataccttttgacctatatatctcttcatattttgctataccaaagtcaatgtgagaattgcatctcatgcctac

SEQ ID NO: 12225 - DNA, 422 bp, Zea mays
  unsure (1)..(422): unsure at all n locations
agcttgctacccacaacatctatgagattagttatttctctctctggcggacaagngtgcatggataacaaagggtagagcatggcacgctcccggcgaagcgcaaccgagatcggcagacattgggccctcccaagtcaagccctaaaaatataaataaagataaatgcctaaagcccccccctaaatctattgtcacacccggttttagaagggaaagcgaatgcaaaccatgtacgtgccaggatcagaaattcacgtacacagcgattacataaatgaatcttcatagcacaatgctttacataacaataaagaataagttataatattaaagactagagtcatttacataatataaatcaaagtgcacataatataaacgtatccaacgtaaataaacccatcatagacatctgact

SEQ ID NO: 12226 - DNA, 465 bp, Zea mays
  unsure (1)..(465): unsure at all n locations
agctggcattcccacatctcaaatcacttagcataagaaagcagaacagaaaatcattccacanacactacttgattaactaagcttgcattcccatatctcaattcacttagcataaagaaagcagaacaaaaaatcattccacaaacactcacatcgatgcagcccttataaagatgctccctccagaaccacctccacggtctcctggagagtggagacaacctaacataaatccccacaataataaaaaaaacaggaaactccattgaaatctataattgaaccaataacttgagttcatccattaactcatttgtacgtgtaagacataacttatgccaataaataagcataacataattctcctaacacctcacattacaacaaagatatccatcccatgaccccaacccaaacttctgttgcaccagattctacanaaaaaagaaaactttggatata

SEQ ID NO: 12227 - DNA, 409 bp, Zea mays
  unsure (1)..(409): unsure at all n locations
agcttcattgataaatgaaggggtgggacccttgcgccttaactatcttgccatggttcctcccccaacatgatatctggaagtcattgccaccgacatcgatatccacaatcggcttcattcttttctagactctcacggtagtggatgggtctggcacaacgtcacggtgatcctccacacggaagctatagcttcatctgcatttgactcctccaactcatcgaccaatgacattccctcgtgttgttgcagccgccatttgattatttgagagattgagcagaccccgcctcaacatccgattcaccctcatccatattggatctgcttcatctacatngcatgtgaagagaaagagtgggggcaacgacatgggacacgaagcatangatggcgatatgcacat

SEQ ID NO: 12228 - DNA, 452 bp, Zea mays
catgcaagcttctatgtatgtacatacatgttctcaagctttataaagtatatatactccatatacatgaagaaacacatacttagcccatgcagtcttttatacatccttggattggaattgcaagacactttcaacaagaatggatacatactcaacacatacaatctttaactttaatatattaataaatcaatctgcaaatactcaaagttctcatgggactgcataaataaaacatataataattagagacaaatcctctcttagtctattatcatggtcttataccgcgtcttggcaactcttctaggataaaaggggtaaaaattggttataactgcatattcaactccagaggggccactcctgcaaagcattataaaagcgcaagattctaatcagtaatatttttagaaatgatgtcagttcacatatggtgtgtataattt

SEQ ID NO: 12229 - DNA, 322 bp, Zea mays
  unsure (1)..(322): unsure at all n locations
agctcgtcattgagctgggaccaacactacatgaacctgagccatctttggtggccaaaagccacccaaaatagaccatatgtcgccgaaaattagttcttgtcggtggcatatgtctattttcggcgccttctagccacaaaaaatagctgaaaataaacctttattttagcagctccaccttgatcaccgaanatagctaatttttagcaaccagtgcgtggccgcgaaaaatatgagctaattttggggggcaagcgggtggccgccgaaaataagatttatattttttgtcagctaggaagggcggtgccaaaaatta

SEQ ID NO: 12230 - DNA, 447 bp, Zea mays
  unsure (1)..(447): unsure at all n locations
agcttctataaggggcatactcgtaattcctcatatgctgtgtcctgtgcctataaatagtgaacagtagtccgttactgttcacggattctggtaattatactcgcatcttctggaattcaacccttgccaaggcagaggtattattgtatccaatgattcaatatattaagtaaatatgacataattcgtctatgatttatttacccctttaatacctnttattttatgttgccttacaatatctattgaaattttattacgaagtcctaagcttcgtaattttactctcatcaaccttcgtccaaggctcattatcctcaagggaataatgtttcatggacgaagaacgttaacatttaacactntatgttgccttgttcttaattatagncggtgaaacaagtccccacaaggatcctcaacatcactttgccagtgatacat

SEQ ID NO: 12231 - DNA, 444 bp, Zea mays
  unsure (1)..(444): unsure at all n locations
agctttaaccattcatattattgtttggtgtttattcaataacccagaagagactaaggcgggatcaataagaacaatggcttcggcagaggacgaagctgattgttctgtggcaaaagatgctatataagggatcacgcttcaggcagtggagaacatcaataaatatcaagccaaaacaataaagtggcgtgacagaaaagttcggctaaagaacattaagccagggcacttggtacttcggagagtggccaacccagatacagtaggcaagctaaagttgaagtgggaaggaccttttttggtagtatcttcatcaagacccggttcttatagattgaaggatatgaacggcaacgacatctctagatcttggaatgcggatgagcttcggcgatattatgtntagctgatgtaatctttttaattttcctatggcaccat

SEQ ID NO: 12232 - DNA, 438 bp, Zea mays
ctgcagctgcagcttaagcaaattcttccctttgcatttttctccataaatgatacaaagaatataaagggtagaaattatgatttaagcaagatgtgaacacactatcatgaaaaagatccttagatgacaaaaaagtaatgtagaagtgacatgaagtgatgtacctttgcgttttaccttttcaagggggtgttccaaacttgtgttgaatttaaaattcatttgcaagctcttgttggcataattttgacataggtccaagatatcaaatgaagattgtcatactaactgaaagataaatcttgatacctggagtctagatgtcacctagcattttcttatcacaacaagaggcaacatgataattgcacaagtatggattatgcaactagtgatcatgtatgaaaaatatcaattgaaaacaccaattgatac

SEQ ID NO: 12233 - DNA, 392 bp, Zea mays
agcttgtggttgaccggatcatctaagcatataagtttctggatgagaagtggtcacccaagtattgttgatgaagcaccagaagaccaatcaaggaaggaatccatgtgggagtttgcaagaggaaggtttgcgtgttggcatcgatgcttcttcaataagctagctgccaagcgaaagctagaagcgtgaagatgatctttgagtagccagaatcagcgtttgcaatcggcaaccggatgctcctcaaaggccagattttgttgaagctccatctcctcgaagattctgcaaagtgaagatatgtagctaaagtaaagttatacccataacccttctatgtcgaatctcgaggacgagattcattttaagtggggtagatctgtagcatt

SEQ ID NO: 12234 - DNA, 345 bp, Zea mays
  unsure (1)..(345): unsure at all n locations
tgcagcatgcaagcttatactctgtgattgtatagccgttaaagcactggagagcgtacttgaggtgttcgcctccaagtgcagtgaagagaatccctgctcctgctccctgcagcttcagcgagccatcaaaatacattcgccatacttctgccgtttctggattgtctggtacttgctgttctgtccactctgatacgaaatcaaccagtgctcgagttttgatggcagtgcgaggtcggaactcgatatcgtgggatcccaactcgcaagcccacttagctattcggccaatggcttccttgttgtgaagaatgtcccctattgnaaaaccagtgactacta

SEQ ID NO: 12235 - DNA, 360 bp, Zea mays
  unsure (1)..(360): unsure at all n locations
agctnggatgattagaatggtggtggttatggttatttataaccccaaccaacattctagccgtnggttgttctgtctgtcgatgggcacaccggacagttcggtgcgcgccacgtcaatcgatcgttggtgtttggagcttgtgactgttgaagtcgtctgtccttgtggtgcaccggacagtccaatggcacaccagacagtccggtgcgacctgacgtcgcagactgtcttctgacttctgacgctttagactgcagtgcaatgaaccgtagtcgactattggcggagtcgaccgttgctctgtgggttcatcggacagtccgatggcataccagacagtccagtgatttttatctg

SEQ ID NO: 12236 - DNA, 463 bp, Zea mays
  unsure (1)..(463): unsure at all n locations
cacctgcngcatgcaagctctgggaactatgcccgtatccaatctgtctgatccggaactattatagctngccagatgcccccgttccagtcgaccacgactagcacccaacataagacttgcctagttatttagccaagaccagagccatgatagttctcatggtagcactgttttcccgggtggtcactccatgttccaattaatatgcaataatcttgtttaaccatcgggttaacaacaataatgtaaacttaccatttggaacattagtatcatataggagtgactgcataaagttaagttgtagcaatagcatagctacgaagttaaagtataattcccaggtttgatcaaggaataaggttggaaaggttatctaaataggcaacccgtcaaattatgcatatatatccaaaagaataaactttattaaatgtattgtttgggatcaaacagagta

SEQ ID NO: 12237 - DNA, 398 bp, Zea mays
gggcgctttcaacctgcgcgcaagcgagggcggtctaagcgcgggcggaggcggtcggatccaagactattgggtctatgtgctgcaacgctgcgcactcagggaggagctggaggcggcgttcagctttgtggaggtccaggcgtggatctactatggctgtgcacgaatatgctcgtccaatctgcaacaatcggctgtcatggtggcccaaccctgataggcgctgtcgcgggataacccttcacgccacagctaccaattctccgcgtcgaggccatcaatcttgtgcaccacggacatgcatttgctgcgtcgttgtaattgaggccgacgtgatccaccttggtcaccgtcgcgacgtggtcacctatactacaacactcgatggtgccacc

SEQ ID NO: 12238 - DNA, 450 bp, Zea mays
  unsure (1)..(450): unsure at all n locations
ctgcaactgagcagngaccgcttcgttgaaaccctggaagctgttatcaacatgtccttcactnttgccatgaggtgattgttcctggccgaagagaggagtaccaggtttgtgcaacactcttgacggccatgacgaaagactttgccatgactgcagtattgccaccatacgaagatatggntgcttcataactcatcaagaattgcttcnggtctgaatgaccgtcgtacatggggagctggggtggcttgtaagactggggccatggtgtagcctgcagttctgttgacagaggagaagcatcatcaaaagcaaaattttcatgatggaaatcttcataccagtcatcctcattgtagaagccctcctgatgaagctctctacgcggaggccttcggttctggtcatcttgagcaagatgacgaacttcttccgaagcttcatcta

SEQ ID NO: 12239 - DNA, 374 bp, Zea mays
  unsure (1)..(374): unsure at all n locations
agctngagataatatttcctcctgcattntttgatgtcatggtccacttgactgtccatttacctgatgaagctatcctgagaggcccagtgcaatatggttggatgtaccccatcgaaagacggttatttactttgaagcattctgtgaggaacatggcacggcctgaaggctcaattgctgaagcatatgttgctaatgaatgcttgactgcttgttcgcggtattttgatgatctcgacacacgacataattgggagggcaggaacagagagcgcgttgatatgagcaagggtgatntatctgttttccaacatggagtcgatttactcggagggcatatgattacataccaagaaaatatatatgacaag

SEQ ID NO: 12240 - DNA, 395 bp, Zea mays
  unsure (1)..(395): unsure at all n locations
atgcataaccatattgagcttccttaggctactataatatcatacaaggacagtggaacatcatttttcatttttacatccatatattatttataaaccatttaaaactacttaaggtgcattaaacaagttaaatcactaacttaatcatacatgcacaacaattcacgaaatatttatcagtcaccaagcatcataccaagagtctattgtaaaaatttcaacccatttggagcactagagctacagatccaaaaataataagcaaataaatcttctttttcctaattaacatgatttaattagcacaccaagaaaacagtgaacaacctataangtttatantttgtcttgatggagtatgacaatatctaactaaacaaaacaggttcatc

SEQ ID NO: 12241 - DNA, 444 bp, Zea mays
  unsure (1)..(444): unsure at all n locations
agcttggaggcgtctattggttgtcgacttggtgtatacacctccttcttctcctccgttgccttgaatgcaacgggttgggcttcggatgagtcgccaagctcgttgattttcctcgagccttctatcatgcattcaaaacttacaaaatgcccgataacttcctcgggggtcattttagtatatctaggattaccacgaatcaattgaacttgagtgggattaagaaaaatgagagatcttaagataacatttaccacttcatgatcgtcccacttcttgctcccgaggttgcgcacttggttcaccaaagtcttgagccggntgtacatgtgttgtggctcctcccctttgtgaagccggaaccgaccgagctcccnctcgatcgtttcccgcttggtgagtctggtgagctcgtctccctcgtgcgcggntttgagtaca

SEQ ID NO: 12242 - DNA, 450 bp, Zea mays
agcttgagcagtaaccggcttcgtctgaaaccctcggaaactgtttatcagcatgtccttcagcttctgccatgatgtgattgttcctggccgaagagaggagtaccaggtttgtgcaacattcttgactgccatgacaaaagattttgccatgactgcagtattgcctccatatgaagatatggtagcttcatagctcatcagaaactagttcggatctgagtgcctgtcgtacattggaagctgaggtggtttgtaagatggaggccaaggtgtagcctgcagttctgttgacagaggagaagcatcatcaaaagcaaaatttccatgatgggaatcatcataccatccatcatcatcaaacaatccttcttgatgaagctccctgtgttggggccttcgttcttgctcatcgtgagcaagatggcgtacttcttcagtggcttcgtc

SEQ ID NO: 12243 - DNA, 363 bp, Zea mays
agcttaaccttgttacgaggatatgctgtctttgttccaaaggtggatgggccttaagcctctttgaaattcttaaggggaaatgcttaagaagtttctaacatgctttcataagtgcataaactgtcatgagcatcacacttatactatgacacaatgcacttcacattatgtatgatatagatatgttctcattaacctaattatgtgcaattggcatttaaggccaaaatatgtgttcctctccatatttagggggagcaatctatattatatagaactatgattatgcttaattgatatatcttttgatcatatgtctatgactaatgtgctttcaagtgtatcttcatgcttagtcat

SEQ ID NO: 12244 - DNA, 312 bp, Zea mays
gagaacacgtgatatgtcttaccaatgttactttcgaaaaagatagaccttgtgcagcttgtcaagcaggtaaacaagtgggaggagcgcatcacaacaagaatgtgatgaccacgtcaagacctctagagctgctacatatggacctcttcggacccgtcgcctatctaagcataggaggaagtaagtatggtctagttattattgatgactgttcccgcttcacttgggtattctttttgcaggatgaaactgaaacccacgggaccctcaagcgcttcctatggagagctcaaaacgagtttgagctca

SEQ ID NO: 12245 - DNA, 387 bp, Zea mays
  unsure (1)..(387): unsure at all n locations
agctngattagcggntggtccgctgctcctactcgtctgctggcgcgattactgccggcccgcctatggtcatgccgactgccacccctatttcttcggttgactggcccgtgacctttgtacttaatgccactgttaggccacgcgcggggtgcctcgagtcgctgtactggttctgaaaacttatcttttcagtcttncgcgacgaccccgaaaagacgtggcattggcgtgagcggtggtgcgattttttcgcacccggcaaccgacgcgccagttatatgacatgtgggcctgggcccccatgctggaccgttggttgaagctgangcggcgcacaaccgtggtgcggttgtacgcttcttgcgtggccgatcgtcttttttg

SEQ ID NO: 12246 - DNA, 659 bp, Zea mays
ttcgctctaatggaaaaattttcacaggtggcaaaaagatgctccttgacgaaaaaagggcgggtgggccgatttgttaccccaggctgtctgggctctaaacaccactgagtgcagggcgaccgggttcacccatttgcgccttctatatggatcggaggccatgaccccacaagaaataaaacatgggtccccacgaacagttcccttagccggaccctacgtggacgaacccacttataaggacctcatggatggaaaccgagtcttttccctacaggctctaaataaataccaagcccaggacaaaagcatggcgcgacaacgcagtcattccgagggaattcaacgaaggggacctcgtactcgtccgaacagctcggacagagtccatgggcaagctggagcccaagtgggagggccctttcattgtcaagacgaaaggtttccccagcgcttacaggctcgcaacgccaaacggtgaaaacctggagcactcctggaacatccaccggcttcgcaaattttttgtttgactcaatagggccgatttgcccttggtatttccaaaaacaaatttattttaacccgcactcttttccttccgggggtgaagtttttaatgaggccggggtctgtaatttacaagtgaaaaaatc

SEQ ID NO: 12247 - DNA, 632 bp, Zea mays
aatatggatattagtatgggtaagctgctggagatagtcttagatacaaactaagcagtccagcaataagttcttcgtgagttgcactctgttgggcctagagatggcaatgggtacccgctacccgaaacccggggggtttttgctctattaaggtatgggtttgggtcaatttatgtacccacgggtttgttaatgggttcaaatggaaacccaacgggtacgtgggcataggtttgttcttccactacccatactcgcaaacccatgggtttttaaaatccgccttaaaatcaacatttcttataaatatgtatcataatattattaattgaatatgttctaattgaaataaacttcatgtaacaaattttaagctaaaattagttatcacttgttccttttatgttagcttattaatgtattgattgtcatttacatgatgaattattttttatgttgatgttagtgggtatgggaaacccgttgggtacccgaaacccgcatgggtttgggtttgggcaaaaatttatacccgtcatgggtattgggtttttagcgggcgtatttttttattcgcgggtttgggttgggcaagtaataccccacggggttttaccccatggcatttt

SEQ ID NO: 12248 - DNA, 604 bp, Zea mays
actctgtcgcaaacatttgcatgataaaacacttgccaaagttccacaccatgcttcaattcttgagcataggacagaagcataatgtaccatgcaccgacataagcaacctgttcctctttggatgctagtttcaatagatctaaggtggaaacactgagcttgtaaagttcaactgcaatatatgtgtcctccattgcctgaaattgggtatcaagcagatcaatattggcggcgtttcgaccccggggggtccctggaccgacgagtgaattgtcgccgcgtgtcccaacccagatgggtcggcgcgagacgaagcacaaaaggggttgagaaacagcaaaggggaaacccacgaccttcatgttgtcccgcgcccaggtcgcgtgcgcttgcagaaagggggttacaagcgttcgcattggagagaaagaaagagaggggcggcctgtgcgtcagcccgttctcccgcgcggccaacttttttgtacgagagccctggaccttacttttataagcgtaaggagagggccccagtgtacaatggggggtgtaacagtgtgctaacctgtctagcagagaagagctaaaacccctaaataca

SEQ ID NO: 12249 - DNA, 628 bp, Zea mays
tctaggggcttctagttgggggctataaatacacccccaaccggccatttccatgtgtgggagcccaagcaacatatcaaggcatattgtagacatttccaagtgctcaaacacccaagtgcttaatagaatcactcgatgattaacgtaggtgctttgcgaagtgcttaggttagttagaccgctttagcgcttgctctaagtaaaccctagttagttgagtgagttttgtaaaaccacacaacccccggctcttgcgcgagccgttgtaattgtaccgagtggggcgagtgtcttgcgagatcgtgacaaccacgtttgtgtcacagccaccaccgtgtaacaaagggaacgaagctcgcggcgttttcggccggaagctcaatagtggagacggcggtgagcgtccgaaaggagccagaagcggagcaccacctgcgtgtggagaatgcccgcggctctctacggagttacttgaccgaggtgcttggccctcgcgtgggcttccctttgcgtaggggcaccaacaaggattattcgggacctttgcgtggttccggaatacctcggtaaaaatatcggcatcatccacgaaagtttgcattctctaccttactctttaagcttc

SEQ ID NO: 12250 - DNA, 682 bp, Zea mays
tgaaaacttcctctccttcaattgttttagtattctatccttagggggatgtaccatagtataggttaaattcattgcattataaaatgttcaatagtgcaatataactttgacatcaactatatgtgtgcactaatttaaaggaatttaatctatccttttgggtttcaagaatgatggttcattttaatccacatataaggatcatcatttgtgaaacctttcccatgtgtttttaatgctctcttttctaagtgtttgaacaaggtccttccaagtgctttcaagatggattcaaaatctacggatataagagtcttggttatttcaatcattgagtttcaatgggtctaatatcatgtatgattgaaccatgccaagatgaatgaagttcaagattgcctggttggatgaaatcataaagagaaaaaaaatcatagtgattcaagaagggagtacacttttttgcaaccaaataatgaagaagcaatgacatatttatatgatatcctttattatgaggtttaaggttatatatacatgctttaacctttcaagatttcaaatgaaatacttttaattctttaaacctttaaattggattaatttcatcatctattgaaaacatgttattgtaaaccaagatataatgcaaacatttcctttaacctcgattggttat

SEQ ID NO: 12251 - DNA, 572 bp, Zea mays
tgatgaaggcatgcgatatgattacagaactaaagatgataagagttaacgacgaagctatcactagatggacaacttcggctcataacagagatgaaatatgatgatgatgctgaccgaaggggacaaagactatttagtccttaatgacttgcattacgatcacacgtgaatattggggacataaatgtacttttacccgggctacgtcccgtgcctataaatagatgaacagtagcaccgcactgttcacgctgaatggtaattaattcctcgcgtcttcatcttagagcaagccgaaagtatcaatgtaatatgaattctattgatattcatacatgtttcatagaatgcaaacatgaataaattatcgagatacatttactgtcttcgaccctttatactcttatttatatgttgaatgatgaaggcatgtcctttatgaccttcgtctgatgatcattatatccatgaagagatattgcttcggaagacgaatgtccctaataattaacaattgggtttccttgttcttgaatcacaacatttgagaacaagtgaccaacacacac

SEQ ID NO: 12252 - DNA, 679 bp, Zea mays
gcgggcttgagaaagcttgtctagaactaaggatgggcctttggccaacgagggtgaacacggggtgaggtgaagctcccccgggggggggtttaaaagcgcgggccaacgcggccgaagggaagctctgacaagcgctcggggagtgcgctggccaacgccaatgcgcgctctggcgtctggcatatcgtcgaacacgaggcatcacagagagaggtcctgttcaagcgcggattggctccaaatgtttgagattatggccatgatcccgttgagaaaactcttcccctgacatttctttgtccgttgtgtgtggaggcttgcaggttttgctgactggatcaggagaaatggaggggcaaagttgggtttgtttaactggcgagcacagatagaaaatcccgggtttgtcgtgtccagagcatgcgttccgatgccctcttttggtattaggtacaggggtttagttgacacatttttttcaatgggagcttagaagtttgaaatagaatataaggggaacgccccttgggtttttgttcaaaagctggaaatttataaaactgaattttagaatttcccaatgaaccctcccttgaaaggcttgtttggagttttaaaaaactattttggccaaactttttaattttaatttaacttaattagcgttttcaatttt

SEQ ID NO: 12253 - DNA, 666 bp, Zea mays
gccatgaggtgattgttcctggctgaagagaggagtaccaggtttgtgcaacactcttgacagccatgacgaaagactttgccatgactgcagtattaccaccatacgaagatatggttgcttcatagctcatcaagaattgcttcgggtcttaatgaccatcgtacatggggagctggggtggcttgtaagactggggccaaggtgtagcctacagttctgttgacagaggagaagtatcatcaaaagcaaaatttccatgatggaaatcttcataccagtcgtcctcgttgtagaagccctcctcatgaagctctctgcgtggaggccttcggttctggtcatcttgagcaagatgatgaacttcttcagaggcttcgtctatctgcctttgtaggtcaactagacgagccatcttttccttcttccattggacctgttgatggagcatctccaagttttggatttcttgatccaagtcgtcctccggaggcgttggactagtggccttcctcttctggcttcgggccctcctaaaagaaaggacatcctgattgggatccagcggctggagaagggcagccccttgtggttgagctttttttcggggcatgacaaaagtgatgcttgtcaaagtgttcaaaactcaaaaatggacgtgagttc

SEQ ID NO: 12254 - DNA, 681 bp, Zea mays
gccaaaaatatacgaattgacttaagcctaactacgggggcataagtttcaccgaaatctaaacctttgacttgggagtatcctttggccacaagtcgggctttgttccttgtcaccacaccatgctcatgttgcttgttgcggaacacccatttggttcctacaacattttgattaggacgtggaactaaatgccatacctcattcctagtgaagttgttgagctcctcttgcatcgccaccacccaatccgaatcttgaagtgcttcctctaccctgtgtggctcaatagaggaaacaaaagagtaatgctcacaaaaatgtgcaacacgagatctagtggttacccccttatgaatgtcgacgaagatggtgtcgacggggtgatctttgttggattgcttggtggactcttgggtgtggcggtctttgttcttcatcctccttgtcttgatcatttgcatctcccacttgatcattgccattatcttggaggtggcttatttgcttgatcttctacttcatcaacttgagcctcctcctcattttgagttgggggggatgcttgcgtggaggaggatgggtgatcttgggcatttggaagctctttggattctttaagacacacatccccaatggacatgttccctagcgcgaagcacgaaacctcttcatcaccta

SEQ ID NO: 12255 - DNA, 685 bp, Zea mays
ggtttgactaacgtgcaattctaaaaagatagaccttgtgcagcatgtcaagccggtaaacaggtgggaggagcacatcacagcaagaatgtgatgaccactttaagacccctggagctgctacatatggacctcttcggacccgtcgcctatctaagcataagaggaagtaagtatggtctagttattgttgatgacttttcccgcttcacttgggtattctttttgcaagataagtctgaaacccaagggaccctcaagcgcttcatcaggagagctcaaaatgagtttgagctcaaggtgaagaagataagaagcgacaacgggtccgagttcaaaaacctttcaagtggaggagtttcttaaggaggaggggatcaagcacgagttctccgctccctacacaccacagcaaaatggtgtggtagagaggaagaacaggacactcattgatatggcgaggacaatgcttggagagttcaagacccccgagtgcttttggtcggaagccgtgaacacggcttgtcacgccatcaacaaggtctacctttaccggccttctcaagaaacttcgtatgagctactaaccggtaacaaacccaatgtatcttacttttctgtattttggaacaagtgctacattctagtgaagaagggtagaaattctaaatttgctcctaaaact

SEQ ID NO: 12256 - DNA, 681 bp, Zea mays
ttgaaacctgtaaaaaccctgaatttggtggcaaaattttttttcttgtttttccctcccaaattagggccaaaatctcttttgtaccccggagacacactcgcttcccaattcctaaccagagggggccgacatattgtatctattgtcaggctttggacccacatacctataccgccaatgggaagttgaaatcatggccgacaccacatttggattggtctgacattggagagtccgtccgcagatctgactttcgctttgcagttccgcgaaagccaccccgttgtcgcgcaatcacggcatagggggcgcgcgtgtccgcggattttcaattcctctaagtggcccggccccaaatctattcaagccccggaaccagaccggaaaagggggaagaccggtgcaagccttccattaggcccccctcattactctgacatctctcatatggtatgttccacgcagcaaccctccctgtaccttcctcacctttctggtgtccccaagagctccctcgcggattgggacgaaggtcactccccccaaattaggactcccggcggcgaacttttcttacattgggggggaacatctcccaataagaacccgggatattcccctttatattcgcgggggaaaaactccagtttttcatggacgaccactcgcccaaaaaac

SEQ ID NO: 12257 - DNA, 758 bp, Zea mays
aaccttactgtttaacactatccccacttaaaaagaatgagggtagaactcttgaatcttggggatttgaactccttgaagtacctcataacaagggtgttatggggccttcttctactgatgctgcttgaacaggctgcggaaaaatgacttacacagggttgattctgggagaaccttattcttatcttctcttcactatcttcttttcactgaccctttctttctctttgctcttcccactggaggattctatcaaagagtattacaatcatacattggaagaaaccaaagactatgaaccatgtacaacagtctttaacccaagaatcaccaagcattgtgatcttaagggcgagggagtggaaaatggagttgcttgcgatttggcagaggggatttatctggaatgtgctttgctttgaacaagatgggagttgagggagctggtgggggggttttataggcgagcgggggtgctctgggggggtgtggagtggtaatgatgggaccagtgacactaaggaacaagtgcgacaaggggaaaggggccttgtgccggtgaccatagcggtgggtgcccttcaaaaagaggcctgggtgccgatattcccttcaaaacgggccttgggccgaggttattcccatttgaggcggcacaccttccaagggcaccggttaaatgtggggtcaaaaacccctatagttgtcgtctcttggtacaaaaaacctttcccttcttgaagggaaaaaaaccc

SEQ ID NO: 12258 - DNA, 785 bp, Zea mays
tgaagacttaattgtctccaagaacgacaagtacatttaccattcttttcctttttggggtcactgatggccccttttggttttttgctgtcccaatgattgctgtaggactcaaaacttctgatgttttggaacccttaattgcttctcttacctcctcaattttttctgtgagcggcgcttcgggtttctcttttggttctgacaacaaaatgtttgattggtctgattctatctttggtggcacttcggccgtttctgcgatctctggcaacaagggccggctcgattagtttttcagcttcggaggctgaagaagtttttccgggaaacttcgacaccgaaactggttcaatataacgcggccgctgcataagaacctttatctttttccttttcgggtctggctcgctaggaacaactgcagcttattcttttgcagagattggggttttttctcttctggcttcaaatgggataaccgtaatcaaggtagacaaaaccccatggcatcaaatacccgattcagtcttttcttttttcggcctccgaaggctgctgacattgcatttatctctagccttcgagtagggtcccaacaccttattacttaaaatgtcaatgcttttaaccacttattaactggctcaataaattatctccaaatttgaaagggacttaaacttataagctcacctttgtcggccttttttaggtttcttggggctttcccatttcttaaaaagcggcccccccttgaggcaaatatttttttcctaagccct

SEQ ID NO: 12259 - DNA, 489 bp, Zea mays
ccatgatattatatgttcctgtaattctatgttgattctttagaaataatatatacgatattgtaatgtttgttcgacatcagttgattttatttgagttgacgtatttataataatattatatatttatattggcacacggattttacatatcatattgatatttggtatttcatatctatgttttacactattttttaacttctgtggcaagtatgataattgaaagattaatataggcctgattgaatgccgttgcaacgcacgggcacctacctagtcaaatattaaatattcaatgtaggtatgtagccatgcaataatgcaaatatttaagcacatgacacatccacatatgtatattatcacagatcatagctacgagaaaaccaagactatgaaagaatgagacaccactgtggcggaactgcccaaataattccgacttaagtgctaaatcccaccttaaaggttaaaccacacttaaat

SEQ ID NO: 12260 - DNA, 552 bp, Zea mays
tggcttcttttgcgacagagggcgtcgaaggagcttcttctcctgtctcatctatcttcggctcggaagagggcactgtgtcaagctttcgctttttagaaattgttgccttccactctggagttgtttttgttttcttcaaaaaaaatcatcttcttttactaaccgagcagcttgcctatttaggatactgacaatcatttttcttttcactccttcggcccctttttcaatcttctcgtaatccgggtattcaaagtttaatgcatccatcacctggttcagccttcgttttggccgagtgcccaagaagcagtcattaattggtcttccttcttggtataggtgccaagaattttgttacacatcgtttcgaatcatttctagccactctttgcatgcttcttgaattgtttctcaaatttgaatcgataagggagccgaacaagttcctactttcccccctccttcttcttaggcattccccaacccctagagggcggaaaatggtctatttgcccagtacctctgtactaaaactctaaagctgat

SEQ ID NO: 12261 - DNA, 503 bp, Zea mays
  unsure (1)..(503): unsure at all n locations
ataanaggacttgaaaaacaggtattagttctcaaagacttagattatagagtaacctccccctgaaagggtgcatacaatttttgaatacttgtaggagacatgcactttgattttcatatcaagaggggcaaattatctataattcgagctttggcacatataaattaaatgatatgaattgaaacatgataccacttgtaggatatgtcatatgaaaatatcaattggagagtcatttacataggaatgttgaataagctatgtgtcggcgttacgagacaggggggtccctaagccgacgagtgagtgtgctgcgtgccccagcccagatgggtcgagcgcgtgggcgagcgcgaaggggggagaggcgaggtggccggagtcgggcgtgaaagaggtggaattcccgcggccttcgtgttcgtcccgcgcccaagtcgggtgcgcttgcagtangggggttacaagcgtccacccgggtgagggaaaccgagcggccc

SEQ ID NO: 12262 - DNA, 706 bp, Zea mays
  unsure (1)..(706): unsure at all n locations
tatgntgagcaacctcccggctttgaagatagtgagtaccctaaccatgtctataaactctctaaagcgctttatgggcttaagcaagccccaagaacatggtatgaatgccttaaagatttccttattgctaatggcttcaaagtcggaaaggccgatcctactttattcactaaaactcttgaaaaagacttgtttgtatgccaaatttatgttgatgatatcatatttgggtctactaacgagtctacatgtgaagaatttagtaggatcatgacacaaaagttcgagatgtctatgatgggggagttgaagtacttcttaggatttcaagtgaagcaactccaagagggcaccttcctgagccaaacgaagtatactcaagatattctaagcaagtttggaatgaaggatgccaaacccatcaagacacccatgggaactaatgggcatctcgacctcgacacgggaggtaaatccgtggatcaaaaggtataccggtcgatgataggctctttactctatttatgtgcatctcgaccggatattatgctttccgaatgcatgggggcaagattccaaccgaccctaagaaactcaccttaacggcggaaaacgaattttgaatatttggcttaaactcctaaatttgggcttgggattcttagggattcacatttgaattgaatggatattcggaagccga

SEQ ID NO: 12263 - DNA, 444 bp, Zea mays
gttgtgcaaagcgatgtaactgtcacgacccgagatgaataggtgaaaattgtgtcataatgtgtgaccccataaagtaatagatgagaaagaaatacattaattcacttatgttcgacacatatcaatttttttgggcattctagcataagcatagtatagtgggtcatgttttcctcctcctcgccccttggtctttccatcacgggacgtgtggagatagctagaaatgctaatatgaagagcacctgctacagattgcgaccccactcgagtcgctgctccgccatttaagagccaccatggtcgtcgtcttttccacattcactaacatttttcacacaatcttaaagtccaaaacataccggggatgcggggacttattagtttttggaggtctcccagtcacaaattaaaatggaaagttttgatatgaacattcta

SEQ ID NO: 12264 - DNA, 536 bp, Zea mays
  unsure (1)..(536): unsure at all n locations
aaatggactctaattaattntactataataccatatgtacaatgaagataaaattttactttgttaccagacatagatagacaatcttttgcatccgtatgaaagcaattagtttgatcaacatagcctctttacatgttatacgatgtttcccagtatttccagtattaccgattctgatgtatagcagatgtgtcaatagtttaaatcaacatttcattgtaaaattgtgcataagtgagggttcgaaaccttgcttgttggttgtacatttattcattgaaaaccttcaaactttttggttttaatggtgggaggttaaggatggatgaaagtattgatttggcatgcacaatcctgatccagttcccttgattatccggtctgaaatagtaatgtccaccctttgtataatttttaattcttaccgtttctttactaagttgtgacaactacaaatttcattccaatataatgtacacgaagctattaattttacacttacctgtaacttggagcgggtcaccaactttttt

SEQ ID NO: 12265 - DNA, 697 bp, Zea mays
ccatgttagtcctagcaattaagcaagtgtcgagttcagctctatcaaaatctactaagtatagctgaccctctaacactcccttaaatgctactgaatcatcacttggtctaaatacagtaacacctatatccgtaaaaagacagttgtaacccattttacataatattgaaacggaaaacaagttataatctaaagaatctacaagaaaaacatcggatatggaatggtcaggtgatataccaattttacccaatcctttgaccaaaccttgattaccatccccaaatgtgatagctcgttggggatcttggtttttctcgtaagaagagaacatctttttctcccctgtcatatgggttgtgcacccgctatcgaagatccaacttgagcccccggatgcataaacctacaaaacaaatttaattcttgaattagggacccaaatggttttggggcccttgacattagatacaagaactttgggcacccaaacacaagtttttgaaccccttgtggttgcccccaacatacttggcaactaaccttggcggaatttgttaggttaacaccttagaagcttcaaaaaggcttaaaggaaatactaaaattcatttgatgcaataaggagttttctttttaaggcaatttaacaccaagtgattggctacaaccaaatgtcccaccccttatcctt

SEQ ID NO: 12266 - DNA, 553 bp, Zea mays
ctatccctgttcattccatatgtagaggtctgtataagaacctttattgcaaaatgttacttctgttgtatcgcgatgttcagccatataccatggttagtgttcttaccatttatattatatttcggcacttttcagttatattggtaattggtatggcagattaattaccagactagtcataatacccagtggcagatccagaaatggatcgcgggtgggggataagttaaatgtaatgatgaatggaatattaaaaataatagtatcaattaaaaatgctcatgatggcatataatccctccattctcttttataaggcatagcttacctgacaggctgacacgggcttatagattaccctttgacaatctatttattttattttatattattatgcttataagcttatgataattacaaattaaccatatcaactttgtgctataataattcaaaattgttagtcaaaaattgtgaggtttgaatcttgatatgcatgtgcgccttataaaagaaaaaggaggtataagtatattttataactttgttc

SEQ ID NO: 12267 - DNA, 615 bp, Zea mays
  unsure (1)..(615): unsure at all n locations
catgttagncttagcaattaagcaagtgtcgagttcagctctatcaaaatctaccaagtatagctgaccctctaacactcccttaaatgctattgaatcatcacttcttctaaagacagtgacacctacatcagtaaatagacagttgtagcccatttgacataattgagaaacggaaagcaaattgtaatctaatgaatctatgagaaaaacattggaaatagaatggtcaggagatatagcaattttacccaatcctttgaccaaaccttgatttccatccccgaatgtgatagctcgttggggatcttggtttttctcataggaggagaacattttcttctcccctgtcatgtggtttgtgcacccgctgtcgatgatccaacttgagcccccggatgcataaacctacaaaacaagtttagttcttgactttaagtacccaaatggttttgggtcctttggcattagacacaagaactttgggtacccaaacacaagtttttgaccccttgtgcttgcccccaacatacttggcaactaccttggcggatttgatagttaagacatatgatgcatcanaaatnttaaatgaaatgctatgttcatttgatg

SEQ ID NO: 12268 - DNA, 762 bp, Zea mays
ataacccttcttctcttgctaccaaatggaaggctcctttgtcattaggacatcctattgctcggaggtggaaagattccctcaccttcttcggagctacgcgcttcgcatagggatccgcaagaagccagagtatgtttggaaagaataccacaaaaacgggattgagaaatgctctatggcagtctacctgggagaaagccgaaactacccaaatcaccctcccttccaaatcaccgccactagacaccgcttcccaaacacttgccagaatactgcccaaaaagccctccgccaactatgccaaacttacaacagggaagtctctgagacaccccttcgctactttccacctagcaataaaaatactcctgcttggaggaaaagactccagaccttgtcagggagagatcctaatgaagatgaccccaccatagtctacatggccggatatctccacacccttgacaaccactatgacgaccttaactcccactggacccacctaaattcccgggtggaaagcctagagcaccaaatcaaggaactgaaggaagaaaaagtgtccctttaagacagtctcgaaatatcgggaagcaaagaacccacactcgtgaggcataccggaccctgaagatgactatgaaagtcgcctaaagggggggggggcgaaaggcctaatctaaaaatattaacttaagccccaacttcaaaccaggttagcgttaaaaagaatcgaatccccgagaaaggggaaaacaa

SEQ ID NO: 12269 - DNA, 614 bp, Zea mays
gctccggactgttgacttctgaagaaatagctgctgccggagcaaacccgaccgctgccgaaggagaagggaacattgaagaaaccgactccgaagatgactaccgtattgccatgcccagcaaacccagccacctagacttcggaaaatcgactgtttcaaaggttgatctcgccaagatggtgaaagcaggttttttcagtgaagatcagaagaagctacttcgctttcgggggagaagagaccaccccgaagccagaaaaggacgaggttgtcatcttcaaaagctttttaaaggctgggctaagattccctgttcacgagattgttgcggagatattgaagaggtttggcatctaccttcaccagttaactcctaacgctatcgttaggcttagcgtttatatttgggccctccgaagccaagcagtggagccttttgctgacagtttctgtcgagttcatgaattgcattatcaaacaaaggccagaaaagatgggcttcatgaaaacttcggttgctacaattttgcctaccggaaaaccgcaaagtttcctgtaattagctaccgaaaccaatggccggcaggctggaaaatagaatggttctatgt

SEQ ID NO: 12270 - DNA, 454 bp, Zea mays
gaaaatacatcaggtttaccttcatcaacttacccctgaagcaataataagaatgggaatcttcgtctgggctgtgaagagtcagggtctagagccaagtgcgaaaagtttttgcaatatacatgaattgttatatgaaacgaagccctagggtaaagagcaatatcataacaactttggttgctacagcttcggcgctcgctgtggatcaagctgtcccgtgcccacctttcgtaagagatggcccggagaatggatgaaagaatggttctatgtaaaaaatgatttgaaagttcgagaggatattaaggatgtcatcatgtgccccatctggcagcgcttcggactccggaaaccgaaggtagaaatggatgaagcagccgaagaatgccaacgggccttcggcgtagtctgctcttttattggaacaagggatttaatacaagaacacatt

SEQ ID NO: 12271 - DNA, 679 bp, Zea mays
aaacatggccttaaattatctgaggaaacagttctcaagatggcccttcttattcccattgctcttaacttctgaaggcccaacagaagtgcttcgtactcaacaatgttatttgtgcaactgaaatcaagcttggctggataacatgttttgacttttgaaggtgctactaggaccgtaaccactcctgcaccgaaggttccccaagaaccaccgcagaatactgtacaagctttggcatctttgtttacttcttcgtgagcccctggcatccaatcagcgatgaagtctgccaacccctgggactgaattgaggatctatgcacataatcaatggtgaattcattaagttctgcagcccatttcccaatccttccagtagcttctatgttcctcataatgtccttcaaaggctgtgacgaaggaacaattatacgatatgcttgaaagtaatgccaaagctttctggaagccattaacacagcatatagcactttctccaattctatggaaattttctttgacaggcttaaaacttttgaagaacaagtacaatggaacttgctttttgaacttgccatttaactttgggctgacaagtgccccactcacttgagaatgcgaagctgaaacatataaaagcgaatggacccctggcgaaagtggaattaatgttgta

SEQ ID NO: 12272 - DNA, 660 bp, Zea mays
tgttcattttgagaaagacagggtttgtagcgcatgtcaagcagggaagcaagttggtacccatcatccacacaaaaacatcatgacaacggatagaccactagagttactccacatagatttattcggcccgatagcttacataagcatcggcgggagtaagtactgtcgtgtaattgtggatgattattctcgcttcacttgggtattctttttacaggaaaaatcacaaacccaagagaccttaaagggattcttgagacaggctcaaaatgagttcggattaagaataaaaagataagaagcgacaatggaacggagttcaagaactctaaaattgaaggctttcttgaggaggagggcatcaagcatgagttctattctccctacacacctcaacaaaatggtgtaatggagaggaagaatagaactctattggacatggcaaggaccatgcttgatgagtacaagacaccggaccgggtttgggctgaggcgattaacaccccctgctactccatcaaccggctctaccttcaccgaatcctcaagaagacatcttatgaacttctcaccgggaaaaagcctaatgtttcatattttagaggtcttggtagcaaattttttattcttgttaaaagaggtagaaaaactaaattt

SEQ ID NO: 12273 - DNA, 590 bp, Zea mays
ggggggggtttttggctaaaccgcaaaatctcaaaaattattacaacttcaggccgggttagagttagaaatataatcgagtctgcgagaaaagatgcaaaaacaaatcgcaagcgaataaagagtgagacaagtggatttgttttaccgaggttcagttctcgcaaacctactccccatttaggtcgtcacaaagaccgggtctctttcaaccctttccctctttcaaacggtcccttggaccgagtgaacttttcttctcaatcacttggaacacaaagttcccacaaggaccaccacaagattggtgtcttttgcctcaattacaaatgagtttgatcgcaatgaagaatccaagaaagaagaaagctatccaagcgcaagagctcgaaagaacacaagcaaatctctcttactaatcactaaagcgttgtgtggaatttggaaaggatttgatcacttgggtgggtctagaaattaaagctagagcctctggaagtggttgaagtaggaaaacttggatgatttgaatgtggggtgggtgggggtatttataggccccaaccaccaaactaacccgtttggtgggg

SEQ ID NO: 12274 - DNA, 719 bp, Zea mays
ttttttgtcaaacatcccgagtcaaatggactcctttaaagagccaaaggctttataaggacaggaataatgaagttaatcttcaattaacccatgggaaaatggccagatcacttaaccaaagtggtgttggagccacaatacaacaacatcaaagtctacaggctttactccattcaagttattattcggtgacgaagcaataactccggaggaagctaaaaccggatcaataagggtaatagcttcggcagaatcaggttccgaagctacttatactgtggaaaaagatgctttacaagggatcaggctgcaagccctggaaaacatcaataaatatcaagccgaaacaattaaatggcgagacaaaaaggtttggttaaagaatattgagccaggacacttggtgctttggagagtggccaacccataaacagtgggcaagttgcagttgaaatgggatggaccttttttagtagcatcttcgtcaagacccggttcatacagattgaaagatatggaccaacacgacattcctaggtcttggaatgccggatgagccttcggcgatattatgtattaattcgatgtaaatgtttcatattccttattttttaatttttctttcatgggacccttttccttttccaaagtgggataaaggtttttaatggggcccacccaatgtatttccttttttaagttttttaagatcaaaa

SEQ ID NO: 12275 - DNA, 673 bp, Zea mays
cgcttgccaaatgcccccgttccggtcgaccacgaccagcaccctacataagagttccctagttatttagccaagggtgtcccataccaccctcatggtagcactattttcccgggtggtcactccatattccaattatcacaatatgatcttgcttaatcgtcggattagcacaataatgtaaacttaccatttggaacattaatatcataaatcagagtgactgcataaagttaagttgtagcaatagcatagctactttattagatcataatcccatgttaaacaaggagtaaggttggaaaggttaggtgtatctaaataggtaacccatcaaattatgcatatatatccaagaataaactttattacatgtattgtttgggatcaaacagaatatgcagagggagaagtccacttgccttgcttattgaaaacttgagtttcttccacggatctgaatagatcttgattcttaactactagatcaaccactgaatatcacacaaacaaacaaaaagaacaaacaccactcaataacataccacattcaccatacgtaaagctaaaagaaagcttaacgaaaagcatttgcttttcaaaaacggcgcaagtaatggttataataagaaggtattcttttaaaaaatgtgggatctatattttataaaac

SEQ ID NO: 12276 - DNA, 661 bp, Zea mays
  unsure (1)..(661): unsure at all n locations
atgtttaatggccgaccagaaaataagctgccaatagcccaatcaagggtgggccaggccaatggcaataccagtggataagcccgatgaatctctgcataaagaaaaggatgaacttgctggcaatccacaccaacttaaataccaaatccagtttcacaaatgggagatgaaaaggctcatagacccaaatagtaactaccaagttttgtttcaattaatcacgaaaatgaatatttaagggcaaaacttctaaaatggccttgccgatacaggaaaaaaaagttgctgataaaaaaaactgaagcgacctatcaattaaatccaatccaaaacaaaggacaaaattagtaagatattcaaaggttctcagtcctcattccagaattctgaaggtggatgctggcagaacttaatggcataaacgatgaaaagagctaccttgtatattatatgtaaactaggataaattagtcaaaacaacacggaagattgttctagcaacctggggtagagctttaatttgtcaccaaggacagtcgaccccaacagattttgaggaatccaatggaaaattagtgaatatagtgctaatacttnctaaggaccccacctattttcggacaagactctgaagatcgtctggcctagactcgcccct

SEQ ID NO: 12277 - DNA, 657 bp, Zea mays
tggactaaaaagtctttctatctttaagtcgggttatactgtcgaagcttcatggaaaggaaccttcggtcatctcatgcaaacagcttcagccgaaaaccgcttctcccttgaagaccttcggcgacgaagcatagatcgtttttcgtaacgagcttgatccgtgaaaaaagtctcttaagcttcggagagccgaaggtccaaaaaacaccttccctgagctcgttgccgagaaacgatttaatttcccagcacgtagcggtcccaccttgcagagtttactgtttgtccctgcggtccaccgcgcagcgagcgcaagcgggtgtgcgcctggtgtaaaaattctggcgattcgccttcttacctgcagcactatataaacagacgagtaggtgtgaagttaccacagcattcattgctatttgcactgttttcctgccaaaatttttaaccatcaccgaagcttgtctgttagaatcgaacgaagctcccgtttgaaacctgcttcggaggaagaaaatattaagtttcacaagttcataattgaatggccagagtccgctctaccgccagggttgaacgcgaggggggggggaaactgaagcttcggagactctccccatttccgagccctgcaacgatcgggtctagtgactt

SEQ ID NO: 12278 - DNA, 430 bp, Zea mays
gcaagtcttggttgtcaaattgcttgccattgtcaactgtgagctcagatgggactccaaaccggcaaacaatgttttgccagaagaatttctgggccagtcttcgatgttattgtggatattgccctcgtctcgattgtcacacccggatttcaggggtccaaaacccgggcgcgaacataaacaccaggtgtgctgggaccaagtctcacacatatgatgcatagtggcacaggatcgaatgtcacatctttactatataacaggagttctatacaaaataattaaataattacatcatatgaggaaccgatccagcaacccaaaagttgactgggaaacgacggcctatacctcttacgaactcatcacaacatcctccatgcgccttatcctggggtacctgctcttgacctgtgggaggggtgtg

SEQ ID NO: 12279 - DNA, 663 bp, Zea mays
tattcaccattcccctctatgggctctcttgagagctaatcggttggctctcaacactaaaaagctccaaggcttcacctttacacaaatgatgtaaagggaacttgtatgagtagtctctaccaagatcaaaagaaataagaccacacatgaaggtggtatgcccttttgatccaacggagatgataaatgttgcttgatcacttcacaaacaacatagaaattgtttcaaggaggagatctatggaagataacatattgatataatctcataatggataatggctaataactgtgatactagcgtgtgccgagtagcgcaaccatgtgcacacacacagaaggccctcggtttcgtcacggcaccactagttttagtcataacaccattatcacacataaccaataagaaatctcacgcgacacaaatgaattgggcaagggtgacaatgtacaaagagatactccactttgtaaggatgggtacaagtagagagccaaacagatcatggccccgatgaaatgaacaaagcaatgggcataaactaaattggttggtgagggaataccatgggagactgatattttatccccaacatatttttatgcccattatagaaatacaaggtcaaggattagtatctcggtagatccggggaaaaa

SEQ ID NO: 12280 - DNA, 688 bp, Zea mays
tcactgggcactggagaaatagtaagctcttctctctccatgaactcaatcgaaagtgcttttattgtttcaaaaaatacttcccagggtaaggggagcccctgaaccgctgatttggctaacaaatctgcatgctcattttcacctcttggaatatgtttgacagaaaaaccttccaaggaagcttccagccttcgaactgtatccagatatctttcaagcttcggatctcgtgccttgctacttttgtccatgtggccagcaataacctgagaatcagtctttaggatggctcttcttattcccattgcccttagtttgcgaagccccaatagaagtgctttgtactcagcaatattatttgtgcaactgaaatccagtttgaatgcataacatgttttgccactaggaccgcagctgctcctgcaccgaaagctccccaagggccatcgcaaaacactgtccaagcttcagcatctttgcttgtcccctcttcgtgagcccctgacgtccaatcagcgataaaatctgctagcggttgggattgaattgaagatctgtgtacatagtcaataatgaaatcattaagctccccggcccatttctaatccttcgagaacttttttattcctcatgatatccttcaggggctttgagaaagaacaattatgtgatattcttgaaaata

SEQ ID NO: 12281 - DNA, 632 bp, Zea mays
ctcatttcttgctcgtcttcacgttggggctcgacagcaagatcctctcgtcttttctccatcctctctttgtcctctacgtcccactttttaagattatccaaccacttcttgtctttctctaatatttctgtgtctatccactgctcaaaatcacatagcggtggagtctacaaaacatgcaattattagtaggcaaagaatacattcaccactatgagtcttcaaattgttaacatattacaagattattctcaccattaaattcaaccgacgttgaacaatagttggctcaaatgcaaagttagcacacatccaatacctctgtcgataggtgtcatgatcctcagacttatcaaccttacaaggatcaccacaaaaacacataggcactagaacaccagttggcaaaggtagcgggtcgaaggcagttccggtcaaaggacccttcctaaatttcgataagatctataacaatcacaaatataatagactcataaaataagatttaatacaatgcttacctttgtttagcaaatttaccacgtctagacatcctaaaaatcaggtcgatatctatagtttcgaagaataagaatgagcacaaaaactagtcgggcgtatggtttatt

SEQ ID NO: 12282 - DNA, 785 bp, Zea mays
  unsure (1)..(785): unsure at all n locations
acatgtgattttggcgtcctggacgncactcccttcttgaaggcgtcacgtttgcgctcgtctcgacctcggcgctgccttcggttgatgctttcgcttcctaacgtctggattgtgggtggaggtggggtttgcaacgtgaagtcgaagttgtcacgttagaggaagtggctcggcacgatgacatgatgcgaaccacgttttggaggtcgggcaaaaaccacaggtaggtgttggatcaagatcgctggtgaagaatccaagctgcctagagtgtgggtgtgttgaggcatggcaacgatggcacatcacggtcctcctcctgtgccaagtttaaggtgtaggcgttgtcgtgttcttttggtcgtgtgcggcctgtctggcgaagtcggagctgctcgtaccttatattgagctcgacaacgatgactctaaatgtgctttgtgtgtggggttgccgctgcttatgttgttgggctccctgtgtaagtttcgggcccccgttttcttaaaactaaggcaattctaatcttctttttaatgaaaaagcagacctcctgccattcattcaaaaaagaaaaagaacccagcttgttttttgccaagaacacccctagtccaaaacattgagtctaaccaaaactttgttacaagatttaaacctgagctgcccttccacgatttattctcttgggggtttgaataattcttttcacctaaaacatcctaggacctttcaaattgtataactgttaccttttttttttaaaaattaccccgctttt

SEQ ID NO: 12283 - DNA, 725 bp, Zea mays
tgaaggattttactttatccaaacctcatacgcttcattagaaaaaccaactaaggatccatctgtgtttattttcgtttttgagttttactgaagggggaatgtccaccgccatatatgcaactgcagtaatgaacaatattatcttccctcaaatatatttggatgtatagaaaaataaattgagatcagcatgtagtcaagatggccgagttggtctaaggcgccagtttcaggtactggtccgaaagggcatgggttcaaatcccattcttgacatatatttttttctgttacttgacatacgttctcttttttatttatatttctaatatattttatactttgtatatactgctaaaaattctatttctatttttcaaaacgattcttgacatatcttcctaccttatatactattttttaaaaaaatatatatttttgacatatattttccccttttatatttttatttctaagaaatctaaattgggtatgctgaaattaggtctatttttgtttttggacctattgtcgaaatatcttttctattgttttcgattactaacaatatatctttgcataaaaaaatctatgatccaatttaaaatattaaaaaaacccaataaactaaattcctgaaactgttagcatagatggataaaatgggcctatcgcgctttagtgcatgttcactgttttttttggaattaaacactacccct

SEQ ID NO: 12284 - DNA, 557 bp, Zea mays
  unsure (1)..(557): unsure at all n locations
ccttggaaactggtgatcagcatatccttcagcttctgccacgatgtgattgttcctggccgaagggaggagtaccaggtttgtgcaacattcttgacggccatgacgaaagactttgccatgactgcagtattgccaccataggaagatatcgttgcttcgtagctcatcaaaaactgcttcggatctgagtgtccgtcgtacatggggagttgaggtggcttgtangacggaggccaaggtgtagcctgcagttctgctgacagaggagaagcatcatcaaaagcaaaatttccatgatggaaatcctcataccagtcatcctcgttgaaaaagccctcttgacgaagctctctgtgctgaagtcttcggttctgctcatcttgagcaagatggcgaacttcttcagaggcttcgtctatctgcctttgcagatcagctagcctaaccatcttttccttcttcctttgcacctgctgatggaacatctccatatttctgatctcttgatccaagtcggcctcctgaagcgttggactggtggccttcctcttctg

SEQ ID NO: 12285 - DNA, 704 bp, Zea mays
taacgctctgtttgtaaaaaagagaccttgtgcagcttgtcaagcaggtaaacaagtgggaggagcacattacagtatgaatgtgatgaccaccttaagacctctggagatgatgcatatggacctcttcggacccgtcgcctatctgagcataggaggaagtaaggatggtctaattaattggtgatgacttttcccgcttcacttgggtgttctttttgcaggataagtctgaaacccaagggatccttaagcgcttttctaaagagagctcaaaatgagtttgagcttcaaggtgaagaaaataataagcgacaacgggtccgaattcaagaatctttaagtggaggagttcctttgaggaggaggggatcaagcacgagttttccgttccctatacaccttagcataatggtgtattagagaggaagaacaggacgctcattgaatatggtaatgactatgcttgggaatagtttaagaccccccgaacgtttttgatcggaaacccggaaaacggtttgtcacgccattaacaggggctaacttttaccgctttcttcaaaagaatttatatggacctgttactggttacaaaacccaatgggtgttaattttcgggaatctgggagcaagtgttatatttttgtaaaaaaagggaagatcttttaaaattgcttccaaaacttgtaaaggggtttttt

SEQ ID NO: 12286 - DNA, 463 bp, Zea mays
acgagtactttcgaagcggcaaacgatgttttgccaaaagaatttctgggcagtttttgatgttattgtggaaacagcccttgcctcgatccatttggtgaagtactcgacagcgacgaaggcgaacttaaggttcccctgggcggtgggcaggggcccgacaatgtccaagccccagcgctggagaggccatgtgtgggcgatcagctttgtatactgcgaggggctgcttgaccgaagggaaaacttctggcaggcttctcaggaccttgtgacccgatttgcggcgcagatcattgcgggccagtaaaagccttggcggatcaccttagcaactagggcccttggccctgcgtgcgagccgcacgtgccactggggacttcgcgtaggatctggatgccttcggtttcggtgacgcacttaagcattggctgactgacccctttcttgtagagttggcct

SEQ ID NO: 12287 - DNA, 494 bp, Zea mays
atacctcccagaatcattgggctcgcttcatgtaccttgcaagtgccaccaggcccgacatctcttatgctgtgagtgagctcagtcgggttggggcgaaaccaggaaatgatcactggcgtgctcttggaaaagagttgcgggatttgaaaggtactatgacatacgggattcattttaccggaaacccaaaagtgctggaaggctattgtgatgccaactggatttccgatgctgatgagctttatgccccaagcggctttgtgtttctgtttggaaggggcgctggttcctggaagtctttgcagccgactattttaatcaaggctacaaatggaagcaaaactcgcatctttagacactgctggggcttgagggccattgcttccattattcctattaacttacccggggtgaaaaagcgctaccggcttttttctatcaccgggaccacccgaccgggtttcaatggtttcccggtcttgaatcaccat

SEQ ID NO: 12288 - DNA, 633 bp, Zea mays
  unsure (1)..(633): unsure at all n locations
tagtggaatgttatacttcctccgatttttttttatttgacgttttgttagtgttggaaaccaaaaagagcctcgcggacggtccggccctgatgccggactgnatattgatggctaattttattttccggtcctgtggcattttccgataaattttcaagatttagatatgcgtacatactgagattttgggtttttttttggatatcttcatattgaataaccccttgattgtgataaacttgactttttgaatattaggtttttcccggaaatgggaattttttttattttgtaattggctcttttgcacaatttgtgctggtctctaattcgctctctaaatatactctcattttcatttttattaaggaatagttgttttcttgagttattgccaattttgtagtttctttttgatttaattgattttgtggatatttacgccttggttttattttttcgatatatctttatattttagagaatttcgtcttgaagtgacattattctttgagatgtgaacctattgtaggatccgtattgattattttttaagaatgttgtaataaaaccgaaattatttggagtttttagggggtgttttggggtatttttttttggcattatgtt

SEQ ID NO: 12289 - DNA, 446 bp, Zea mays
atcatatgacggcaacgatcctccacaaccatagttgacggggagatgatagcctaaacctctcacgaactcatcgcgacatccttcatgctcctcatcttgtggtacctgttcttgacctgggtgtgagtacagcaagagtgagctcacatactgatgaggacattctccactattacccgttggcaaagatgcaattggcctagttggcccaattgtagtcggacggtgaccgtgtgagcctcagaattatcccaccttgcttaacttgggaggaggaagccactttaaaagggagagccacccttcccctattggactagtcttttggaacgattgggcctttccctgagttgggtgtgcataatgaactgttgggctccgggcaaccctaatttgttgggccttggccaaccccacctgggctgggggtattatctggtatc

SEQ ID NO: 12290 - DNA, 590 bp, Zea mays
gcaactgcttcttcaactctgccaactcagcgggtggcattcggtagggcctcttggaaattggggctgttcccggttgcaactcgatggcgaattcaatatcccggtccggtggcattcccggcaattcatcaggaaagacatctgcatactcacagaccactgggatcttctttaggggtaactccgtcatagagaaagcacatgactgagaagaaccctgactaggcagaatcaaagtgaaattcccgcagaaaggagaattaacttccacggtgcgactggctacatcaagcacaacttggtgcaaggtcatccaatttgctcctagaataatgtccacattttccaatcccaatacaagaagagtggttttgataatgtggcttcccagttgaataggcacactttggtttaattgattagttgcaattttacccccaagtgtgactatcacgaatgacccttttgagtgagagaatggcagtttgcaattagcactgaacttttggctaatgaaactatgagatgcaccagaatcaaacagaattaaagcaggttgattataaactggaaaggtaccggtcatg

SEQ ID NO: 12291 - DNA, 573 bp, Zea mays
acaaacatggagtttgtgctccgctgctcaaatgtttatccagaaccgaagggatagagttaatgaaagaaatacatgttcgcctgtgtggatctcacatcggatctaggccgttacttggaaaagttttccgtcaagggttttactggccgaaagcaacttcggatgcagcagaattggttcaaaagtgcgaaggatgtcagaaatgtgcaagagatcaaaaacaaccttcgtccttaacacagctcatacaacccacttggccattacaaaggtggggccttgaccttgttaggtccgttaccaccggcccaagggaacctgaagtatgttgtaatagctgtggaatatttttctaaatggattgaggcgaagcctttaaccacgataacttcggctaccgtccaaaagttttttctggcaaaatattgtttgtcgtttcggggtgccaaaggctatcactgtggacaatggaacacagtttgacttccaagctttcagggatttctgtgaccaaattggtaccaaaaactattttgccttcagttaggcacccggagtcaaatgggactc

SEQ ID NO: 12292 - DNA, 774 bp, Zea mays
actccttttttgggcaaacattcatcccatttttgtgagaagtccaaaacacatgcccgtggcatatcttccaggatatgattgaccctctcagggtgcccactggtttgaggatggtaggccgaactgtggagcagcttagtacccagggatttatggagttcttcccagaatttggatacaaattgtgggccacgatccgacactatagtctttggaacaccatgcaaactgagaatacgagcaatgtgcaactcggcctaggtaagtaccgggtaatatgtcttgaccggcagaaagtgagcagtcttggtaagccgatcaattataacccagatagaatcatacccttttgcagccctgggcaatcccacgataaagtccatacttatgtcttgccatttccatgtctggatcggcaaaaattgtaatggaccagtgggtttcatgtgtatgggcttgacacgtctgccagtggtacacttagccacatagcagacaatttaaattttcatctttgtccaccagtaatgttgctttaagccctgatacatcttaatgcttccgggatgaatagaaaagtgccttaagatgtgcttcatcaagaattggctggcgggagttttttattcttaggcactactattggggttattaaaccatataacaccttgatcgtcttctttaaaacattttggctgtttcagcccttatttttttacgaaagggtgtaatacccttatcatcctttggggcatcaattatcctttgcaa

SEQ ID NO: 12293 - DNA, 628 bp, Zea mays
ttgtatcttttgagcttttccctttctgaaacgagtccgaagatacctgctcacacattatagagccgcttctcccttgaagaccttcggcgacgaagcatagacccaacacgtccattgctacgaaaaatcacccgcgatagcacccaaaagagctaactcgaaggcagccccatccgtcgacgaagcagcgaaggcagccttgctagctgtgaaaaagggcaaggccctcgccgacaacacccaccaaggagctggtgaagatgaagcacacagcaagagacagcgcaatgaccaacacaccccggaaggcacccttcgcacctgcagctccgaagggcagccacaagtgccacccccaggcttcgcaccaccagcgggcgaagacgcagcagaggacggcgaggtcctcggcatctccgcagaagagcagctacagctacgagccctgcgccttagaaaccgcaatcttcagaagcagaagaaaatcctcgaggccaaacgccaacgcgtcacttgtgcaggcaagctgccccaaatgatacgagatgaagagcagagggcctaagagcttgagccagagattgcgctactgcagcgcgaaggccaacacgatctgcaacagcac

SEQ ID NO: 12294 - DNA, 661 bp, Zea mays
tttttattacccccgcgaaacctgattggaaaagtaacacaagcgtgtgaagacaaactttgacatgctctgatacaagggctcttaccgcaattgggaggaacaccgtcatcatcacatggcagccatgaaaattgtagccaaatagagacaaggccttaatcctgactagtccggtgatattggatgataaacctgtgggcacttttaccccacgcaaacatttgccaatcttttttctctcctcaactgacaagttgtacctagctggggggaggtaaggcttccctttgccactatccactggatgaagttccggcctgatttgaagatctactagaacattgcggtgaattaagtccgtctttttgacttactcgggatgccccagcaaggttcccaatgatgctgtcaaaaacattttttgttacatgcattaaatcaatgctggggcaaatttccatatcctttcattatgggaggtacttgaaaaaaattgaatgcttcttgaaagtgggtaaactgaaaggtcaagccctctttttcttttttccttggtaatttcctttcccaatacaaatgaaaggtcttaacaatttaaaaacaagtttccactatagggctttgggacctttactttgaaataatggtaaaaattttt

SEQ ID NO: 12295 - DNA, 686 bp, Zea mays
ccacatattttttttggaaaacatagtcaaattacgtttttgaggaccttcggaagccgaaggcccccaacagtagcccctcgcaatattaatttgctgtaaagataaatttatattgcgatatggacgaaggctatgggccgaaagtccgaaaaaacaccttccttttgctagaatagcaacagtcattgacaagcgggaccctccagtttccgacataatgggtgtataaataggggctcgccacaagttatttggcacgctctcttgccatctgttttgcctgctcaaatagctttctgcccacaaatatttggttgcctccctagttttaagcttcggaagcgagaggcatgaattctgaagggatgtctgaggagaataaggttgctgccgaaatgaagctgagcctttctgaggagaaaaatctgggcttcattgaatcaatagcaaaaacaaataccgagaaaattactagggagattttggaaggcttatttgaagatactagtgaaagtgatagttatgatgcagacagtgggggtgaggatttcgaagaacgaccttggcgaccaaacccttcagtctttggaaaatcaactattgcgcaaagtcaccttgaaaacctgaaggggaagattttttccagaattgttcattcttagggcagattacggaaagaagac

SEQ ID NO: 12296 - DNA, 607 bp, Zea mays
ccaaaggttattttgagaatttacggaattgtagcgcatgccaagccgggaagcaagttggcacccatcatccacacaagaacatcatgactagtgacaggccactggaactccttcacatggatctattcggcccgatcgcttacataagcattggcgggagtaagtactgtctagttattgtggatgattattctcgcttcacttgggtgttctttttgcaggacaaatctcatacccaagaaaccttaaaaggattcttgagacgggctcaaaatgagttcggcttaaggatcaagaaaattagaagcgacaacgggacggagttcaagaactctcaaattgaaggcttccttgaggaggagggcatcaagcatgagttctcttctccctacactccacaacaaaatggtgtagtggagaggaagaatcgaactctattggacatggcaagaaccatgcttgatgagtacaaaaacaccgatcggttttgggcccaagggggtcaacaccgcttgctacgccattaaccggtttatttacatcgaatcctcaaaagacattttatgaactcctaaccggtaaaaagcccaatattttaatattt

SEQ ID NO: 12297 - DNA, 643 bp, Zea mays
ttaggtttagatttgataatagcgggggctagctcaaggaagaaaccctaagtgacactggggtgtcacactgacggccttgacctgaagtactaccctcgtcgttcgaccgacagtgctagaggagtgattgtctcgccagttggtgagggcaatcccaggctgaacagcatggtcaacctggccgtcgtgctcaacatagagctggaccacgcccttgacgagttgggcaagggttcgggcgaaggttgcggaattgcgtgctgagtgcacagcacgccactatttggatggtagttctcccgcccctgtcgggattcagcacccttaccgatcaccgccccatggtcgctttgactatggtaccccagactgcaggacccggatagatttagatccatagatcgacggagtcggagtctgtaataatggctaatttgggtcttagtctagttaattttagttagagttaggttgcttattatatgttggaatgcttggcatgatgaacatgtaatgaaagttggatctttggaataattggtcatcaaggtggtgggtatcccctacaacttgatgtagttttaataaaggtagttaattaagtggggtattccatttctttccacttcccttttatctg

SEQ ID NO: 12298 - DNA, 618 bp, Zea mays
tcgcatactaggaaaacattgtcaaatcatgtttttgaggacctttcgaagccgaaagaccccaacagtagcccctcgcaatattaattcgctggaatgataaattcatattgcgacatggacgaaggccttgagccgaagggccgaaaaaacaccttctctttgctagaatagcaacagtctttgacaagcgggaccctccagttttcaacgcactaggtgtataaataagagctcatcacgagtttatttggcacgctctcttgccgtctgcttttactcacccaacttttaacctgcgcgcaacaacacttgcttggctttttagattttaagctttggtttcgagaacaccttctcagcgtttgcaaggatgtctgatgataaaaaagttgttggtgattcgaagccgagtctttttgaagagatgcatctgggctttcttcaatcaatgtcaaagactaatacagagaagattactaaagaaattttggagggtttatctaaagatactggtgacagtgacagttatgatgtggatagtggtggtgaaaactccgaagatcaaccttggcgaccaagccatgcagtttttggtaaatcaagttttaaagaaaa

SEQ ID NO: 12299 - DNA, 800 bp, Zea mays
accggtttttctgtatggtggccggagagggctggccactgtggccgtagctctggcgcgcaaagcgggcggaaaagagctcgccggagctaaagaacggtggctggccgctaaaggtgagtgccgggcgaacaaaagagcgccccgggaggctttataagcccgggcgggcaccgcctaaggcccgggcgcgcggcggacttgaccggacgcccgggtgagcgcgccccccggttgggccacctctggcgtgccgaccatggtcgaacacatgtgcccctgcgttctgcccaagctttggcgcgtgtggtcgctcatccgagcctgctctcgccttggtcagtgcacaaaacctctttttctccctacaagctaccatttttgtgtggaagtcataagattttgcctactgggtgcaaagatatggagccaggaaaactggtctgtctccctgcccaaaccccgaggcaaatccaagttttgtcgggtctaaggctcgcctcccaatggcatcttctggcccacgacagaggggttagtttgaacacatttttgtcaatggggccctttaggattcgagtttgggatcaaggggaactatcctgatccttggcttaaggtctgaattccaaaatttctaaaatccaaaattccccatgggtcccaaccaaagaagcttgatttgggggtttttttggaatttactgggctaagctttcttaaatcaatcttggggttattaaagtaactttaaataatttaatgggtccacttgaaaatttaaaccttcacttcccttt

SEQ ID NO: 12300 - DNA, 646 bp, Zea mays
  unsure (1)..(646): unsure at all n locations
tgcctccattttgacactttttcgactntggaggggtccacttctattccttctgcggttaagatatgcccaaggaaggctatcttttccaacctgaattcacatttactgagtttggcataaagttggtgtgctctgagttttccaaggacgatccgaaggtgacgcttatggtcttcgcggttcttggagtaaataaggatgtcgtcgatgaagactacgacaaacttatctagctcttccataaacactttattcatgaggttcatgaaaaaggcgggtgcgtttgtcagtccgaacggcattaccgtgaattcatattgcccgtaccgggtgacaaatgcagtcttttggatgcctgcttccttgatcctcaattggtgataaccagaccttaggtcaatcttggagaagtacttggctccttgaagctgatcgaagaggtcgtcaatccgaggaagtgggtacttgttcttgatggtaacttcatttaacgatccgtaattaatacacattctcatgctttcatccttcttggagacaaacaagactggggctccccaagtgatgagctgggatgatgtacccttttggctgaagatttgaaattgaagcttcagttttgttaactcagttggaaccatgc

SEQ ID NO: 12301 - DNA, 721 bp, Zea mays
gctactttcgcttttctttatccctcctacatatatttcggtccttacaaggtactccaacgtgtcggcagtgtggcatacaggctgcagttaccatcatctccgtcaatccatcccgtattccatgtgtcccagctgaagcccagtgtcaaatcttctattctggtcagcacttctttaccttatacatgtgctcgaccgacgatccttttcttggggcggccacaacgtcgaccaataagttcgagtgcgctggtctggttatgatgctgcccttgatacttgggaggacgaggctgctctgcgccagcgttttccttcggcagccgcttggggacaaacgccttcttatggagggggattgtcagcatcgctaggtaccgtgcgtcgagaagcaggcgtcgtcgtccgacatggctgggttggagttgggtcgtcgcatcaagaatcccaatgccaagtttctaagagaggactaagtggcataataggccgcccaacccttggaatagttgatacttaaaatactatgaacaggcaggcacccgaaacgatttcaggcttagaaatatattgaacaaatactttaattccccttcctaactgaactccctttttctctaaaaatctccaaattttggtggttcgaacagaagctcacaagcaccaaacaaaattttaacggaaaaacacttgcccctaaaatcagcggaactaaaat

SEQ ID NO: 12302 - DNA, 710 bp, Zea mays
tgcggcaaatacaaaggcttttaggggcttcaacaaatcttcgggttcggttgaagtcactagtgacgttgtatttgatgagactaatggctctccaagagagcaagttgatcttgatgatatagatgaagatgaagttccaacagacgtaatgagaactatggcaataggttatgtgcgaccacatgaacaacaagaacaggatcaaccatcctcctcaacaatggtacaacccccaactcaagatgaggaacatgtacctcataatgaaggcatatgtcaagggggagcacataaagataaggacaaggaggaataagtaccataggcaccttcaactcaagtccggaccaccctccaaaggaatcatccagtggatcagattatgggtgatatcagcaagggactaactactcattcgcgattagctaatttttgtgaggattactcatttgtttcttctattgagccctttcagggtaaaagaagccttgcaggatccggactaggtgttggccatgcaggaagaactcaacaacttcaagagaatcaagtggtggagcctggtgccacgtccgaagttaaatgttgggggaacccagtgggggttcccaattagccagatgagccccggggtgtgacaagatacaaggcttgacttggggaaaaggttatccccagttgcgggtttaaatttgaggaaactttgc

SEQ ID NO: 12303 - DNA, 680 bp, Zea mays
tcaaaaaagtatctttttattaaaggggtgaaattatgatttaagcaagatgtgaacacactatcatgaaaaagatccttaaatgacaaaaaagtaatgtttaaatgacatgaagtgatgtacctttgcgttttaccttttcaagggggggttccaaacttgtgttggatttagaattcatttgcaagctcttgttggcataattttgacataagttcaagatatcaaatgaagattggcatactaactgaaagataaattttgatacctggagtctagatgtcacctagcattttcttatcacaacaagaggcaaccatgataattgcacaagtatggattatgcaactagtgatcatgtattaaaaatatcaattgaaaaacaccaattgatacaatttgatagataaatagatcactaatagcatattacactaagttctccttcaagttttagtgcacacatattttatatgaattcaattgatatctgttgagagtacttatttgcaacctaaagtaccattagcataaaaagaatattaattgaacataatcatacaacataagaaacatgtgcactatttaaataattaaagttctagacaggaagaatttataagttatgctactttaaatatttgtaataaaaaaaggaggtgatacatatttacccattt

SEQ ID NO: 12304 - DNA, 606 bp, Zea mays
gcggggccttatccttcccatgggggccctaacaattaagcatgtgtcgagatcacctctatcaaaagctactaagtatagctgaccctctaacacacccttaaatgctattgaatcatcacttcttctaaagacagtgacacctacattaatgaaaagacaggtggagcccattttgcttagttgagattcagaaagcaaactgtaatctaatgaatctacaataaaaacattggaaatagaatggtcagaagatataactatttgacccaaacctttgaccaaaccttgatttccatccccaaatgtggatagcctcgtttgggggatctttgagttttttccttgtaaagaaggaagaaacatcttttctttctcacccctgatcatggtggttaagtgccaccccgcttgttcgattgatctcaactttgagccccccggatgcataaacctacaaaacaagtttagttcttgacttttacgtacccaaatgggtttggggcctttggccttagaaacaagaactttgggtccccaaacacaagtctttgaccccttgtgcttgccccccaaatatttgggaaccactttgtcggatttgtt

SEQ ID NO: 12305 - DNA, 427 bp, Zea mays
tgatttccatgaataaaagcggatgatggaccacaatgaatattgaggtattttcaaggccctgtaaatggtgctattttcgagcctgtgtaaaacgggatgtacttgtgccggcccgtgggccgtgacttttgcccaaacaccaccaaaagcattaatttggacccggctcatggttaaggcggtgttttttgatttgtaacttcatgaggcagtccaaaagaacctattccaatgtacacctcaagaccaacctcccggtgttggtccagatgcaaacaaactctggcttctatcgagggggcccgaataccaattgcggttggcttgcaacaatgaaaagggaagctgcaaagcccatggaagggcccaaacccaatcaattcatggcatataccagagaagtttttttgcgatgttgaaaaac

SEQ ID NO: 12306 - DNA, 586 bp, Zea mays
  unsure (1)..(586): unsure at all n locations
tgaggatcaacaccatggtggttaaagcagggacatctgacatcggaggaaaaagaagaggaaaaaagatgtgtggtgggaaatcaggagaattttcttggctctggtatcatgctgaatccgtgcaacatgagaccctttttagggttgtaatcgngtatgtgtgtgtatatagatagatagataatatattacgagccctgggcttccaataactagaggaagcctaggtcagacggtgcaatccggtcgagtcgggccaggtccggacgtctataaaacaagacccggagtgctagggttcagtttttcacgccccatccggattcattatcgacggcgcgtgcgatggcggtggttgcccgagaggagcgcggcggcgcacccccgactggtggttgcggtggcccgggcttcccaaccccgacgcgcggtggtggcggttcctcgatccgaagtattggcggcggttcccaggtcggtggcggcaactccccgatccaaagggcgagcgattggcggcccctgtgcgggccaacgacggtgtcccccgtgccctgaggcggcgacacttccaatgcgggcg

SEQ ID NO: 12307 - DNA, 762 bp, Zea mays
gggggtatttgttgtttataaaagcatggaagctcaaatttcagtgctgtaagtgaaaaaacatctttgctgtagccttttacttgccaacgtgccttgtcgaagacaaagaagatgctctttgaatcactcaaacgttcacaaaactcaacacgaacactggaagaacacactaagttttttggcgctgccaaactttaccgatgcaataggtgtattggattgatctgtttatatacataattacaaaggctcacaacctttacgacaccaatcaacaatcaattagctaaggaaactatccaatcaactatcgattagcgaagaaagggaattaatcaatcaattataaattagctatcaattaagaaggaaacaaataaactgagatggattatgcaacagtctacccctaagcatatctcggtttatttgaccttgatgatgccaattttgccacgaattttaacaaaccgtgcacggccaagtgattttgtcagaatgtctacaagctgttcttttatactcacatgggccatgtctctccacacattcacgaatgaaataaaatttagggtcgatgggcttacttcgaacctgaagacttaagttcttgctgagtgccattggggactggatgtccatcttaagcagaatggtgaatggacttgatgccgggagtcccccaatattgccgaacccccatcttgactgctttaccgccccaccatttctttgcttgcaaggtgaaaaggccccttt

SEQ ID NO: 12308 - DNA, 710 bp, Zea mays
agcggcgatgccttttccagtccatgctagtcttaacaattaagcatgcatctagaccggcctcctcttttgcaaaatcaactaaataaagtttgtcgtctaatacacccttaaaagctaatgaaccatcacttcttctaaagacagacacatctatttttgtaaatagacaattatatcccatattacataattgactaacatatagtaaattatatccaagagactcaactaaaaacacattagagatagagtgctcatttgatattgcaatcttgcctaaacctttcaccttgccttggttcccatcaccgaatatgattgaatcttgggaatccttattcttgacgtaggaggtgaatatcttcttctcccccgtcataatggtttgtgccatccgctgtcgataatccaacttgaacccccggatgcataaacctgcaaggcaaatttaggcttgggtcttaagtacccaaactcttgttgggtcctacaaggtaagtccaattggcttaggaccccaatgcaagttttatcacccttgcattttggccctaattcctaacaactatcttcctatcctttctacaaataccaaaggaagcatttaaagcatgataaaatgtagaaggaccattcataacttttctaggaccatgaacatatttttttctaggcccatgaagaatattttttccttaggctatttt

SEQ ID NO: 12309 - DNA, 624 bp, Zea mays
ttgggttttttggcgggcggaaaatggcaggcgacgaagctcgaagccatcttaagccggtaaaaaacttatgttttgttacttttaccttcttctttgaaatttgtacctttcttactctgctatttggtatatacaggatgacgaagctgaagattgacaatactgaagtttggcaaaactgaagacgaaaccttagctgaagcttaaagttgcttataatatgctttcctgcaaaaattcttggaatatagatatggaatatcttatggaaatttggacataccttgtaatatatcctgcctcccttatccggattcaatctgctttgctgtggacgaaacttcttttttgagccgaaggcgaaaaacacctttccttcttttcgtacacaacgaagcataaaaaaaattttccttcgaatcttttccttattttctgaagcacctgtcttttttgtgtagcatgatgatgattctatatatgtctaaatggatgtttatgaatgcaaatgacatgatgatatgttatgtgccaatgaatattatgacacgggccttcgtccccttaaaaatgataaaaatctttttgccgtttactttttggctttaaccgttacttttc

SEQ ID NO: 12310 - DNA, 576 bp, Zea mays
tttcttccaaaaaattttgccattggataacctcaggcatgggacacttgcaaatattaaaattgaagcaaaggaaattcctaaacccggcactgtacagataaatgtgcataaactgtaaaggccttctgtagcccttttaactaaatcatcccacaactaccaactttcctgataagggtgcttggattttatttcagactgagaatagttcctactttcattgcggccaggcccaaacttaatgcctttttctctctaaatttccgtttctcttactggcaccatcctttgctagcttgctgctttggtcaaaataatggaagatcggtgcaaccacattgcatttgcaaaaaagaaaatgcttgcccgcaacttataaacatgataagcattgttaatcttcatgtggttccccctacacaccccgactacctttatggaatgacccaatgttcaggcataaacattcccttaatcctttttaattgccggtcaggttgagcaaacctggtctgcttatttcacactggcttttgagatttctttccccgcggccactgaataacggttacc

SEQ ID NO: 12311 - DNA, 779 bp, Zea mays
accttcgttttctgttttcttgaccaaaagggggcgcatcaatgacattccttaatatcttctcttgcctttaaatcattcttcacgtaaaaccattccttcatccaagctccatgccacctttttcagaatgttggcaccgggtggcttgcgttggggcgagcgataaatccataatagccaaaaaagttatgatattgttctttgtccatggctttcgtctcatatacaagttcgtgcatacttcaaaagcatttcgcgcttggctccaacccctgtcttctcacagcccagacaaaaatccccattctaataatagcttcgggggttatctgatgaaggaaaatctgataaattttcaacacttcaactacaaacctgcttaatggaaaccaaagcccagctttgaagaaacttcggtaaatcacaacttcgtctttctcgggggcaaggacgttggtgtcttcaccagctctcacaatagacatattccgaaaagtaccttccttttatattgtcaaaatgactctgtttaattgtgatttcccaaaaattggatgacttgggctccagggccatcctcagaatctttttccctgctttaacatcataatcatcactggtaccaggatcttcagacaggccctctagaattccctaagaaaacttccactgatttggttttgccattgattcataaaatccccaagggaaggattaaagccttttcttcttaaaaaccttttttttttaggaagtttcgtttaaaaaaaaccttt

SEQ ID NO: 12312 - DNA, 685 bp, Zea mays
ttggccggtagatgaggaacctgttgtcaaaatcaaaaggtcgtggacgcatgtgagagcagatttccgttctgctttaataataaggaaatgcccatggcctcccgtgaacaacacgctgccgcaacactggcgtctacaggctgcatcgttcacgtgagcagcctatatatatgctttcagatgatccgtcggggtacttgttagacacacattgacggtggcacgcatgttttctacactacaagaacaaaattcattttcgacggtcaggagttgccgaaaatatggtccatgccatcgaaaaagctattttcgggggctcctgtcccgccaaaaaatagccgaaaataactaataattttcggaggtagtatgagagacaccaaaaaaaggtttattttccactgttgaggtatggttgacgaaaataagactttatttttggtggtcgaattctgaccgccgaaaataatattgacccgccaaaaacctgtagtactattatgctacctttgtttattgatcgggaattgatctttttggtcttagtcacgaacgcgctcgaaaaaagttgcattattcctaaaaaggttttttagggacgccaaaaggtcaataatggctgctgcatgccacccgggaattggatagggatggggaaatccccctaaggggggggggg

SEQ ID NO: 12313 - DNA, 595 bp, Zea mays
catctattttttgtctaacctagctgagataaccgccaataaagtgagtgaaaaagcttaactcgggtcaaacctgacaagtcttagtctttaagcttttagcacttaaattctttcttttcatgcaattattggttcttgaaatatgcatgaggtactgcacttagggggagtattcaaaactcaaatcactcttgaaaacccctagtgcaagccaaaatgcaaatttcaccatttgcctattttctctaaaaattatctagcctatggcaaaatattttgaaaagtatatgagggtgccaatacctgtcccaacaagtgttattttgtgtgattataagttgggatttggtttggttaggagttagatagaaaaattcaaaattttccaaactcccctctgtctgggctcaccggacagtccggtgtgcaccggacactgcactgtgcaatgtccggtgcaccggcagccgcgcgctaaaatgctttttcctgtgcgctgtcccggggttcaccggacagctactgtgcgctgtccggtgtgcaccggacaggcaatgtagactgtccggtgtgcccattctgcgttttaaaa

SEQ ID NO: 12314 - DNA, 755 bp, Zea mays
  unsure (1)..(755): unsure at all n locations
gttgcattggcttttttatctactttctggaggcctgaatgcacggttggtggggacgatggtcagcaagttacagtgcatgatcctgagatagacgtacactcccaatgtgctctattggcctcaaaggtcatgctcccttatagcattagattcattaattatactccctgcatcctgaaaaggatgcaattattgaacagtgataggtaacaattaatgtttattgtactaaataggtaccattagatttgtcatgagcccatgaaacatatatttacagtataccttatttgaagtcatacatgttgatactattttctataaatttagtcaaaaccttaaggtagcttgattttgatcagacctagaattgcatccttcttgggacggaagtagtatgtccttaagagcacatttgtttgactcccattaattttcttagtgtgaaactgcagtatgggcctaatgcttcccttttggtctgctttggtaaccactgcaactatctttgtgttttgatttgatgtaattttaccaggttagggatctacttnctttttacgatacaccatatgcccatagttggaaccatttgcatattttggggaaagggaacatccgggtattggcaaatatttgagattgaaatgcttttgatttttattaaaacattattcttctcatttgagtaattggccttttgggtaggggctttgatcccccattacaagaagaaacctttatgggaggga

SEQ ID NO: 12315 - DNA, 582 bp, Zea mays
  unsure (1)..(582): unsure at all n locations
aaaggagctttcggacttgtgaagnttaactgtagtgtgtgatgtcttcaattcagacatctcacgttctctttttttccaagttctctccgtaatatattgtagtactgtatgcaagtgccttccctggtatatttgtatctgcgatgaccgggtcatctaaagatgtcatgatcatcatgccaataactagaaataaaatgctaaaaagttctgtcttaaatacaatgtttgtttttataaaataggaaagatcgtgattaattgttggttaggatcctcattaattcttgattaaacggtttttcttcaaaataatgatagcttttataggggttcaagcaatcttctttatataaagaagagaagatatgccaatccaagcaaatacaattatcttgtttggtctcaaaggtcatcttccacaacatctcccacacctctttctcgtccgtctactttttatgcgcgaccatgactcctatgcgcgctggaggtacacatcctgaacatcgatcttctattcatatagcttacactagtggagaacatgatggcttccatcccttaattttagtatca

SEQ ID NO: 12316 - DNA, 595 bp, Zea mays
aaagcttcggtatgacggccgaaaagaggaaccgacttaaagatgaaaagccaaattagacctcgaagaattattatagagttattgataaatgtaaagggcattaatgtaattctacacgagctgcgtcccacgcctataaatagatgaacagtactcccgtactgttcacgctgacttggcatttgctttccgcatcacacctgtacctttacttttcatcaatccgaaggtacatttataattcgttattaccaatttgataataaaaataagttgatgataatatctgtattattattcgtatttcatatatgtgttcttcctcatcatctatcgaacttatgaaggtcttttccttcgtaaccttcgtccagaattcattatatccgaagggacataatgtctttaaggaccaatggctttaaccatttaacacctttttatgttgccttgttcttaactcttaccatttgagaacaagtctccaacaagctttgtttttgaagtcataacctaacaaaaacccttctacagctttgggagcaaacttagaaatcctacctttcttcaatagaatgtaacatctgggccc

SEQ ID NO: 12317 - DNA, 788 bp, Zea mays
ttgggctttttggtttttggaacgggctggccacggtggccgttgctctggcggcaatggcgggcggaaatacgctcgccggagctaaggaaccgtggctggccggtgagggtgagtgccgggcgaatataggtgcgctcggggaggctttataggcgcgggcgggcacggccgatggcgtgggcgcgcggcggacttgaccggacgccggggctagcgcgcgcgccggttgggcgagctctggcgtgccgaccaaggtcgaacacgtgtgcccgtgcgttctgcccaagctctggcgcgtgtggtcgctcatccgagcctgcttttgccttggccagtgcacgaaaccttttcttctccctacaagctaccattcttgtgtggaggtcataggattttgcctactggttggccaaatttggggccagcaaacttgggctgtctccctggcttaacccgaggccaaatccaagttttgcccttgtttaggctcccgtcccaatgccctttttctgccacacgacagagggggttgttagacacaaatttgttcaatggggccctttagattccagttatggatcaaggtgaaccattcctttattttgggttaaggtctgaatttcagaattttgaaatttaaaattccaatgagccccaacaaagggacttgtttggggggtttctttgaatatttttggttaaccttctaaagcatttttgcgcttatcaaatttcttttaactttattaattggttcaactcaaaattttaaccttttctttccc

SEQ ID NO: 12318 - DNA, 631 bp, Zea mays
  unsure (1)..(631): unsure at all n locations
gagagatgttgtgattgatgaacctatgagagatcctcctcagaaacaagtgtggcttccaaaacctaaccatcttaggaacacacttgacacctttcccgacatctctagcgatccccttcctagagcccctcgaccatccaaaaagaaaatcctcttccacaaacaaaatccacccaagagagaggtgaagtaccattgtgaatattgtgagagggatggacatctagcttatttttgctttaggaggaagagagatgagcgacgggtttctgagtcgagtagtaaggacatgaaccacccctctcatggtgttcatgctcagccagttcagagacgtcctgggaggcctagaggtgttttgcctcttgctgctaggtctcaggcagtgagactacgtggtggtcgtgcccgatggaatgctggtcgtgtatcatatggccaaggaccatgtgatagaggttttggttcatacttccccagcagaccacaatattcttcttgtggtgatcgcttcccttcgggaccggggatgtttggtgttttccctaacacatttcangggccaatgctgcaacaccggtattcttcacaggttacttaccccaagggtgtgccatttactcacccc

SEQ ID NO: 12319 - DNA, 519 bp, Zea mays
ttgggagccagccatatcctgtgcatctatgtttgtcatgatgaactatgtttggtttggatctttgtaatgactgtcaccagagtgtgggtatcccctgcattttggtttacctattatgttaatggagttagttatatagttgggaaaccttttattccactctccttctttatctgaaaaactgtgtggtctgtgttggagatcaatgaagatgctcatctgttcaagtgctgttgaaaaattctatactcttttcttatgctgcaagatttgccaaatccagttctgatgtgtggttgcattctgcagatgtcagagaacatgcgcataggaggaaggcgtgctcagcatgagcgagccgctcaacaagaggaggtgccccagcagcagcacctgccggccccgcccccgatgaccatcgagcaaatgtttctgatgcagacttaggcagttcaagccatcggtcagactttggccggccatttagcagcagcagcaacaacaggctcaggcccc

SEQ ID NO: 12320 - DNA, 522 bp, Zea mays
gaaatagccactggagggcgtactttaaggggtcgcctccaggtgcgatgaaaagaatccctgctcctgctccctgcagtttcagcgaaccatcaaaatacattcgccatacttctgcagtctctggattatctggtacttgctgttctgtccactctgatacgaaatcaaccagtgcttgagttttgatggcagtgcgaggtcggaactcgatgtcgtgggatcccagctcgcaagcccacttggctatttggccaatggcttccttgttgtgaagaatatcccctattggaaaaccagtgactactatgactttgtggtcgtcaaagtagtgacgcagcttgcgggcagttagaagtactgcgtataatagcttctgaacttgaggatactttttctttgaggggcccaaaacttcactgatgaagtaaacaggatgttgtaccgggtaggtatgtccttcttctactcgctcgactaccaacgcggtgcttaccacgtgagtcctgcaagaaatgtaca

SEQ ID NO: 12321 - DNA, 619 bp, Zea mays
ttttcaacccatgttagtcttagcaattaaacaagtgtcgagttcaactctatcaaaatctaccaagtatagctgaccctctaacactcccttaaatgctattgaatcatcacttcttctaaagacagggacacctacatcagtgaatagacagttgtagcccatttgacataattgagaaacggaaagcaaattgtaatctaatgaatcaacaagaaaaacattgcaaatggaatggtcaggtgaaatagcaattttacccaaacctttgaccaaaccttgatttccatccccgaatgtgatcgctctttggggatcttgggttttctcatatgaggagaacatcttcttctcccctgtcatgtggtttgtgcacccgctgtcgagtatccaacttgagccttcggatgcataaacctacaaaacaattttagttcttgactttaggtacccaaacggtttttgggtcctttggcattaaacacaagaactttgggtacccaaacacaagtctttgaccccttgggtttgcccccaacaaatttggcaaactacctttgccggatttgctagtaagcacataaagaagcatcaaaagttttaaatgaaataaccataa

SEQ ID NO: 12322 - DNA, 617 bp, Zea mays
gaagcctctttatgcgattctcacttatatgacccaaacgacagtgccacatgtatgtaggaattaaatcattaggccgaggccttttaacactaatattacagataggtgcatcatcaaaatttaaaatgaataacccattcataatggatgcaaaagccacaaacatgccattcttagagatcacacaaccattgttttcactcgcaaatgaataaccatccttcatcaaacatgaaggagacataatgtttcgactcatactaggaactagataacaattatttaactccaaaataaatcctgatgggaggtggagttgcatcgtcccgacagtcaacgcagcaactcttgcattattgcctacccggaaatcaacttctcctcttttcacgcttctacttcttatcattccctgcatcgaattgcaaatatgggcaaccgatccggtatcaaatacccaagaattaatataagaatcaacaagaaaaaattctgtaatgtgaatagcaagtgtacctgctgcggctgtacccttaccggtgcgatccttaatagaagctaagtactggttgcaatttcctttttcaatgaacaagttcttttgcaataaaagc

SEQ ID NO: 12323 - DNA, 793 bp, Zea mays
tggcggttttactcaccgtttggaacctggcacacctggatttaagggatgaaatccggtgtgtctcatatgtgcgcctaagaaaaacatttcctataataacaaagtggatatagataaatggcacaaatatcattatttcataacggaagtgttttacaaaaataaatgataaccataaagcgaactaaatattattccttggcgccacaaaactgacggggacacgccacctagataagctcggactcctcgttgaaaacctcctcctcgactacatgttcttctcatgttgggggtttatatattccaagggtgaactcacaaaagatcatagctcaacaagttgtggggaataatgtgcatgaactcaccaaaggtgggagcttaagtgaaatgtaagggtgatcaacaaataagggttaaagttgaacattgcttttgataagttggtcaagtttattaccagttacttaatgtgaattgatttcaaaccagagtaattattagactaaatttattaataaaaccacaatgtgatgccaatgacaaaatgaggtaaattccataaattaatcctgcgaaaatttctgaactgctcattaccccgagcaatggtattatacccgtttttacctctggaacggtgtaccctttacccccaagattttgttcccatttgccaagggtctttaatcttataacccttaccaaaggaagggaggcaaagtacccttacagggctttttaaagttcactagcttaaaaaaccccctcaatttttagggaaccc

SEQ ID NO: 12324 - DNA, 589 bp, Zea mays
tccttgaaatcttgattggcaaactgcttgccgttgtcaactgttagctcggacggtactccgaagcggcaaacaatgttctgccaaaagaatttttgggcggtctttgatgtgattgtggacacagccctcgcttcaatccacttggtgaagtattcgacggctacgaaggcgaacttgaggttcccctgagcggtgggcaagggcccgacgatgtccaggccccagcgctgaaaaggccatgtatgggcgaccagctttgtgtattgcgaggggttgcctgaccgaagagagaacttctggcaggcttcgcaagaccttgggactcgatttgcggcgcagatcattgcaggccagtaaaacccttgtcggatcaccttagcagccagggcccttggccccgcgtgcgagccgcaagttccactgtggaccttccgcaaaatttggatgccttcggtttcggggacgcatttaagcattggctgactgacccccttcttgtataattggccctcgaatagcgcgaaggcccggctccgatgctcgaggcgctttgcctcactgacatccgttgggtgaaagaatccct

SEQ ID NO: 12325 - DNA, 683 bp, Zea mays
gatcatcaattcaaatcttacaaaattcccaattacctcctcgggagacattagtgtatatctaggatttcctcgaattaattgaacttgcgtagggttaaggaaaacgagggatcttaaaataaccttgaccattcaatggtcatcccatttcttgctcctgaagttgcgcacttggttcaccaaggttttgagccggttgtacatgtcttgtggctcctccccttggcgaagtcggaagcgaccgagctccccctcgattgtttcccgcttggtgattttggtcacctcgtctccttcgtgcgcggtctttagcgtgtcccaaatctccttagcacctttcaacccttgcaccttattatactcctctcgacttagagaggcgaggagtatagttgaggcttgggagttgaagtgttggatttgggccactttgtcctcatcataatcttcattccctacggatggtacctgtacaccaaactcaacaacattccatatacttttgtggagtgaggttaagtgaaatcccattaaatcactccacctagcataatcttcaccatcaaatgttggtggtttgcctaaagggacggaaagtaaaggcgtatgtttaagaatgcaagaataacctagggggaatttactaaacttcttgcgctcatggcgctaaaaattaccga

SEQ ID NO: 12326 - DNA, 689 bp, Zea mays
gctccaatcaatatccacggactttccattatcatgagcaccattctgtttttcttcaatcatagaaggctgagatacacaaggaatctcttttctagattttctagggcttcttgctgtcttaatggttttttcaggacactcttgcacagcataaccattttcctcagcagttctctttcttccaacaccatttaaatccacatgagagttgcattcacgactaggttggctatccaaagtaaaggcatgacataatgtatctaggaccttagtagactcatttaacccatgtcttcgaggagtgcctatgacaaaagattcattggttttcttcacctttggaacagaatgagaagaaacagataacgtagaatcatgatcttcaatattgctgaacatgtcacttgctcgatgaccaaattcattcttctcaaccaattgtaactgggaaactgcaacccaattcttgatgcttcagaaaaaaagtctcttgtcatggtgaacaaactcagtccccgaagaacaaccctcctggcttgctcctttactattggatacacgattaatgaaaagcctatgcctttttgagcgtaaagaggatatggatcctcggggaactttgcactgcagaactgcagttcttggaggtggaaactggttctggatccatcacctcattttttgcc

SEQ ID NO: 12327 - DNA, 651 bp, Zea mays
caaaaccaacatacataacttattttacgagcaaaagtatatataccttcaagctattataagcaaggatatctacaagttcatccttcgacattgcagaaaaaccgagctctagctttggaaaagccatattctttgccatttctcaacaaacagatatctcctttggtgtccggtaggcaatatagaaagtcatctttgtcagtgccgttgtataccaaggaacctggggggataccttagatccttggcatattggctagcttcggcaatttgcttcttcgatagttttttccctgaagcgtgacgcactataaattctaattccttaacagatgcttcaggagcaggggatccagattctttactagaattctctttttctaatggtaatggtactttcgcggcattccgaaaggctaaattaagtattctttttaaccaaatctccgcaggtctttgctttgcggcgggagccgagggccccagccttcaactttaacctaccgtcatgttgggttcgggagaattctttggattcttaaactttccacgcttaggggcttttataggggtaggaagtaaacgcctttgtggaatcaataaaacgggttaaaatgctggcaaatcttttttttttggggccattga

SEQ ID NO: 12328 - DNA, 768 bp, Zea mays
gcttttttatatttgctttcctacgacatattagtcactgatgagtggacattaagggtagattccattgccaagaactaaggtgacaattacttaaactttggaagcaaaccgatggatggtgtccaagatcaagaattttcttggattatcacgttattatataagattgattggaagcttctccaagatagtgaaaccttttacttcactactagagaaaggaaaagaatttaaatgggatgaagattgcacataaatgttttgaagaaccgaaggaaaggcttaccactgcaccaatgttagcaatgccaaatatttcataaagggtttgatgtatactgtgatgcctcacatctaggtctctggatgtgcgttaatgccagaaggaaaaatgattgcttatgcttcaagacagttgacgaaacatgataagaattattctacgcattatttggaactagctgccgtagtgcgtgccttgaagatttggagcactatatcatttaaacatgtgcaaagcttcacggaacataatagcctgaaatatatctttccttcaaaagaaccttaccttttacagagaaaatggcttgagttgaataaggactttgatttggaaaaaccaaaaaaaccccggaaagcaaaagttgtaaatgatttttgaaccggcagggtaaagtaagcacattactactcatttgagggcgccatatttgtcctgggaaatgggaacgcctcacacttggatttctttaaaaaggtata

SEQ ID NO: 12329 - DNA, 677 bp, Zea mays
gcgatgccacagcctgttctctgctggccttaacaattaaacatgcatctagaccggcctcctcttttgcaaaggcaactaagtaaagtttgtcgtctaatacacccttaaaagctagtgaaccatcactttttttaaagacagacacatctacatttgtaaatagacagttatatcccatattgcataattgactgacggatagcaaattatatccaagagactctactaaaaacacattagagatagagtgctcatttgagattgcaattttacctaacccttataccttgccttgattcccatcaccgaatattattgaatcttgggaatccttattcttgacgtaggaggtgaacatcttcttctcccccgtcatatggtttgtgcatccgctgtcaataattcagcttgaacccccggaatgcataaaatctgcgaggtcaatttaggcttgggtcttaaggacccaactcatgttggggcctacaagggtagtgcaaatattcttagggacccaaaatgcaagttttggctcccttgcattttgcccctaactttctagcaactattttcctatcctttctaccaaatacaaaggaagcctttaaagcaccaataattggtagaaaatcattccttactttcctagaacatgaataatattctttctaagc

SEQ ID NO: 12330 - DNA, 691 bp, Zea mays
taaaaacttttttatttaccggcgcaaagaaagatgttgataaattttactttgtggactttggccataccttgtaatatatgcttacctttccatcaatggataaagcgctttgatgtgaaccaaattagcatttttgagccgaaggcgaaaaacaccttcccttcttttcgttcatagcgaagcataacactgcttctttttctttttttccgaagccttctctttagaacccaagtaactggctatgttatgatgatgaccatcctattgttgtctaaaagaatgtttatgaatgcaaatatatgatgtaatgtaccgtgcaaatgaatgtgcaaacccacacattacgaagccattaccaaagccttcatttccttaggaacaaccaaaatccttttgccggttattttttgggttcactgggtattttttcgggtatcaacactgacttttcgctggaaggtctgcattcccttaagaacggcttttgaacttcttcgccttcttatttcggaggtatcacgttgactttttgcgcttcgccttatatttagaggaatcaccgttgacttttcctgtaagctctgcattccccttggaacgaactttgagccgaaaacttaagcttacctcctttaggaaccggtttttttggtactttcgtgcggttctgcattccccttaggga

SEQ ID NO: 12331 - DNA, 503 bp, Zea mays
gttcaaaatgccatttacgggaagataatatgatgcttatggattagtttgttgatacatcattgtcacgttcacatagatatctggttgcccttcttctgcgtttttcctaaatgtcttggaatgttcctttaggatcttaaatgtctactttgggacttgtgatatatttcctttgtcacatgatgtgttatattgggcacaaaggtgcgcacaaaggatggagaaagctagcatgatgcatgatttgaggggtggcctttgggagggatttatttgtttaactgagggggtctcatgaaatgataaatagagatggcgcacatggatataaaggaatataatgtgtccttttagattttcttataaaggggggaaatacagatcttaaccccttaacaagaatctcatcctggagatttaggaagggactaggggaaaaggaggggaaaatgtatgcgaggctcttcttccctctcccagggagctttgtcttcttcatg

SEQ ID NO: 12332 - DNA, 588 bp, Zea mays
gcgtttccaccccggggggtccctggaccgacgagtaaattgtcgctacctgtcccagcccacatgggttggcgcgagacagaaacacaaggggggaaaacagtaaggggaaccggggcctcgtgttgtcctgcgcccaaggcggatgcgcttgcagtaaggggttacaagcgttcgcgagggagagagagagaggggggtgtgagactgggcgttagcccgttctcccgcgtggccacccttttgtacgaaggccctggacctttcttttatagacgtaaggagagggtccaggtgtacaacgggggtgtagcagtgtgctaacgtgtctagcagagaggagccaaagccctatgtacatgccgacatggctgtccgagaggtgttggagccctgttcatgtggcgtcctggccgtcggaagaacacttgagccctatagaagcacagctattggggctgccggattcttgttgacgtcttcttgcttcccgaaagggcttaaaaccgccgttgtcatgggaccccgcgggggccctcaatacttgttttaccggggcgagccataatgggcgccggtttttttccc

SEQ ID NO: 12333 - DNA, 495 bp, Zea mays
gaaaggggtttttgttgaagcatctataatactttagagatgtatcagaaagcaatggttaattagtgttttgaggaccttttcgaagaaaacccccaataattcccttaggtcccgtttgtttcctttcattttgaggaattggaatcttactatgtaataggctattttttagaatgtgacattccaccactttctaaaggtatcgtataagcttatctcaaattcatggggtgagagatggaaattgattctatagatttacatgctatttttccgatgtacaacttatagcacactcttctactcgcttcgttataacataaatgtagtatataactatctctctcatatgatttaggataatatacaaatatattacatatacaaatatatgaacttaattagttttgtctaaattataattattaaaatggaattcaatttcaacgaaacaaacgtggccttagtgaagtaaagtaatctcaaacaccc

SEQ ID NO: 12334 - DNA, 656 bp, Zea mays
tatcaaaatctaccaagtatagctgaccctctaacactcccttaaatgctattgaatcatcactttttctaaagacagtgacccctgtattagtgaaaagaacagctgtagcccattttacataattgggatacagaaagcaaattgtaatctaaagaatcaaccagaaaaacattggaaatggaatggtcaagagaatataacaattttacccaaacctttgaccaaacccttgatttccatccccgaatgtgatagctcggtgaggatcttggtttttctcatatgaagagaacatccttttcttccctgtcatgtggtttggtgcacccgctgtcgagtattcaacttgagccccccgatgcctaaacctacaaaacaagcttagttcttgactattaggtaacccaaacggttttgggtcctttggcattatacccaagaacttttgggtacccaaacacaaatcttggagccccttgggcttgccccaaacatatttggcaactaccttgcccgatttgttaggtaaaacctaagaggctcaaaagttttaaaggaaatattatgatcatttgatgcactaagagttttctttttaggcaacttaacatgggtgggttggctaaaacttaatggctcaccttatacttaaa

SEQ ID NO: 12335 - DNA, 498 bp, Zea mays
gatgggggcttctgctgctgcatgcagcagcggcggcatccacttcctcgggctccatcgtccacgtgttccggtcgccgaccacgcgggtgcgcctcgtgctgtccgtgctcatcaacctcctcgcctcggtggtgtactacggccttagcctcaacgtggtcaacctcaagaccaacctctacgtcaccggcgtcgtcaactcgctcgccgagatgcccgcctacctgctcacggggctgctcctcgaccgtttcgggcggaagcctctcgccatcggcaccatgctgctcagtggcgtcttctgcaccgccgggagtctcatacccggagcagggaccatgaggtccggcatgttagactgataaccttcagcaggattcgtttctttcaaacatgtaccagacactgacgaacggtgcacttgcaaactgcactgcacgccaaatgtacaggctggcgcggatggcctgcggcgtgggggggcattttggcatg

SEQ ID NO: 12336 - DNA, 750 bp, Zea mays
ctgacaattggggtttattttttcaaacttgaaaatgctttaaaaatcatatttctaaaccattggctaattgcaaaagaatttgaaaagaccttttccaaaagatttgcaaaaacaagcaaagtggtgcaaatgtgggccaaaatgttaacaatatcaaaacaatcatatatccttagaactgctttcatttcaaagtaacttatgcacatctgacaaaatacaaactagttacatttttatactttggatttgctttggtttgtgttggcatcaatcaccaaaagggggagattgaaagggaaatggcttcaactatttcctataatcgattttggtgtttggaagaccatcataaaccctttatagactaactagtttgcctaggttatcttttcttaagggcacaaagttcatatacacgtataagtaaaatgacccttggggcaattctataagtatggagctgggacacccaaagtccaattctaggatctaatgaaagcttctccaaaagtatttgaacttaaatacctttttaataaggattttcttaattgaagtcactttctctccaaaaggaataactttggttgacctatacatttattaaccctctttaaaaaaattaagtaaaatcataactgataaaggctttccattgaaattatttttttgtaatacaaaaaaactattttgtgaaattgcgtttttgaagctttgcttaaagggatttaataaatgtttata

SEQ ID NO: 12337 - DNA, 628 bp, Zea mays
ccaaaaaattatccaagaatattaagggtagaaattatgattaagcaagaagggaacacactattatgaaaagggtccttaaatggcacaaaagtaatggagaagtgacatgaaatgatgtacctttgcatttttaccttttcaaggggagttccaaacttgtgttgggtttacaattcatttgcaagctctagttggtatagttgtgacataggtccaagatagcaaatgaagattgtcatactaactgaaagataaatcttgatacctggagtctagatgtcacctagcattttcttatcacaacaagaggcaacatgaaaattgcacaagtatggattatgcaactagtgatcatgtatgaaaaatatcaattgaaaaacaccaattgatacaatttgatagataaatagatcactaatagcatattacactaagttctcctcaagttttaatgcacacatatatatatgaattcaaatggatatatgttggaaatacttatttgaaatttaaagtaccattaacataaaaagaatattcactgaacataatcatgcaacataaagaacatgtgcactatttaatcaattaagttctagacaggagaatctataagctatgctac

SEQ ID NO: 12338 - DNA, 240 bp, Zea mays
catctaccttgggaatgcaagtgtacctctacctattatgtcccatttactgtataatttatcaacctgcataccatgatcaacctaatgattgactattctttgatttaccattgcctcgattaccttttgggttattattgattaactttacgctattgctcaactctaattaacgaacatgatgagatgtatcaatgattcactgttccctgcttattaagatttataccgcgtcct

SEQ ID NO: 12339 - DNA, 444 bp, Zea mays
ctgagctgcagcttctcacgcttgccccagtgatcggctaagcatgtcttattatctctctagtatagcagagagctccaaacggtgtgatgaatgcacgtttttcctcgtcttcttttgccaggctgatctgatgatacccatagtatctatccaagatagacaacacataacacctggcggtcgagtctaccacctggtctattttatgaagtacgaagggatctttcggacagtgtttgttgagatccgtatagtcgacgcacatgcgccaatccactttattctttgtgagtacaagaacaggatttgctaaccactcatgatgcggtacttctctaatgaaccctgccgcgactaatcgagctatcttggcacgaatagcttctctcttgtcgggcgggaattccttctttccctgtggacccgttcttctggagtttc

SEQ ID NO: 12340 - DNA, 421 bp, Zea mays
  unsure (1)..(421): unsure at all n locations
ctcacatgtcagcagttcacaatgtatttcacgtatctcagctgcgaagatgtgtccgcctacccactgaagtgctacctgaaccagatcttgagattgaaccagacttatcttatcaagagtacccagtcaagatattggatcagaaggagagatcaacacgggcaaggtcaattagaatgtataaagttcagtggagtcaccattccgcagaagaagctacatgggagactgatgatgttctacgctcccgcttccctgaccttctgcccaaaggagtctgtacgtaaccccaatatcccacccncacctgccctttgaatacaactattagaaaaacttagatacccaggatagtctaagttgtggatntaacttaaaaagggcttcttctgaagttgaaagagatgacattcgaaga

SEQ ID NO: 12341 - DNA, 431 bp, Zea mays
  unsure (1)..(431): unsure at all n locations
attattatatctggatagagtataatagatggtattacatcaaatatacatacaagtatatgttttaaacttggttcgtgggtcttggaaagaaatggattccttttaacataatgttggcaatcaatcttgcctacagtcatcatgacattcggggagtngaaaatggagtgcctgctcctattgcgaacatccatacaacctggattcctggatgatttatggatggttattttggtttaactaatgtttgatcacacatatatctgaaaatatctagtagtgctggtttgaaattgttgaataggtctatcttatacactgatttggtaatctgaaaatgggctttactcaaatctttgatatctattttctttgctaacattttgagtcctcggtgtggctgtactgtaatctactngcgtgtgtgt

SEQ ID NO: 12342 - DNA, 354 bp, Zea mays
  unsure (1)..(354): unsure at all n locations
tcgaccacgaccagcacccaacataagactttccctaattatttatctaatggcgtcccataccaccctcatgtagcactgntttcctgtgtggtcaatccatgttccaattaaatcatatgatcttgcttaatcatcagattagcaacaaaaatgtaaacttatcatttggaacattaatatcataaacaggagtgactgcataaagttaagttgtagcaatagcatagctacgaaggtaaagtataatacccaagtttgatcaaggaatatggttggaaaggttatgtgtatctgaatangtaacccatcatattatgcatatatccaagaatatcaaatgtcccgtttcgt

SEQ ID NO: 12343 - DNA, 313 bp, Zea mays
  unsure (1)..(313): unsure at all n locations
gtcaactgtgagctctgacgggactcctaatctgcaaacaatgttntgccagaagaatttctgggcagtcttcgatgttatcgtggatactgcccttgcctcgatccacttggtaaaatactcgacggcgacgaatgtgaacttgatgttcccttgtgccgtgggtagtggtccgacaatatccatgccccatcgctgaaggggccatgtgtggtggatcagctntgtgaattgcgtaagggtgcccgagcggtgggggaaatttntggcaggcttcacacgatctcgtgactcgattcgcggcacagatcgt

SEQ ID NO: 12344 - DNA, 368 bp, Zea mays
  unsure (1)..(368): unsure at all n locations
tggacgtgaaaagtgcctttctcaatggaccaatcaaggaagaggtctatgttgagcaacctcccggctttgaagacagtgagtatcctaaccatgtctataagctctctaaggcgctttatgggctcaagcaagccccaagagcatggtatgaatgccttagagattttcttattgcaaatggattcaaagtcggaaaggccgatcctacactctntactaaaactcttgaaaatgacttgtttgtatgccaaatttatgttgatgatattatatttgggtccactaacgagtctacatgtgaagagtttagtaggatcatgacacagaaattcgagatgtctatgatgggggagttgaagtatttc

SEQ ID NO: 12345 - DNA, 305 bp, Zea mays
gcctaactgatgatccaaagaaagttacatcgattatggactggtacgcaccgtaagatgtccgaggaatcacgagttacattggaatggccacgtactatcgtcatttcattgaaggttctccaagactgccatgccaatgacagcctagctagcaaagaatgttgagttcatgtggaccccatcgtgcctagaatcatttgagatgttgaagcacaagttgacaaaaacaccggtgttgtgtctgccatatgctcacaagccattctgaatatatggtgatgcttcatacaccggactgtgat

SEQ ID NO: 12346 - DNA, 468 bp, Zea mays
atcctcttagtcacctgatgcatgcaagcttctgtgagccgaatgtccataatacacctttcctgagctcgttgcggagaaacgatttaatttcccagcacgtatcggtcccaccttgcagagtttactgtttgtccttgcggtccaccgcgcatcgagcgcaatctggtgtgcgcctggtgtaaaaactctggtgcttcgccttcttacctgcagcactatataaacagacgagtatgtgtgaagttaccacagcattcattgctatttgcactgttttcctgccaaaatttttaaccatcaccgaagcttgtctgttagaatcgaacgaagctccagtttgaaatctgcttcggaggaagaaaatattaaagtttcacaaagtcataattgaatggccagagtccgctctaccgtcaaggtggagcgcgagggggatgaaactgaagcttcggagactcttcccat

SEQ ID NO: 12347 - DNA, 483 bp, Zea mays
  unsure (1)..(483): unsure at all n locations
tcttcatacataaacaatcgcatctagcagcttatagtttagctgttaggtcttgcgattcaaccaacgatatccatttcttatcactcggtttaattatcctcactgtatttaaagtcatatggcactttcagtgttctttattaaatcatctggtttactgactctgagttatcctgaagtttggacaaaaatctcaccctacacttggtgtttctgatttgtccctttgcacacttatctcangattgatcggaagattctctgtattccgagtactgtgtctaacagtagtacttgtttgctcattatttactccttgtcgatacacctgataaatgaataagaaacgatgttttgtgattacatacactagacatgtggaataaaacaaaacataattaaagatgagttctactaatngcatcctatgtcgtcanactatgtctagatgcatgtacctttctgcgtattcagtgtatg

SEQ ID NO: 12348 - DNA, 379 bp, Zea mays
atctatgtcgtttattgtcttttagtctgtacagtttacttcggaccttctggcagcttcctgacttacatgaatggcaatatgtccttggtccaatagtatcttcatgcaaagatatgctggatgaagaattgcttcgaaagcattgagagtaccacgaccaatgattgcattgtaagggtattccatgtcaacaatgtcgaacacaacttgatcagtccttgtgttgttgatagatacgaaggttactggcattgcgatttatccaagtgctacaatctgccttcctccgaagccacaaaggggatgcatggcatcatggatcttgtcttctggctcttgcatctgtctgaaggccttaccaaatatgatatcagct

SEQ ID NO: 12349 - DNA, 375 bp, Zea mays
agcttgtgaaggttcttcatccacacatgtgctaatctgcgatgccacaaccagcccatgctagtcttagctattaagcatgcatctagaccggcctcttcttttgcaaaatcaactaaataaagtttgccgtctaatacacccttaaaagctagtgaaccatcacttcttctaaagacagacacatctacatttgtaaatagacaggtatataccatatgacatatttgactaacagatagtaaattatatgcaagactctctactaaaaatacattatagatagaatgctcattagaaattgcaatgttaacctaatcctttaccttgccttgattgccatcaccagatataattgaatcttgtgaatcctta

SEQ ID NO: 12350 - DNA, 445 bp, Zea mays
  unsure (1)..(445): unsure at all n locations
atgacatcagcttctcccatatctttcatttcgaaatggctcgatagaagaattttaactccctcaatcacatggagatttgatccatagatcaagatgtcatcaacataaaggcacagcataacagactcacccncaccataccgattatatacacacgtgtcagattcatttacagcaaagccagcagctgtaagagtattatcaaacttttcatgccattgtttatgtgctggttttatgccatacaatgattntatcaacctgcacaccttgttctcttgaccatctgcaatgaacccttctggctaatccatgtagatcttctcatccaactctccatttatgaaagctgtcttagcatccatctgatgaaatgatagaccataagaggatgccacgactattaatgtgcgaattgtagtcaatcgagccactggtgagt

SEQ ID NO: 12351 - DNA, 472 bp, Zea mays
  unsure (1)..(472): unsure at all n locations
tgtaagatctgtaaaatcaatgcacattctccatttaccatnggccttcttcaccataacagtattatctagccactctatgtatttgacctctctgataactccagcgctaagaagcctctttacttctttccgagcaccttcagctntgtcatcagacattttccgaagcctttgttttcttggcctgaaagatggatccacattgagtgaatgctcaatgacatctctgttgacaccacaaagatcattggctgaccaagcaaagacatctttgttgttgaatagaaatcttagcaaattcttttcatgttcttcaaataactaagaccccagcagtacctgttgttttgctatatcttcacatagaagcatangctgtggctgatccaccgaagcagccttctctcttttgtatcgatactgctcacaggcttcggctccatctatgttatggatngcctttgaatct

SEQ ID NO: 12352 - DNA, 394 bp, Zea mays
  unsure (1)..(394): unsure at all n locations
atcgctagctgtggatacaatgaagtcaagtgcagccatctgggaagagtgattttggaattgatgcagaacttcagagtctagcagcatctcctttcgtacctgaaaaatattcaacactgcttatacnagcgaattggttgaaatgttgaataaacgaaactgaaatgcagtgccggcagaaaatagagaaattcactagttatggaacatttgagaactgcgagagatttattgctatgacacaattaaggacattataattgaatgtttttttacaaagaaaggatgcttacaaggtttggaaaagcagaccgtagtggttctagtctcctatctcccccataaatttcaccagctgcgatgtacataagagcatccttgttgaaatcct

SEQ ID NO: 12353 - DNA, 401 bp, Zea mays
  unsure (1)..(401): unsure at all n locations
agaattggtactgtgacagaagtcattgaagcaacacaaccaatggtttcagctccgaaggtgccggctattgaaagcacgacagctactgaagctgtaccttcagaggctgccgcataagatgccagagccgaagatgccaaatccgaagatattaatgtaaagagcatagctgctaatatagacacaatgctactaaacattgccgcggaagaacctgccgcagccaccgaatagactacagccacaaaacccgagaaggaagagatgaccgaagatacttcggaggatgaaactttngactntcaaaacttaagtggccaagagctgacaaaagttgagaaagaaggaataanagaatatgctatatcctgcgggtatcggccgggagcgcttctctt

SEQ ID NO: 12354 - DNA, 340 bp, Zea mays
  unsure (1)..(340): unsure at all n locations
aagccacatgcagaactgtgtgaagacacagccctttcaatcaagcatagcaganaagaagtcttcagctgctaaaaaacataaataaatctgggtgaatacactaggtattccgcaagcccacctgtctcccgtatagagaaagaggcctattgtggtggacagatatcccccgggtccactataagaataaaagacctcacgaaaggtccaaatgccccataattcgtaatgtcatccccctcgtgagcctgtgaggaacgaacagtgagacaaatcatcacaaggtcgggtcggtgcaagcccatacggcccaacaacatccgagcagtaatcacat

SEQ ID NO: 12355 - DNA, 349 bp, Zea mays
gctgtcaaagaacgatctggctgacagcctatcttacaacagtttataggtgcgacaagtggaattcttgtattttttgtcgagttcaaaatttttcgtttgtttaaaactattgacacagacatgttcctgtttgcatggcctgatactcatcaatgccctcatggcacaaaaagatgctgaagacgaatgttgtactatatccctgagcaaccttcgttccgaagtaattgaactgaggaacgaatgtctcgaaaaagacaaaatactatactcattgatagataaaataaaggaggacgaagcctgctttataagtcaagctgaagctcagaaaagcgaaattgaa

SEQ ID NO: 12356 - DNA, 477 bp, Zea mays
  unsure (1)..(477): unsure at all n locations
atccttaagtcacctgctgcatgcaagcttgaaatgtgttntcctccattcatttttgatatgcaagtacacctaatcatacatctcgtggatcagataaaaatattagggccactatatntacatcatatgtttcagttggagcgatacctgngagtattaaaaggttatgtgcgaaatcgcgctcacccagagggttcaatcatggagggatacactacagaagaagtgattgagagctgtatagattacataagtgacggaacaatgataggtgtgcgtgtacctaaacatgagggtaaactatgtgggagagggagaatgggcaagataacttttcgcgttgaggattacaagctagtacattgtgctcatggtagtgtactacaacatctcacgatagccgagccttacatagaggaacacctggatgagcttcgtaaagaaaatcagaaccgcacagatgactggatcatg

SEQ ID NO: 12357 - DNA, 410 bp, Zea mays
  unsure (1)..(410): unsure at all n locations
ctgcattgatgttaaatttcttgtattgcctctatggcttgtctaacctagttgagataaccgccaacaaagcgagtgataaagcttaactcgggtcaaacttgacaagtcttagttttaagcttttagcacttaaattcttactttttatgcaattgttggttcttgaaatatgcatgaagtactgcacttatggggagtattcaaaactcaaatcactcatgaaaacccctagtgcaagccaaaatgcaaatttcaccatttgcctgatttctctaaaaaatatcaagcctatnggcaaaatatttgaaaagtatatgagggtgccaatacctgtcccaacaagtgttatttttgtgtggtataagttgggaattggtttggctgggaactagatagaanaattcaac

SEQ ID NO: 12358 - DNA, 414 bp, Zea mays
  unsure (1)..(414): unsure at all n locations
atcttatgccaatgtntatgattatcatatatcttctttnttatcaaattgatcaatgtcctattactagactcggcctgtccattggcctgagcataatatggagatgaattaagcagcttaattctgtataattcagcaaattcacgtacctcctttgtcataaaagaagtaccttgatctgtggtcaaggtctggggaatgccaaatctatgaataatatgctcagttatgaactcaattacctccttgtgcgtcatgttctttatagcaacggcttcagtccatttggtgaaatagtcagtggcaactaacacataccgatgcccccttgatgatgaatgatgaatttctncaataaagtctaatccccatcctctgaacggccaatgcttgatgatatgatgtaattcg

SEQ ID NO: 12359 - DNA, 435 bp, Zea mays
  unsure (1)..(435): unsure at all n locations
agcttctaaatggagaacacgtgatatgtttgactaacgtgcatttcgaataagatagacactgtgcagcttgtcaagcatgtaaacaagtgggaggagcgcatcacagcatgaacgtgatgaccacttcaagacccctggagctgctgcatatggacctcttcggacctgtcgcctatctgagcatatgagggagtaagtatggtttagttattgttgatgattnttcccgcttcacttgggtgttctttttgcaggataagtctgaaacccaagggaccctcaagcgcttcctcaggagagctcaaaatgagtttgagctcaaggtgaagaagataatgagcgacaacgggtccgagttcaagaaccttcaagtggaggagttccttgaggaggaanggatcaagcatgagttctctgctccctacacaccac

SEQ ID NO: 12360 - DNA, 472 bp, Zea mays
  unsure (1)..(472): unsure at all n locations
ggatcttaagtcacctgctgcatgcaagctngtggcgccctctggcgtcttgccgtagtctaagcaccaagtctcccacctggaagtcttgggaccgaacccctcgggcgtgatatcgtcgcatagactgctgatactgcgccgagtgtagtaaggccatgtcccgagcctcttccagctggtccagtgagtcttctcagctggtctggttgctttggtcgtcatacgcctttgtcctcggtgaaccgtattctaagtctttgggcaagatagcctcggncccatagactatatagaactgcgagatacccttggcccggcttggcgtcgtcctcatactccagaccaccgatggtagttccttcatccatcacttgccgaacttgttgaggtacgtgtagatcctcggtttgagtccctgcaaaagcataccgttggcacgctccacctccccattcgtcatggagtgagc

SEQ ID NO: 12361 - DNA, 390 bp, Zea mays
atcttatatcaactgctgctgcaactaaagcgttggatgaacttccttatttttacattagaaagggcctggtgaagaccaatccatacaggaattgttgctaacgttggataacatactgtcatataatgtataagatcatgatggtactgtgataaaagcacggtattgcatggcatggagtactatatcataaaaaaacaaatatcacacgaaaggattcctattgaggaatgaagcacaaaatatatagtcagtatggcttaagacggaaaaagtcaagaaacctgcttataggtttacaccagcttgcttgtataaccgatcagtctgtaactgtatcctttcataatatgaattatataaaagcatgaaatctaaatacgcaat

SEQ ID NO: 12362 - DNA, 409 bp, Zea mays
  unsure (1)..(409): unsure at all n locations
ttctacagatgtcagaaaacaggcgcagaggaggaaggcgtgctcatcatgagcangcagcaccgcatgatgaggcaccccagcaacaacagctgccacccccgcccctaataaccatcgagcagatgttcctcatgcagactcatgcagttcaagccatcggtcagactctggccgccattcagcagcagcagcaacagccaccatctcagcctcatatgcctccgatgcccaatgacaaacgtgctaaattcatgagaggtcatccncagtgtttgctcactcttctgacctcatggatgctgaagactggctgcgcacagtggagcgagagttccacaccgcttagtgtgatgacagggagatagttctgtatggtccccgtctggtgagaggagcagctcaatct

SEQ ID NO: 12363 - DNA, 489 bp, Zea mays
  unsure (1)..(489): unsure at all n locations
cttgcagagttttgggcgttcatgcttcattcgtgtcatcgtaaccgcttttctattggttctgatattttaaacgttagctatcaaatctcgtaggacaccattacttgccttcgacagttttcaaccatcttctggttggaaaacttatcccagttactatccggtcttatttgatccacttcatatgtagcataaggaacaagctgcatgcttgaattattcttgcaaatattagcatgcatggttattgtgattgtgactatctaaaagtatcacagtccctgacctcgtatgagtgtcatagcatagtatgattaccatcttgtgattgcattggaaagcaatgccactgtatcatccatcttttgcacgggcacacaacatgcgaccgttgaaatatatcttccatccacagctcgcctcgacgtgggtcttcccaaacagggtggcagtntcatgaatgatttaaatgatgttataattatg

SEQ ID NO: 12364 - DNA, 510 bp, Zea mays
  unsure (1)..(510): unsure at all n locations
atcttaagtcacctgctgcatgcaagcttgtgatgctgacatgcggaccccactcggttgtctcacctcatacaccaacctatgctgtcgctgacggtgggccgccttggcagggtcgtcatcttccttgaaccgaacaccggagaaacgcatcataataccgtattgcgcgctgagatcccgattcaccgcaacaacctcgtcgatccggccagaaccaaactgctgcttcccctgcgcatataagtgaatgtttgtaaccccattgccgtgcacggtcgatagaatccgcgggaatgcgagaacctgagagagagcaacgaagaagagagagaagagaatgggggatcactgcttggtgttccttctgcgcgcgcagcatagcgcctggaggcgcgccgcacggttcttgggaacctctggacaggaaagattctggtggcgacctacactacggtgatcacatcggacctggtcggatgcantgaccatcgcgtggcggatctctcg

SEQ ID NO: 12365 - DNA, 369 bp, Zea mays
  unsure (1)..(369): unsure at all n locations
caatactgtgccagaatcataacatatctattgagagatatcctacccctgaaacagatttcatattcattgtcattttatttttttaataaggaacaattattgtaaacctagttntattgccattttcaatttcttgtaatagcttcgttcttgccacagtgaaatatatcttctccacagactcacgaagtccaaaaagtcgctgaagcgcataagtcattcctaatggaacgcggtgctaaaaatcacattacaagtatcaccgaagctacaaaaagtcgttctaatgaacgcatcgtaagtttgccgaagctacaaaaagtcgttcttaagcgagcgcagtgtaagttttctgctcaaaagtcg

SEQ ID NO: 12366 - DNA, 482 bp, Zea mays
  unsure (1)..(482): unsure at all n locations
atcctcttagtcacctgcggcatgcaagcttcggctatgggttaaaaatttggcagcataacagtgcaatagcaatgaatgctgtggtaacttcacacctacccgtctgtttatatagtgctgcaggtaagaaggtgaatcatcaggatttttacaccaggcgaacagctgcttgcacccgctgcgcggtggaccgcagagaccaaatagtaactctgcatggtgggaccgctacgcgctcggaaactgaatcgtttctcgacaacgagctcatggaaggtgtttttcggaccttcggcttcccgaagcctaagagactttnttcacggatcaagctcgttacgaataacgatctatcaccgcgaaggggctactgttgggactatgcttcgtcgccgaatgtcctgcatggagaaacagcttcggctgaagctgtccgcatgtgatgaccgaaggttcctcttcatgaagcttcggaatta

SEQ ID NO: 12367 - DNA, 408 bp, Zea mays
atcctcttagtcacctgatgcatgcagcttcctgcaaccatatctgcgcaatgttcgctcttctgaaggttccgagcgcagtgcgcgctgtgcaatgcaatgtttgaagatggaacctcccgctgactatataatataagcagagaaatttcgtcaacaatcaacaaacttaatcccagctgattggataaagagcatgaggagaatcgaagctcataatataatgtacagctggctaataaaaacataccccatcgtggtaatcatacgagtacctacctgatacgatgctggtaaaactgattatataagtacgcgagttcgataatttgcagaatgtaacccactacctgtggcgggtaagcggagacgctgggtagtcgatggggccaagaccagcaagagaga

SEQ ID NO: 12368 - DNA, 405 bp, Zea mays
  unsure (1)..(405): unsure at all n locations
atcttaagtcacctgctgcatgcaagcttcatacanaatcttatgccaatgtttatgtttatcagatatcttcttttctatcaaattgatcaatgtcctattactagactcggcctgtccattggcctgagcataatatggagatgaattaagcagcttaattctgtataattcagcaaattcacgtacctcctttgtcataaaagaagtaccttgatctgtggtcaaggtctggggaatgccaaatctatgaataatatgctcagttatgaactcaattacctccttgtgcgtcatgttctttatagcaacggcttcagtccatctggtgaaatagtcagtggcaactaacacaaaccgatgcccccttgatgatgaatggatgaattctccaataaagtctaa

SEQ ID NO: 12369 - DNA, 479 bp, Zea mays
  unsure (1)..(479): unsure at all n locations
tctcgtacacgtgatcctcttagtcacctgctgcatgcaagcttggaggcgtcgatgggtgttctactnggtgtagactcctccttcttctcctccgttgccttgaatgcaacctgttgcgcttcggacgtggagggaccgtcaagctcgttgatcttccgtgagcccttgatcataaactcaaagctcacaaaattcctgattacttcctcgggagtcattagtgtatatctaggattaccgcgaattaattgtacttgagtagggttaaggaaaataagtgatcttagaataaccttaaccacctcgtggtcatcccacttcttgctcccgaggttgcgcacttgattcaccaatgttntgagccggttgtacatgtcttgtggctcctcccttggcaagacggaagcgaccgagctccnctcgatcgtttccgcttgtgatactggtagttcataccctcgtgcgcgtctgacacg

SEQ ID NO: 12370 - DNA, 490 bp, Zea mays
  unsure (1)..(490): unsure at all n locations
tctcgtacccgngatcctcttagtcacctgctgcatgcaagcttctaaagggagatacacatttgtgactaacagatgttncatttgagaaagacaggatttgtagcgcatgtcatgcagggaagcaagttggtgttcatcatccacataagaacattatgacgactgatatgccactcgagctcctacacatggacctatttggcccgattgcttacataagcatcggcggnggtaagtactgtctagttattgtggatgactattctcgcttcacttgggtgttctttttgcaggaaaaatctcatacccaagagaccataaagggattcttgagacgagctcaaaatgagttcggcttaaggattaaaaagattagaagcgataacggaacggagttcaagaactctcaaatcgaaggcttccttgatgagganggaatcaagcatgagttctcttctccctacacaccacaacaaaatggtgtagt

SEQ ID NO: 12371 - DNA, 397 bp, Zea mays
  unsure (1)..(397): unsure at all n locations
ttctagattctcgcacaaattgaaccattcgtctatgagtggacatcagcacatagaggaagcatcagcgcatagcatggtttggggctaatgaaagctgagaagattcactacagtaaatcacctgaagcagtgagtgtttccatactgacctgccaacacttggaagtatgttgtacataatgattaagaaaatgaccaatcatcctgagttgtagacttgttttcttttgcatttgagctgtctgtttccttatcaagccttagtagacaggtcacatatganaaagattgaatataccaagacttgcatacaccaccttntatgcatttgtttgaaatgacacaaaacaagaacgatgcactntcatgagatgctangttatttggtaaatct

SEQ ID NO: 12372 - DNA, 388 bp, Zea mays
  unsure (1)..(388): unsure at all n locations
atattcaattttgactagtgagagattaatcactccaatcccatttgatcccgatgccctaatgtgatcgtgctatcatggtacctaaggctgaaaatgttccattgaaaactgaaaagaaagtttacccgttgatgtaccagtgtcaactctgacataacatgagagacagtaattagatgtcacagcaagtgcacaatcatcacttcatcagataaaattactattttaggtattgtaagatgcatctccagaggatttatgagaaagggcacacgtgcaagcacaacaacggaagagattatggcagcanataactgaatctgtgctctatctcaacagcacgatgacatacgtaatgtacatgggtcagcatatgaatttactt

SEQ ID NO: 12373 - DNA, 436 bp, Zea mays
  unsure (1)..(436): unsure at all n locations
agcttatgaagattcttcatcccaacatgggctagtctgcggtgccagagccaacccatgttagtcttagcaattaagcatgtgtcgagttcagctctatcaaaatccactaagtatagctgaccctctaacacacccttaaatgctattgaatcatcacttcttctaaagacagtgacacctgtatcagtaaaaagacagttgtagcccatttgacataattgggaaacagaaagcaagttgtagtctaaggaatcaacaagaaaaacattggaaatagaatggtcaggagatatagcaattgtacccaatcctttgaccaaaccttgatttccatccccgaatgtgatagctcgttggggatactggttnttctcatatgaagagaacatccttttctcccctgtcatgtggtttgtgcacccgctgtcgagta

SEQ ID NO: 12374 - DNA, 469 bp, Zea mays
  unsure (1)..(469): unsure at all n locations
atcttaagtcacctgaggcatgcaagcttatgaagattcttcattccaacatgggctagtcgtcggtgccagagccaacccatgttagtcttagcaattaagcaagtgtcgagttcagctctatcaaaatctaccaagtatagctgaccctctaacactcccttaaatgctattgaatcatcacttcttctaaagacagtgacacctacatcagtaaaaagacagttgtagcccatttgacataattgagaaacggaaagcaaattgtaatctaaagaatctacaagaaaaacattggaaatggaatggtcaggtgatatagcaattttacccaatcctttgaccaaaccttgatttccatccccgaatgtgatagctcgttggggatcttggttnttctcataggaggagaacatcttcttctaccctggcatgtggtttgtgcatacgctgtcgatgatccaacttg

SEQ ID NO: 12375 - DNA, 425 bp, Zea mays
atcctcttagtcacctgctgcatgcaagcttgtgtttacaagaaggatagtgggagcgctgttgtatttctgatcttgtatgtggatgacatattattgattgggaatggcattcctatgctggagtccgtcaaggcttcactgaaaaagagtttttctatgaaagacttatgggaagcagcatatattttgggcataaggatctatagagataggtcgaagaggcttataggattaagtcaagatacatacattgacaaggttttgaaacggttcaacatggaacagtccaagaaagggttcttacctatgtcacatggtatacaccttatccagatgcaatgtcctgcgacggctaatgagcgggagcgcatgagtaatgtaccatacgcctcagcaattggatcaatcatgtatgctatgat

SEQ ID NO: 12376 - DNA, 443 bp, Zea mays
  unsure (1)..(443): unsure at all n locations
catatgtgtcatgttttatacgtttctttctctagtaaatagtgatgtagtattgtgttgcgtaaatgtccaaaatgtttgtcgtcttttaaatggtattaatgttgaacgtcgatagtgtgtagataactaaagcgaacctgtgattgttacggtgtcttccattatattgtttagttcgccactgcgtccttgtatatcttgtgctactgtcattatattcatacatatgcatcttgcatctcatttangaccgtgagatgacactcatgcaagtggtgtggtgccaaccacaagatgccgntggtggacgacctgataaatggacataaccagtggatgctcgccgagcgagtacccnccatcaaacactacctaagtgttaaaaggcatccccggttttatgcataccgttatatatctatttactacactaatgtttg

SEQ ID NO: 12377 - DNA, 438 bp, Zea mays
  unsure (1)..(438): unsure at all n locations
agcttgacatttgtctcctgttggaagccaatgccatccttaatgccatggcgtctcccactatagagcttgcttttagcaaatttaaaatgttcattttccaagtcatgctcattaattgtggcactaagttgagctatgtgatcattttgtttcttaattaaagctaggtgatcatgaatagcatcaacattaatgtctctacatctagtgcaagtagtaacatgctcaacggtagatgtagaggggttgcaagcatttaattcaacaatcttagcatgtaaaatagtattctcatctctaagattggaaatagaaacattacaaacatttgaagttgtagccttagcaattatattttcattntcatttttaaggctanggagggatgcattcaacttatcaatcttaacaaataaattagcattatcattccta

SEQ ID NO: 12378 - DNA, 517 bp, Zea mays
atcctcttagtcacctgctgcatgcaagcttcatcataatgacagcaaagggtctccattctcagataggcaggaatgtactaacttatgttgatgatatcattggtaagagcacgaagcatgataaccacattgctgatttacaggagaccttcgctaattttatacaggctggtctaaagctgaatccagaaaaatgtgtcttcggagtaaagaaggggaaatttcttggttgtctagtttcaacaaagggaattgaggccaacccaagtaaaatcgaagctatacttcgaatggagccaccaagtacaaaataggggctcatagattgacaggaaggctggcatctctcaatagatctatatccagatcagtagagagaaacttaccattcttcgaagtgctgaagtcagccgaagtctttcaatggtgacgaatccagcataatgcctttgatgactgaaacagtttgataatctacaacataactcacctacccagggctctttgtatatat

SEQ ID NO: 12379 - DNA, 379 bp, Zea mays
agcttatgaatattcttcatcccaacatgtgctattcggcgatgccagagccagcccatgttagtcttagcaattaagcaagtgtcgagttcagctctatcaaaatctaccaagtatagctgaccctctaacactcccttaaatgctattgaatcatcacttcttctaaagacagtgacacctacatcagtgaatagacagttgtagcccatttgacataattgcgaaacggaaagcaaattgtaatctaaggaatctacaagaaaaacattggaatatgaatggtcaggagatatagcaattttacccagtcctttgaccaaaccttggtttccatacccgaatgtgatagactcgtggggatcttggttcttctcat

SEQ ID NO: 12380 - DNA, 466 bp, Zea mays
  unsure (1)..(466): unsure at all n locations
atcctcttagtcacctgctgcatgcaagcttggncgtgcagagcttgtgcttctactactgtggctatggcggcgcggtttctctctcagttttgtttctttggtcggcgagctatgtggttaggggagggctgcatgggcaagcatatatgcgcagggatgagggtcctcctgtgcggagtctgcacgaacggcgagatccacggcgggttcgccagccatgcgcacggccagtgcgtgagccacggcgaaagaagcggtcctgactcaacaacctgagaggacggctgacctgacccgtggggcccatgtggcatcgagtgatcaagtggctggtgacaggagactgtgcgcggtgcccgactgtcggcgaaacgcgagtgagatgcgggagggctgtcatatatggcccgcacgccagtgtccncgtggttagcgcgagaaggagtaaagtgggctacgcgtg

SEQ ID NO: 12381 - DNA, 509 bp, Zea mays
  unsure (1)..(509): unsure at all n locations
atcttaagtcacctgatgcatgcaagctnggccacggtgtgatggctnggcgcgcgctgctcatgatctccgctacgggtgtgtgtagagaggccgtggcctgcatgctgcatctacatgcctacatggatggacatcgtcggctctctctggtggaggataataacgcattatacgcgcgccactacaaccaccaagcttaatgccgccgaaaggtatgcctgaagcaagcaagcaaagcatagcatgaacccaccactccacggctccccccttntgttcgctctcgctctcgcttagtctttgcactcactcaacgcccccacacgcacgatagcagtatcggcgcgccgtccacactcagcacccnccgctgcctgcctggaatcgtgcgtggtgcataagtagttggtgccttaacagaatgaaagccacgcccggatacagagcgacctttttggtaatatcggcagcataagaaggacacgcgtgttgctttgtatgtatct

SEQ ID NO: 12382 - DNA, 359 bp, Zea mays
  unsure (1)..(359): unsure at all n locations
agcttgaaccggtgacccgcgtcaccggtatatcccaatcgtgctcaccggagttcaagaacccgccggcgcacgtggaccgggtaagcccctgcaccgttntccaattcattgcgcgcatggcctctatatcaccccgtgaagctcctcgtgcaccctaattgaactataccgccgtggtttggccggagcatgagccgtcgacgacccccgccgcctgtgctcgtggccagtgtagctccgaccacctccgacgtcgacccgcacaccgacgtgaccgtcgcaacctcccggacgtcactgaccaccccgncggagctctactgccgtcggtaagccccaccgccgtaatctatgcc

SEQ ID NO: 12383 - DNA, 406 bp, Zea mays
  unsure (1)..(406): unsure at all n locations
atcttattgtgattctttttgcataccttcaagtgttttcctaatgcagatgtaccattgacttttgcctcacactngataataatcttgcaatagttgcaccttgcttccttcacaacactagaatctttgtctatgatcttggtgaaactctgccatacctctgatctgggtgccatagcttttcttttcttcacctctttctctgcatgtgcctctgcaatacctttctcgggttcttgagttgagttgtctcgcatcggaacattctcaatcaattctagttgaggcattctttcttcaggttgtgccatctgcaaatgagatgtccttaagcaacattggaacaacattcatattngaaacatcattcatctaagcaacatgtgcgagtttgaacaacatt

SEQ ID NO: 12384 - DNA, 442 bp, Zea mays
  unsure (1)..(442): unsure at all n locations
cacatattctggtatgtagggagagtggcacgaagcagtatgtaagacctgctttggctgattctgccaggcttctgcttcggcaatctctttttgcttctgaatggtgatcagacacgttcttgtagtgtggcccttgtcttcaccatagaataagaaatagattttcctgggttgatccccataccttccttcgaagcccctactgcctcatccccttggagctggtggcctgaaagagctntgttgctgtcctaaaggctgtgagttgtgttgtggcctctaaaactggcttactttgtcatcgttctgactggagctgtgtattgatctaacatttctaaggtgaattctntctctaaagccactaatcatcttataaaatctgganccttcctccttctttgtggaagtattgtcacccggatgactatccgtttct

SEQ ID NO: 12385 - DNA, 464 bp, Zea mays
  unsure (1)..(464): unsure at all n locations
agaagtctacgagaatgcctctaacattgaacaactacgtcgcttctacccttagatttccacgatgatatctattcaaatcttatgaataaaatgtctaaccttcaagtgaggctccctcatggctagaaaaggaggaccccctttgtgccactttttctcaagagttntttcattaaaaatangtttcgtgctctcgccctantcataaaatggaatcataaaggaataagagacatcctgataggaaagggtggccgaaccatgggaacacctaagcctctatgatatggtttccccactcactatccttctcttaagaaggtaactcgcgttccgtggagaactccgcagaatgacatgacgactaccgcgaaacacaagataaagtgcacagcgaaacaccagaacaaatatgaaaagtctcgaaatgctacatacataatgaacntaagtgttattac

SEQ ID NO: 12386 - DNA, 413 bp, Zea mays
  unsure (1)..(413): unsure at all n locations
gatccttaatcacctgatgcatgcaagcttgaagccatggtaagtagcatatgctaatattattctaatggactcaagccttgctatgggtgcatatgtttcaccgaaatccataccttcgacttgggagtatcccttggccacaagtctggctttgttccttgtcaccacaccatgctcgtcttgcttgttgcggaagacccatttggttcctacaacattntgattatgacgtggaactaaatgccatacctcattcctagtgaagttgttgagctcctcttgcatcgccaccacccaatccgaatcttgaagtgcttcctctaccctgtgtggctcaatagaggaaacaaaagagtaatgctcacaataatatgcaacacgagatcgagtagttacccccttatgaatgt

SEQ ID NO: 12387 - DNA, 310 bp, Zea mays
cgcaaccgacgcctgagatcctccttctcggccatcgcaaacgccatcctcttcaacagcctacggctcttgtgttccgcagctgacttgctcgaacagcatccgtatgctgcgcccggaggcgctcgatcctgccctcgagtcgttgcctctcggcagcgaactccgaagtcagggcgcccgatgcaacatggtcgacgaatgcgggcgcctgccatgaaacatccatcagacttgcaacaacatattaaaaattaactaacgaagtccaagacgacttacatgcttcatctgctgcgacgcatgcctc

SEQ ID NO: 12388 - DNA, 376 bp, Zea mays
  unsure (1)..(376): unsure at all n locations
cataatgaaagccacaagtcttaccaatttaaagcgaataccggtgattagccaaagcaaaagctcaagctaaatccaacaagaaaaatctccaacacctacataaacaatgtggacaaaaaggccgctacaccatatttgatcaagaagaaaaagaatggaaaggtgatagcaatcaaggctaacaaagcatgccaacaaatgaaaggngaccaaacgcatctgggtgccaaaggagattatctcaactatggaaagcaccaagaatgtttggatcccaagtgggaagtgagaagtccgaaggacttcggggaaattggagacttggcaaaattgggatgtatatcatgggatgcatcatattggatctagtcta

SEQ ID NO: 12389 - DNA, 402 bp, Zea mays
gtgaagcgatcacgatactcgctgtctttatattcccttgagtaagggaaaggaattctttcttcttcaacttcataattcccgaacgaatgtgatgagcgcggaagttcgcttggaactcctgccatgttactatatccgcgttggggtgtgctgctgtgaaggcatcccaccaatctgatgcatgtccctcaagtcttcctgaggcgtacaataccttctgcggtcgttgaactgggtgatgtaaagcttctttccaatgaccttgagccagtcatcggcatccagatgatcaaccgcatgagaaaatgtcggcgggtgatgactcatgaagtaccggtgcttatctctggccacgggtgcatactattgatgctgctgatgttgctgattctgtggttc

SEQ ID NO: 12390 - DNA, 403 bp, Zea mays
  unsure (1)..(403): unsure at all n locations
aagctctntgacaatagaaccacttcatctatttttatcatagatgcaataatgcatgagtganaattttaagaggttaaactaggtatgaagcaaggataaatgcacaggacatgctttctcttccttttatacaagatatgcaaagagtgtgtataagaggaagattctaggtacatatgtaaatgataggaataagttntacccgttttgtacctttacttgtagacgctctcttcattgtgcttttgtacttagtcttgtttgcttaagacctatgctcaatgacaatgtgtgataatattttgcacaagagagagttcttacaactagtgatccttttctatgtcatggttaacatatatcaagtggatcacacaatgcataaatgaatcatgaattc

SEQ ID NO: 12391 - DNA, 341 bp, Zea mays
ttaccttcggccacttttgcagacttctggcgttcatggatagcgatgggtccctgatccgaaagtatcttcatgcacagatacgcaggatgaatgattgcttctaaggcattgacagtaccactaccaataattgcattgtatgggtattccatgtcgacaatgtctaacacaacttgctcagttctagtgtggttgatgaaccacaaggtcactgacatggtgatctttgccaatgctacaatctgtcttgctccgaaaccatatagaggatgtgtagcatcatgaatcttatcttctggctctcgcatttgtctgaaggccttatcaaatatgatgtc

SEQ ID NO: 12392 - DNA, 353 bp, Zea mays
attgatagagatcgggcggtggataaagtaaaaagtcctaacggaaatgtacctggaacctcatatcatgcttggtgtgtgatttaatccatgtagtgccttgctaagcttgcattattgtatatatgattgggtcttttggcatcttttcataatgctaattcgctgcattgcttcatcgtactccctcagtttttttatagttgacgttggttagtgtaaaattgcactatctagcgtcaagtgtaaaaaataataaaggtagtatttgaatactcttcttttgcggaactatcaggttaccaataatagaaatatactctttgctatgtaaatacttagcttctaaattg

SEQ ID NO: 12393 - DNA, 504 bp, Zea mays
  unsure (1)..(504): unsure at all n locations
ggcgcgcgtgtcagtgtcgctccttgctctgtcgtttgtcgctgctgctgattgcttaatggttcggcacggtggggacaacggatactgagcccggtttggtgatgaggatccacgaggcccacgctttgggtggaaggagggtttccgtctgaattatgtgaaaggcacgcacatccttactacatttcctggaatgccggaagccttgtcagctgagatcaagtataataaagtcacgtaaaatccacataaataatctgtatttcaaggtgtatcaagggagtacgtgagaaaaaacacaagatagaaacatgtntagatgaaggaacgtctctagcacaattntgtaaatctggatatggcttcactgcattttatggagaaagaaacatgaatcagtaaatcatatagtcaatgttatggtatgntaatttttacaacttcatgatgatgtctgaaaatattgtntgtgaagcaccttctgcaaaattcttttataaa

SEQ ID NO: 12394 - DNA, 339 bp, Zea mays
actctgtggttcaccgtcagaggattattggaggaaatctaagcttccccatgccaccattttcaaaccgcaacacccgtatgcaatgcgtgttccagaaacatttatagagttccctgttcctgctctggcattaatagatgttcttctttcaatagacccagctgatcgtggaactgcgtcttctgcattgcaaagtgaggtatacaatttccctcttaaacctatctccagcaacacaagacatttgtctttgttttcgaactggtgcattctttttatgagacatgttgtttcaatactcattgtttgcattacttgaaatattttataatttga

SEQ ID NO: 12395 - DNA, 423 bp, Zea mays
  unsure (1)..(423): unsure at all n locations
actataccctgaagagttattatagagttactgataaatgtaaagggcatcaattgtaatttacacgggctgcgtcccgtgcctataaatatgtgaacagtactcccgtactgttcacgctgacttggcattcgctttttacattacgcctgtacctttacttttcatcaatatgaaggtacatctataatttgtcattatgaatgtgataatgcgaataanaataagttgatgataatatctgcgttattatttgtatttcatatatgtattcttcattattatctatcgaggttacgaaggttgtttccctcataaccttcgtccagaattcattatatccgaacggatataatgtcttgaaggacgaangactntaacatttaacactgtttatgttgcacttgtcttaactcttagcat

SEQ ID NO: 12396 - DNA, 438 bp, Zea mays
  unsure (1)..(438): unsure at all n locations
aattttctaagtactatgattgtataaagtattactaatacttatatcttcagaccctngtcgttcgggttgataatgagttattgccaacatggttagtactttgacgtgagttttatactaacccgggtatgagattatgtattgtgcaatcatatctcccggcttgtgactgcatgtgtgcagtacatagacggtggtcgacgatgaaagtgaagatcatacgggttcgtgccgatgggccgggagcgatgaatgacgagcgctcggncttgatcgatggattggagaagccatgtgactaccttggtggctgacacttgtgatatgcaccattgtgaggacgtggcatatcggatcgtgtcgttggcgtattcgaggactggtgggacacatgttcatgacgtcgtgggatgcgtatggagtacgctactcatg

SEQ ID NO: 12397 - DNA, 431 bp, Zea mays
  unsure (1)..(431): unsure at all n locations
ttaatcacctgaggcatgcaagcttatgaagattcttcatcccaacatgggctagtctgcggtgccagagccaacccatgttagtcttagcaattaagcaagtgtcgagttcagctctatcaaaatctaccaagtatagctgaccctctaacactcccttaaatgctattgaatcatcacttcttctaaagacagtgacaccaatatcagtaaaaagacagttgtagcccatttgacataattgagaaacagaaagcaaattgtaatctaaagaatcaacgagaaaaacattggaaatggaatggtcaggagatatagcaattgtacccaaacctttgaccaatccttgatttccatccccaaatgtgattgctctctggggatcttgggttntctcatatgaggagaacatcttcttctcccctgtcatg

SEQ ID NO: 12398 - DNA, 414 bp, Zea mays
  unsure (1)..(414): unsure at all n locations
ctctctgtatactccatttaagttagttgtaccccttattctataatatgcttaaggataaggaaaatagaaaatgtaatctaattaatgaaccaaagagtacctctatgtttgttaggttacttattcaatatagttcactggataaatatatcataccctgttttagtgtaaaataagtaagatctctgttgttttaataaaacaagtgatacttataaaaactctacaaaaataaccccaatgtataagcacccccacccttgcgataactattgttttattagagagaacttacgataaatatgaaatcntgctgttgacattgttcatataataatgtaatagaaagtgactctgtgacattaaacttaataatatcataactaaataaccacccctttattctctgtg

SEQ ID NO: 12399 - DNA, 445 bp, Zea mays
  unsure (1)..(445): unsure at all n locations
tacttgtcaaagcaacaacatatgccatcactgctactgcagaccataccagtaactnggcctttcgcatgctgtggactggatatgattggacctttcaagaaagctcaagggggatacactcatgtattggtagcaatcgacaaattcactaaatggatagagttcaagcccattgcttctttaacctctactaaggccgtggaattaatacaagacataatattcagattcgggataccaaacagcatcataactgacttatgatccaacttcacaagttcagagttcttcgacttctgcgagcaaaagagcattcagatcaagtatgcatctgtagcacatccaagagccaacggacaggttgagcgagccaacgggatgatactggaggcactcatgaaaaaggtcttcgacaagaatgatnagtcacangaaagtggat

SEQ ID NO: 12400 - DNA, 421 bp, Zea mays
agcttcacacgcttgccccagtggtcggctaatcatgtctaaatagccctctggtaagtcgctccagcgttttgatgccgaacgacatggaggtatagcagaatgctccgaacggtgtgataaatgctgtcttttcctcatcttcttttgccaagctaatctgatgatacccggagtagctatccaagaaagacaacacagaacatccggcggtcgagtccaccacctggtctattctaagaagtccgaagggatcctttggacaatgtttgttgagatccgtatagtcgacgcacatgcgccaatccactgtattcttgttgagtacaagaacatggttagctaaccactcaggatgtaacacttctctaatgaatctggccgcgacaagcgagccatctcaacatggatggcttctctc

SEQ ID NO: 12401 - DNA, 389 bp, Zea mays
atcctcttagtcacctgctgcatgcatgcttgaaggccaagttaatatgcagaccccaatatatttcgtatccgacgttcttattttatcgaagaataattatacagaatcggagaacgtactgtatgctgtattgatggcctccatgaagcttcggcattattgtcaagcttacagcataattgttccttcttcgcaacctttgaaggatattatgagaaaccgagaagctactgtaaggattggaaaatgggctgcatagctcaatgaattctgtattgattatgttcatagatcctcgattcagtcccaggcattatcagacttcattgctgactggacgccacgggctcacgaggaataaacaaataaagatgccgaatcatgga

SEQ ID NO: 12402 - DNA, 286 bp, Zea mays
  unsure (1)..(286): unsure at all n locations
aatgacgaagtaatagtgttcagaagctntttcaaagctggattgcggtttctgctgaacgaggtaattggagaaattctggataattatgaaatatttcttcattagttgacccctaacgccatcgttatgctcagcattttcatatggtgcctttgaagccaatggatggacccaaatgccgtagctttttgccaagtgcatgagcttcattaccaaacaaaggctagagaagatggcctacatgaaaattgtggctggtacaacttcgcgtatcgcatggata

SEQ ID NO: 12403 - DNA, 336 bp, Zea mays
cgtgctcgccggagttcggaaccccgctggcgcacgtggaccatgtgagtctctgagctattttccgattcactgcacacatagcctctacgtcatcccgtggagctcatcgtgccgtttaattgaactagatcaccgtggttaggccggactctctccaccgacgagttcacccacctgcgcgcgtggaccgatcgattccggccacccccatcatctagccgtacctcgctgtgaccgccaggactttccggagccaacctcgcccctcgccggacctctctcgctgccggtaagccgcgccgccacttttccttccgcggttactgttatcac

SEQ ID NO: 12404 - DNA, 465 bp, Zea mays
  unsure (1)..(465): unsure at all n locations
atgtgttagaactaaccgatgtctattttgagaaagacagatcttatgcagcatgtcaagcatgaaaacagatgggaacaagtcatcctatcaagaacatatagacgacatcaagaccattggagctgcttcatatgaatctcttcggacttgttgcttatcatagcatcgggggaagtaagtatggtctcattatagttgatgactattcccgcttcacttgggtattctttgtgcaggataaatttgaaatccaatgaactctcaagatcttcttaaggtgaactcgaaatgagttcgaattgagaacaaaanagataatgagcgacaacatatttgagttcaataaccttcaagtagcacaatttcttgatgaggaaggcatcaagcatgagttctccgtcccctatacaccacaactgtaacacccaatataccatgttgtctggttattaatatgctaac

SEQ ID NO: 12405 - DNA, 300 bp, Zea mays
attgacatacttagcaattgaagctttctacacctacaccttttggatcattgtgtcagaatcaactatatgcttaaccacaatgccataatagagtaagcccatcatatagtgatatatcacaggaaataacctacatattaccattaaaaccagtttactcaaactaattaagcatctaacacattacatatgcatattatcaatgactgttattcaaagacacataagccattatttacacggagcactatctatatcaacacatatatctgagaactatgatacaactacaactaa

SEQ ID NO: 12406 - DNA, 317 bp, Zea mays
atgctagtcgtagctattaagcatgcatctataccggcctcctcttttgcaaaatcaactaagtaaagtgttgccgtctaatacacccttaaaagctagtgaaccatcacttcttctatagacagacacatctacatttgtaaatagacagttataccccatgttgataattgactaacagatagcagattataaccaagagactctactaataacacattagatatagagtgctcattagagattgcaatttacctagccctttaccttgcttgattccatcaccgattaattgaacttgggaatctattcttgcg

SEQ ID NO: 12407 - DNA, 456 bp, Zea mays
  unsure (1)..(456): unsure at all n locations
gcttctctttttgctgaacaatgaagagatcgttatgttgctatatagaacaatgtggtatattatatgaggagaaatgattgccctgctggcaacaccacanattattaagtattggtataagttctctctcaaaattattatacctaaaaatgttgcattaatcgacacccaatttcatatcggaatgactaattgtgtaatccatgggcagtgataaaaacgagctggactatacatctctgcatatataaatctttgcttggcagcattggcctgatgtcgtgcactttactaccaatataatcacattgttctatgttgcctataacacaatgcaaccagtgaatgtgcttgtgagcgttataccctgatggtcattatacttgttgatctgaattcaactaatggctccatatgacgaatggtattcatgatcgccctgcagaaccctat

SEQ ID NO: 12408 - DNA, 384 bp, Zea mays
cctatttcaatgcacgcatgaccatgaggagtatcttcatgcatacgtccgaatgttcttgcgtctcatagcacatgcgcctatagtgcccaatgaaattgtcattgatgccatgatcaatgtgcttcgttcaggacctactgtccaatatttcgccagatagcctccacagactctggagaagctgcttcaaaagatggatgagtacatcagggctgataatgacttccaccaaagaagggagaaagcttataggttctctgagatgaaccagggtttcggaggaagaatccacccgaggcatgtcatgtcaattcacaactccactaagaatgacgacagatgaagtcagctgcagaggccgtaatattcttcacaatcttc

SEQ ID NO: 12409 - DNA, 378 bp, Zea mays
gaagttcttagttggtcaaagaataattatacagagttggagaaggtactgtatgctgtcttgatggcctccatgaagcttcggcactattttcaagcttacaacataattgttccttcttcacaacctctgaaggatattatgaggaaccgagaagctactggaaggattggaaaatgggctgcagagactcaatgaatttgtattgaatatgttcatagatcttcgattcagtcccaggcgttagcagacttcattgctgactggacgccatgggctcatgaggaaaaaacaaataaaggcgccgaagcatggatagtgttttgcgatgggtcttggggaaccttcggagcaggagcggctgctgtgttgatttca

SEQ ID NO: 12410 - DNA, 418 bp, Zea mays
gtaaagagaaaagtttcttttgttcttttgccttctgtgatctttctgctgtcaactaaagctgatgaaaaaaaagggcaaaagaaaaggaggttgactttaccgtgcaactcacaatggcattgtacccaagacatatgtatgcatatatacgtactgcgttcgctcgcacttgtcatatatacaggtcaatgccagcaaaaatctacagcgaacaggacgtgacagaaaaagaaacaaagtcacgtacggagtacacggctctgcgctctgctatactacatttcccaatgattgtgtgccaatggctctcattgaagactactggatgtctgtgataaataccattaacaccctgatcatacgaagccatagtgtggctcgtcttcgagtcatcgaactcccacccactgatctc

SEQ ID NO: 12411 - DNA, 335 bp, Zea mays
caactgcatattgacaccactgcaccatctttgcgttagcacaaccgcagaacgtagtattacacacacaccggtgacccctatgtctgcggccataacaccaagagctgttggacgtggtgatttgggagcagatacacgaacactatacaacttaatggatgcagctcctgacgtcttctatttgcatatatatggtgtctttgttagtatgcacgcgcatctctctatctgtcatactcgttgctgtgtgtcttgtctagctaaacaaggcagatatggtggctgaacatatgaaacatgcgtgtggtgccaatttacgatacaacatatgg

SEQ ID NO: 12412 - DNA, 436 bp, Zea mays
agctggtgctaccaccatgcatccatattgtggttattatcccgcgtgaacatccatggaagtacaagatggagaccccgctcggacaccctctggggctgggccatagtttgcgctacccacttgagccggatcacctccggcagtaccctcggcggctgggcagtggcttgcgtttccatcacgagccgaatcatgcacgacaacatcctcggtggctgggtatgtgccatcaccatacttgaggaccaagttctctgtagtatccacctctaacgctgatggtccctcagttacttccatgtgagcaagactatccaagtcagtttgctgaccctcaagactgcgctctaacgtcgatgtggcgcgggacactgcccaggatgaccgcatcccgacgtgtagcacatcagcacaaacctgcatcacaccatca

SEQ ID NO: 12413 - DNA, 477 bp, Zea mays
  unsure (1)..(477): unsure at all n locations
atcctcttagtcacctgctgcatgcaagcttcagcctctccgcttatccactctataactcttctanggtcgcctcgtatgaagttatctgtgttgaataggcgcccacgttggcgaatctagcctttatcttctccacgcagcccaaagatttttcataacatctttccttggatgcgcgaagatcttcaactgttttttctaaatagttattccaatattcgctggcctctcggttagcttctgcgagagcgcatttttctttggcctctgccaattgtttccgaaggtcttcgatctcattcttttgaatctcaacttgagccttggaactagcttcatcttatttcactgtgtttaccaatgaaatcaatattntgtcttttcaaggccttcattccttaactcgatcacctctgaatgaaggttgttcagagccattgtatacccttcatcttcaatggtnntctgtgctct

SEQ ID NO: 12414 - DNA, 377 bp, Zea mays
tctttttatccactactgtatgtggtccctctagctctatatcaaactctgctcgcatatcatcaagcatctcatccatcatatcattctcgggtgtgtcaacttattccattgttgaggcattttcacgtggttgatcactttggtgcacccacacctcatatcttggcatgaaaccgaatcaacaaagctgcattagtagttctctcttatcgtgtggctaagaatttttacaccaactatatgggtacctcatagtagcagcttttcaaagagaaagaatactgataaaacttagagtcttgttcatccacactctcgagtgagctgcactattacttcatctatcatacatccattaatggtcattaaccata

SEQ ID NO: 12415 - DNA, 389 bp, Zea mays
ctttctgcgcatagactcgtgattggtttaaccttcatcatgttcgccttcgcatctcactcaagcttcgtcttacctgttcacatatttcacttggaaaacattgtcaaattatgtttttgaggaccttcggaagccgaatgcccccaacagtagcccctcgcaatattaatttactggaatgatgaattcatattgcgacatggacaaatgctctaagccgaatgtccgaaataacaccttccctttgctagaatagcaacagtcattgacaagcgggaccctccagttttcaacgcgctcatcgtataaatacgagctcaccacgagtttatttggcacacattcttgccatctgcttttgtttactcaactgtgttgcaacaata

SEQ ID NO: 12416 - DNA, 447 bp, Zea mays
  unsure (1)..(447): unsure at all n locations
attatatgaaaaatccgctaacggcaaacattcatcacanttttgtggaaattccagaacacacgcncgcaacatatcttcaagtatttggntcactctctcagtctgtccactggtttgaggatgataggccgaactgtggatcaatcgggtacccacgaatttatgaagctcttcccagaatttggatacgaattgaggtccatgatccgacactatagtcttcggaacaccatgcatacagagaatacgagcaatgtacaactccgcatatgtaagtaccgggtaatatgtcttgaccggcatatagtgagcaattttcgtgagccgatcaacaataacccatatagagtcatacccctttgtgttctggcaatcccacatgaagtcatactatgtcttccatttcatgttggaatggaaaaatgtatggacacaatcttatgt

SEQ ID NO: 12417 - DNA, 378 bp, Zea mays
cagtgtcgcatgacaccagactgtccaacccaaacggcggtggctgaatttataattattgcggagcacattggcactatgtgattggtgcaagaatttctggctttcaaagtatttcccaccatgaatgaatgggctatgccgaagcttaaaggagagaagatagaggtggagcttatccgactgccctaccattataaattcaagaaatatttcaaggcaccctgccaagaatggctcgaaacaatcgaaataatgagtactgaaattcttggaaattactctaaaatagaagaccaattgatgacagcagccttcatcacccggctgaaacgaatgctaaacagagtacttgatgctatatgctttgaataccct

SEQ ID NO: 12418 - DNA, 369 bp, Zea mays
  unsure (1)..(369): unsure at all n locations
ggagccattgggttattgacagtggatgcacacatcatatgacatgcatcccacggatgttcacctcacttgatgagaatgttgatgggcaagatataatcacatttggagacaattcataaggaaaagtgcaggacttggcaaggtggcaatctcaaatgatntatcaatatcaaatgttctcttagttgcacctttgagcttcaatntattatcagtgggtcaactctgtgatcttggacttcaatgcttattcactccaacagatgttattgtaacaaaaatggatgatgaatcaatggtgttcaaaggatgtatgtacaacaacctctacttagtggatttcacttcagaagatgcagacttaag

SEQ ID NO: 12419 - DNA, 399 bp, Zea mays
  unsure (1)..(399): unsure at all n locations
tcctttagtcacctgctgcatgcaagcttacggggtgatgtagatgctatctgtgcattgtatcgaanaatggcgcagtgacttacccggtccacgtgcgtctgcggtgttctgaactccggcgagcacgatttcgctattccagtggcgtgggtcctcggttcaagctcgtccaagcttcacggcctctcatggaagctatccgagggcttataccgatcggaggagggcgggaaaggggctggctatggtggttgcccttcggcggctctggcgggtcgcggtgaggtcgccggatctatgggcgagctcggtggagttatgcgtggtacggatgatgcatcggtgaaggcagccgggcactgtgactggcttatatccgtggcgcgggcgtggtca

SEQ ID NO: 12420 - DNA, 302 bp, Zea mays
cacaagtgcttatatatgaatctatgcccatgaatggacaaatgtcaattcaagagcaaaggtatgcttccatgtcctaatacattggttttgtgtactaatatacttgtctaagtatcagaaacaagaagaaaaagataagaagggagttggctgtgtacagacaagatgcggttttggtctggagcacctgactgtccggtggtgcaccatatagtgtccggtggtgcaccgtacagtgtacggtgcgccatgctgactcgagcgaagtggtcgctctcgggaattcgccgacaacgtac

SEQ ID NO: 12421 - DNA, 337 bp, Zea mays
  unsure (1)..(337): unsure at all n locations
actcaagcctagctacgggtgcatatgtttcaccaaaatccaaaccttcgacttgtgagtatcacttggccacaagtcaggctttgtttcttgtcaccacaccatgctcatattgcttgttgcggaacacccatttggttcctacaacatttngattatgacgtggaactaaatgccatacctcattcctagtgaagttgttgagctcctcttgcatcgccaccacccaatccgaatcttgaagtgcttcctctaccctgtgtggctcaatagatgaaacaaaagagttatgctcacaataatgtgcaacacgagatctagtggttacccccttatg

SEQ ID NO: 12422 - DNA, 326 bp, Zea mays
caatggctcaacaatagtggttaggtcaatgtaacctagctggtacgaattaattttgctattgtgtcatatcgtgatgttgttgactgtgatgttgtgcctatggatgcttgtaatattctgctaagtagaccatggcaatttgattcagattgtatgcatcatggtagatcaaatcaatattctctcatacaccatgataagaaaattattttgcttcccatgtccactaatgctattgtgcgtgatgatgttgcttaagctaccaaagctaaaactgagaacaacaagaatattaaagctggtggtaataacaaagatgggat

SEQ ID NO: 12423 - DNA, 202 bp, Zea mays
  unsure (1)..(202): unsure at all n locations
agtcacctgctgcatgcaagcttcatccacaccttaatgcctgttataatacattcattgtgaccgtgatgccgcgcacaccgtgtagcttctgtcaatntgacagtggtgctcggtggaggccgattgttgtcacagtcgttcatcttcaccgcacggtcatggcggatcacccctgcttggttggtgggggggggggggg

SEQ ID NO: 12424 - DNA, 139 bp, Zea mays
aaaagacgttccatgacatgagcaccatttgcttcacgtcaacacgattgctgtggagagctctaataggtggattctaatgtaataacaaccatgtgttatatagctagaagcgggtatgtcaggtgtttcatacatt

SEQ ID NO: 12425 - DNA, 336 bp, Zea mays
ctgcaacttgcgatcgttgtaaccacgctatggctcttctgaggttgacatgcgttcatgacatcaacgcagggtactgtatgttttctcagtcaatcactccaattctctccagcatatacctcacacaggcattaaggtcttcatagttgatacgtccaagactttttgcagaccaagcaaaaggcactgctctgagagcatttgcgatagcctcagtatagtagcagatattctgtggctacacggtaatatattttgtccctaattgagatagatgctgagaaaatttgaaataaggctttggtcacatagtgatcaacaaatatctgacta

SEQ ID NO: 12426 - DNA, 272 bp, Zea mays
  unsure (1)..(272): unsure at all n locations
gcttgccaatacttgttaaagcaacaacatctgccagcacagcnactgtatatcataccacgaacttgggctttcgcatgctgtggactggatattattggaccttccaagaaagctcaagggggatacactcatgtattggtagcgatcgacaaattcactaaatggatatagttcaagcccattgctcttttaacctctgctaaagccgtggaattcatacaagacataatattcagattcgggataccaaacagcatcataactgactt

SEQ ID NO: 12427 - DNA, 443 bp, Zea mays
  unsure (1)..(443): unsure at all n locations
acactataaagtataggcctatcaacttctttgatcaaanctaaaactgggtacttggcggtgcantgatattacttacagactaattaanaatatttgtcaaattaagcaaaccttctccaggctataaactaaaatgacaactattcggtccacggttgctccctttgctgaactcctcttgctgattatctctataagtgagatgcatgattttgattggttgtgttggagaatttttaaacgaatacatcgtccatgcatctgtgcatacctgngaacacgccgaatgagttgagggtcgaagcattcggagaataccaactgccggtaggcatcagcctcacggtcatgaacctctcaagtcattggctgttgggccagtggcagagtgagatgcgagcctatcaattgcacggggatggaatcatcatcttgacact

SEQ ID NO: 12428 - DNA, 242 bp, Zea mays
cgtagtcaggcactgtttttagtgcatcaaagcaaatccatccatgagactcctcactgggtcaaggtgcacagtattttaacttgccagaccaaccctgatcctttgggtgtacaaacctggctaattcttggacaattcctgattttcttaccaattaacttgctatttgagaacccattcagttgtgtttaggtggtaccaaagtcttccaaccagatgctcttaattagtgtttcaaa

SEQ ID NO: 12429 - DNA, 290 bp, Zea mays
  unsure (1)..(290): unsure at all n locations
acatgtgctaaacggcgatgccacagtcagcccatgctagtcttagcaattaagcatgcatctagaccggcctcctcttttgcaaaatcaactaagtagagtattccgtctaatacacccttaaaagctaatgaaccatcactccttctaaagacagacacatctacgtttgtgaataagcaattgtatcccatattacaaagttgactcacagacaacaagttatatccaagcgactcaactaagaatacattanaaatagagtgctcggatgaaatagcaatttttct

SEQ ID NO: 12430 - DNA, 134 bp, Zea mays
  unsure (1)..(134): unsure at all n locations
gcttcatcagtatctatggagcttcngtttccgctctcgcatccgntatagcttggcttcgtcttcttactcctcagcttcggcctcggcttcgtcatcctgtatttattaaagtatggtaagcaaaattcaag

SEQ ID NO: 12431 - DNA, 157 bp, Zea mays
tctgataagttacaacctatgatagactggtatgcctttcgatgaacggacttacctcctttgtcgaggtccaagtgtctgtcagttcccattggggtcttggcgagcttaacgtacttcattccgagccttctcaagaagtcctgagtgtacttca

SEQ ID NO: 12432 - DNA, 186 bp, Zea mays
  unsure (1)..(186): unsure at all n locations
atcatgtgttaggactaaccgatgtatcgtttgataaagaaaaccttttgcagcgcgccgagcanggaaacaggtgggaagcactcatcatagccaaaatgtgatgatgaccgtcagactactggaacctcttcatatggatctcttcggtcccggtgcctatctcatcataaggggaagtaagta

SEQ ID NO: 12433 - DNA, 366 bp, Zea mays
atggacgtgaaaagtgccttcctcaacggaccaatcaatgaagaggtctatgttgagcaacctctcggctttgaagatagtgagtaccctaaccatgtgtataaactctctaaggcgctttatgggctcaagcaagccccaagagcatggtatgaatgccttagagatttccttattgcaaatggattcaaagtcggaaaagtcgatcctacactctttaccaaaacacttgaaaatgatttgtttgatgccaaatttatgttgatgatatcatatttgggtctactaacgaatctacatgtgaagagtttagtaggatcatgacacagaaattcgagatgtctattgatggggagttgaagtact

SEQ ID NO: 12434 - DNA, 126 bp, Zea mays
  unsure (1)..(126): unsure at all n locations
tcatcatcatcatcatcatctgagctatcatccgagtcccattcaactaagtaggctttgccatccttcttcttggtataagaattctttttcttctcgtcactntcatctttgcccttcttcttc

SEQ ID NO: 12435 - DNA, 400 bp, Zea mays
agcttcaacttcatctatattatggattgccttggaatcagtccagcttccttcggcccttctggcagcttcctgactcccatgaatagcaataggcccttggtccgaaggtatcttcatgcagagataagctgggtgaagaattgcttcaaaagcatttatggtaccacgaccaatgatggcgttgtaggggtattccatgtcaacaatatcaaacacaatttgctcagtccttgtgttattaacaaatccgaaggttaccggcatggtaatcttcccgagtgccacattctgccgcccttcgaagcacaaagaggtgcgtgcatcatgaatcttgcttcggctcttgatctgctgaagctttggaaatataatgcagctgcctgctgtgtacttgaca

SEQ ID NO: 12436 - DNA, 315 bp, Zea mays
ttcttcatttgagagaaagttaccctatagataagagatgatctctattctccagtcctcactataaacaggggatatgttgatgactgctctttcaagaaactcaaccgaaggtgcgtttattgtgttgaaaaatacttccgaaggtaatggcatgccctgtgctgctgacttatctaataaatcagcatattcattgtcaccaccaggaatatttttgacagacaacccttcgaaggaagcctcaatccttcggaccgtgtctaaatatttttcaagcttccgatctctttgcttataacttttgtcatatga

SEQ ID NO: 12437 - DNA, 228 bp, Zea mays
  unsure (1)..(228): unsure at all n locations
catgttagtcttagcaaataagcaagtgtcgagttcatctctatcacaatctaccaagtatagctgaccctctaacactcccttaaatgctattgaatcatcacttcttctaaaagacagaacacctacatcagtgaatagacagttatagcccatttgacataattgagaaacggaaagcaaattgtgatctaaagaatctacaaganaaacattggaaatagaatg

SEQ ID NO: 12438 - DNA, 141 bp, Zea mays
caagaaatgaagcctgcacagagtatgagtatttcgtcctggagggctggtgatcatgtcgatgcccttccaatccgagattgtgaatcctagtcaaaaatacacacaggacctgagaaatggcagattaacatctaaaga

SEQ ID NO: 12439 - DNA, 265 bp, Zea mays
  unsure (1)..(265): unsure at all n locations
gcgtgccgaaggtgcgcccactgcctgaggaggccctctggcgagacgtaacattgtcccggactacagtttccgcccgaggctgggctcgggcgagacgatattgtgccccttgtgtagacgaagccttgacctgaatcgcaccaatcagtcttcgcggtttgtgctgatgggtggtaccagccgtgtttaagagtgttgggggtacctgagagcatctagagggggggtgaatangtgatcctgtaaaacttaaaacttaaca

SEQ ID NO: 12440 - DNA, 169 bp, Zea mays
cttatccaccgcgcctatagccgggcaatgtggcaagatcaccggtgtcgccgtggtacgccgacgaccccaaatgtgccacatcgtagtcctttaccatgctatagtaattgtggcgcatctggatttaccggctcaagagctattgccccggcaatcgccacgactg

SEQ ID NO: 12441 - DNA, 317 bp, Zea mays
  unsure (1)..(317): unsure at all n locations
acaatttcgcttaccgcaaagatatgaaagctccggtggctatctatcgcaccaagtggccaaccggttggaaaaacgagtggttctatgttaacgccgatgaacagaagagggagaagctaaagacgctagtactgagcctgctgagcttacacttngggttgactaggcccctatgccgcatgtcgtcggagtcaccgtgccaacaagctgntgcagaattctgggtgtagccgagctgatcagcaccacagatctagtccaagaatatctggcctataaggtgttcccgactctaattgaatggaatatgccga

SEQ ID NO: 12442 - DNA, 383 bp, Zea mays
  unsure (1)..(383): unsure at all n locations
atccttaatcacctgngctgcagcttgacttacaccaaaccgacccgcatcatatacattaatggttaacatagggaaggcaagtaccaactggacaataatttgtatggtcaatcggatgtgttactggatgtgtcctatgagctgaatatctgctagaacaggaattgattaatgtgctatgaacaatatttttatccctataaaatattgttcctgccctgagttgtcggatgatgtgtaactacaagtaaactggacacaaatatggataatgaaggaatgttgttcacaaactgagaataatattgttcatttgtgcaccctggatcaggatgcttgatcatcaaatatgcacatcttgctctgtgtatacatttgag

SEQ ID NO: 12443 - DNA, 130 bp, Zea mays
aacatacaaactggccaacgatcaagacgatgtctaccgcatcgctcggaacatgcaacagctacgtctcttctacccttaagatgattcaagactattcatgtaccgcgagcttgtacatatatacata

SEQ ID NO: 12444 - DNA, 261 bp, Zea mays
  unsure (1)..(261): unsure at all n locations
acatgtgctaagcggcgatgccatctttatcccatgctagtcttagcaattaagcatgcatctataccggcctcctcttttgccaaacaactaagtaaagtttgccatctaatacacccttaaaagctaatgaaccatcacttcttctaaagacagacacgtctacatttgtgaatagacaattggatcccatattgcataattgctaacagataacanattatatccaagagattcaactgaaaacacattagatataga

SEQ ID NO: 12445 - DNA, 276 bp, Zea mays
ctacattcacttcaagtgtttagaccggatttttgattcgtaagttactagcacaatgttataatcatatcaacaaggacatactgaggatgaagcttacttgatatatattgggtatatcaaggcctccaatggatatagtatatactatatgtcaagtggtggtagatatactgtatactgtgttagattgaatttctttataatttggcgattgagccaagttttactgaactacttgctcgttgtaggtatgcttattctcagatatgatct

SEQ ID NO: 12446 - DNA, 443 bp, Zea mays
  unsure (1)..(443): unsure at all n locations
agcttggtgtcttagcaacaagataaggttatgatataggatcaggctcttgtgtggagaagctcccgagagattaatactttcaagatgggaagtacatcacaacatggtaaaggtacaaaaggaagtattgatattntgcgtaaatgtatcctaatatctctggtgcatatgtttaatgaataagggggagttttgatagtgtggttttcctccttaacaccctgttgtcccttgacatcatcctatgntcttgcttgagtatggnttttggtggttgatgtcaaagggggagaagtcgtgcattaaagcttatctcaacctgagaggaaagcttaccctaaggggtgatgtgttagtttgagcattgntagtgtgttattgataattcttatcatatacttcttggcagattatatgtcgtgcatcatatggactaatac

SEQ ID NO: 12447 - DNA, 353 bp, Zea mays
  unsure (1)..(353): unsure at all n locations
acaatttgtgtttgaatcccaacaactataaaagtctctgtcaagtacagtatcagaaaaaatgacttatgtacatgtcgctccctagatcctgacagaccgcgattcactaaaaaaccaacaaaactttgttaggttaatatatgtacacactcacaatgacagataggccacgccctatggtggacaatcgccatgactttgcaagtccacggtagaattacacaagttctgcacacttncatcagttataatggtgaatagtctgtgccttaagagcagacaatctaacatagactttctaagntcatgacttcattgcacaagttatgttcactttccctagatataac

SEQ ID NO: 12448 - DNA, 243 bp, Zea mays
ctgtccagctcaataagtcgtgacggcggtcaagcgacctgagctctgttgcgccagtcctgccaggcttttttctggcctcctgttttttcagtgtaacacagcctcagtacgtcagcttgtcgtggtcggtgactctacgcttttgcacgatttgccccccagtcgtcgtgactctgtcgactctcatcggcaggcgttaacatcactaggccgtgttcttccgggcattctgtcttatga

SEQ ID NO: 12449 - DNA, 186 bp, Zea mays
gcaagcttctaagggagaacacgtgatagggttgactaacgtgcaattcgaataggatagaccttgtgcagcttgtcaagcaggtaaacaagtgggaggagcgcatcacagcaagaatgtgatgaccacttcaagacccctggagctgctgcatatggatctcttcggacccgtcgcctatctgag

SEQ ID NO: 12450 - DNA, 258 bp, Zea mays
  unsure (1)..(258): unsure at all n locations
gcttcttcacaaccatcatcaagtggaatgatgtcaaaggatattgaacaagatgcttctgttcctggtgaacttgggcttatagatataatggcagcaccagttaacttatttgcaagatacaaattcagaactatccgtgcaacgtgcttgtctttgntgaactactcagaggtatggatttcttcagtttaaattgaccagtggatcatgaaaccttttcttcctatcttaattgccaacaattggtatgttttt

SEQ ID NO: 12451 - DNA, 262 bp, Zea mays
  unsure (1)..(262): unsure at all n locations
atgcaagcttgagacgaggcattgcctcaccggagaggtggtttcaccctcgccggactntggtcttccgccgccgcgcgtggaccgagctaaccagtgagtcttcttccaattccttgcacccacatcnttncctagcantcccgtgaaagctctctgacccattcaattgatctatcgcgccgtgagtaggccgaattcctcgccgccgatgagcatctcncgctgcacacgtggaccggccgacttcgaccattcccga

SEQ ID NO: 12452 - DNA, 439 bp, Zea mays
  unsure (1)..(439): unsure at all n locations
gtagtgatgtctccacttacttgatgctaacaagacattttcttcaccaaagccatcttcaacatttcgcccataaaaaagatcaattctctttttcaattgtttgtctgcaagacangtgataatttcaataagtaacatgatatgttaaccacaagtgtctgtctgcaagagaagtatctcgtgttcacctattgataacaggtatgagactgcctaattgcacacataatatttatccctttatagactggtggttgtctaaaccctccttcctctccctctcttttctaaagatacaatctgagacttacttgtcaatgcgctaacagcaaaagcaatatcctcctttcctaagaattggatttgtaacaaccagcatccacgtgtctccattcaattgagatttgcttgtaccaaatgctgcccacaaaacaaa

SEQ ID NO: 12453 - DNA, 408 bp, Zea mays
  unsure (1)..(408): unsure at all n locations
agcttaaacatttatgagggatcgtcctacttataacatcgcacgcatagacatatatgcaatataaacaagtagaacaataagaatggcattcacacaacagttgtgattcggtatggcttgctgtcacatggtgatccccatctccaataatctgtccatcacgatgatctccatctccatgatatagatatgccatccttcangtgatgagtccttcaagacctatctaacgtatgcttggtaacaaattacatatacgctntggatcatcacatgttgacacgcaggtcattacattnatatttgacantacatgtggctcagccgtattgccctggcacgacacgccgtcatgaataattattaacatgcatcatatacacaataccataccgacacatgtct

SEQ ID NO: 12454 - DNA, 207 bp, Zea mays
  unsure (1)..(207): unsure at all n locations
gcacgagggtcagactgctataaaaagacctncaagccaccacggattatggtttagcacggtggcgggtccctcgggcaagcgagcggtggcagcggtttccttgggcgtgcgagcggcggtgatcccaggggctagcggacgaccggcggcaacgctcctatggcgagcgggcaagcaccgacggcgcttccgaaccggacgagc

SEQ ID NO: 12455 - DNA, 274 bp, Zea mays
  unsure (1)..(274): unsure at all n locations
tgcaagcttctatagggagagcacattntatgattaacaaatgttcactttgagaaagacaggatttgtagcgcatgccaagcacggaagcaagttggtgttcatcatccacacaagaacatcatgatgactgacaggccactggagctcctacacatggacctattcggcccgatagcttacataagcatcggcgggagaaagtactggctagttattatggatgattattctcgcttcacttgggtgttctttttgcaagaaaaatctcata

SEQ ID NO: 12456 - DNA, 131 bp, Zea mays
  unsure (1)..(131): unsure at all n locations
agtcaaatggactcgttgaaagagctaatggcgttataatgacacgaataatgaagntaatcttcaatcaacccacgggaaaatggccagatcagtttaccaaagtggtgtggagccacaacacaacaaca

SEQ ID NO: 12457 - DNA, 468 bp, Zea mays
  unsure (1)..(468): unsure at all n locations
acattgtctccttntggaagccaatgccatctntaatgcctgagcgtctcccactataaagcatactacgagcaaatttaaatttctcattttctaattcatgctcgacaattttagcatctaattttgctatatgatcatttttgcgnttaatcatagcaatgtgatcatggatagcatcaactntaacatctctacatctagtgcanatagagacatgactaacggtagatgtagaggggttgcaagcatttaattcatcantcttagcattgtacatgacgtttcatttctaagattgaaaacattcattgcaaacattaaatttttagccttaaatatcaattttcatttctatcttaggctatgcattgatcattcacttgcaatctagcantaaatagcatatcattttaagttgacagagaatcatacatcattattctcacctaacatcatttacatcta

SEQ ID NO: 12458 - DNA, 239 bp, Zea mays
tcactggatggttacagttaagaaatcggataatcggtggtataccaccagccaagaacttgactgatgtcagggtggggttcacttaaaatcttgactgatggatcacacatccattctaaagacatgtccaaaatggattctcagcaaacaccactgcgattacaaagtgatgtcctaccgtaacatcgaagtactgccttatctgataaagatttccaaacatcaattgcactgct

SEQ ID NO: 12459 - DNA, 186 bp, Zea mays
  unsure (1)..(186): unsure at all n locations
gcttggcgccgatggagaaacaaanatccctggaatcttggctgtcgaactgcttgctcttgtctactgttagctcggacggtactccgagacggcaaacgatgttctgccagaagaanttttgggcacgctttgatgtgattgtggaaacagccctcgcttcaatccatttggtgaagtattcca

SEQ ID NO: 12460 - DNA, 301 bp, Zea mays
acgtgaagagtgcctttctaaatggaccaatcaatgaagaggtctatgttgagcaacctcccggctctgaagacagtgagtatcctaaccatgtgtataggctctctaaggcgctttatgggctcaagcaagccccaagagcatggtatgaatgccttagagatttccttattgctaatggcttcaaagtcggcaaagccgatcctactttattcaccaaaacacttgataatgatttgtttgtatgccaaatttatggtgatgatattatatttgggtctactaaacaatctacatgtga

SEQ ID NO: 12461 - DNA, 268 bp, Zea mays
ctcacaacgccaaattgtaggacctgtagcactcctggaacatcgacaaccttcgcatatttttttgttgacccacttatggctcgattcgcccttgtaattcgcaaaaacaatcttgtaccggcccgcactctctttcctcccgggggtgaggtttttaacgaggcggagccatgtaatatatgtgagaaaaattccccgcaaagacatgtgtcgaaaaaagaccgcgacaacggtcttcggcattcgaccaattcaaagtcaccgc

SEQ ID NO: 12462 - DNA, 283 bp, Zea mays
  unsure (1)..(283): unsure at all n locations
gagttacctgcggctgcagcttgataacaataatataatcaagttgatagcacgatctcaattgtgtcatgcatatatattggcagncaagaaatgacagtgcaaaaagtgagatcaaaagcgctacgggtttgtgtgtgtgtctcacatgccacagtatgccacaagtaagaatagattagtttgatcgatttaggcatgtatttggttcatacccatgtgtatagcaagaatttgctcttgctgcggtggttccactcatcaataactttgtaaatatgat

SEQ ID NO: 12463 - DNA, 269 bp, Zea mays
  unsure (1)..(269): unsure at all n locations
agcttggaggcgtctanttggtgtcgacttggtgtaaactcctccttcttttcttccgtcgccttgaatgcaacgggttgagcttctgatgtgtcgccaagctcgttgattttcctcgagccttctatcatgcactcaaaacttacaaaatgcccgataacttcctcgggggtcattttagtatatctaggattaccacgaatcaattgaacttgagtgggattaagaaaaatgagagatcttaanataacatttaccacttcgtgatc

SEQ ID NO: 12464 - DNA, 336 bp, Zea mays
cttaagtcactgagctgcagcttgcctttcaatacacatctttgtcgctaacctgtttttttaaacctttgagggctcattcactggcagccttatgctaccattaaatgcttggaatcgctaagggggagtgaaggcaatctaaattataggttagccaatacaccgggtacgtaaaataacagtcgaagaaggcaacaatcagcaatagcgataccagattgttaccagttgttctgaactatccgtgagggacaaacgtgactttttatcacgacacaccccagacacacatggcttgctatcatgatgaacaaaagaaaaacatcaccaact

SEQ ID NO: 12465 - DNA, 307 bp, Zea mays
  unsure (1)..(307): unsure at all n locations
gcagcttgcttngcatggacctggtcgctcactctgtgtcncaaggttgttttacaaggacttggtcacccgttctgtctcgcaagcttgctcggcaaggacttggttgctcgcttcgcctcgcgaggtgctcggcacagacctggttgatggtccgcttaaagagttccatgggctttcttcggctccttgttcctangtgactgacagcaaggtatccttaagatatgtttgacctctcaagacgtatgctacatgtagcctatgctcttgtgtatcagattatggtttgggaattcatattata

SEQ ID NO: 12466 - DNA, 241 bp, Zea mays
agcacaacagcgcaatagttgttaatgctatggttacttcacacctacccgtctgtgtatatagtgctgcaggtgggaacgtgaatctgcaagccgctcgcacccgctttacagtcgcccgcactcactgaacggtggaccatagtgcccaagaaagtgaatcaccagatcgcgcgtacccgttgtatggtgggaccacctttcactcgggatatttaaatcggttctcgacaacgagcta

SEQ ID NO: 12467 - DNA, 305 bp, Zea mays
  unsure (1)..(305): unsure at all n locations
gcttcgcatctctgaactaattcggctgcatcgntcttcgccgncggtcaatagaattctgacctgaannaccttccgactagtgttctggatgctgcatgtatcccacattggccttgcatggacttctncagaagttgtttcccggtggacgagagaacgcacttcatgaggatgcctgatgcgcaccctctgtacagttccctcccaatgagtgtatagtgagccgactgcctggcantgcgctctgccgagttctttgcatctgggtcttcttcatttcttatatacttaataatccggct

SEQ ID NO: 12468 - DNA, 252 bp, Zea mays
  unsure (1)..(252): unsure at all n locations
ttattggatcctgaataacagtgctatagactcatgagctccaaagtagcttctgcattcacaagggagtctatccttggcaagggaactcatcctttggacatgccttgttaagatccgtaaaatcaatgcacattctccactttccattggccttcttcaccatcacacgattagctagccactctggatatgtcacctctctaatcactccggcactcangagccttttaacttcgtttcttgcacctt

SEQ ID NO: 12469 - DNA, 251 bp, Zea mays
  unsure (1)..(251): unsure at all n locations
gcttgtatgttctctactgataacattactgaaatggagtaaaaagtttcaaggacaccttaagtacaattgctagattatatcccccaagtgcaaaattactaaaggtcggtttgtggntaatgtcacttgcttttctttgaagttggtgctgagaaactgtttaaaaaactcttatttgaaaaattagactaagtttagacaaaaggtatatcacgccatggcattggatttacctaagtgggctatca

SEQ ID NO: 12470 - DNA, 320 bp, Zea mays
  unsure (1)..(320): unsure at all n locations
ctgcagcttcgaatacaaccgctaaagaaagaccttatcctaaagttggtcctgtgaatccctatggggcatattgtattcctcacatgctggctcgcgctataaatagagaacaggattcctttactattgaggcattcctgtatttgcaatcgcatcattcgggaatcaatctttgtcaaggcagaggtataactgtgttcaatgattaaatacactaagtatatataatatgggtcggttatgattcatttaccctntgaattctatattttatggtatcctggacaatctattaaaattcaattacgaagatttaa

SEQ ID NO: 12471 - DNA, 180 bp, Zea mays
  unsure (1)..(180): unsure at all n locations
agcttcttcaaagctggacttcngntcccattgagcatatttgtggttttagttctaagacttatcagatttttcttcaccagatcactcccagaacagttattagaatggggatctttgtctgggttgtgaggagtcaaggtctatagcccagtgccagatgtttctgcagtatgcatg

SEQ ID NO: 12472 - DNA, 385 bp, Zea mays
  unsure (1)..(385): unsure at all n locations
agctngtaagtgtatgcattattatgcctactgagcatctncaagagttttcataaactaatcctgatcttgagttgttttggtaagaatgaaaataactgctctcaactcccaatcttgggaaaatggattcaattcaacgtgtacgtggatgtgggaagggaataagcangacagggttcccaatgccaaatgtaagagagaaaggaagtacaaaagcgtgatgatgtttaccttttccaatngcatgccattgagcaattaaagcagccggnggtatctaattagagctgaccctctcccacttgaacacattaatcatccttttttggtggtctgctaggaaggcatttgatatgtgtacaaccagcgcatgcctttacat

SEQ ID NO: 12473 - DNA, 463 bp, Zea mays
  unsure (1)..(463): unsure at all n locations
gcttctnctggacaagtgctgcactcgccgctgagtgcgaagctgtcacatataataacaaaggagcccctggcgtaagtggagttagtgttgttagatctatcaaatactgtttcagctcttcaaaggccttctgctggattggtccccattgaaagacttcggctgacttcagcacttcgaagaatggtaagcttctttctgctgatctggatatgaatctattgagagatgccaaccttcctgtcaatctttgagctccttnttttgtagttggtggcttcattccgngtatagcttcaatttacttggatancttcaancccttttgtgaaccaagcatcaagagattctcttctttactccaaaacattttttggatcactttaaccagctgctaaactgcgaagtctctgcaataacatatgatctcctgtctgctttacatgatgctcactagtac

SEQ ID NO: 12474 - DNA, 108 bp, Zea mays
  unsure (1)..(108): unsure at all n locations
agcttgtggaacattgaacattatctcatattctcattcaatgtctattatgctatcactctgtactataatcgcactctgagntagcatccactatctgcatggatc

SEQ ID NO: 12475 - DNA, 133 bp, Zea mays
taatctgtccatcacgatgatctccatctccatgatataggtatgccatcctccacgtgatgagtgctttaagacctatataacgtatgcttgtaaacaaattacatatacgccttggatcatcacatgttga

SEQ ID NO: 12476 - DNA, 460 bp, Zea mays
  unsure (1)..(460): unsure at all n locations
agctttaacgtcgaaccctggacctttgactcagtggaagggcttctctccactgtgtcaggcctgtcctcctcttggtgggctgcaattaaataaaaataattgcagctgactcctatttctatgtttgaagcctcaggagcctgcacgtgaaggggagtgttgaagtataagcctttttcttatgaacttaagtctntttggcccgtaatccattcacatggntaacggatcccgctgcttcgtgttcgggtacgtctgagtgtaatggatcacaacgttaatagctacgggacaatacaatgtctataccgctcatnctgtagtgtatctgatcctcttaagcagcaaaagaaaaaatgtctaacaaacaaccacggcttncgtacagctggtggatacatctgtaccattcattacgcttcactacagagtctaccaacagacgttagtttttggt

SEQ ID NO: 12477 - DNA, 442 bp, Zea mays
  unsure (1)..(442): unsure at all n locations
actggttatatttgctggatcattgtgtgggtttattctaatgtcatgattcttactcgtttgtgcagntatgcacacgtcatctcgtgggcagactattacttatgtcgatgatacgaatatcactaatgatgaccttggatattgccttgtgaagcacgtctgaccagaaatttcttacgccaatcttggtcctcttcgttattctcttggaattgagatcttctccatgtctgatggctttacttgtctaagaaaagacattagnggttctggatgtcctctcttgtgatatttgaacaatgagactgccattggctaatttcattatgggagcctttgtgatctacccatatcgcacatagtcggagtcttttttcttgtggcactcacatatattctcttgattactagcagttattcaactcatcaatccatgagc

SEQ ID NO: 12478 - DNA, 232 bp, Zea mays
  unsure (1)..(232): unsure at all n locations
gcttgtgaacagtacanattcagaagggagaaagcagcttcagcagatcagccgaagcctatgctcttatgtgaagacatagcagagcagaaggtgctgntaggctctcaattatccgaagagcangagaaaaccttgattaggttttgttcaataacaaagatngttttgcatggtcagccaatgatctctgcggagttaatagagatgttattgagcattcgctcaatgt

SEQ ID NO: 12479 - DNA, 277 bp, Zea mays
  unsure (1)..(277): unsure at all n locations
tatttgtcgaaacaacaacatctgccaacacatcaactgctgaccatactagtttcttggnctttcgcatgctggggactggatatgattggacctttcaagaaagctcaaggaggatacactcatatattggtagcaatcgacatattcacttaatggatagagttcaagtcaaatgcttctttaacctctgctaaggccgtggaattcatacaagacataatattcagattcgggataccaaacagcatcataactgacttaagaatcaacttca

SEQ ID NO: 12480 - DNA, 253 bp, Zea mays
catgggctagtcggcggtgctagagcccacccatgttagtcttagcaattaagcaagtggtgagttcagctctattaaaatcaactaagtatagctgaccccataacactcccttaaatgctactgaatcatcacttcttctgaagacagtaacacctaaatctggtaaaagacaagtggagcctattttacacaattgaaaaacgggaagccaattgtagtctaaagaatctaccagaaaaacattggaaat

SEQ ID NO: 12481 - DNA, 378 bp, Zea mays
  unsure (1)..(378): unsure at all n locations
ttcaagcatataagtttccggatgagaagtggccacccatagtttgttgatgaagcactagaagaccaatcaaggaagtgatctatggataagtctgtatgaggaagggttgcgtgttggcatcgatgcttcttaaataagctagctgccaagcaaaagctaaaagcctgaagatgaccttgagtagccagaatcagcgtttgcaatcggtaaccggacgctcctcaaatgctagatcttgttgaagttccatctcctcgaagagtctacanagtgaagatatgtagttgaagtaaagctatacccataacccttctaagccgaatctcgaggacgagattcattntaagtggggtagttctgtagcatcccaaaaaa

SEQ ID NO: 12482 - DNA, 299 bp, Zea mays
  unsure (1)..(299): unsure at all n locations
agcttcanaggcgaagcaagactaccaagcanagagcgtgacacatcatcatatatcatgtcaataatcacatgcatcaccccttttatatgagagatatttttaaagtaaactattttactcactgagcacttgactccactaatcagaagttatacgaggtaactttacataacgagcttcgggaagggtgttttcggaccttcggcacgaggcctcctaatcatattttctgtggtctaagcttcgtaaggaaaacaaactcattccacaagggggctactgtgggggcctatatc

SEQ ID NO: 12483 - DNA, 380 bp, Zea mays
  unsure (1)..(380): unsure at all n locations
gcacttaacttttacataaatacttacccaggtaaacatttatgtttaacgaacgtttgagatgttaaactaggtatgaagcaggggttaatgcatgaacatgccttctcttctttttatacaagatatgccaggaatgtangaagatttatgtacatgtgtaaataagattgaatatttctaccctgtttgacctttacatagagatgctcttcttcattgtgctctggccttagacttattgaattcgcctaagacttatactcaagacaatgtattaaaatatcttgcacaaagagagttctacaacaagtgatccttttctaagtcatgtcattatatattaagtagatcacaacattgatanatatatcatgaat

SEQ ID NO: 12484 - DNA, 202 bp, Zea mays
atgttagtcttagcaaataagcaagtgtcgagttcagctctatcaaaatctaccaagtatagctgaccctctaaccactccttaaatgctattgaatcatcacttcttctaaagacagtgacacctacatcagtgaatagacagttgtagcccatttgacataattgggatacggaaagcaaattgtaatctaaagaatcta

SEQ ID NO: 12485 - DNA, 239 bp, Zea mays
agaacacatgatacgtctgactaacgcgcacttctagacagatataccttgtgcaccttgtcaagcatgtgaacaagtgggacgagcgatcacagctcgaatgtgatgaccacttcaagacccctggagctgctgcatatggagctcttccgacccgccgcctatctgagcatatgagggagcaagcatgggctaattattgctgatgaatctttccgcctcactcgggtgtacttttt

SEQ ID NO: 12486 - DNA, 460 bp, Zea mays
  unsure (1)..(460): unsure at all n locations
gacctctaatcacctgcngctgcagcttagtataagcaagttcatccattatactctacagtttgtgtgtgacgttagcaaatccttgattttataaaacaaggctcaaagcagccctattcactggttttggactctggcatatgagaggtatagagtggtttttttgcaaataagcccacacctcatcttttgacttggaaatcctcaaatgtgtgaaccatatgatttgacgtgccctaataccttggttcttgcacttgngtccaaaagtgtgcagaattacacataaccnctatggtttcactcanaggtttccaggggtctctaaggggttttgcactttangnngttggtgtacccaagtccatatgtatatatcttatgatcatatctcatgaagttntaagctttctcataggtggggcttattatcactcataagcctagttntgggtga

SEQ ID NO: 12487 - DNA, 178 bp, Zea mays
attgtagcgcatgtcaagcagggaagcaagctggtgtccatcatccacacaagaacattatgacgaccgacatgccgcttgaactactccacatggatctattcggcccgatagcttacataagcacccgcgggagtaagtattgccttgtaattgtggatgattattctcgcttcac

SEQ ID NO: 12488 - DNA, 108 bp, Zea mays
ctctctctcgagcattttctaaccgggttcccttaagaatatatccttcttcacgtggagaagctagcatgtttgaaacctctcgggaggaagaatatgccttccacg

SEQ ID NO: 12489 - DNA, 190 bp, Zea mays
gctttgggacacacttgaagttcagctcagcttaccacccgcagacagatggtctaatatatataaccaatcagattctggaggatatgttgagggcttgtgctttgcaagacaagatatgttgggacaagagataaccatatgcagaattctcttacaacaaccactaccaagccaggctgaagatgtc

SEQ ID NO: 12490 - DNA, 302 bp, Zea mays
  unsure (1)..(302): unsure at all n locations
gcttatcagcaacataagcatanaagagaanaggctgcttccgcagatcaaccaaagtctatgcttttgtgtgaagatatagatgagcaaaatgtgttggtgggatctcaactatctgatgaacaagagaagaccttgcttagattttttgttaacaacaaagatagttttgcttggacagctaatgatctctatggtgtcaatagagatattatngagcactcactaaatgtggatccgtcattacaccaaaatcatacatttcctacgggtttttaactttctacaactttataacaaac

SEQ ID NO: 12491 - DNA, 479 bp, Zea mays
  unsure (1)..(479): unsure at all n locations
taagttacctgctgcatgcaagcttctaagcgtttctttctcggctgatccncaaagatatctttnctgttattactgaatctacggccgccattactgaattttgtcgcgctgagttcttgagctggaggaattcctgccaagaatctcgacgcttcatagtaactcactgcattatgagcgggtaggacatttctgtaaactnttctctcacttttactccactattacctattggctgctctgattgtgactgctgngtgtgtatgcttgagttttgtcatgaaaatccctttactgaatttctgagtttgcatattaaaccgaaggttaactttagtcattgcattgcatactagatattctgttcaaattgaccgcgtataatacgactgctaataatagactaacactatatctgcaaactgatcaaattgctgctcngcgctgaattgaatcagacctactatgcctctgtg

SEQ ID NO: 12492 - DNA, 134 bp, Zea mays
ctaccgtggccatggtcaccaaagacactgtcatgagaggtgttgtcatgatccaagaagatggcaaaagtagtgtgttgcatctgtaatatggccatgtgttgaagttgtacacatctatgtgcacgaacatg

SEQ ID NO: 12493 - DNA, 437 bp, Zea mays
  unsure (1)..(437): unsure at all n locations
aagagcacaatctctacttattattttcatgaaatagcttaaaagagattgctttagtaacacaagcaatagtttcctatttagcaacctttagtatatgaatggcaagaaggttactaaaataaggaaacctcatgatatgaactaaattacccttatcagcatcatgcataacatcaatttgaaaaagatgaacgtagcatgattatttaattaagtttatagggcaactctaattcataacatggtgagtgattaatggagaagactcacaaccaatttaaccagaatgaatacatcacatagtattggtttgatcctttntgaatgttaatgngacacttcatttgggaaacacattctcatgttgtgagactacatanacacttagatagaaacattagtctcacaactctagtcatatagagaaatcccca

SEQ ID NO: 12494 - DNA, 350 bp, Zea mays
  unsure (1)..(350): unsure at all n locations
acccgcattcatatcacattttatggcttaacaatagtggtaaggtcaaggtaaccaaactggtacgacattaatttgctattgggtcatatcgngatagttgtgactgtgatgttgtgcctatggatgcttgtaatattctgctaggtagaccatggcaatttgattcagattgtatgcatcatggtagatcaaatcaatattctctcatacaccatgataagaaaattattttgctttccatgtcccctgaggctattgtgcgtgatgatgtttgctaagctaccaaagctanaactgagaacaacaagaatattaaagttgttggaataacaaagatgggataaaat

SEQ ID NO: 12495 - DNA, 641 bp, Zea mays
cttaatgagggtctgatccataagaaaagtacaattagggaattcccatgacatattgtaaaagataaatttccaaatgtttttattgcttcgaaaatttcatggtgaacaatagttacacaagtataaatctccgtactcgacatatactaaggcatttcattactcgtatgaaactaattctttttaataataaggactacaaaaatgaattatactgcatatctaagatatgcatccatgttgataaaagataatgcaggcactgaattattgaaatgagcactaaaacaacaaatttgagcaaaatgtttataaaacaagagcttcaaaatacctagcgatcattgttccttctccatctcctgtaaaaaattctaatagaagtgatacatccacacatccttttataatatgaactctttgaatgccaccctgacatttcgaaggaacaaatagatagtcacctaacaaatacagactttaagcaaatgtactaccacacatctcacaattctatccaactcagtcatgagaatgagatgatacaaagaacagaaaagaggtcgtggtggtggcattgcttaccaggaagttatggtggtggctttcactgcgcgtccggtactcctacacttgcg

SEQ ID NO: 12496 - DNA, 525 bp, Zea mays
  unsure (1)..(525): unsure at all n locations
agcttgagcgatcactggcttcatctgaaatccctgaaagctagngacttacatatccttcaacttctgccatgatgtgattgttcctggcctgagagaagaataccaagtttgagcaacacttctgactgccatgatgaaggattttgccatggcagctgtgttcccaccatatgatgatatggtcgcttcgtaactcatcagaaactgctttgggtctgagtgaccatcgtacatgggtaactgaggtgtcttgtatgatggtggccatgggacagcctgcaaatctgtagctagaggggaagcgtcatcaaaagcaatgttatcatgataaaaatcatcataccacatgtcatcatggttggggccctcttggcgaaggtctctttgttgtggtttgtacccttgctaagtctcttgcgcaacatgtcgatttcctcagctgcttcatcaatcttcttctagagctcacccaaccgaagcatcttttcccttcttttttcaacctattgatgaatagcttct

SEQ ID NO: 12497 - DNA, 620 bp, Zea mays
agcttacacagtaacacgagtgtcattattagcaagtctgcaatcatggtccgagataactcttttgcacaaagcgggcgaaagaaaaagctcaactctgtaagcgctagccggacatgcgcagggacataggcctcgaaccatcgcaggaacaatttgctcaaacaggatgtggaagacatgactcttcatccctaaaactcacagagtagataagttcacccccctactcagggtagcttcatacccatcatggaacatcaacatcttgagcaattgaagaacttccttcctctgggccctggttaggacgaaatcggccttaggccttctccatgtctttccaccactaagcggcttcatcgatggggttgggctaacacataaacgcggcagaaccactcttgcttttaagtaatcatttgacctatcaggagagtccataattgggggccaaagaggcccggcgactttcttttcattgggcatcacatcaatgttgggtgggaggagcaagaaggcaaaatagcggagctaaagcaggggtggaccaaggggccacagaagaagctcaccaaatcccacaaaaccaacttatggaataaccacgaagcccatct

SEQ ID NO: 12498 - DNA, 399 bp, Zea mays
tgcaagcttaaagtagaatttaaattctaaaaggaattcaagaatttagaatttttaagaagaagaaaaatattatatgagtgaaaatgagcaaataccacactagtattttcaaggtgaataattaatctaaggacaaattcaccttaagcttgaaattcaaatggggattcgaaattaagaaaattaagagagaaaggaaaagagaaagttaaaaaaaagaaatgaataaaaaccctaactgggccttaacacaccattttagcccattcgcctaaaaaacccgcacaagccaccccggaactttgcgccgacagctgggtcccgcgcgttagccaataccactctggtgcgctctctcaaagccttgtgcgagtctttttcctgcgggcccccctg

SEQ ID NO: 12499 - DNA, 542 bp, Zea mays
agcttgcatcatgctccctagaatcaaaaagtcatttctatgtagcacccaaaattagctacaagtggtgagcagttacaactcccaaaaacgaaaactattcagagagcaccttaccttgctggcatttcaactagtagttggtgaaaacatgcgcctccctcccttcgccactggtaggcccatccccacccgcgggaacctcagccgccaccccaaagggctcgcctcgctgtggcaagagaagaagggcgcctgctctaaaggcctcgcagttcgggctgaccatgacaaggggcaacgtcctggccatgccgacgtgccgcgaacaagtgctgatgcatcgggactaaacagaaatttggttaagaggtgcttttgtaaagatatgaaagcaaactatgtattaaggaagggatgtgcctggcaactataaacaaccttagctatggccctgcagaaggacctttggccttgcggaggaagcgcttcttctttacgacgacccagggggcaacaaaacggcccgccggtgaagcgag

SEQ ID NO: 12500 - DNA, 523 bp, Zea mays
ccacccggcgaagcacaagggggcctggcctagagaacttcagggataccctccgagcatgccaaataaaagggtgggcctcatacacattgaggggggccaatgcgtggagcctgggccctgctatgggggcacttggaagaaagcaatactctttatcttctcccaaagctaaaggccttattgaaccccatcttgcatacgctggagggattgcttcgacaacgaacataagcttgaatggggtaaaacccgttgaccttgagacaacagtgttggggttccacaccacctttattaaatcgcctagcaatattcctctgggctgattgaagaatgacttcattatccctgttattatgattccattggctcgctctacctgaccatttgattctggatggctcactgatgcaaagggtatttttgtaccaatttggacacaaaaagctttgaacggttcgacatcaaattgaagaatgttatcaaccgcgaagggctacggcacacctaagcgacaaac

SEQ ID NO: 12501 - DNA, 508 bp, Zea mays
agcctattgcaagcgtggggaaaggaaagacaacgaaactaacgtgaatgtacggctcgagagaaaggcaaagtggaacggagggaaaacagagagaagagcgcggcgacaggcggcagggctgctcggacaagcgtctgggctgaaaacgaggggatcgccaaggcgcacgggccgaaaacggaggctcgggcacgaactcgaaaataagctaaaggcaagcatgtggaaagacaccgaacatacagggtatgtctttggtgaagggcacagcggaacggagggaaaaacgacacggaggcacgcggcgacgggcggcatggctgaacggccttgcagtcgggctgaaaaccaggcggtcgccatgtcgcgcgggccgaaaacaacgggtcggccacggcctccaaaaaaagctaagtccaagcgcgtaaaaagacaccgaagctaatggggaagactgggctgaaacggaaggaaaacgacaccgaagcgcgcggcgaccggcggc

SEQ ID NO: 12502 - DNA, 544 bp, Zea mays
agcttgctacatgccttcttttcttccatagcaggaacttttctggaacactaccccacttaaaaagaatgagggtagatctcttgaatcttggggatttgaactccttgaagtacctcataacaagggtggtatggggccttcttctgctgttgctgcttgagctggctgcggaaggatgactggcacagggttgattttgggagaaccttcttctcatcttctcttcactatcttcttttctcttctcacttttcacttttcactgcctctttctttctctttgctcttcccactggaggagtctatcgatgagtattaccatcatacagaggaggaaaccaaagactacgaaccatgtacaacagtcttcaacccaagaatcaccaagcattgtgatcttaggggcgagggaatgggaaaatggagttgcttgcgatttggcagaggggatttatctggaatgggctttgagcgaattgggagttgaaggagctggtgggggggtttaataagccaccgggggtgctcggcgggggggggg

SEQ ID NO: 12503 - DNA, 474 bp, Zea mays
agcttgtgaagaatcttcaccccaacatgggctagtcggcgaagccaaagccaacccctattagccgtagcaattaagcaaggatcgaggtcagctctattaaaatcaactaaggatagctaaccctctaatactcccttaaatgcgactgaaacaacacttcttctaaagacaggaacacctatatccggaaaaagacagttgtagcccattttacataattgagaaaaagaaagcaaattataatataaagaatctacaagaaaaacattggaaaaggagtgttcaggtgatatagcaattttaccaagtcctttgaccaaaccttgatttccatccccgaatgtgataactcggtggggatctttggttttctcggaggaggagagcaatcttttctcccctgtcatggggtttgtgcatccggtatcaataatccaacttgagcccccggatgcataaacccgcaaaaca

SEQ ID NO: 12504 - DNA, 639 bp, Zea mays
  unsure (1)..(639): unsure at all n locations
agcttcgctgtggtcaaattttttgacagcagaacagtgcaatggcaatgaatgttgtggtaactccacacctacccgtctgtttatatagtgctgcaggtgggaaggtgaatcgccaagtcgcctgcacccgctgagcagtcgctcgcacccgctgaacggtggaccactcggcgcctgacaggtgaattaccagatcgttcgtacccactgcgtggtgggccacctcgcgctccaaatattttaatcgtttctcggcaacgagctcagggaaggtgtttttcggaccttcggctctctgaagcctaggaaactttttcacggatcaagctcgttacaaaaaatgatctagcaccgtgaaggggctactgttgggggtatgcttcgtcgccgaagatcctataaagagaaacaccttcggcagatcctctcaaaagcagtgccgaagctgtaacccatgaagcttcagcatagccacatgtctcaagacgaangagtgaaccgacttaaagatgaaatgaccaatcaacccggggtaatttgtattatgattgtaagcatttgtaaagggcatgaatgtaatttctcacaagttgcgtcctgtgcctataaatagatgaacaggtcccccgtactgtt

SEQ ID NO: 12505 - DNA, 628 bp, Zea mays
  unsure (1)..(628): unsure at all n locations
agctccgcatctctgaactagctcggctgcatcattcttcgccgncggccaataattttctgacctgaaaaccttcccgactaacgatctggatgctgcatgtactccgcactgcccagcatggacttcctccagaagttgcttcccggaggacgggagaacgcacttcatgaggacgcctgacgcgcccctcctgaataatatctccccaatgagtgtatactgagctgattgtctggcaacgcgctctgccgagttcttgtcatctggttcttcttcattctttatatacttaataatcggttgcctccagtcatcagagtctgactcgggttggtctatgatgttgcactcttctatttgatccgtcgagatgctcggctgaaggatttcttgcacgaaaatcccgggcgggacttgagtccgaccggatccgagcttggacagtacatcagccgccgtgttccgatctctttctatatgatgaaactccagaccttcgaatttatcttctagctttcggaaggcggcgcagtatcttcccattgaatcacttgagcagtcccattccttggttatttgactgatgactaccagagaatctccgtacaccatcagtcctttgaca

SEQ ID NO: 12506 - DNA, 658 bp, Zea mays
agcttattcaacgagtttggtgatttttggagttactaaataatttcttaaattccagaggtgtaggtttaagcccttttaaatattacataattccttttttgtactaaaaatcacaaaactatttttattaaatacaatagaaatttaggagcctaacaaaattggtctcatatttttagcattttccaagaattttctatgtatttcctaattctggcagaaaaagaaaaaggaaacatatcaacagtgttgggctcaatctggcccgagatggcccacgacaggcgaaaatgcgcccgcgcgtgcccgcggtgtcaggtttacacagaaggccctgacgatttgaaaaaccagcgaagagtcccccgcactattcatttgagtcactgacaaatgcagatatgccctcctcctttttctttacaacccgcggtccccgacggtgaacggtggcaggccgagctccggcgagcttgtatcgaccagaataggcaacggctagcccttccctttgcttgacaccaaatttaaccctaaccgattgttgggggccttcgtcttccgaaggtcctaaaaacatgatttaacaatgtttctggagtataatacatgaacaggtaccttcgaactcggatcagagccacaatgtgaaaaa

SEQ ID NO: 12507 - DNA, 648 bp, Zea mays
agcttcttggcaacaacctccgcctccaccttcgttacagcaaggacttttatccataagggagccagtatgctccacaccaaaaggacttccgagagcagtccgaagctcgtacagtcaacaagcacccgtgccaagagtcaaagcacatctattgacaaatatcctaccctaatagcaatcttttctatccagttttgttttctgtaataaaggatattgtttaagtttcatataaatactttcgttgattcccacaaggaaaatatatttttctcaggcttaaattgttaaagtttaaagacttgtgataatcaagaggaccttcggactaccgaaaattattcgaaacagcaaaaagtcgttctaaggaacgcagagtaagttgccgaagtcacaaaaaagtcgttccaaagggaacgcagtgtaagttttttgctccaaagtcgttcctaagggaatgcagagcttacagcgaaaagtcaacgctgattccgccaaaagtaaaggcgaagaagctccaaagacgttcttaagggaatgcaaagcttacagcgaaaagtcaacgctgattccgctgaagtaaaaagcgaagaagctcctaagggaggcttataatgaaaaattttgtatgttttgtcacaggaa

SEQ ID NO: 12508 - DNA, 664 bp, Zea mays
gacctcgcagcatgcaagcttaaagatttgcgataacaaggaggaccttcgaattatcaaaaaattctttgaagcaacaaaaagtcgttctaaggaacgcagagtaagtttgccgaagtcgcaaaaagccgttccaaagggagcgcagtgtaagttttttgctccaaagtcgttccaaagggaatgcagagcttacagcgaaaagtcaacgctgataccgcctaagtaaaaggcgaaacgcgaaaagtcaacgcgaataccggtgaaagtaaaaggcgaagaagctcctaagggaagcttatagcgaaaaataaacgctgattccgctgaagtaaaaggcgaaaaagctcctaagggaggcttatagcaaaaagtcaacgctgattcaaaaagatcatgtgttttatcgcaaggatgtgtgtgtatcttcggaacaaacaccaccttacataacataacatcatcgcattattttggattacataagcattatacatcatgctgcatatggaacaagaggcggacacaatatcgatctttaaaagaatgttttgaaaaagggggaaaaatcatgctaagtcacaaaggagaaacactattgatcttcggaagggtaactttggaaaaaattttaaacaagcctggattttattcatcagaacac

SEQ ID NO: 12509 - DNA, 558 bp, Zea mays
agcttgaaccgaggcattgcctcactggagaagcggaatcaccctcttctgacttgaccgcccgccaccgggcgtagaccgagctatccggggagccattcttcaattcctcgcgtctatgtcttccctgacctctagtgaagctcactgatcggtttaatcgaactctaccgccctggataggccggagccctcgtcgccgatgagctcccccgcctgcgcacgtggaccggcctactccgaccatccccggagacgatccgcacatcggcgtgaccgtcaaacctcccctacaccctcaaccacctcaccggagcaatctcgccgccggtaagcccctccgccctttcctccgcagcgggtagtgtttaattgggagaaggacctcgggttaagtttagcaaaaccccatggggttttctgaactgtcagtggcacatttgaatagtgacccaaggactagtctgaaggaaatctgaaaacaatcgccagggaccccgatgcaaagttagtttccatttaactatttcttggtattctttttaatgaacacagaac

SEQ ID NO: 12510 - DNA, 593 bp, Zea mays
  unsure (1)..(593): unsure at all n locations
accacagaaggacgcgaagcaaacaagccanaaaggccgatccaagagagggacgaacaaaagttttgaacaagaggggggggggccaagaaaggagggtgccgccaggaagcctcgaccaagaaagggagcatcggaaacaaactgcagaaaggggggggtaacttaaacaaagacagctaaacgggtaaggacccttgaggcataaggatgggagccgagacaaaaagatgtcacccaacaacaggagacataaaaaagaaaggatcagcaaggagtggcttaccgatctaccttggctacaagcggagaagcaaaagcgcaccaggagactagggaggggcggggactgaatcacgaaggaacaaacgagggataacgatttagcgggagtagaccaacaaaagggtaaaaagaacgactccgggcagggacagcaagggcaaaagaaggcggaatattgtgcggaagaaggcacccagcacaccaacaagtaacggggcgagcaaagctggaaaaggaaaagtcaaaaggaaaaaaccaaacggaagggaaccgaaaccggagaagaggactcaagggccgaaaaaagg

SEQ ID NO: 12511 - DNA, 567 bp, Zea mays
agcttgaagccatggtaagtagcataggcaaggaatattctaattgactcaagtctagctacgggggcatatgtttcaccaaaatccaaaccttcgacttgtgaatagcccttggccacaagtcgggctttgttccctatcaccacaccatgctcatcttgcttgttgcggaaaacccacttggttactacaacattttgattaggacggggaactaaatgccatacctcattcctcgtgaagatggtgagctcctcttgcatcgccagcacccaatccaaatctttaagtgcatcctctaccctatatggctcaatagaggagacaaaagagtaatgttcacaaaaatgagtgaccttgagatcgagtggttacccccttatgaatatcgccgaggaatagtgttcacggggtgatctctttgaatcgcatggtggactcttgggtgtggcggtctttgaccctgttcatcttgtcttgatcattggcatctcccccttgatcattggccttctcttgaagtggctcatcctcttgatcttcattttcatcatcttgagcttgaac

SEQ ID NO: 12512 - DNA, 549 bp, Zea mays
agcttgttcttttttgaataactttatcaacaaacattattattatccttgaattgatctgaacgaacacattgttttaaggatgccatttggtacgagtaatgccatggcacacaaggctgttgatgctgaaatggggctccggactgttcggcatgagattgttatctcaaaaactgctggtgctgcccctcctgcttcagagatgaacgctaatggttgcagaatccattctaaggctttccaagatgtatgtctgcttgccacctttatgctgccttgttttccctcaatttgaagcatgaaacatttggttactcacttctgtgatgtagtagtgaagttttatgggggctttttttttcctttactgaacctgcaaattacttaatcatcaaaccttggccattaatcaaagtttaatattatgggcatgatcctaccgttggcttttgtgaggtcatgttaagaatttgtaacctgcattttgtattctcattccaagatgtgttctaacccattttttgggtgatgcaatgtcttaacaac

SEQ ID NO: 12513 - DNA, 636 bp, Zea mays
atttttaaaaaaaactccccgcctgcaaactttccacgtggcgccaaccggggcaaaccggttgtttcccacttcttttctggcagaccccccacgtcggagtgactagaagcacggcgaaaaggtctgaagggtgaacccaaccactcctccccgggaggaacttacttcaccgaaggaatctccccgccagcgaacacaaatcccaacaacggcgggaatcacggcgtgtgggccatcggcggcgaaagggaaaaaaaggggatcttctgcaggtactgaaccatggtaaaaacctgattcaatcgcctgacagaacatgtttaggccacattatctctaaaacttgcatgtgaacttcatcaaacctctggaccaaagctggagagctaaaagtaatcttcaactttgccacaatgctcaccatcaagtagtcactgaaacctattcaaaatcgagctccaaggtcatcccatcacactggtactctgaaattcagaccccaagccatctggacagccaactttcagctcaattatctccacggttttcttaacaaccatgcccaccaccctaagcaaaggtggtccccctaagaatagggctcaccaatttggagggggggacctaaaaatg

SEQ ID NO: 12514 - DNA, 559 bp, Zea mays
agccccagcacgggggccaaaacaacctgctcgccgcccccagcgggggggcccgcggctagccagcgcgcggcggaccgaaagcgaggacagcacaccggtagcccggcccaaccctgcgcgacgctacccggcccgaagcggggacttagcagcgcgggaaaaaaagccacgcccgagggccccaccaggcgaacgacatccacgggcgagtagtcccggggcgggaccggacggatgcgcggacgactacttccgaagaagaagaagaagtaaccgctctgagaaacaaaccgcaggaacctaagcgtagaaatccatggggccttccgggaggaaggggggcgaccaaagagaccgggacacatcggctaaaaaccgcaaaagattacttaatcaaagaaatgcacaacgaaaatacgttgtgacccgggacagaatgcactaggtccggaaagaaaaagccaatgcgagaggaacaatactgtgcggcaacggggcgtttaaaaaaataaaaaaacaatgggacaaccaataaggaacaaaaaaccaccagcca

SEQ ID NO: 12515 - DNA, 658 bp, Zea mays
agcttagcctcggctggaccaataccagaaaggctggcccgcaatgggtttggaaagatggcgacagtatcatgtatccacctggcaagaagctggatggtggggtactgagctctcggttggcggggacacgttctggtctagagaaacccgtgggcgagttgacatatgcaagggttaagtgctacatatgtcatgtggttggagatccccagctgggtattaatcgattcggatcgccgaacttctcggatatgaagactggatcttcgaccctcatcgtagataacaagtgaaactaaagttaataaaaggaagctagtgtaggacaagcaaatgctctagatcaggcaaatctagattcaggaaaagtacttaatttgtgaagtaaaagtttggcataaggatccactactagtaagcttttctgcaaaaatgagtctttgaaatttgataagctttaccttgattcccgacaaaccagcatacccttgagagtcttttctttagtcgggtaagtcttgctgagtagttgcgtactcagggttttattccctgttgttttcagattataattttgttctgttgtggatggtgctaagtgtcggtgggctcgaccttcttacataagtgtaccccttctatagtttctttaatg

SEQ ID NO: 12516 - DNA, 542 bp, Zea mays
agcttatggactctggaatgaagtcttttattctcatgttaaaccttttattctttcttgcagggcttaatacttaacaacgccctaagggcacaaaagaatgttgaagacgagagctgcactatagctctcaataaccttcgatcagaggttatcaggctgagaaacgaagccacagaaaaaaacaaaattctactttcattggtggataaagtaaaagaagatgaaactagcttcaaatcctaatccgaagcccaaaaaattgagattgaagacctccggaagcaactagccgaagctaaagagaaatgcgcactcgcagaagctaaacgaagaattagcgaatactggacaaatcatttagaaaaaaatgttgaagaacttcgcacatccaaagaaagatgtcttgaaaaatccttggactgtgtgaagaaaataaaaaacagttttgccaacgtgggcgcctattcttccgaaaaaaactttatacaaggcgaccccgaaggcgttattgagtggataagtggggaagcccaaacctt

SEQ ID NO: 12517 - DNA, 645 bp, Zea mays
  unsure (1)..(645): unsure at all n locations
agcttgactggggtggaaagcgatcacgagaaggataagacgatcactatgctacttttctttaaaagcttcggcatgacggcaaaaaagaggaaccgacttaaggatgaaaagtcaaattaaacctcgaaggattgctataaagttattgtcaaatgtaaagggcatcaatgtaattttacacgggctgcgtcccgtgtctataaatagatgaacagtgctcccgtactgttcacgctgacctggcatacgctttttcgcatcacgactgtacctttactttccatcaatctgaaggtacatttggaattcgtttttatgaatttggtaataaaaataagttgatgataatactcgcatcataactcgngttttatatatgtgtgctcttttttaccatctatcaatcttacgaaggtcctttccttcgtaaccttcgtccaagattcattatatccgaagggacataatgtttttaaagacgaanngagttaacatttaacactttttatggtgccttgttcttaaatcttaccatttgaaaacaagtccccaacattggcgcccaccttccgtgaacctaccgtcatttttgagttttgaacaaccttcggaaagcgtaccctcgtcatgccggctaaaaaa

SEQ ID NO: 12518 - DNA, 514 bp, Zea mays
gctttgggcacgcacttgaagttcaactcagcttatctcccgcagacttttggttataccgagagaaccaaccagatcctagaagacatgttgagggcttgtgctttgcaagacaagttaggttggtacaaaaggctaccttatgtaaaattctcctacaacagcagctaccaaaacagtttgaaaatgtcaccggtccaaacactctatgggaggaattatcaaaatccggtgcactaagatcagcccggcgaaaggcatgtgtttggtctagacatttttcttaaagccaaaaagaacatcaggatggttcgagagaatctgaagacaacaccatccaagtaatgaagttgtgatgacactccaagaaaagagctgagttttcaagtgggagattatgtttacctgaaagtggtccccatcagaagaatcaaaagggttaaaatcaaaggcaagctatcacctcgatacattggaccatacccaaattaatcaaaaaatgggaaagttgcat

SEQ ID NO: 12519 - DNA, 568 bp, Zea mays
  unsure (1)..(568): unsure at all n locations
agcttacaacaagaaggtcaaggctaagtcatttcagatttgagaagttttggacacggncncaaatgctatgagtcaaaaacaaggcaacacaaaacattaatggttaaagtccttcgtccctcgaagcattatttcccataagatataaagatcttcagacgaaagatatgaaggacatacattcatcatcacagggcataataatggaagtataagcatgcgaaacatgaaaagtatcatgaataatcatacgatatcatttatatatctttattttattattatcaacgaatatgaacaatattgaattatatttatacctttgacttgatagaaagcggaaattcaagtgtgacgtgcgagtgaataccagtcagcgtgaacagtacagggttactgttcatgtatttataggcacgggacgcagcccggtcgaaattacattcatgccctcaacaaataactataaacatgacacaaactatcatggactgatcggtcttttcctttttaggtcggtgcagcccttcgtctcaaggcatgtcactatgccgaagctccttgg

SEQ ID NO: 12520 - DNA, 650 bp, Zea mays
agcttaatcttccttccattgattcatacatcaagcgttttaaaatattattacaagcaaaaagattcttctttaagaactttttctgcaacttcgttcaaaagcttatcgacgacttcgtcgataatggagtccgctaggcttataattttcaatgcttccttcatttatggctcagctaggggatcatacagctccggaggcggggatagttcagctgaagtaggtaaatagattagttcaaagccacaaagcaagtaccgaagctaagctaaataatcaagaaataatacctatacgcctttcgcgttctgcagcttctttagctcgctttgcttctgctcgggcgtcgtgggtgtctttttcactcttttttataatctcgagggctagctctcgaccaccggtcacccaaacatcgttataaaatttcccacccattaaagttgcttcggctgaaggatccttcgtatcatctatggagaaggcaacttcggcctgggctatggccttaatgtgatcatatccggccttctccaaaatagctgagattcctcgcgcaccgaaaaacgtgcaaatatccccgcgatcactcaaaaattccttgaagggcttggcttctccacttatccattcaacgacgccctcgg

SEQ ID NO: 12521 - DNA, 643 bp, Zea mays
agcttctgaaaactgccacctcattagcttcaggaagatgaacgatattcttccctccggccctcacaatagaaatatcacgaaagtgtctgcctttcatcgcttcgatctgccttgcttaatagatgagtttccaaaaacaacatgactaggcctccacggccgattttcaacttcctcattcccgctctctacatcgaacctctccctatcgctggaattctcaaacaacccaaccaacatctcattggtgattttttctatattggccttctctatagcttcataaaaaccagtcagcgtagggccaatgatcttattctcctcagccatttagatgatggttgcgcagatgccgaagctcaaaagtcaatcgagctcaagaaagcaaagaaactcaaaatggcaaacacagcgcaaccagctagatagcacgaaaaatactcacgacacaggcttctatatatatactcagaaccccacagttcggtgggtcccacaattcaaagtgatttgctattctagcaaaaggaaagtgttttttcagaccttcggctaaaggccttcgttcacgtcacaatctaaatttggtacagagaaacaaatcaatcctgcgaagggctactattgggggcccttcctc

SEQ ID NO: 12522 - DNA, 655 bp, Zea mays
  unsure (1)..(655): unsure at all n locations
agcttaaaatgatatttacaaaccttggggaataattggtatggcttttacaaaggtngaaacctaaaccccaaaaccctaatcttttaatgatgcctgccttatgaaatacgggactcactccaaaaaccttagtttcctggagtaccgtgaagggaaattatatccaacacctaatatgatgtagttttattatctttgcattttcataagcattacatgaacattcatggttatatatatgatttatatagaaaacgaaaaaatttaagttgaagaaggaagaacttcaccaccacctgaagacccacctgccaggaactgcttttattttgaaatttggggagcagaaccccgactcttcctataacacaaggcaaaccccggtgcattttgccacctccttgctattttaaaaaactttctcacttgcttgatgcattangtgataagagttgtgtgctaaacacttactgcatttcctttctttggaagattgattacctttccttgaacaccttattttataaaaagggtttttcttatgcttaagtcttgcctctaaaaaaaacaaaatgttttgttttgaaccaaagaagatgcttcaatgcgaatgggatagttttcaaaaataaaaactagaagggtggatcca

SEQ ID NO: 12523 - DNA, 638 bp, Zea mays
agcttgagtctggtcttcaatagaaaaaaggtgatgctcaaaaggctaataagggcatgaagcatatccaagaaaaaatggaagccaacaaagctacctattttaggaaagatgatcagtgagggttatgggttaaagatcgtatagggatgcctaaggacattgaactccgccaaaagatcttggatgaaactcatctcactcggtattctatccacccagggagtactaagatgtattaggacctgaagcaacattattggcggattaaaatgaagaaagaaattgctcgctatgtagcaaagtgtgatacttatcagcaggtaaaagttgtgcacatgaaaacagctagtcccctatagtcgctgcccatccaacctggaagtgggacgacattagtatggattttattgtctgagtacccaagacatccaaagggtttgactctatatgagttataatggatcggcttacaaagacaactcattttcttccagttaaaggggctccatagtttggcctatgctcaagtgggtgcatatgctcaagagtatattgctcttatcctgagccagcatggggtgccaaaaacgatagtgacggaccgaggaccgcaatttatatccaaaatctgggga

SEQ ID NO: 12524 - DNA, 661 bp, Zea mays
agcttgtgcaaagtcacacttcaaaaggatgaacaagattgagcaatgatacgattaattaatctcgcttagatgaacattattctagttttaaaaaaaaggagcccggccagaatatgcttgacttaggactctaccaagccaaagatcccctgcaagggcctgttgtaaatttagagaaataagtgacatgctttctacatatttaaatagattaaatattctaattccgaataaaacaagcatataactcagacaaatgccatatgtaattatagcagcaatgaacagtagcaattctaagcatgtaaacatgtaaaatagctacacaggtccatttgaaaattaaacatggcttgcagatgaagaaggcagattaaacaaataaacataattgtttatcttaaagtattgctctcaaaatagcgggttgctgcgcaagacagccctccaacgctaaagggtgatcaaagatcctcgactaacgtgacagtcctatcttaccaaaacatggttttagaacaaatattatgagcctagaaatcaagcatgaatattaagatcaaaacagtgtgcataagaattaaggaacaataatgaacttaaataatcagcttgcacaatagtaagaaataactaggcacaaataatatcaatgctg

SEQ ID NO: 12525 - DNA, 659 bp, Zea mays
agctttaccctacagactgatctataagttggttacgttaggtgtgctttatgcagtttgaccatttccagcatttgcataatgaggactctagggaaaagcctcgtagtgagaccctagccagtcacctcggaagtgaatacaggacttgcaaacccgggctagaaaggaatcacgactcatgggtaaagatgtgccacctctgccgagtgtaaaactgatatatcagccgtgctcatggttatgagcagcctggaccctcacatgataattgaacttgaagatggaaatgaatcgtgattggttttgtttaagcggtatgcttaagtggtgcgctcaagaggttgagcttcatgttgatggtatttgctcaaatggtttaaattcatgctgattatgaattatgcttaattgggatcgatatatacttatacctagtaatcaggtgttgatagtaaaatgttgaccaactaaaatgccaatcacattaaactttagccttaccttgttaccttgcattttcccccacttgctgagccccgaccataagtgagctcacccttgcttaaattttgatcagaagtttgcagatgaagttatgatgctgagctccatggatgctagtctagtgatacccccggtcatcttcctgtggatgg

SEQ ID NO: 12526 - DNA, 651 bp, Zea mays
agcttgtggaggttcttcatccccacatgtgctaagcggcgaagccatttccagcccatgcatgtcttagccattaagcatgcatctagaccggcctcttcttttgcaaaatcaactaagtaaagtttgccgtccagtacacccttaaaagctagtgaaccatcacatcttctaaagacagacacatctacatttgtaaataaacaggtatatcccatattacataattgactaacagatagtaaattatatacaagactctccactaaaaacacattagagatagaatgctcatttgatattgcaatcttgcctaaacctttcaccttgccttggttcccatcaccgaatatgattgaatcttgggaatccttattcttgacgtaggaggtgaacatcttcttctcccccgtatatgggttgtgcatctgctgtcgataatccaactggaacccccggatgcataaacctgcaagacaaatttaagcttgggtcttaagacccaactcttggtgggtcctacaaagttaatcacaaattccttaaggaccccaatgccagttttatcgcccttgcattttgcccctaactttcctaacaactaatttttctaacctttctacaaatagcaaaagaaacatttaaagcatg

SEQ ID NO: 12527 - DNA, 410 bp, Zea mays
ggactcaagaacaacagcaggaaggggttggagggacataacggggggccgacggaggggccggtcgcggcggagcggagaaccgattcgggggaaaacccaaattcgggcgaaaagaggtgagctgggcgcgcaacaagcaggaggaaaagggggtgccaccaatccagaagcgccggctaagcctaacacgaaacctggaaggggatcgagggcacagcggccaggataattttacagtggcctgcacaccaaggcgcgcgaaagggaatagggtcaggggtgataaccgggtgctcgccacgaaccttatgacgcggaggaaagaacgctacgtggcacggccggggaaaaggggaactccggtgaagccaacacgactaaccgcgggaggacacgaggccaaaccg

SEQ ID NO: 12528 - DNA, 587 bp, Zea mays
agcttgtccataatagtttaataaaaactctaaaacaagcttctcaagttttggttcaatggggatttctgaaattcagaattctgaatttcagcccttgagctaaagaccgagcgtgttcaccttgatccctaactcaaatccaaatgaccccattgacaaatttgcctaactaatccctctgtaacatcccaaaagatggcattgggacgcgagccctagacacgacaaaacctaggatttgcctcgggctcgggcagggagacagaccagatttcaggactccaaatctttgaaactagtaggaaaaatcctatgacccccacacaagataggtatcgtatagggaggagaagaggttttgtgcactgaccaaggcaagagcaggctcggatcaatggccacacgcgctaaaacttgggcagaatgaacgcgcacacgtgttcgaccctagtcggcacgccggcgttcgcccaacccgcgtgcgccctcgccccagcgttcggtcaagaccgccgggcgcccttaccaatggccgtgcccccccgcgcctataaagccttcccaggcgcgccttaacttaaccc

SEQ ID NO: 12529 - DNA, 594 bp, Zea mays
  unsure (1)..(594): unsure at all n locations
gcacccgcaggcatgcaaactttctttgtcgaaaacaccctaaaaaaaagggcacctttttaatttattgtcgccacatangcaaatcaaggttaatcatcattaagatggaggctcatataaatctaaacaccaagaacctcttgaacattgcgagccataatttgatgcacctcataaagttcatcgctcaattttgcgaagtttctctgagttcttgtatccaaatatagtttcttaatcttatggatgaatgtatctagaacagaaagaggcataagttttaaagtggtaaaatttgaaatgaaaaatgaagcaatgctgtcaagtgaactctggaaccataccaaacttgataaaagcatatggccttgcagcagtttcaatttggttgccattgaccctccatgagacttcaccatccaaaggtaaagatccttttgttttctgcactgtaatacatgaaggaggagctgaggacagtcaaactgtcctctagatgctcaagaactacaccatcatcactagactaaaaccctttgtgatatacccgactctccaacccactaaaccaagaagactgccctacaaata

SEQ ID NO: 12530 - DNA, 630 bp, Zea mays
agcttgccttcgcttcggtctatcatccgcagtccaactgtgtcgtgttatcgtgccaatgggaaaatattcacagctgtcaaaaagatgctcctcgatgaaaaaaggcacatggatcgatttattaccggaggcagtctgggcgctaaacacaactgagtgcagggcgaccgggttcactcctttccgccttctatacggatcggaggcgatgatcccacaagaaataaagcatgggtccccgcgtatagttccgtcagccgtccccgacgtggacgagccaacttcaaaagatctcattgacggagaccgggtcttcgccctacaggccctaagcaaataccaagcccagaccaaagcatggcgcgaccgcgcagtcatcccgagggagttcagcgagggggacctcgtactcgtccgaacatctcggacggagtccaagggcaagttggagcccaagtgggagggccccttcatagtcaagtcaaaagcttcccccagcgcttacaggctcacaacgccaaatggcgaggacctggagcactcctggaacatcgacaacctttgcaaattttttgtttgacccatttaaggctgatttcgcccttggaattcgctgcaaacaatctt

SEQ ID NO: 12531 - DNA, 529 bp, Zea mays
agcttctaaagggagagcacagcttaggacgaacaaatgtttcatgtgagaaagacaggattcgtagatcatgccaagcaggaaagcaagttggcgcccatcatccacacaagaacatcatgacgaccgacaggccgcttgagctacttcacatgggactattcggcccgaatgcgtacataagcatcggcgggagaaagtataggcttggaatagaggaggagaattctcgcttcacttgggagggcgtttggcaggaaaaatctcaaacccaaaagaccttaaaatgattcttgagacgggctcaaaacgagttcggcttaaggagcaagaaaattagaagcgacaacgggacggagttcaagaacactcaaatcgaaggcttccttgaggaggagggcatcaagcatgagatctcttctccctacacgccacaacaaaaaggtggagtagagaggaagaatcgaactccataggacaagggtagaaccatggccgaagagtacaagaactcggaacgggtttgggc

SEQ ID NO: 12532 - DNA, 590 bp, Zea mays
agcttcacacctctggactaactcggctgcatcattttttgctgtcgttcaatagaaaccagacctaaagaccttccccactagagttctggatgctgcgtgtatcccacactgtccgacatggatctcatctaacagttgtttcccagtaaccgaaggaatgcatttcatgaggattcctgttgtgcctcttctgtacagtgcatccccaatgagggtgtagtgggctgactgtcttgcaatgcgttctattgtagctttatcatgcggctcctcttcattctttatatacttaataataggctccctcccgtcattagagtctgactgtggctggttcaaaacattgcactcttctgcccgatctgaggaaatactcgggtgtggcacctcttagatgaaaactccaggtgggacctgagtccgactggatcctcgcttcgataatgcgtctgctgcagcattgcgatctctttccacatgatgaaactccaccccttcaaatttgtcttccaattttcggacggctgtacagtacttgcccatagagtcattccaacaatcccattctttatttatttgacttatga

SEQ ID NO: 12533 - DNA, 498 bp, Zea mays
agcttctccaccatgtcgctgctagccaagaggttgcagctacctccatcaatgatcaaacgacatgaacgctccttaatgacacactttgtttgaaacaacgtatgtcgctgattctgctctgccttctccatttgggcactaagcacacgctgtacaatgaggctctcataatgctctgcatcatctgcaccaatctgttcttcgggtgggtccttagtgcctacatcatcagccgcaagcaaagcaagtgtagcttcatccaaatcactaacagaggaatacccaccatcgtcttttaccaccaaaacacgctgattaggacaataacgctgcacgtgtccatagcccttgcatcgataacaacagaacatctcttgttctacctgtggaagctactgaagaagcactacctgcgggtttctgggcagatttggttgctgaaattggggaagaagcacgtgggttgtcactggaagaaggcgggggtgctggtcg

SEQ ID NO: 12534 - DNA, 601 bp, Zea mays
actgaagactgcacacccctacatggagaacatgtgagaggcctataccagttatttttttaaaaatagaccttgtgcaccttgtgaagcacggaaacaagtgggaagaacgcatcacacccagaaagtgatgaccactatgcgacccctggagctgctgcatatggaacccttccgacccgtcacctatctaagcctagggggaaccaagtaacgtctatgtaaagctgatgacttttcccgctccacttgggcgacctttttgccagataagtctgaaacccaagggaccctcaagcgcttcctcaggaaggctcaaaaagagtttgagctcacagtgaaaaagataaggagcgacaacgggtccgagttcaagaaccttcaaacggaggagttcccttgcaaaaaaagggatcaagcacgagttctccgctccctacacaccacagcaaaatggtgtggtctacaggaagaacaggacgctcatcgacatggccaggaccatgcttggagagttcaagacccccgagtgcttttggacggaaacccagaacactgcttgccaccccatcaacagggtctacctatatcgcctcctcaa

SEQ ID NO: 12535 - DNA, 554 bp, Zea mays
  unsure (1)..(554): unsure at all n locations
caagctttcccatccctccatttatttaccggtatttcattttctctgcacttcgaacaatgatgggtacttttgcaaaaactcccatgatgatgatggtgatgtaataattaaacactctggcatgtatgggtttatgctttattgtatttgctatgtgactcaccttcgagtgagattgtggtacttgatcctgtcagtggccgtgtcggactatatccgagggattgacgggttattcccatttagggcttgttcggttaggccaatccagaggggttttgtacttatntaatattcccccttcacgaggtctagccttttaggcggtggtttaaaaacctatgactcttattctcgactgatgcaacacttcggggcggtgtcttctagatcgacacttgacctgggaactcaatgctactggtcctcgcagatctaaatatcctctgtgccgggttggtcaatacttcctctgaatatacaaccactcctggcaggggtccctggactatttggctgccatgcatgcttttgtacctagatgttgtccg

SEQ ID NO: 12536 - DNA, 655 bp, Zea mays
agcttatgaagattctttatcccaacatgggctagtcagcgatgccagagccaacccatattagtcttagcaattaagcaagcatcaagtttagctctattaaaatcaactaagtatagctgaccctctaatactcccttaaatgctactgaatcatcacttcttctaaagacaataacacctatatccgtaaaaagacagttgtaacccattttacataattgagaaactgaaagcaaattgtaatctaaagagtctacaagaaaaacatttgaaatggaatggtcaggtgatatagcaattttaccaagtcctttgaccaaaccttgatttccatccccgaatgtgatagctctttggggatcatcgtttttctcgtaggaggagaacatcattttctcacctgtcatgtggtttgtgcatccgctatcaattatctaacttgagcccccggatgcataaacctacaaaacaaagttaggccttgttcttaggtacccaaacggtcttgggtcctttcacattggaaacaagcaccttgggtacccaaacacaagtcttggagcccttgtgtttgcccccaacatatttggcaactactttgcctgatttgtttggaagcacatatgaagcatcaaaagttttgaaagaaaca

SEQ ID NO: 12537 - DNA, 632 bp, Zea mays
agctttttagatataaggaacgaactttccagaactgtctagattgtttaaaataagtattccaatgtaatgatttgtgatgttcatgttgttaaaattgaagattcgaatgatgcatctgttgtggtttctgcagtgattacaaatgctggtgttgcttcctgtattacaagcgaagctcccttggttaatatgcatttagaagacgttgcgcctgaaataaaggactcagaattttaataggtcagtgggtaggattccattctgctctgctgggaaggcagtgagtgcttctaacacctcaaatccatcaatttaaaataatacattaatagttatttaaaacctagtagggaataaagtagaaatttgaaacaagtgtttgacctcatttgtctttagagaatgatttttgtttgctcataattgattgatgattttataaaatcccttttatgtgaaacccacttaattaaaataggaactttggtccaaaaataaatatttcaattataaataattcttgtataattattatgattttttgaagtatttaaaaatatatttatttatatttatgggttataaaaaaaattttggaaccccttaccgaaccgaccgatttggcccat

SEQ ID NO: 12538 - DNA, 606 bp, Zea mays
  unsure (1)..(606): unsure at all n locations
agcttgctacaggtcttcttctttttctccataacagaaaccttactggaacactatcccacttaaaaagaatgagggtagaactcttgaatcttggggatttgaactccttgaagtacctcataacaagggtgttacggatccttcttctgctgttgttgcttgagcaggctgcagagagatgactgacatagggttgattccgggagaaccttcttcttatcttctcttcactatcttcttttcactgaccctttctttctctttgctcttcccactggaggattctatcgatgagtattaccatcatacagaggaagaagccaaagactatgaaccatgtgcaacagtcttcaacccaagaatcaccaagcattgtgatcttaggggcgagggagtggcaaatggagttgcttgctatttggcaaaggggatttatctggagtgtgctttgctttgagcggggtgggagttgagggagctagtggnggttttataggcaagcggnggtgctggagcaggtgccacacgtcagcaaacactacaaggggaggggggttgttgccggcgacgatggtgggtaatgggtgcgcctcaaaggggggt

SEQ ID NO: 12539 - DNA, 593 bp, Zea mays
agcttgtgaagattcttcatcccaacatgggctagtcggcggtgccagagccaacctatgttagtcttagcaattaagcaagtgtcgagttcagctctatcaaaatctaccaagtatagctgaccctctaacactcccttaaatgctattgaatcatcacttcttctaaagacagtgacaccaatatcagtaaaaagacagttgtagcccatttgacataattgagatacagagagcaagttgtaatctaaagaatcaacaagaaaaacattggaaatagaatggtcaggagatatagcaattttaccaagacctttgaccaaaccttgatttccatccccgaatgtgatagctcgttggggatcttggtttttctcataggaggagaacattttcttctctcctgtcatgtgggttgtgcacccgctgtcgagtattcaacttgagcccccggatgcataaacctacaaaacaagtttagttcttgactttaggtaccccaatggttttgggtcctttggcattagacacaagaactttgggtacccaaacacaaatcttggaacccctgggcttgccccccaaatatttgg

SEQ ID NO: 12540 - DNA, 644 bp, Zea mays
agcttgccaagccctcggacccggccggacttcaccggaggcccgagatcgacctcaccggacttcggtcttccgccgccgcgcgtggaccgagctatccagtgagtctccgaccaattccttgcgcccacatcttttctggcaacccgtgaagctctctaacccatccaattgctctatctcgccgtgagcaggccggactcctcgccggcgacgagcatccccgtctgcgcacgtggaccgaccaactccggccatcttcgacggcgacccgcacaccgttgggatccccaagacctcccctacgtcctcgaccactttaccagagcaatctcgccgccggtaagcccctccgccctttcttccgccgtgggtactgtttgagttagacgaaggacctcgggttaggatttgtagaacccgaggggttttctgtaacgtcagtgactcatgtgaataatagcctaaagactgatccgtgaagacacttaaaaaacccggccgggaccccagtgcaaagtggatttccatttaatcaattatgttaatctttttttttaatgaccagagaacttaaaaaatccattacttgatgaaatcttaataaaaagttgtcaaactaattttgctaccttctaaatatt

SEQ ID NO: 12541 - DNA, 592 bp, Zea mays
  unsure (1)..(592): unsure at all n locations
agcttgtgaagggtcttcatccccacatgtgctaagcggttatgccacaaccagcccatgctagtcttagctattaagcatgcatctagaccggcctcttcttttgcaaaatcaactaaataaagtttgccgtctaatacacccttaaaagctagtgaaccatcacttcttctaaagacagacacatctacatttgtaaatagacagttatatcccatattgcataattgactaacagatagtaagttatatcccagagactcaactaaaaatacattagaaattgagtgctcatttgagattgcaattttacctaacccttttaccttgccttgattcccatcaccgaatataattgaatcttgggaatccttattcttgacgtaggaggtgaacatcttcttctcccccgtcatatggtttgtgcatccgctgtcgataatccagcttgaacccccggatgcataaacctgcaaggcaaatttaggcttgggttttaagtacccaactcatgttgggtcctacaaggttaacacaaatatccttaaggacccaaatgcangttttgtctcccttgcattttgcccctaac

SEQ ID NO: 12542 - DNA, 647 bp, Zea mays
agcttatgccccattgtcgtgctaagttacaaaaactcattatttcatcatgcaagtatttgaggtgatcatcatctccaagagcttgttttgactctcggtccaagacgaactcatttttttactccctcttgctatctttattcaacaagagaaaacacctaagagagatacagtgcaagcaatggttgctgcttgtgtctgtttggatcacagaacgagggcaacactgctctttatatagagggcattgtgtacctccaactctgtataatacaacaaatggaagttgtttcaccaaagcagatttgtttcaagcagtccaagttcaacattttcttctgcatagtgtaggtatgcatttaaatatccaaaacaacatgaaatagttatcccctaagatggacaaaattttgttttactctagaataaaaggcaccaccaccacatattcgaagatcgcatgccttaaaattacttgaaagcaacaaaactacaaatgtttgtaacaaagtaaaagcgatgacagttataaatggaaaaagccggaaaccgctagtggtaagagcctggattccgttctattttaaccacccataaatgaggccaaccggatttcttgaaaggaaaaaattgaatttggtctg

SEQ ID NO: 12543 - DNA, 622 bp, Zea mays
agcttataaaatcaataaaatttacggaggcgtaaatatgtccatttttattcctcaaaaatatttagaccataaaattcataagatgccatcatttttctattttactttcacttgttgcatgagttatatgtgaaataactctaaacatctaagtttcaatataatcaatatttcactttatcatttttatatggggacttgaggttatcttattatagaatgtttattagttttggtaacttatttacaattttcggtcgaaactataatattctataaatttaattgtatttaatgattttctacataaagaaactaataatacactagtagccttagaaattcatgaaactttacatatggaatagtttttactatagcccgtctatagtattttatagctcctgacgaaaagccgctgctagacgccttatcccattatttaaaatcttgcaaagcagcattcaaatttcagagaagtcgaaaaaatccatacatccccctcgaaacagaaaaaaagggaaatcacaatgcaaaagagtgaatgtctggattacttgaaatattttatataaatacagccacaaattgcccaagtctattctggatataccgccca

SEQ ID NO: 12544 - DNA, 635 bp, Zea mays
  unsure (1)..(635): unsure at all n locations
catgcaagcttcnactgtttccctcaaactttttgtttgcggataaaacggtaatcaacttcaatggacttaaaaaactcaaccatggaaaattggatttgcagcaagaaaacgggctataaaattatatacattcgtcaaaataagtaaatagcttgtcatattcaataggatctttaagaagctattaggttatttagataaatagtctagaacaatacaaaatcaaggaatcgcttatactctttatattggctctagatggaatagaaagatttataggctattcaccttttctctagctatctaggtcctttcaactatctagtgtgatgtacggtgccacactggacacgtccgatgagttttagagtgagtgtctcagattataaactctgagtcccctatctgatgcatactatttggtgtccactagaaatggtcgatgagagatatccagtacacactaaactgcaggatactcatctaaaaatcgcgtggggtgtggatgaggttgccttgtggtagggcatatatcctgtgatgggaaccagcagacacgaacagggcatgtagaaaaagctacaccgagaggaccttccaaactttactcaagctacccgggcatggaaaaa

SEQ ID NO: 12545 - DNA, 593 bp, Zea mays
ttgaaccgcctgttaggggccttactcttcccgaagttcctcaaaatcatgactaaccatatgttttcagtaccatatacatcgttacaggagggtttgactcccccctaaaagaccttctctaatggcgaaaggatatgcggtgtaaaggagcaaccccaaggtgataagaaaaagcgccgaaactattgctagaggcttgactatggtgaccaaaaccaagaacggcaccgacttaaagggggaaaagaccacttaacctatgatattttgtattacgatcaccagtaaatgtcaagggcatgaatgcaattttgtctaggctgtgtcccatgcctataaatagatgaacagtatccccgtactgttcacactagattgtaatcactcttgcgccattctcacatccttaccttttgctaaaccgaaaggactaatgccatatgaatattattgatatttactcatgttcaccgaatataaatgcaaataggatattgatatataattatgatctttacctccttatgctccattgcttaattattcaaattcctaagctaaaaatgataaagggctgtccttcatgacct

SEQ ID NO: 12546 - DNA, 442 bp, Zea mays
ctgcagcatgcaagctttcgagagaggtttggccttaaagtgagtcgtctgagttatcctcctccgcctctcttgggaaggccctgggcatccccttttatagatacaaggggatggtccaactgtacatatgggggtgtagctatgtgctaacgtggctggcaaagaagtgcttgagccctgtaaaagcgtaactggcagtgcggccctgggtcctgctgacgtttctttgccttcgtagagagctgagaacaatcgacgtcatggacgcatgcaaggaaccatcattacctgttgccggagtaatctagatgtgacatcggtcttgttccttcatagcctgaggcggctagctaggggtagggtaatgatgtatcccctgtagcgtaatcggtccgaggccgaggtcaaacgaggcggtgacttttcctgaagcccaagc

SEQ ID NO: 12547 - DNA, 591 bp, Zea mays
cgggaaaacggggggggcggcccatacactttcaagcactctaaaagcccccaaagggcctttaacaaaacgggagagaaaaagagaccacgaccattttttggacgccaagggcggaaccgaaatggttgaaccaccacgcgcggggggcggtaactctcggtggaacgaccgaagtgagcgggacgggacaaggaaatgcactatacaccatactatacgcgcgggccgggtttgcatgccaaaaggagctggcgaacgggtgggcggggacagctaccagccctatctgagctagctagctgctgggggcattgcatgtaccggccaggccagtatagggctcggccatatcatgcatgcatcgatctagaacgacatcgagagaccgagagggaaataattaatttgagcaatggttagtaagaaattttctctccggctgggtcaactctttgactacttctctagaaaaaaaacctgctcttgaattttaaaaagagctcgagaaaaagcacaataagtgggtgaaaacgcagcacgaaaagggacccaaaaaaaggaggagccggaaaaaggttcttttttttg

SEQ ID NO: 12548 - DNA, 661 bp, Zea mays
agcttctaaagggagaacacgtgataggtctaactaatgttacctttttaaaagatagaccttgtgcagcttgtcaagcagggaaacaggtgggaagctctcatcatgccaagaatgtaatgacaacatcaagacccctggagctacttcatatggacctcttcggacccgtcgcctatctaagcataggaggaagtaagtatggtcttgttatagttgatgatttttcccgcttcacttgggtattctttttgcaggataaatctgaaacccaagggaccctcaagcgcttcctaaggagagctcaaaacgagtttgagctcaaggtgaagaagataaggagcgacaatgggtccgagttcaagaaccttcaagtggaagagtatcttgaggaggaaggaatcaagcacgagttctccgctccctacacaccacaacaaaatggtgtggtagagaggaaaaacaagacgcttatagacatggcaaggatgatgcttggagaattcaagacccccgagcgcttttggtcggaagccgtgaacaccgcttgccacgccatcaaccgggtctaccttcatcgcctcctcaagaagacgtcgtatgagctactaaccggtaacaaaccaaatgtttcgtatttccgagtctttgggaataaatg

SEQ ID NO: 12549 - DNA, 658 bp, Zea mays
  unsure (1)..(658): unsure at all n locations
agctttgcggggagggggaatgggaatgatagatatagaatagtggtttaacatgataatgaaccgtacgcggggaggagggaatcggaaaggcaaaatacggaatgggcagaacagggaatgacagaacgcggaatggccgactactattgcagccttaataagtagagatttgagctttgcttcccaaaacagctgatattcattgctaccgaacagcaacattgcacttccgccccagttcaaccagctattgatgtccaaaggcatctatgcgagttcaaagttcaaatgtcagaaatattttttttcttaaataagggtatgtttgtttccatagcgttaaaatttagcacctactaaactttaacacttaattactgtttggatacaagtgctaaactttagcacaataccactaattaatgccttaactagcagctggacaagagccggtccatgcggaggagagagaagcgggctttcgatgggggagagagaaatggggttgggggctgcttttagcataatttagcatgtatggtggagctaaagtgctaattggtgctaaactttagcacaacattattgttccccaagagctaaactntagtaaaaagtgtaatactaaactttagcaaggaggaaacaaatggga

SEQ ID NO: 12550 - DNA, 642 bp, Zea mays
agcttctttcccaacgagatgtaaacggggaaaaatctttccccgacgggtaaacgggatggggacggggaaacatttcccatccccgttccccgcggggacccgttaaactttcacgtgatgttattttatgtactaggtaatgggaaaaataagtaattacattgtcaaaagatcactcaatgtacaaatatggtcattttgatgtacacattatgatttttatatatgacaatatgtatatgtgataatgttttatattaataacaaaggacatatggtctaattataatttaagcaaaaacggggatcccccgtccgggatttatcctcacgagtaatggggatgaggaagaaatgtcccccgcgagcgttcttggggatcccgggggggaaaatttttcttcgcggggatggggaggtattccccaatggggatttccctggtgccatctctagcaggcgcatgcatgcatgggtcgcgcgtccccctccatcagttcctagctatttttatggagcgcatgcatgcggtttctatatttaagcagatccaaaaattatgaaaagtcgcggtaatttctattgcttgcacacaaaatttgaatgaacattttcattcacactaaaggcgcgcaaaaa

SEQ ID NO: 12551 - DNA, 643 bp, Zea mays
tgcaaggctgtaaaaggtaaatggcactataacagggaccggtttaccacgtatgcccaacaataatttgttggaagactcggccatgttactacactggaactcatatcttcatccacctaagacgtgagctcttgtccaattttccaaatccggcatcaatccattcaaccaatctctaccttcggcatttggtgcgactttgagcttttctaacttttctttaaagaacttgtcttccagctgtcgacatgtctcctggaaaagctcaaagatatccttgacaccatccttacgcagaagattctcaacaaggtgtcgagtacaccacctgggatgcaaaggagggtacccatcgatctgctcacggaccgcgttgaagtattccctggtgccgatctgatattacaccaactttccgtcctgggccaaccacatgtatccggaccagtcgcaggaaccaaccccaactgtctttgttctctttctctaccagaacaaatgctaggggaactagctttgtggttgcatcaacggatatggcaattaaaagagtgccctggtacttgccgaaaagaaacctgcccgccaatgaaaagacaggaccacaatgccggaagggctccacaccctagggaaaggc

SEQ ID NO: 12552 - DNA, 619 bp, Zea mays
agctttaaccctcgcgagacctttccccgcctctttctatccatggtttattcattatcgcatgtgatattctatgcatatttactttatttgttctcttgtatggcgtactgtttgtttcctaatttgaatggatggatgtatgtgtgcttgcaatcgcataaagaacgatccggttgaagagcccgaggaactcgcaggagaagcccctgagcagcagtcggttggtggaggcaagtgtcccttgacctatctctgtcctattcattctttaattcacctcccgcattacacatttatgcctaaggattgactagctttgttatccatgtccttgtttacctattcgggttgaattattattgtttagctttatgctattgctcaaactctaatcaatgaacatgatgagattatctatgatacactgttttcccttctcttattatgatgttgtacttgtggcctttaaaggggctcgaacggtttctcgagtgtctctccgtaaggacctgttcgatggatgaccgcctgggaaaacagtgcaaccatgagggtggaatgggaagcccttagctgaataattagaggatccggggtgtagttcgctttacccggt

SEQ ID NO: 12553 - DNA, 543 bp, Zea mays
agcttctaaagggagaacacgcgatagggttgactaacctacaattcgaaaaagatagaccttgtgcagcttgtcaagcaggtaaacaggtgggaggagcgcatcacagcaagaatgtgatgaccacttcaagacccccggagctgctgcatatggacctcttcggacccgtcgcctatctgagcatagggggaagtaagaatggactagttataggtgatgacttttcccgcttcacttgggggagttttttgcaggaaaagtctgaaacccaagggaccctcaagcgctttccaaggagagcccaaaatgaggttgagctcaaggtgaagaagataaggagcgacaacgggtccgagttcaagaatcttcaagtggaggagttccttgaggaggaagggatcaagcacgaggtctctgctccctacacaccacagcaaaatggtgtggtaaagaggaaaaacaggacgccaatcgatatggcgaggacaatgcttggagaaatcaagacccccgagccgttttgggccgaagcccggaaca

SEQ ID NO: 12554 - DNA, 626 bp, Zea mays
agcttagcaaaagaaatttctagaatcaagaatattgagctcatgcctaagtctggtaaaagattgttcatcaaggggcttggtaaagatatcggctaattgatctttagtattaatgtaagaaatctcgatatcccccttttggtggggatccctaagaaaatgataccgaatggctatgtgcttagagcggctatgctcgacgggattggcggccattttaattgcactctcattatcacatagcaaagggactttggttaatttgtaaccgtagtcccgcagggtttgcctcatccaaagcaattgcgcgcaacaatgtcctgcggcaatgtactcggcttcggcggtggaaagagcgaccgaattttgcttctttgaagcccaagacaccaaggatcttcccaagaactggcaagtccccgatgggctcttcctattgattttgcaccccgcccaatcggcatccgaataaccaattaaatcaaatgtggatcccctagggtaccaaagcccaaacttaagtgtataagccaaatatctcaagaatccgtttacggccggaaggtgtgattccttaaggtcggaatggaaacttgcacacatgcaaacggaaagcataatat

SEQ ID NO: 12555 - DNA, 495 bp, Zea mays
agcttggactaagtcgtcccaattggagatctgccccggttgcaggtgctctaaccaggcgccagcggtgtctgagaggaacacggggaggttgcggatgatgaagttgtcatcgtccattccacccagttgacaggccagacggtagtccgcgagccacagtttcgggctcgtctctcccgagtacttagtgatagtagtcgggggttggaaccgggtcgggaacggcgcccgtcgtatggcccggctgaaggcctgcggaccgggtggcttgagcgagggactccgatcctccccactgtcgtaacgtcccccacgcctggggtggtagcctcggcgcaccctctcgttgaggtgggcccgacggtcgacgggatggtgctcgttgccgaagccacccggggccgcatgcgctgtgttgcgtgtgcgcccggggcagaccgaggcttcccgcatgaatcgggaaagtccggcatgaggttccgaggggtaccc

SEQ ID NO: 12556 - DNA, 574 bp, Zea mays
agcttggttcaacaaaagttacattaaaaaactacaaatgtttttgcaatgactacccttcttccttcagaaatttttctgcagcttcgggaaaaagttcggtaacaaacttcgtctacaaaagcttcggccatataaataaattctattgggttcttcatctctggggcggccagtggggcgaatggctctgggggaggagatagttcagctacggtagaagacatcaattagttcgaaggcacgaaaataaacaataaaactaaaaaccattaagtaatacctaaccatctttcgagttccacagttttctcaactgctttcgttgcttctcgagcgtcatgaatatctttttcgctcttcttcattatttcatgagccatccctcggccgccattggcctagatatcagggaaaaatttcccgcctattgaacttgcttcggccgaggggtccttcgtatcggcgacaggaaaagcagcttcaacccgtgccaaagttttaacatgaacacaacctgccttctccaaaaagggtgcaactcccctagcaccagagaaagcacagacgtccc

SEQ ID NO: 12557 - DNA, 594 bp, Zea mays
agcttgtgcacttactaccttgggcaagaggagggaaaaccctagacctctcgggaaccctatcttccagagccatggttgaaagggggagagaataagcaattgggcaaaccatgagttaatctttaaccaaactttaagtaaccttataaccagcaattgggggaaggaaatattgcaaaaagacccctggagaaaccccaaatccattccctaagtagagagagagctagagctctctaattttctctaaggaaaaaactacacctacactaaagatcaaccgtgttcacctcgaagatggcaccaaaaccacctaagttctataccaaaaatgtggcataccacctagggcacccactggaaaaagctgagcccgagaccttgacgtttgacatgccttggcatggtttttgtcgcgaggtgggcagagtgacatacctgatttggtgaccgaagatctccctacctaggccatatctgccatggcaactcacggatgagagacagccctaggtgccaggaaaagactcgcgccagatttttgccaagattcgcacgtttgcgacttgggggaactggggaacacgggcc

SEQ ID NO: 12558 - DNA, 642 bp, Zea mays
agcttcttgtagctgctgccaaaaatgagatgtgaactgcgttcctcgatctgacactatcttcttcggcacaccatgaaggcagactatccgtgacatgtataactcagctaacgttgctccggtgtatgttgtcttcacaggtatgaaatgggccacctttgttaagcggtccacaaccacccagatggaatcgtagccagcccgggtgcgaggtaggccaactataaaatccatcccgatctcatcccacttccactgaggaatccgcaatggctgcaacaatccggcaggcctctgatgctcttctttggttctctgacagctatcacagatggcgacatattctgcgatctctcttttcatgccataccatcaaaaccttctttttaagtcctggtacatcttctcactttcagggtgtatggagtaagctgtttcatgagcttccttgaggatcagttcccggataggtttgaggtcgggaacacacaatcggtctttgaaccatattaccccttcttcatcctctcgaaagtctttgcctcttccttctaggatcagctgccggatcttggtcaagttttcatcatccttctggccttctttgatctcccgctttaaggtgggctctaattctac

SEQ ID NO: 12559 - DNA, 652 bp, Zea mays
agcttgatgaactcatgacttaaaaatagaatccctctaagcacttcgttgaagtgtctactgattggttcaagggaccacccataagtgttatggatcaacctcattttggtgttatgacctactataagcagaaaaattgcaagcttttcttctaccgacacatttagggtatcctgtaagccactcttttctcgtaagatggcactcaagtcattaaaagatctcttagttaggcgcaaactgtcatagcaatagacatttgaaccctggtacatattacgtagcatttgttttctggactcgacatttctctcttgaacttcgttagcatctacgatgtgtctaggtctcctccgttgataccggtttgcaataatagccataatagacacagctaatacaacaactctctttcgcttctttctcttccttttaatttcctcctcgttagtatattgagttgatatctagaacaagtaatttatatgcaattagacatgctagttgaaagcaaaatgctctactcaagaataaaaacacaactagtaagagcacaaggtggaataggagaaataccgatgtaaccatggaaattgaaggatttgttcaaggtagctagaagaaacttgaagtagcaaataccaaaaca

SEQ ID NO: 12560 - DNA, 553 bp, Zea mays
agcttcagcaggtttttcccaccctatgttatttggaatgacagcagcttcagcaacaacaaaaacctgttcattatttttgacacttttttttgaaaaaactgatatgtcttcttgtactgtagattagcaaccatctggagctgataaaacctaatccaaaggatgagcttgaaaagcagaagaaagatgctgaacttgcagctgctgtctttggtgcagatattgacttagttggtggtactgctaaaagtgagaacttcatgggtctcagtgatgctgagaactgtggaaagatgcgagcactaaaaaggcttctgtcattatggactggacagggtgacaagattcttcttttcaattattctgtcaagttgttcatttatgcactaacatttaactcataagctggcagcctagcaaagttatattgtcatgcactttaatcccatcggttccaatttatatcgacatttagccccactggtctaccaaatggctctagtattactttcatgcctcaatttaatattggttacttttcaaatctcta

SEQ ID NO: 12561 - DNA, 662 bp, Zea mays
agcttattgtctttctccgaggactccattttccttcaatgagactactacacgtaatagacttgaaaacaagtattagtctcaaaaacttagattatagagtaacctccccctggaagggcgcatacaagttttgaatacttgtaggagacttacactttgaatttgatatcaagagggccaaattatctataattcgagcactggcacatataagtcaaaatgacaccatttggagaataccgctaggaggacataaacattcaagcattagtggcatttacttaagaatggtaaataatctatgtttcgtgcttaactaaacattttaaaccatgtggttgctcaagaacatgagtaaaacacgcattcttaccatatggttgacctagcatgcatgcaattataattaaaaggaaataccactataaaaactaagcatgtaaggtagaaactagatataagaaaatagatactcatatctaaaaacaaagaaatggcataaatctagttaccttaatcatgggggggggaatttgggggccaaaggaattaactaacccactttgggaaaagacttgaacccatatgggggcattccatgaaatacatcccaaatttggccagggctctaaatttcccgaaggcccttggaacttatc

SEQ ID NO: 12562 - DNA, 564 bp, Zea mays
agcttcacgcctttcaccttgagacatcggaatgtcatttcaaggtcttaaaggaagtccgaagctttcctcgtcttgactacgatgtcatcgacgtaggcctcgaccgtccagccaatgtgttctcccaacacatggttcatgcaccgctggtacgtctcaccaacattcctcaagccaaacggcatggtgacataacagtacatgcccaaaggtgtgatgaaagaagtcgcgagctggtcggactctttcatcctgatttggtgataccccgagtaggcattgaagaaagacagggtttcgcacccagcaatggaatccacgatttgatcaatgccaagcaaaaggtaaggaaccttcggacatgctttgtttagaccggtgtagtctacacacattcgccatttccctcctttctttctcacaagcacaaggttggcaagccattcgggatggaatacctttttgatgaaccctgccgccattaacttgtggatctccttgcctattgctctgcgcttttctttctcgaatccgcgcaaaagctgcttgacgggtccggct

SEQ ID NO: 12563 - DNA, 649 bp, Zea mays
agctttttctggacaagggctgcacttaccgctgagtgctaagctgtttctattaacaatagaagagcccctggcgttggtggagttagtgttgttaggtctatcaaatattgcttcagctcttccaaagctttctgctgaactggtccccattgaaaaaacttaactgacttcagcacttcgaaaaatggtaaatttctctctgctgatctaaatataaatctgttgagagatgccagtcttcctgtcaatctttgagctcccttttttgtacttggtggctccattcgaaggatagcttcgattttatttggattagcttcaatcccttttgttgagactagacagccaagaaatttccctttcttcactccgaaggcacatttttctgggttcaaatttaaactagcctgtctaaaattagcgaaggtctcctgcagatcagcaatgtgattatcttgcttcgtgctttttacaatgatatcatcaacataagttagcacatttctgcctatttgaaaaagaaaaaccttcgcttgtattctgcttaaaacttcctccaacattcttgaaccccttaggcatcccaaaggaacaatatgttccaactagggttaatgaagcttgtttttgggttatccttcttttt

SEQ ID NO: 12564 - DNA, 603 bp, Zea mays
agcttaagacatcggtcaccttttcagagacgagctgagcatggagagtggagttcagcgtgttggcatcattcaaagaagcagaaacccgggccagatcaggctgaccttgagaatatttttcttcaaggtcagagtaccgccgagccatatctgtcaagaaatagccaagcaagggtgttcagctaaaaagcagattaatcaagtagccaaagaagaaacaaagggcactaaccagcatttgccatctccaaatcagatacccgccgctgaagcagcaccagattccaatgcgttagagatagagctctttccgggacagaagcaccctacgacctcagctgaccagccatttcatcaaccaatgcctgacattaaaaacaaatgagtgtaagaacaataccacactcggggtacaaccagattaggaaaaaccaagttacctggagggtggagaagaacgaaggaactcccaagtcgtgggaaaccagttgatggctcgatgaaggatcaacacccggagcaacccggaatgcatcagtggcgaccaagtcaagggcaacaacagaaatcaaaactctatcgttaccaacgccggactct

SEQ ID NO: 12565 - DNA, 590 bp, Zea mays
agcttgggtctatttgactgggcgcgtttctttttctcaatggaccagtgcaacttcctaatttggaatgtgagaggattgaacagtagggctaggagagataatgtcaagaccctagtcctggacatcaaaccatcacttatctgtttgcaagaaaccaaaatgagcaacatctttgattttgatatactggccattcttggtgctggttacagtaattttgttttcagcccagcacaggggacaagaggggacattttagtggcttggagagatggagttttcacccacaacaatcatgggaacagagagtactcggtctctattcaactgcaagaggcttcaggcccactttggtggttcacaggggtttacgggccacaccaagataatcttaaacaagctttcctacaagaggtaagaaaagtcagggcaggttgtgatggaccttggatcttggcaggtgattttaatcagatttgcaggtctgaggataaaaacaacccctgtatcaacaggggcctgttgagaagattcagaagatgaaaagaggaaattggagctgaaggaaattcccttgataggaaaga

SEQ ID NO: 12566 - DNA, 527 bp, Zea mays
agcttaccgcatttgaagcatgagcgcttctgctttgtcttggacttgcttggctgacccttgcgacctttaaacgcggtcttgaagcgcttaatgatgagggccatctcctcattatttaacccgaccgcctcaacttgcgccaccttgcttgggaacgcctccttgcgccttggaggcttgagagaaaaggggtgaggctcaaggaatggaccattcaatgcggcgggcacgtaccttgcctccttgatcatcattcgcccgcttacaaattttccaagaacttcttcgggcgacatcttgggggacctaggagtttcacgaatattgctcaccaaatgaggatcaagaacggtaaatgaccttagcattaggcggacgacgtcgcgggccgtccatcgcgtgcttccgtagctccttatttagttgaaaaggggcttcagcctgttgaaagttgggttggctcttctcctcttatcattgcgaatcgtccaagctcgccctccaccaactccattttaatgagc

SEQ ID NO: 12567 - DNA, 604 bp, Zea mays
agcttacatagacgaacaacgagaacaattgcaacggatcgtaggggatatacaaaatgaacatgaaaggctagtgtgggtgcttgataagtctactatggcaaatcttccttcgcacgagggtgaattgagtgaggacgcacaaaattcatcggctataggtggtcacgaccagtcacaacccctttatgggatgccgatggacatgtaccctaggcaacgaaagcctcccacgcacatcggcgataaatttaccgatctgcgcatgtccggaccgaccgcacatgggcgcggaccgtccgggccagcggcggccgatcccatttttagaagcaaattaccgagacctgcacccaagctgccacatgccatgcaaaccctagatagcccattcggaacctctgcgtaaggcgccagacgggccgaatataatatcggacagtccggccacatggccggacagtccgcgcacggggccggacggtccgcgtatttaaccggacggtccggcacagagttttttaaagaggaaagatatccaactccgaatccggcccagctagactccccaacttaccaaatgaaacaccagcaccataatata

SEQ ID NO: 12568 - DNA, 525 bp, Zea mays
cttggtgccaatggagaaaaaaaagtccctgaagtcttggcagtcgaattgtttgccattatcaacggtgagctcggaagggactccgaatcggtagacaatgttttgccaaaagaatttctgggcggtcttcgctgttatcgtggatactgctcttgcctcgatccacttggtgaaatactcgatggcgacaaaggtgaacttgaggttcccttgggccgtgggaagcggcccaacaatgtccaggccccagcgttgaagaggccaggtgtgggcgatgagctatgtgaactgcgaaaggtttcccgagcgtggagaaaatttctggcaggcttcgcaggacctcgtcacccgattcgcggcgcaaatcatagcgggccagtagaagccttgacagatcaccttggcggctagggctctaggccctgcgtgagagccgcaagttccgctgtggacttcgtgtaggatctggatgccctcggtctcggtgacgcatttaagcatgggttgactgacccccttttt

SEQ ID NO: 12569 - DNA, 620 bp, Zea mays
agcttgcaacagcaatactcatgcacagctaagcatatcagcattccttttcagcacgcatgttcactcaaagcttatgactgtaagcactgatgccaactacagatagtcaaacagatattaagtgtacaatgacaagcaggagtgtcagcatgactggcatacttggaaagttaagatctcccatagcatacatggaaagaatggagacaaatgtgcccagagtttgacaggaatcaaccaaacatggtcccctaggtatttcacagaatagaacatgttccttgcactcagaaaaatatggaattctgagataaatgaaggaatttagaaaacagaggcacctagttatttatagcagggcctacaacaaggtctaaaacagtgcactacacagaaggaaccacaaaaacagttctctttgaaggtcacacttcctagtaaggaacccttgctcgtaggtgatcaaaaagcccataaacatttttgatgaaaccagcaacatgatattatagaggctaccccaacataagatgctctgagacaaaaaccatgaaccaaaggagagatgccacactgtggcggacagaatcccatgggaggtgaacccaataaagatg

SEQ ID NO: 12570 - DNA, 615 bp, Zea mays
agcttgtgaagccaatcacaagtttattgaagaatgatattaagttcaactggtcttttaagtgtaatgaagcctttgagcaactgaagacactattgaccactgctccggtattggctcaaccggacatcactaaaccttttgacgtatattgggatgcatctggcagtgggctcggctgtgtactgatgcaagagggccgagtgattgcgtatgcttcaaggcagttgcgccgtcatgaggagcattatccaactcatgatctggagctagctgctgtggttcatgccttaaagatttggcgtcactatctgctgggaaatatctgtcacatatatacagatcataaaagtttgaagtatatcttcacacagtcagagttaaatatgaggcaaagacgatggcttgagctcatcaaagactatgaactggagatccattatcacccaggtaaagccaatggggtggcagatgcactgagtcgtaagacttcctgccactgtcttatggcgaaaacctccgagaacactttgtgtcagggaaaggagaagttaaacctggggatcatccaacaagggaatctgaatcaacaaaagcttgagtcaatcattttgc

SEQ ID NO: 12571 - DNA, 608 bp, Zea mays
agcttatcaacctgtagtcgtgcgacgtggccggaccaccggtgtcgttgtggaaactccggtgacctcaattatgccacgccatggctatttactgcgcaattgtaactgtggcacacctagacttaccatctcagaaccgctgcaccggtgaacgccacgactgagccaccagtgaccttcttcctctccggccggcagcacgccatgcccaaattaagagacaccgcccttggatactataaattggtgccccagccggcttcgctaagtagttgtgcacccagtgaaccaaccctcaacttcaatcgtcccccacagctccccaatttgagatttcctccaaatcaatcaagaattccaccatgtgtgagctcgtcgtggccagctctccacaggtccgatcacgcccttctcgctcttggttctacactcttatgtgctcttgatgcttctcgacccagccaattgagctagaacacgtaggatcaccgggaatgcctcggttcatccgtagtttgcgctatcaccgtgggcagagcgattagaagctagaaccatgcaattgcttgaagggttatggtcgttataggtggaattaggtatca

SEQ ID NO: 12572 - DNA, 576 bp, Zea mays
agcttctaaagggagaacacgtgataggtttgactaacgtacaattcttttaaagatagaccttgggcagcgggtcaagcaggtaaacaagtgggaggagcacatcacagcaagaatgtgatgaccacattaagacccctggagctgctacacatggacctcttcggacccggcgcctatctgagcataggaagaagtaagtatgggctagttattggtgatgactttttcccgctacacttgggtgttctttttgcaggataaatctgaaacccaaggaaccctcaagcgctttcttaagagaagctaaaatgagtttgagctcaaggtgaagaagataaggaacgacaacgggtccgagttcaagaacctttaagtggaggagttccttgaggaggaagggatcaagcacgaattttccgctccctacacaccacagcaaaatggtgtggtaaagaggaaaaatagcacgctaatcgacatggcgaggactatgcttggagaattcaaaacccccgaacgtttttggtcggaagccgtgaacacggcttggcaccccatcaacaaggtctacct

SEQ ID NO: 12573 - DNA, 621 bp, Zea mays
cctgcaagcatgcaagcttaaacctccctcggaaggggcgatcattttttcccagaatttgaagccccggacatacaagctggccaacgatcaaggcgagggctacagaaatggttggaacatccgacagctaccgccgtttttactcttaacatggtttcaagggggtcatataccctcgcttttctatacacacacaaataaagtctaaccgccaaggaaaggtcagccttggcttcggaaaacccgacccttccttgggggctaaaaggggggaaccccctttgcatcaaaaatttccttgcaaaaagactttctgccagaacatccttcacgctttgtaaatggttcgaaagccggaacctgaaaacgacgaagcacacgtaaacgggaagggcgaccgagccgagggacttctatgcctctgggatatggaaacctcacttcataccttccgcgaaaagtaactcacgctcggataagcaattctgctgccgaaaagacctaaacgctagaaaacttttctgcccaaacgagttcgggcccttctccctatattcaaaagagaaacctaccaacgaataaaaatggcctctaagcggggaggccgaccgatccgag

SEQ ID NO: 12574 - DNA, 653 bp, Zea mays
agcttgtcagctatatataattgatattttgttgatgcaattagtgtgatatatttacaatatttttgttggctacaaaattcagtgccttttggattccaatggatccatagtggctgatgttttgtatgctgcttgtatgcacaaggttccacaaagcttctatgattcataccaaaaaaagctgctattttgtatggcatgttccacaaggttaccgaagaagttgttgttttgtatgttgcttctatggtaacctgaaacctatgtttgcacaaggttcgaacaacaacttctatggttgagcacaattccatggttcaaacatgagcttctatgtcacatagtttggttcagatttaacatagacttaaaacttgtgctcaacacagatctatttaatgctatctattcaattagctataatgaaacaaatgttgacatcaatgactcagtgtttgctttcaaaatttgagatattagttggcagttcaacacaacagtgaatttggtttatcagttggcaaaatgataattcctttactctttggacacatcgttggagatggaaaattggatgtgggaaagtgcattctagctaccctggaacaaatttaattgtccagtttatacatcataactttttggtatct

SEQ ID NO: 12575 - DNA, 628 bp, Zea mays
agcttaaagtatgcattgattttcgtaatttaaatagagcaactcctaaagatgagtatcctatgcccatagccgacacattaatcaataatgcatcaggaaatagaattattagctttcttgatggtaatgccggatataatcagatttttatggccaaagaagatgcgtctaaaacggcctttatatgtccaggcttcattggtttatttgagtgggtgggcatgacatttgggctgaaaaatgctggtgctacttatcagagggctatgaatttgatcttccatgagctattgggaaacactatggaagtctacattgatgatattgtagtcaaatcggctgagtttagttctcatgtagctgatttgcgcaaagcctttgataaaatgcgtcggtatggtttgaagatgaacccgcgtaaatatgcttttggagtgtcgactggtaagtttttaggatttgtcatccatgaatatggtatagagatagaccctgaccgaatcaagtctattcggaaagtgagacctccgacctggaagggcgaaatgcaaaagtttctcaacaaggtgaaatatttacgaagggttatctctaaactaccccaaaaaatgatggcttcacccct

SEQ ID NO: 12576 - DNA, 620 bp, Zea mays
agcttcaaagctctctttccacctccatcttcagacaaccgatatttgtcccaaagtcccttgggatgaatcaatataaaaaatagattagcgattatgatgttattcctttaacgggttctcgttgcgctgttagacatttatatctcctttcataggattggccttttgccttcttttattcattggcaacggataaggtgttatcattttaagtgtgttgccctgttatgaatcctacaggagctttaatagatgaccaattggccgtgtttatgatccgactgtgcactacaggggttcttaaaaggaaatgtccgattttggtgtttgacgaccatcacaaaacttatgtactaactaggttggctaggtgaacttttctcatgcgcaaaaaatcatattcatatataaggaaaatgccccacaatcaattctataaatatggggcaaggcagacttgcaccagcctgcggtggaccggacaggacgatgcccaggctggcgcgctcgacgaacatgccgctctcaggaaaactcagcgctcttcggctaaaattcatcggattggccgggggggcaccggactgcaagtgaacccacaggccacgggcatcttc

SEQ ID NO: 12577 - DNA, 255 bp, Zea mays
agcttccaaccctctccaagtcccacaattaagataagtgatcaatagtgattagtgacttgagaaagtgagatttgtggtccatttgttgttcttgttgcttggatgtgctttcttcttttccttctaaactcttaagtgatttgtaaagctagcaagagacacctaagtgtgtggtgatccttgcggggtatttgtgacccttgagattaagaagaagcactcaaccggtctaggtgaccgattgagagaggg

SEQ ID NO: 12578 - DNA, 627 bp, Zea mays
gcagctttaagggagaacacggatgggttttttagtcaattgaaaaagaagacctgtgcagcttgtcaagcggtaaacaagtgggaggagccatcacagcagaatgtgatgaccacatcaagacccctggagctgctcacatggatcttttcggacccgtcgcctatctgagcataggaggaagtaagtatggtctagttattgttgatgacttttcccgcttcacttgggtgttctttttgcaggataagtctgaaacccaagggaccctcaagcgctttctcaggagagctcaaaatgagtttgagctcaaggtgaagaagataaggagcaacaacgggtcggaattcaagaaccttcaagtggaggagttccttgaggaggaagggatcaagcacgagttctccgctccctacacaccacagcaaaatggtgtggtagagaggaagaacaggacgctaatccacatggcgaggactatgcttggagaattcaagacccccgagcgtttttggtcggaggccgtgaacacgggttgccacgcccataacagggtttacctttaccggcctctcagaagaacgtatatgagcttttaaccgggaacaaacccaatgtatcggattt

SEQ ID NO: 12579 - DNA, 539 bp, Zea mays
agcttctcgctgaggaggttcttccctaggcacggttggctcgtcatcgaagaagggagatgattccactcttcccccgaagaagaagacgtcggggtaaaaaggagttgctggggtgacaagcttctttctgtcctcctttgagggcgaaggcgccagaagagcagcttgacgggcctctatcccatttgcttctttttttctcgtaatccatgtccactcttccgtggacgaggtggacaatagggttcttcaggtaaatgaattctcttctcctgacttgcaagaggtagtcttcgcttggggcgctggaggttgctctatttgctgcctcgttccggctttttcggagattttcgaggaaggcttcttcttcagtggatccgctatacgatgcagaattccttcctcgtctgccatggacgagatgatcccgaagcagaacacggatccagggcggagagcaattttgggttggaaaatgatggccattgagctagctgggatcagcgacacaccccctacctggtgcgccagct

SEQ ID NO: 12580 - DNA, 493 bp, Zea mays
agggacaaagggaaggatgaaaaacgtgaaaggcgtaaccaagggaagaagtaaggggagcctcgcgaagaggcgaagtggagaaaacaaacaaggggtagaaaagtatggggccaaaggaaaagttggagtaaaaaaccattactgagggaagttacaaggaaacaacgagaccaccaagggtgtgcaaaataaaaagaccgctcatggggcattaagaaacaaaggtgggcaaagacatgtagataggattggcttaaagagagaagggagtataaaggtatctatatatataaaaagaaaagggtatgcaaggttcccacgatgcgagcataccaaaaccaggggaaaaaaaattgctgaaagatggcgacttaacaacggaggaggaaaggatcttacaagataagaaggtcatggacattaaaactgaaatgtttaagtaggcaatagaaacttaaaggcgagtatttgaaacaagagaattgaagaa

SEQ ID NO: 12581 - DNA, 424 bp, Zea mays
  unsure (1)..(424): unsure at all n locations
agcttctgcagaacttgagtctttctaatgctcttcttgctacggctttcaaagaagtgttgagtggctcgctggaaacttcaagaatgatgagggtattgacttgctaaaagataacaagctctccagcgattgacagaagctgctgagaaagcaaagatggagctgtcatctttgacccaaacaaacataagggttttttctcagcattaacatccttaaagtgtgtttttntgctcgttcaactctaattatttatttgttccttcagcttgccttttattacaactactgcagatggccccaagcatattgagactactcttatccaggctaaatttgaagagctatgctcagatcttcttgacagagacataattattgcccatgatatgtcaaatgaaagattatagatgtacatatc

SEQ ID NO: 12582 - DNA, 423 bp, Zea mays
agcttctgcagaactagtgtctttctaacgccttactttctttggctttcaaagaattgttgagtggctcgctggaaacttcaagaatgatgacggtattgactcgctaaaagataatcaagctctccagcgattgacagaagcggctgagaaggcacagatggagctgtcatctttgacccaaacaaacataaggtttttttctcagcattaacatccttaaagtgtgtttttttgcttgttcagttctaattttttatttagtccttcagcttgccttttattacagctactgcggatggccccaagcatattgagactactcttaccagggctaaatttgaagagctatgctcagatcttcttgacaggtacataattatggcccatgatatgtcacatgaaagattatagatgtccata

SEQ ID NO: 12583 - DNA, 441 bp, Zea mays
  unsure (1)..(441): unsure at all n locations
ggaccttaagcacgagctgcactttaaggaagcacatttagatattttatgttattttgagaaagacaggatttgtagcacatgccaggcagggaagcaagttggagttcatcatccacacaagaacatcatgacgaccgacaggccgcttgaactacttcacatggatctattcggcccgaatgcttacataagcattggcgggagtaagtattggcttgtaataacggatgattattctcgcttcacttgggtattctctttacaggaaaaatctcatacccaagagaccctaaagagattcttgagacgggctcaaaatgagtttgacttaaggatcaagaaaataagaagcgacaacgggacgaagttcaagaactctcanattgaaggctttcttgaagaggagggcatcaagcatgagttctcttctccctacac

SEQ ID NO: 12584 - DNA, 418 bp, Zea mays
agcttatctggttcgagtcaccaaagaggagatttatttctagtccatgtcatctcgtagttcaagagcagcacacataaaaaattgacacatatgtatatggactccattttcgatgatccacataagcatggaaatatactttgataagctaacaaatggatttaatttgacattaaaattcattctaagttaatgagaaccatcgaaaccagtaaacatctagaatctatcatggtgtgtgtggcatcatctttaggtctgttgggccttgtatcatcttagaacccattatgggcacactcaggggaatgatgcctaatgccctataattagccaccaccgatcttattaaggttagggtttgattgcattttttctctcatgaaacatgcattatttgccacacttgtatcgt

SEQ ID NO: 12585 - DNA, 437 bp, Zea mays
  unsure (1)..(437): unsure at all n locations
gcttctgtaaaaattcagaatttttggacactttatcgaanagttatgcccaggttacggaaggttcctcaagttatgttttaaaaacgactgggatgaaacaaccgtatcctttctccttcgctttctttttttttgtttctgtttttttatgtaaccgaaggagaaaaacaaggaagcggtcgttgactcggtttgtttttttctgtttttttcctaaccgaaggagaaaatcaaggaaacggcctgtaacaccccgggttccacaaacaacccagaatgctactgaactacacttctgacgtccatatataaaatttcggcagcatcccctttgcaagattgcataaataagggggccaccagggttaaacatatatcatgagcaaaacatactaagtattattaatcggctagcaaaggaagaataacgtacg

SEQ ID NO: 12586 - DNA, 415 bp, Zea mays
  unsure (1)..(415): unsure at all n locations
agctgtggtntattcaatgtaaaacaagcactatttttaacatagnatntctatggataaactcaacataaaagatggcattagtagcacaagcactagtttcttatttagcaacctctttatatgtgggaggcaagcgagttgctaaaatagagaaacctcataatattgactaaatttccttgaaccctcatgcacaatatattttgaatgacatggataatatgcatggttattcaatgaagcctatagggatgacttaatccatattattgtgcgtgtctaatatagaagaatcaaatccaaattaactagatagagaatacgtcacatatttttggattgttcaccatatgaataatatcattcaactttcaaatagacctttatttcataatcaacaactgatgtatat

SEQ ID NO: 12587 - DNA, 426 bp, Zea mays
agcttgcacatagtctcgatgatgtatgcccttttatttctaagtcttctaaagctattacttgttgtgataccgcattgaaaaaataacacaagcgtgtgatgacaaccttgacatgctctgtttctaaggctcttaccgcatttgggaggaacaccgtcatcatcacatggcagtcatgagagctgtagcccaatatagacaagtccttcatcctgactagtttgctgatattggatgagaaacctgtgggcactttgaccccacgcaaccattggcaaatctttgttctctcctcaactaacaagttgtatctagctgggaggaggtaaggctttcccttgtcactatccactggatgaagttccggtctgatttgaagatctactagatcattgcgtgattaaagctgtcctttgtcttact

SEQ ID NO: 12588 - DNA, 427 bp, Zea mays
gtgcaagcttggaggctcacccagacggctcacccatctatttctaaacacttcagggcaaacctgctctccacaacattagacctctcaagagacctgagatccgttccctctctcgcaaagcttgtatcccctactacaagcatcccggtgcaagataatataagtctcatcctccctctgctagaagtaggaccttcttagcccgaaccaggataaaccttgtgtttcatcttgcatcaatccatccgggcagggacacgcaacataaaatttactagtcggttgagggtcccccggttacaaaacaccgacacatctgtccctccaaaacaagtgttacgaccatcacccacctctgtaatcatagctgtagagaggatagatttcagtatgctggaactttagagaggtaaaccagcccaag

SEQ ID NO: 12589 - DNA, 423 bp, Zea mays
agcttctcatctctgaactaactcagctgcgtttttttcttcgtcggccaatagaaccctgacctgaagaccttcccgactagtgttctggaggctgcatgtattccacattgccctgcatggacttcctccaaaagttgcttcccagtggacgggagaatacacttcatgagaacccctgatgcacctcttctgtataatatcttcccaatgagtgtgtagtgaaccgactgtctggcaatgcgctctgctgagttcttgtcgtctggctcttcttcgttctttatgtacttaatgatcggcctcctccagtcatcagattctgactcgggttgatctacgatgttgcactcttctgtttgatctattgagatactcggtcgtgtaattatttgcacgaaaactccgggtgggacctgagtt

SEQ ID NO: 12590 - DNA, 366 bp, Zea mays
agcttctaaagggagaacacacttaggtctttttacgttcattttgagaaagacaggatttgtagcgcatgccaagcagggaagcaagttggcactcatcatccgcataagaacataatgacgaccgacaggccactggagctcctacacatggatctattcggcccgattgcttacataagcatcggcgggagtaagtactgtctaggtattgtggatgattattctcgcttcacttgggtgttctttttacaggaaaaatctcaaacccaagagaccttaaagggattcttgagacaggctcaaaatgagttcgccttaaggatcaagaaaataagaagcgacaacgggacggagtttaagaac

SEQ ID NO: 12591 - DNA, 403 bp, Zea mays
  unsure (1)..(403): unsure at all n locations
aagcttctcgagactctntgcaaaaataccttgtncgaagggtatccaacgatcctggccgctggatcagagatccatgacccacatcaaaagttatcgtggctgattcttaacggtctagatctagatcgagggtctggattcaatctcgaaggggtatgcccacgatccgatccgagctgtacactctacatcctacggctcgcgcgaattttccccaaccctctcttctttcccaatcagcagggcggcgacgaagcagagctccgccctgggagctcgctggatttcctccgcccagcgcactggcgtcaaaatccaaacgcgaacggtgctcaacattgggggaagaaaggcgaagtgatggatagtattcttaccggcgatcggagcgatggtagca

SEQ ID NO: 12592 - DNA, 371 bp, Zea mays
  unsure (1)..(371): unsure at all n locations
agctttaagctggtaanggccgctgcatcttggtgttataatcggaaatggaaaaccttntctagtcatgacattttctaacacatctttaaactatcttgatctgttggccagatctctccattgtcaggagagactctcttcagcactttcttgagaaacgacttgacagggtagcctgatagatgatagcaacaaggctatgatattttgaaccttattgtaagctccttattacatgactggattattaaacatatctgagaatctacatgctcctgtgtattatcccgctcttttgaaaagatggtcacttaaagatcgttgcgctgtggcggtgaaatagctttattaaaataataaaatttatg

SEQ ID NO: 12593 - DNA, 436 bp, Zea mays
agcttgtggcgtcctcaggcgtactgccgcagtcttttaccaagtctcccacctggaagtgtggggaccgaactcctcgggcgtggtagcgtcgcagagactgctgataccgcgtcgagtgtagtaaggccacgtcccgagcctcttcgagctggtccagtgagtcttctcggctggtctggttgcttcggtcgtcgtacacctttgtcctcggggaatcgtattctaagtctgtgggtaagatagcctcggccccatagactagacagaacggcgagaaacccgtggctcggctcggcgtcgtcctcagactccagaccaccgaaggtagctccatcatccaccgcttgccaaacttgttgaggtcattgtagatcctcggtttaagtccctgcaaaatcataccgttggcacgctccacctgcccattcgtcat

SEQ ID NO: 12594 - DNA, 379 bp, Zea mays
  unsure (1)..(379): unsure at all n locations
agctntatcaaatggacgtgaaaagtgcctttctatttgaccaatcaaggaagaggtctatgttgagcaacctcccggctttgaagacagtgagtatcctaaacatgtctataagctctctaaggcgctttatgggctcaagcaagccccaagagcatggtatgaatgccttagagatttccttattgctaatggcttcaaagtcggcaaggccgatcctacactcttcactaaaactcttgacaatgatttggttgtatgccaaatttatgttgatgatatcatatttgggtctactaatgaatctacttgtgaggaatttagtaggatcatgacacagaaattcgagatgtctatgatgggggagttgaagtatttc

SEQ ID NO: 12595 - DNA, 447 bp, Zea mays
  unsure (1)..(447): unsure at all n locations
ttaagtcacctgcagctgcagcttgngagaatgagattccggccgagatgcttctggagcaccaacgtttgagactttacccctgaggatcatctcaagtcggcttaccaagtcaacagaaggaattctcttattggtaactcgggttgagtcggccagccctcgataaagatatgccggataagccctgtctttcagcggctgaatgttcttgaaaacaaaatccgtgaccacagcttcagcagtcagacctctctctttcagtaatccgacttcagtaagcaacacgcctgcctcggccacctcttgatccgtgggaaactcagtccaactcggagtacgaacgtctggctgtcttcctgaccgggagggaagagaatttccatagttatcaactataaaccactccagacgccaacctttaatgctgtctttgaggggtatctc

SEQ ID NO: 12596 - DNA, 438 bp, Zea mays
aagcttacccatgacgagacatgtggccagtttatatgttctataccagcaagccgacttttggtatggtccttaatcgacataaacagatgacttttcctgctcaacatctagtctcaaattattatttacttcccaaaatcatgtacctgacagaggtactatacctgaatggtgaattcatcactgcagatgatgccttcaccattataagtctttttccataaattcatgtacccagtgttacacatcattctttcaaaaaacaagttttaattctctaggtagagctaagcatcattagttctctttataaaaccggtatcaagtaagataatcaaattccaaggaatggtaatgcatcaagtgtttcatcactcaactcctatcacctaatgcaacatataagtgagaaaaatgttaaaacaacaaggaggg

SEQ ID NO: 12597 - DNA, 442 bp, Zea mays
  unsure (1)..(442): unsure at all n locations
agcttcgtgcgcatagcttcgggatagactctttcttctntaggatcgaccttcgtcctgagcatgctttccatatcatatatgcttttgacccgagtccgaaagtacctatttacatattacacttggaaaatattgttaaatcacatttttgaggacctttggaggacgaaggcccccaatagtagcccctcgcaatattaatttgttagaataatgaattcacattgcgacatggacgaaggccctaagctgaaggtccgaanaaacaccttccctttgctagaatagcaacagtcaatgacagacggggccctccaacttggagtgcgctgggcgtataaataggatctcacaccgactgcatttaatacactgctcgtgccatttgccttattttctcaatttggtaacttgctgcttactagcgcttgatagctgt

SEQ ID NO: 12598 - DNA, 325 bp, Zea mays
agatgtgcggattatgtaccttcactcggtagccagaatctagcttctatgccttggatacactactgcagtatgctatgactcatttagaagtatttggttgtacaattcccaggtcttgacatgccgttctggatcaactctaatgcttggcgtaatatattcagagatactgaagactgtacgaacatatggcttactggaatttgatgcagagattttctttccaaatgatctcaatagcctccctaggggctatgaacaaacaaaaaagcacaatggtcgatgagccacatattatgacttcaaagtcacttttggttga

SEQ ID NO: 12599 - DNA, 429 bp, Zea mays
cgccgcatgcaagcttaaccctcttgttttccagagcaatatcttttccagtcgtctctagaaggatgggaatgtgtgtgatattagttggtattggcccgatcaaaccttccagaaatagctcctgctttttctcatcatcatcgacctccccaggagcatatcaggaaagctggatgaatttgtctctatattcgcttactgacatccctccttgtttgagagataggaactctttctttttaatcttgataaggccagcacgaatgtgataatggtgttggcagcagcgtgggaagcgtagtatgcatcgcaccaatccgcaacgaggccagtaaggcgacccgatgcatataacaccttctctcagtcagtacattgggttatgttgagcatcttctccacatactttagccaatcatcagctta

SEQ ID NO: 12600 - DNA, 397 bp, Zea mays
  unsure (1)..(397): unsure at all n locations
agctttatcaaatggacgtgaaaagtgttntctttattggaccaatcaaggaggaggtctacgttgagcaacctctcggctttgaagatagtgagtaccctaaccatgtttacaaactctctaaggcgctttatgggctcaagcaagccccaagagcatggtatgaatgcctaagatattttcttatcactaatggcttcaaagtcggaaaggtcgatcctactttatttactaaaactcttgacaatgatttgtttgtatgccaaatttatgttgatgttatttgggtctactaacgaatctacatgtgaggaatttatgaggatcatgacacaaaaatttgagatgtccatgatgggggagatgaagtacttcttatgatttcaagtgaagcaac

SEQ ID NO: 12601 - DNA, 439 bp, Zea mays
  unsure (1)..(439): unsure at all n locations
gtgcaagcttttgaaggctgagctgcgatagccccttattagcttcgtcgtggaagtgctgaagattgttgaagtctatcttcaccaacttacccccgaagccatcataaggctgaacatcttcgtatgggccgtgcgaagccaaggtctgaagcctgatgcaaaaagtttctgcaatatgcacgaattatcatacgagacaataccttggggtaaggaacagtatcacaataactntggctgctacagttttgtttctcggtctgggtcaagctgtcccgtgccaacttttcggaagaggtggcctagcggctggatgacagaatggttttatgtaaaaaatgatctgaaagcacgggaagacatcaaaggtataatcatgcgacctatttggcaaagcttcggccttcggaggccgaaagttgaaatgaatgaagcc

SEQ ID NO: 12602 - DNA, 428 bp, Zea mays
  unsure (1)..(428): unsure at all n locations
agcttctaagggagagcacantttaggactatcttatgttcattntgagaaagacagggtttgtagcgcatgccaagcaagaaagcaagttggtgttcaccatccacacaagaacatcatgacgaccgacaggccgcttgagctactccacatggagctattcggcccgatagcttacataagcatcggcgggagtaagtattgtcttgtaattgtggatgattattctcgcttcacttgggtgttctttttgcaagaaaaatcacaaacccaagagactttaaagggattcttgagacgggctcaaaatgagttcggcttaaggataaaaaatattagaagcgataatgggacggagttcaagaactctcaaattgaaggctntcttgaggacgagggcatcaagcatgagttctcttctcctacac

SEQ ID NO: 12603 - DNA, 408 bp, Zea mays
agcttgtgaattctctatctgatgaattgttatttcaagtggttgctaaagggtttggcggcctgcttatattcaagccacatttattgtcgagaaagttgcttatctggctgatgcggaagcttaacccagaaacaatgaaattagagattggtggtgggaaagagattcaaatcaccgaacacagtgtttggtgtgttttgcagttaccaaacgttggcagtgatccgccccccatgtctgatgcaaatgctcgttccttgcgggacgagctgggggagcaaatttgtggcaaatcttatagacggatatttggtatcaatatatctgttatcactgatagattgcagaagaggactcttaatggggagctgggcctgagagcctttttcatggcagcatttcagt

SEQ ID NO: 12604 - DNA, 383 bp, Zea mays
agcttgacatatatttataaacatgacatatatttttatttttaaataatatatttttattaatgaatatgcttataaagtattattactatgcttataatttacttgtaacataattaccgtgccggtcgctcagtctatgcaacaccgcaacagaaactactaaaggtctgtttggttgggctgtggctgtgaaaaaagttgctgtgggctgtgaactgtggaaaaagctgctgtaagctgtaagctgttaaaaagctaaaaaccgtttggtagaaaccactaaaagtcgttaaaaatccttcgatatatgttttcatagttccatccgaaaagccactaaaagcaggtccagaagtgctttcagattttcactacaagaa

SEQ ID NO: 12605 - DNA, 431 bp, Zea mays
agcttgtgaacagtacaaatttataagggatatattttcttagcagatcagccgaagcctatgctcttatgtgaggacatagcagagcagaaggtgctgttaagctctcaattatccgaagagcaggagaaaaccttgataaggtttttgttcaataataaagatgtttttgcatggtcagccaatgatctctgcggagttaatagagatgttattgagcactcgctcaatgtcgatccatccttcagacccagaaagcaaaggcttctgaaaatgtcagatgataaggccgaaggtgctcgcaacgaagtcaaaagactcctcagtgcaggagttatcagagaagtgaagtacccagaatggctagctaacactgttatggtaaaaaaggccaatggcaagtggcgaatgtgcatcgactttacagatct

SEQ ID NO: 12606 - DNA, 428 bp, Zea mays
agcttatgaagattcttcatcccaacatgggctattttgcggtgccagagccaacccatgttagtcttagcaattaaacatgtgtcgagctcagctctatcaaaatctactaagtatagctgaccctctaacacacccttaaatgctattgaatcatcacttcttctaaagacagtgacacttatatcagtaaaaagacagttgtagcccatttgacataattgggaaacagaaagcaagttgtaatctaatgaatcaacaagaaaaacattggaaatggaatggtcaggtgaaatagcaattttacccaaacctttgaccaacccttgatttccatccccaaatgtgatagctcgttggggttctttgtttttctcatatgaagagaacatccttttctccccggtcatgtggtttgtgcacccgct

SEQ ID NO: 12607 - DNA, 449 bp, Zea mays
  unsure (1)..(449): unsure at all n locations
ttaanaacctcngctgcaactggagacttgatgatgagggnggtggttttataacccccaccaacattctagccgttggctgttctgtctgtcgatgggcacaccggacagtccggtgcgcaccggacactctactgttcactgtccgctgcgtgccacatcagccgaccgttggggtttggagctgttgaccattgaagtcatctgtccttttggtgcaccaaacagtctggtgcgacctgacgtcgcatactgtcttttgacttctgacgtttcaaactacgggacagtcgaccattgggtgaagatgactattgctcatggtctcacgggacagttctgggcacactgaacagtctcgtgaattttagccgaagagcgctaagaattcctgagagcggctagttcacggagtgctccagcctatgcaccggacacaatctattgcg

SEQ ID NO: 12608 - DNA, 401 bp, Zea mays
  unsure (1)..(401): unsure at all n locations
agctntatttcagtgtacccaggaccacgaagtatatctncagcatgcgtctgaaggtttctgcgtctgagggcacaagcaccaacagtgcccaatgaaattgtcattgaggccatgattaaagggcttcggccgggaccttcagcgtagtactttgccaggaagccaccacaaacattggagaagctgctccagaagatggacgaatacattcgagctgacaatgacttccgccaaagaaaggaggaagcattcaggttctctgaaatgaccaggggcttcggaggaagatttcacccgaggcacgttatgtcaattcataactctgctcaaactgatgatcgagggagtcagcagcaaaggccacaatactcttcacaagctttgggccagcagcaaag

SEQ ID NO: 12609 - DNA, 440 bp, Zea mays
agcttagcaaaagaaatttctagaatcaagaatatttagctcatgcctaagtctggtaaaagattgttcatcaagtggcttggtaaagatatcggctaattgatctttagtattaatgtaagaaatctcgatatcccccttttgttggtgatccctaagaaaatgataccgaatggctatgtgcttagtgcggctatgctcgacgggattgtcggccattttgattgcactctcattatcacatagcaaagggactttggttaatttgtaaccgtagtcccgcagggtttgcctcatccaaagcaattgcgcgcagcaatgtcctgcggcaatgtactcggcttcggcggtggaaagagcgaccgaattttgcttctttgaagcccaagacaccaaagatcttcccaagaactggcaagtccccgatgtgctcttcctat

SEQ ID NO: 12610 - DNA, 433 bp, Zea mays
  unsure (1)..(433): unsure at all n locations
agctntacaatcttgataaattccaatgttaatatttttctattctaagaaaacacataaattcattattaatgacgaaaaatattaaaatagctctaaaaattctagaaaaattcctataaatattttggcaccgaatgaacacaaataaaaatatttgtaggttataaaaaatatttttaggtgccctagtaaatagattttttgcttttcaaaaataggaaaaaataattagaaaaatatgaaaattatcgaggacttctgaggtttgttaacatgttttgcacttagaaacactatgcaacaacacgaatgcaacaaaacaagtttaaccttatattttcttttaattgatttacaataaaagaaaatacttaaaactgtaactagtgattctaaaccactcaaatcttaataaattaaactaaatcgt

SEQ ID NO: 12611 - DNA, 433 bp, Zea mays
agcttctaaaggggaacacatttttggactatttaatgttcattctgagaaagacatgatttgcagtgcatgtcaagcaaggaagtaagttggagttcatcatccacacaagaacataatgacgactgagaggtcgcttgagctactccacatggatctattcgacccgattgctaatataaacatcaacgggagtaagtattgtcttgtaattgtggatgactattttcgcttcacttgggtgttctttttgcaagaaaaatcacaaacccaagagacattaaagaaattcttaagacgagctcaaaatgagttctgattgagaatcaagaagattagaagtgataatggaacggagttcaagaactctcaaattaaaggatttcttgaggaggagggcatcaagcatgagttctattctccctacagacct

SEQ ID NO: 12612 - DNA, 298 bp, Zea mays
  unsure (1)..(298): unsure at all n locations
gcgagagtgggacgcaccctcccggcaacggatcgcctaanagggggggagtactctcggagggcgcagacctgttcatgcagtggaggatcccggggaatagcacacatcaacgcttacgagaaacaagcgtcgtgtggtaaaaatcctcacctgaataaatcgaatcggatcgccgctatatccccggagagaggagacttgagctccgacctacaacctaagtcaagatgtgaacactatggataaaaatgacgtggcattgatgacacgatgaaattagactagatgcaaacag

SEQ ID NO: 12613 - DNA, 425 bp, Zea mays
  unsure (1)..(425): unsure at all n locations
agctntaaccctcgtgagacctttccctctctctttctaaccatggtaaattcattatcgtatgtgatattctatgcttgtttaatctacttgttctcttgtatggtgtattgttggtttcctaatttcaatggatggatgtatgtatgtttgcactcgcatagagaacgatccggttgaagagcccgaggaactcacaggagaagcccctgagcagcagtcggttggtggaggcaagtgtcccttgacctatctctgtcctattcattctttaattcacctcccgtattacacatttatacctaaagattgactagcttttgttatccatgtccttgtttacctatttgggttggattattattgtttagctttatgctattgcccaactataatcaatgaacatgatgagattatctatgata

SEQ ID NO: 12614 - DNA, 439 bp, Zea mays
  unsure (1)..(439): unsure at all n locations
agcttctagaagccgagacaccgagcgagcgttttatccaacatgatattcgaagtctcctcgaccatgttgcaaaacaggaggccaagagctccatatcatggcgaagagagactgaagtcggccagtataccacgacaacatagccgagggacaaagcccatcaggacatcagcttgagtataatgaggaaggcatgacatcggtcccttcccgccgacacctgnggtcaggcaggaatgcatggagcatccccaacatggggcaagggggaaagggcccgaggggccagccattgagcattggtacagccgatgtcgcaaggcacgttttgaccccaactagaactgaagccttagcccacctctgccatgcccttgggccttcgactgccacattctnncggcaccagtgccacaacagtatcagacgccaacag

SEQ ID NO: 12615 - DNA, 425 bp, Zea mays
agcttcatatgtcatcagcattccacccatagttctttggacagacggaggcggccaacaaagtcatcgccatgtaccttcgctgtttcatgggagatcggccgcgtgagtggctgccttgggcagagtacacatacaacacggcgtaccagtcttcgctctgcgacacacccttccatgtggtgtacggtcgacatcccccatccatccggtcctatgaggtggggggatacccgggtggcagcagtggctaagacgatggcagagcgggaagtattcctggaggatgtacgacttcgcctggagcaggctcatgctgtgcagaaacggttctatgacaacaaacaccgggaggtggcctacaacgtgggggactgggtcctgttgcgtctccgcaatcggccgatggcttccatgttcctggc

SEQ ID NO: 12616 - DNA, 434 bp, Zea mays
agcttacctggaccggcttaccacatttcatcttattatgaaccctcccccctccgcgcagcccacgactcctttccacgcgcgcgccaggccatcgactcagcggatatcctctttctcggacatgtgggccaaggctgtcagctctatccgcgccctcctcctttttcctctcccacctttgaccggatgtcaacagaacgcgcgggcggagaccgttcaaccgtgccttcatcctcgcggtcgccaacggcgcggaatccgcgcggactcggccgaacggcgcgcagacggcggaagatccccattccatcagagctggcgcatgcagtggggctacctcgggctcgcctctgaccctataaaacttgccccctctcagctctcttgcatcgcatagaaccgattgaccgtgtgtaccatcgccgaaccga

SEQ ID NO: 12617 - DNA, 433 bp, Zea mays
agcttgtgaagattcttcatcccaacatgtgctattcggcgatgccagagccaacccatattagtcttagcaattaagcaagtatcgagttcagctctattaaaatcaactaagtatagctcaccctctaatactcccttaaatgctactgaatcatcacttcttctaaagacagtaacacctatatccgtgaaaagactgttgtaacccattttgcataattgagaaactgaaagcaacttgtaatctaaagaatctacaagaaaaacattggaaatggaatggtcaggtgatatagcaattttaccaagtcctttgaccaaaccttgatttccatccccgaatgtgatggctctttggggatcatcgtttttctcgtaagaggagaacatccttttctccccagtcatgtggttggtgcactagctatcaa

SEQ ID NO: 12618 - DNA, 443 bp, Zea mays
agcttgttgtctttctccggggacttcatttttcttactatgagactactacatgaaatagacttgaaaacagtattaatctcaaagtcttagattatagagtaacctccccctgaaagtgtgcatacaagttttaatacttgtaggagacatgcactttgatttgatatcaagaggggcagattatccataatccgagctttgacacatacaagttaaatgataccaattgaaggatataagattttgaagcattagtgtcatttacttacggatgttgaataagctatgtgccatgcttaattaaacaattttaaatcatgtaggtttgctcaagaatatgaaatgagaacgagcaatcctaccatatgatttacctagtatgcatgcattgttaatctaaagtgagtacgacatgaaatactacgcatggaaggtaaaac

SEQ ID NO: 12619 - DNA, 433 bp, Zea mays
agctttaagcaattctatcaacagaattaaactttattattgctaaagaagttgtggacaatttcataagctgtccagattgttgaagagcgcattcatatgaattatgaaagtccagttatgtttgttttactgtggctgtttttgtttgcctcacaaaaatgagcgggtttgttcactggtgggtttcatatagtaaatagccaaattgactgttccaacaatggatacatttgtagagggataaaagttcttactgccagcagaatttcataatttttggttgagtagtttggtagatattgaattttgaagttaactatgctgctgtctgaaacagattccgacatttatcttatcagatgttttaaaacttatagatggcagaatttaattatccattaaatatcgaagttatagaatattttgtgta

SEQ ID NO: 12620 - DNA, 417 bp, Zea mays
agctagaagccatggtaagtagcataagctaattatatcgaatagactcaagcctagctacgggtgcataggtttcaccgaaatccaaaccttcgacttgggagtatcccttggccacaagtcgggctttgttccttgtcaccacaccatgctcgtcttgcttgttgcggaaaacccatttggttcctacaacattttgattaggacattgaaccaaatgccatacctcattcctagtgaagttgttgagctcctcttgcattgccaccacccaatccgaatcttgtagtgcttcctctaccctgtgtggctcaatagaggaaacaaaagagtaatgctcacaaaaatgtgcaacacgagatctagtaggtacccccttgtgaatgtcgccgaagatggtgtcgacagggtgatctt

SEQ ID NO: 12621 - DNA, 434 bp, Zea mays
agcttgtgaaggttcttcatccacacatgtgcttatttgcgatgcaacagccagcccatgctagtcttagctattaagcatgcatctagaccggcctcttcttttgcaaaatcaactaaataaagtttgccgtctaatacacccttaaaagctagtgaaccatcacttcttctaaagacagacacatctacatttgtaaatagacagttatatcccatattgcataattgactcacagatagcagattatatccaagagactcaactaaaaacacattagatatggagtgctcattagaaattgcaattttacctaaaccttttaccttgccttgattcccatcaccgaatataattgaatcttgggaatatttattcttgacgtatgaggtgaacatcttcttctcccccatcatatggtttgtgcatccgct

SEQ ID NO: 12622 - DNA, 426 bp, Zea mays
agcttataatcagcacctttcaatctcttcttttaaagttccttgcctcccaatgttgtaatgctgatctgagtccagcttccacaatgcaggtttcccttgctgaggttggaaatgacctaagaacctgcattttttaaagacgagtaagctattttgtgatgaacatacaaatatcaatgttttccactggttaagtcattccaacagaatattattttgcaatatattcagaagcatacatgtttatagcatcctgcttctcgtgatcagtgtaggcgttattgtagtagcgttgaaaggttcgaaggaactcctgagattgggttgttgccttccattggcccctttgctcacagaagatctatgcaaatatgattaaaatgaaatcagaatgttatagttcaaaaaagagatctggaacat

SEQ ID NO: 12623 - DNA, 308 bp, Zea mays
agcttgacaacgaggagatggcgctcatcatttatagctttcgccaaatcctcaagcaaaggagggggaagaactacaaatcccactccaagaaggtgtgctaccggtgtggtaagtccggtcactttattgctaaatgtccaatatctagtgaaagtgacagggacaaagacaagaagggggagaagaaggagaataagaggtgatacaagaagaagggcggcgatgcccacatatgtcaagaatgggactccgatgagagctccaccgactccttctccgacgaggacgccgccaacatcgccgtc

SEQ ID NO: 12624 - DNA, 432 bp, Zea mays
agcttgtggcgccctcgggcgtcttgtcttagtctaagtaccaagtctcccacctggaagcctcggggcaaaacccttcgggcgtggtagcgtcacagagactgctgatacagtgccgagtgtagtaagaccacgtcccgagcttcttcgagctggtccagtgagtcttctcggctagtctggttgcttcggtcgtcgtacgcctttgtcctcggggaaccatactctaagtccatgggtaggacggcctcggccccatagactagaaagaacgacgagaaacccgtggctcagcttggtgtcgtcctcagactccagaccaccgagggtagctctttcatccactgcttgccaaacttgttgagggtcgtgtaggtcctcagtttaagtccctgcaaaatcataccgttggcacgctccaccttcccattc

SEQ ID NO: 12625 - DNA, 418 bp, Zea mays
agcttgtgaaggttcttcatccccacatgtgcttagcggcgatgccacagccagcccatgctagtcttagcaattaagcatgcatctagaccggcctcttcttttgcaaaatcaactaaataaagtttgccgtctaatacacccttaaaagctagtgaaccatcacttcttctaaagacagacacatctacatttgtaaataaacagttatatcccatatgacataattgactaacagatagcaaattatatccaagactctccactaaaaatacattagagatagaatgctcattagaaattgcaattttacctaacccttttaccttgccttgattcccatcaccgaatataattgaatcttgggaatccttattcttgacgtaagaggagaacattttcttcttccccgtcatat

SEQ ID NO: 12626 - DNA, 435 bp, Zea mays
agcttgacaacaccattcgacatttcacatattttttctgagatcaagaatatttagttcattcctcaacatgcaaaagcgggtcttatcaagaggcttattgaaaatatccgctaattgatcttccgacctcactccttctaaaatgatatctcctttagcaacatgatctctaaggaagtgatgacggatatcaatgtgcttggtgcgagagtgttgtacaggattattagcaattttaacagcactctcattgtcacacaacaaaggtaccttttctagaactacgccatagtctagaagagtttgtttcatatataaaatttgtgtgcaacaagcacctgcggcaatgtattccgcttcggcagttgacaaggcaacactattttgctttttggatgtccatgaaactagtgatctaccaagcagatggca

SEQ ID NO: 12627 - DNA, 369 bp, Zea mays
  unsure (1)..(369): unsure at all n locations
agcttatataagccttctgattatgcaacaacttatttaatctaaataatgggaaatattctagcctaaacaataagaaactgttttagcctaataaaactgacttatcctatctagtaggagaaaaattcaaacaaactcttttctccatgcagctcgttgaccttggcttgtgctttaatttctggacttctatttntatgcatcacaaacatgcttcatatgcatttttgttgaccggcttcccttctttttttatcaagtcattatgtccgtccctgcagccctacatcatccaattacaaatttctcattcaacacctatggaacccgaacctggtgcacgcatagagcatcctgtccatctgg

SEQ ID NO: 12628 - DNA, 435 bp, Zea mays
agcttggatactttggttcccaaccgatctctttcttagtttttgaattctccattctcttgcccaatggaccatcagtacctggagttaaaacacacttcgggttaattaagctatatgctattgcctgtgcactcaagaatatgaaagaatcaaagaaccatagcaggtcgtacaagactaaccagtaaagcctccaaacttcgtgtcaaattttccactattgttaacagcatccattatttcttgcatgtaaagttttttttccttttaaattaagcaaaccgaaagagtaactctgcacagcaaaactgactaaaaaacaaagaaaccgatatgaacaaggtcagcagttacctggaaaggggcttgttgtcacagcccagaaatattcgactccgcagtccctttttcatgattgctactgcaagggag

SEQ ID NO: 12629 - DNA, 431 bp, Zea mays
  unsure (1)..(431): unsure at all n locations
agctntacttaggatcaaaccctaattatagttttatatgagaacacaacaataaaaagaaaatctataaacataacttattttacaacaaaaatatatataccttcaagctattatacgcaagattttctgcatgttcatccttcgacattgtagatatgccagcctctagctttgggaatcctatattttttgccatctcccgacaaatagatgtctcctttttgtccggaaggcagtagagaaagtcgtcttcatcagtgccattgaacaccaaggatcctgggggatacttcaaatccttggcataatgcatagcttcgacaatctgctcttctgatagttttttccatgttgtgtgacacactatgaatttcaatccctcacaagaagcttcaacagtagggaattcagactctttgctagttttt

SEQ ID NO: 12630 - DNA, 339 bp, Zea mays
  unsure (1)..(339): unsure at all n locations
agcttctcatnggagaacatgtgatacgtcttttttttgttcatttcgaaacagatagacctggtgtcgactcgtctagcacggaaacacgtgggaggagcgcatcacagcaagaatgtgatgaccacttcatgacccctggagctgctgcatatggatctcttcggacccgtcgactatctaagcatatggggaagtaagtatggtctacttattgttgatgacttttcccgctttacttgggtgttctttttgcaggataagtctgaaacccaacggaccctcaagcgcttcctcaagagggctcaaaatgagtttgagctcttagtgaaaaaaata

SEQ ID NO: 12631 - DNA, 434 bp, Zea mays
agcttcacgcagacatgcaaagcgtgaataaacttgtctaacattgaacaaccaacagagtgtgcaccatcaagtaccatatatataaagaggtcaatgcatcaacaccatgatcgcaaagaacagttgtacatatatcagacatggcaaatgccttctattgttcccaaatacatgggccaatgcatcaaaacagtgatcagaaagaacaactgcacatattatcaacatagataatgtattgtcatgttgtcaaaaaaggatgacaaatgcagcaccagcaaaaaaaatattgctctgtcagcattcagacagatagctggagaggaattagagagatacagctaaattcctggtcacattggcatcaagccatcaatggacaagatcaaccagcgtcttcctccggagaaacctctggggaagccgaaacg

SEQ ID NO: 12632 - DNA, 419 bp, Zea mays
agcttgtgagcaatacaagtacagaagggagattctgcttcggctgatcagccgaagcccatgctcttatgtgaagatatagcaaagcagaacgtgttgctgggatctcaattatctgaggaacaggagaaaaacctaacaaggtttctgttcaacaacaaagatgtcttcgcatggtccgccaacgatctctgtggtgtcaacagggatgtcattgaacactcgctcaatgtcgatccatccttcagacccataaagcagaggctttggaaaatgtctgatgacaaagctgaaagtgcccagaatgaagtgaaaaaacttcttagtgctggagtcatcagaaaagtaaaatacccacaatggctagctaacaatggtatggtgaagaaagccaatggccaatggagaatgtgcattga

SEQ ID NO: 12633 - DNA, 430 bp, Zea mays
agctttactcaagagcgtaccctggttatacttctatattagagcgcatcaatggcttgagtgatgggcaacgtggaacggagggaaaacaggaggatgcgcgcttcgaccgactataccggctgattttctttctcgtctgggctgaaaacgaggtgttcgccatggcgcacggtccgaaaaccgaggctttggcacgaactccaaaataagctaagttcactcatgtggaaagacaccgaacatacagtgtatgtctttggtgaagggcacactggaacggacggaaaacgactctgatgctcgcggcgacaggcggcatggctgatctgccttgcgtttgggctgaaaacaaggcgtttcccatgtcgcgcgggccgaaaacaacggttctgccacggcctcgaaaataagctaagtccaagcgcgt

SEQ ID NO: 12634 - DNA, 441 bp, Zea mays
agcttagtcatggcaagtctacattacttaagtttctatcaaacatttttagcaaatagggtgaactaaacattcattgctcacttgcagattttggaacagcaacacagcagtcactccgtttaatcataactctccacaatattaattctcaaaaaatagcgaaaactaaagaacttttctggaaaagatttaaaagtgaactacaactttgggatttttacctcaacatgattcaacacttaacaaggttaaaacgtgctaatacaacagtgttgtccagatttggacagattcagacctgtgactttaaaaatccataactagagattaagacatccaaacaaatcgatcttagactttctggaaagataatgacattgtctacaacatcattataaacatctcaaggtgagtcaacatgaaatttatgataaaaga

SEQ ID NO: 12635 - DNA, 433 bp, Zea mays
  unsure (1)..(433): unsure at all n locations
ttaagtnacctgaggcatcaagcttaatcatcgcccgcatcatctcttctttctttctgatatacacactcatcatagataagcttaagccccttgtccttgtccattagattctttggtcctgtcattgttagcacaaaatagagacaaaaaggcaacaaacaatatgaaccctacaactatcttttagggtggtggtggtggaatataaattatgaagcgtcttaccctgctcttacaacgttcttaccagcactgtaagtggcaaacggtgaccagtgcgactcccaacgagcgtgggtgtgattgcaaaagagtacctattctgctcgatagaaagctggagttctgggaaggttgactaaatatatatatgtggcacacaagtcagtaacagatagcaatgctgaataagtgttccagtactcgtcct

SEQ ID NO: 12636 - DNA, 370 bp, Zea mays
acaaaatgagcatgctgatttgctagctaagtcagcagcacaggggctgcccttaccttcggatgtgttcttcgaaacaataaaagcaccttcggtggaacttcttgaaagagcagtcctcaatatatctcctgtttatagcgaagattggagaactgagatcatctcttatcttcaaggtaaattcctttcagatgacgaagcttataacaggaggatagaggcaagagctcgtccatatgtcatgatagaaggggagttgtacaagcatggagtttgtgctccgctactcaagtgtttatctataaccgaaagtatagagttaatgaaagaaatacatgcaagcctgtgtggatctcacattggatct

SEQ ID NO: 12637 - DNA, 428 bp, Zea mays
agcttcctagaggccattagtacagcatatagttctcttctccaactatgtgtagttcttttcgatggacttagtacttcggagacgaagtaaattgggacttgtttctttgtttgttcatcttgcttttcttgcactagcactgcagtaactaccgcctgtgaagctgctacatacaatagcaatggggcccctgatgaaggtggagtctaagttgtcaattgtataagatattgtttcaaatcttcaaaggccttttgttgaactggaccccattgaaagacttcggtcgactttaatactttgaaaaatggtagattcctttctaccgatcttgaaataaacctattcaatgatgccagcccgcctgtcaatctctgagcaccttttcttgactttggtggttccatccaaagtatagcttctat

SEQ ID NO: 12638 - DNA, 353 bp, Zea mays
  unsure (1)..(353): unsure at all n locations
agctntagtgttaagtgagagagatttcgtgtttcttttgagctcttgcgcctggattgcttcttctttctcattcgttcttgcgattcacttcaattgtaacaaagcaagagacaccaattgtgtggtggtccctgcgggaagttttgttaccaattgatttgataagagaaactcactctttcccaaggacctgttgagagaaggaaagggttgaaagagacccggtttttgtgaccacctcaacggtgagtaagtttgcgagaaccgaacctctgttaaacaaattcgcatgtcacactctttattctcttgcgatttcttttgtaccctctctctcggactcgattata

SEQ ID NO: 12639 - DNA, 397 bp, Zea mays
ctctgagtcacctgcggcatcaagcttcgcttgccatgctatctgaaccctttttttgatcctgattccgaagatacctgctcgcatacttagaaaacattgtcaaatcacgttatttgaggaccttctgaagccgaatgtccccaacaggctcaatagaatatacaaaagagttatgctcacaaaaattaactaatctagaccgagtagttactcccttgctaatatcacccaaaatctggtcgacgggatgatccctttgaatcatcgctcggacttgggttggaggtgccagttgcgcttcttccttcattacatgatcatcttgtgcttccccttgatcatacgcctcatgttcatcatcttgagttgggggttgcaccattgtttgaagaag

SEQ ID NO: 12640 - DNA, 402 bp, Zea mays
agcttcctcaaagctgggctacgatgccccctttgttattctgttgtcgaggtactgaaaacagtccgaatgtaccctcatcaactcactcccgaagctattataagaatggggatttttgtctgggctgtgacaagccaaagctcggagccaaacgctcaaaggtgctgcaacatacaccaattattgtacgagacaaagccctgaggaaaggagcaataccacaacaactttaagtgctacaacttctgcgcccgctccgggtcaagctaccctgtgccaacctttcggaagaaggggcccggagcctggatgtccgaaaggtcttatgtgaaaaatgatctaacaagcgcaaataatgtccaaagcaccattatgtacccaattcgacaacgcttcgga

SEQ ID NO: 12641 - DNA, 445 bp, Zea mays
atccttaagtcacctgcggcatgcaagctttacagacaggccttatgagaattttggtcttgcctatgtatgtccttagtgtgttcagaattggttcgagatggtggatggttacgaagtgcactccctggaataagatcgatttgatgctcaatccctcgaattagaggtagtccagccggtgtttcttgtggaaacacgtcttcaaagtcctgcaaaagatcagccacaacactatgaagagatgttatgtcgttaggagaaatcaaaacatctttgttcacaagtacaaagagcacttgatatgggttgttcctcacttagctcagattttgtggctagcataactagatgttctccctcttccttccttttatctcttgaatttgggttgtagcactcgctcaccgaatagtagatgtcactcaatttcttttgctcttct

SEQ ID NO: 12642 - DNA, 432 bp, Zea mays
agctttatcttggtgacttcacaacaagcaaatttattcctgagacttgtttagtggcaaaatccgacaagggttggctatggcatcgccggctagcccatgtcggtatgaggaatttggccaaacttcaaaaggataatcacatcattggactaacaaatgttgtatttgagaaagatagggtttgtggcgcatgccaagcaggaaagcaacatggagtcccacatcaatcatagaatgtggtcacaacaaagaggccattggagcttcttcacatggacctcttcggacctgtggcctacattagcattggtggtagtaagtatggtttagttattgttgatgatttttctcgaattacctcggttttctttttaatgataaaggtgaaactcataaatttaaagaaatcatgagagagctcaaatgaat

SEQ ID NO: 12643 - DNA, 336 bp, Zea mays
tgcagcttgcgtgaagatagggctccgtttctttatcccattcccaaacaagcgggcctaattattaattacaaggcaggagttctgagacaacataatcataaagatactaacatccacaagggtaggtctcactgtcacaactgccagcaacaaaagactagaacatatgtcacgaacttctttctctttttggtaacaagaacccaaaacaagaagaagcgacatactgatcatgtttaccccaaagactcatcttcatcatccaaaaattctttctcatcatcagagatattcttgttgaaaggaacaccatatattcgctgaaccccaccg

SEQ ID NO: 12644 - DNA, 415 bp, Zea mays
  unsure (1)..(415): unsure at all n locations
agcttggacttttgcctctaaagcatcttggttgttattttatcaagttnttctttcatggcaaagagggttctagctaatatctcttcgtcatgcatgtggtctaatgcatgatctactaatccacgaagggattttgtggcatcctcggcacagtcgacaagtactttaaccaaagacttcatggtgtcttctttcgaagatgccattcggaactgtgctgcaaagaataataaatgaacaaacactacgatttccttatgaaccaaacaggcgtaacgaattgaaaacaggccaacatatttatcaatgatgttgcatgccacaagtaaagaattcaattgtagtagtcatattttagcatggaacataacatatttatattagtataacactgcaaatgttattacagata

SEQ ID NO: 12645 - DNA, 431 bp, Zea mays
  unsure (1)..(431): unsure at all n locations
agcttagactgaatggttataaatgtgtgtacttttattatgtggaacttatgtgattntgtgcttctaaactattgaggccaaatgatgtttccatacgcaacttgatatgcatgaactgagtagcaacttggaatgacactctcaggtggtaccttgtcatgtttaaagcagctaattgcatggtgacaaggtatcctagtaagatgccatctgaaattgttcaacaattattccttcaaattttcatatgcccagagttgcttcttcaaatttgcacctttgaacttttcttgaaagttggagtgtcgatgtctaacacaaaacctatgctcagactctgaaaagacttgttgcacaataaggaatggtctcttttgtttatctatcattatccgccatggatatgtgttgtttatcttcaaatcatc

SEQ ID NO: 12646 - DNA, 417 bp, Zea mays
agcttaaagtaagtccggtgctaatcttcgtttattatgatgatatcagaatgagaaacgacgaatgaaccataagcaaacctccacccttcaactgatctctccataaccagcaaagacccttcttgcatctgaagtttaaggaggacaaacaaccaaaaggccacaagcgagatcagccgttaacataagaatgtactgaaggttctccaaatccacctggtgtgcaggctacaactgcactatcggtttctgacgctacccgcaccgggagacgattgacctgaaaccaccgaatccatgtccaagtgacaatttctggtggtaccacaccgggagacgattgggcctgaaaccaccgaatccatgctttccaagtgacaaaaccaatgaaccgtcggatctgacaaaacactg

SEQ ID NO: 12647 - DNA, 419 bp, Zea mays
aagattcttcattccaacatgcgctatttttcgatgccagagccagcccatgttagtcttagcaattaagcaagagtcgagttcagctctatcaaaatctactaagtatagctgaccctctaacactcccttaaatgttattgaatcatcacttcttctatagacagtaacatctgtattcgtaaaaagacagttgtaacccattttacataattgcgaaactgaaagcaagttgtaatttaaagaatctacaagaaaaatatttgaaatggaatggtcaggtgatatagcaattttacccaatcctttgaccaaaccttgatttccatcccccgaatgtgatagctcattggggatcttggttttctcgtaagagagaacaacttcttctcccctgtcatatgggttgtgcacccact

SEQ ID NO: 12648 - DNA, 411 bp, Zea mays
agcttcaaaggatatttgtctttgtatgctatttttgtgggtgaggttttgcagacgtagtctttgtaggtgaaggtttgtgcatctttccttcattgtaagagttcatggataaaagttcatgcacttgaaattcataggctggactttgggttcatcttgcgcaaagtcaattctacaagcctatgttgataacaaatgcttcttagttagttctaaattattagtggacgtgttacgtgtagtgaaaccatcaatagtagatcctcataggcaaaggcctactccgaaggtttgaacccgtgaagtcatgatttctaaccatgtgtgtctaagtcacacgaaagtaccccaaaaaattgaagtcaaaatcagaaatattggagaaaaaagccctcactgtagcctatc

SEQ ID NO: 12649 - DNA, 397 bp, Zea mays
  unsure (1)..(397): unsure at all n locations
agctctgtcttaaccatgctttcgtatactcgttatttgacttcgaaagtacctgttcacatatttctcttggaaaacatagtcaaattacgtttttgaggaccttcggaagccgaaagcccccaacagtaacccctcgcaatattaatttgctgtaaagataagtttatattgcgatatggacgaaggctatgggttgaaggtccgaaaaaacaccttccttttgctagaatagcaacagtcattgacaagcgggaccctccagttttcgacatactgcgtgtataaataaaggctcaccgcaagttatttggcacgctctcttgccatctgttntacctgctcaaatagctttctgcccacaaatatttgactaccttcctagttttaagcttcg

SEQ ID NO: 12650 - DNA, 349 bp, Zea mays
acatctgctttttggcgatgccacagatagcccacgcggagcgtataatgaagcatgcatctagacccgcctccactcttgcaaaatcaactaagtagagtccgctgtcactacacccttaaaagctaatgaaccatcactgctctcaagactgacacatctacatctgtgaatacacacgctaatcccatgatacataattgacctacagacagcagaggatatgcaagcgactcaactacgaacagattagaaatagagtgcccggaagaaataagcatcctacctaacccattcacacttgccgtgagtcccatcaccgaatatgattgaaacttgaggatccttg

SEQ ID NO: 12651 - DNA, 300 bp, Zea mays
  unsure (1)..(300): unsure at all n locations
ttaagtgacgcngctgcacttatgaccgactagacggcttttttttttcttcaagaaagtgttgagtgcacggcaggttaacagtcgaactctacctgttataacttctgggcgcttgatggctcaacaacacattaccttggtcgacgcctacagattgctacgatatggattcagttgtttgccaatctgcttctttactaaaagatcggtatgaatagttgtagcaaaatatgtggtgaaccgtattgggtcactgacaaccacttgagaagagatattatgtcaaggtcgaatttg

SEQ ID NO: 12652 - DNA, 444 bp, Zea mays
  unsure (1)..(444): unsure at all n locations
agctntatatggactacagtgtcggactccgtttattggtctgaacctggagaaagatactggtttatacctgatatggagaaagaggttgaagaaaaggttcagagaattatccataatatgaagaaagctcaagcacgacaaaagagttatgcagacaaacggcgaatgcccttatatttcctggaaggagactatgtctacttgaaggtctcaccaaagaagggtgtatcgcgtttcggagttaaaggaaaacttgcaccacgatatattggtccttttcttattctggaaagatatgggccagtggcgtatcgacttcaacttcccgaaacattgtctgctgtgcataatgtattccacgtgtcacaattgaagaagtgtcttcgggttcctgattgaaccatagaagtgactgatatcgtcctgcaaccagaattaaca

SEQ ID NO: 12653 - DNA, 388 bp, Zea mays
agctgcttcggcggattagctgaagcccatgcttctatgtgaagacatagtacagcaaatagtattgctggggtcttaactatctgaagagcaagagaaaactttgataagatttttagttaacaacaaagatgtctttgcttggtcagccaatgatctctgcggtgtcaacagagatgtcattgaacattcactcaatgtggacccatccttcaggccaagaaagcaaaggattcggaaaatgtctgatgataaagccgaaggtgctcggaatgaagtgaaaaggcttctcagagctggtgtcatcaaagaggtaaaatacccagagtggttagccaataatgtcatggtgaagaaggcccatgacaaatggagaatgtgcattgac

SEQ ID NO: 12654 - DNA, 420 bp, Zea mays
agcttggaagcgtctattggttgccgactggtggtatactcctccttcttctcttccgtcgccttgaatgcgacgggttgagcttcggatgtagatggatcatcaagctcgttgatcttcctcgagccttcgatcatgcactcaaaacttacaaaatgcccgataacttcctcgggggtcattctagtatatctaggattaccacggattaattgaacttgagtagggttaaggaaaataagtgatcttagaataaccttaaccacctcgtggtcgtcccattttatgctcccgaggttgcgcacttggttcaccaaggtcttgagccggttgtacatgtgttgtggctcctcccctttgcgaagccggaaccgaccgagcttcccctcaatcgtttcccgcttggtgatcttggtgagc

SEQ ID NO: 12655 - DNA, 396 bp, Zea mays
caagcttataatacggagaccacgctcagacgcattattttatgttgcaacggaatgaggctaacccgtagttcctgactgaatctcgagcgcgaactgcccaccacacataattggactaactacgtggcccaagcgtatagatcatacaggcgttaaacgttgacactcatactatcataagagcaagttttggatctcacaaatgaccaaataaccgacccaaggctccctcgtctggatgcacccgactgtcctgtgtacacccgacagtgtccggcgcaccaccggacagagtacgcagcaccacacgatttcaacttgaactcccaccttgcataatttccagaggcactcgtcctataaatcaccggactgtccgttgtacaccggaca

SEQ ID NO: 12656 - DNA, 418 bp, Zea mays
  unsure (1)..(418): unsure at all n locations
agcttgtagctataatagacattaacatattcttatttctcggagccagaagagccatatgtgttgaccactagactactagtgatgataatttgtgatagaaatatgaagatcttgtagagacctgttgtatcctctctactcctgatgatttcttcgtacgagagcaatactatctggtgtttgaaaggatcacgatgcccaagaggggggtgaattgggcttttctaaaaatcaacactaattaaaacctaagcaagagctaaacaagagcccaacttcaccccaacaactagcactaagaaaataatactagaaatgtaacaaggctaaaacaatgcttcaaatacttgctaaacaaatacacaaagtaaatagcttgaattaagtgcggaatgtaaagcanagtttagaagac

SEQ ID NO: 12657 - DNA, 428 bp, Zea mays
tagctatggtgaagaggcaagttcttaattctgtttcttctgaagtgaaatccactaagtagaggttgttgtatctaaatcccttgaataccattgattcatcatgcatcttggttacaataacctctgttggagtgaataagcattgaagtccaagatcacaaagttgacctactgataataaattgaagctcaaaggtgcaactaagagaacatttgatattgataaatcatttgagattgccaccttgccagtccttgcactcttccttttgaattgtctccaaatgtgattttatcttgaccgtcaacattctcatctagtgaggtgaacatccaggggttgcctgtcatatgttgtgtgcatccactgtcaataacccaatggctcccaccggtcttgtagttcacctacattcacagacaat

SEQ ID NO: 12658 - DNA, 412 bp, Zea mays
  unsure (1)..(412): unsure at all n locations
atgcttgatacacggattaaacatcgccatatttctgggtgtcaagagactgatggtgtacggagattctctggtagtcatcagtcagataaacaaggaatgggattgctcaagtgattcaatgggaagatactgcgccgccgtccgaaagctagaagataaattcgaaggtctggagtttcatcatatagaaagagatcggaacactgcggctgatgtactgtccaagcttggatccgggcggactcaagtcccgcccggggtctttgtgcaagaaattctccagccgaacatctcgacggatcaaatagaagagtgcattattatagatcaacccgagtcagactctaatgactggaggcacccgattattaagtttatanagaatgaagaagagccacatgacaagaac

SEQ ID NO: 12659 - DNA, 384 bp, Zea mays
ccttttctcctccgagtcaaccttcttctcgccatcagccttcttcttcacaacttcttcagctgcagccattctcttaatctcaacttcttcagcctcggcctttctcttaatctcagcttcttcggcctcagcctttctcttaatctcagcttcttcggcctcagcctttctcttatcctcaacttcttcttccttcttcttctcagcttcttcagctacagcctttctcttgatctcagctacttcggccttagcctttctcttattctcagctacttctgccttcttcttatcagcttgttcggcttcagcctttctcttctcagccctctcagcttcagcattcttcatctcaatctcagccttcttcttctcagactc

SEQ ID NO: 12660 - DNA, 411 bp, Zea mays
  unsure (1)..(411): unsure at all n locations
agctnttattactcgcacctaagtgtctacagtatgttttacaagctgagcgggagaagggaagactccaagtccctgtaaatgatttacgcaagtgtgtatatcgaatgccactggaagactatgaagtgttcgcctgcccctggaagagttgtatgcagccctatttatacactcagggggtgcatgacattgtaaccggggaacgccttgtcactgaaggaggcgtctttgtaccctatggacagtatggccttttacttcatcattgacttgaatccgctggttttcccgctgacagccatggctgaggttgagggtttggccacatacccgaacccccagaggaggggttgcccataccatactggttgtcacagggcttaagtatggggaaaagctgcttacagg

SEQ ID NO: 12661 - DNA, 367 bp, Zea mays
  unsure (1)..(367): unsure at all n locations
agcttcacaagctctgcgcgaagctatccgagctgtttcttcngcttggaagcgacaggagtggactggccacggtggccgaggctccggtggcaatggccgccggaaaaaaactctcccaatcttaagatggggcgtttggcccgcgaaagtgaacattgggtgaggtgaggcgcgcctgggaaggctttataagcgcgagcaggcaccacctatggccaaggcccgctgtggacttgacccaactctgggctaatgctccccggttgggccaactctcggctacctaccagggtcgaacacttgtgcgcagtcattctgctccaattctggcgcgtgtgtgtattcattcgagcctgctcttgcc

SEQ ID NO: 12662 - DNA, 422 bp, Zea mays
agcttaccgcatttgaagcatgatcgctttcctttgttttagtcttgctaggttggcccttgcgaccctttagtgccgtcttgaatcttttgatgatgagggccatctcttcatcattaagaccggccgcctcaatttgcgccaccttgctaggaagcgcctccttgctccttgttgccttgagagccatgggttgaggctcatggattgggccattcaacgcgtcgtccacgtacctcgcctccttgatcatcattcgcccgcttacaaattttccaagaatttcttcgggcgacatcttgatgtacctaggattttcacgaatattgttcaccaagtgcggatcaagaacggtaaatgaccttatcattaggcggacgacggcgggatccgctcatcgcgtgcttccgtagcttcttatt

SEQ ID NO: 12663 - DNA, 405 bp, Zea mays
ttaatcacctgcagctgcaagcttctcatctatctagtgctatcaatttatctttatcttatataattggctcaactcagaattttaaacttttcattcccttttgcttattttcttgaatgttgttcatggggttcacttaaggttcttaattatggttgcacattcttatcttttcaaagactcaattgttttgatcatgacacttttaaacatatacttggtgaattctttgtcacttaagttatcttgatgctcatgcttactttggttcacaagaagtaatggctcttggtgtggctttttaagagaaaccctaagtgacactggggtgtcacaattaaagcctaaccgctcgaagtgatgtcgggagatcacaccaagagggagattgagaccggtgac

SEQ ID NO: 12664 - DNA, 390 bp, Zea mays
agctttaccaaatggacgtgaagagtgttttttttattggaccaatcaaagaagaggtctatgttgagcaacctctcggctttgaagatagcgagtaccctaaccatgtgtataaactgtctaaagcgctttatgggctcaagcaagccccaagagcatggtatgaatgcctaagagatatccttataactcaaggcttcaaagttggaaaggccaatcctccactctttactaaaactcttgaaaatgactcgttcgtatgccaaatttatgttgatgatattatatgtgggtctattaacgaatctacatgtgaagaatttatttggatcatgacacacaaattcgcgatgtctttgacgagggagttgaagtatttttaagattcaa

SEQ ID NO: 12665 - DNA, 388 bp, Zea mays
  unsure (1)..(388): unsure at all n locations
agcttngagtttgaaggccatatattgcatattatttttgactctctcaattaaagactttgccacccacattagtctaagtctactcttgtttggtggacctacgaatgtaactttaacctttccatttgcaacctttcttagaacataatgagcattgaaagcaaatggccttgagtgcttaagcaagggagttggtggtttgactttgcaattgtgggcaaagtgaccttcatttccacactcaaagcatttgataagcttgtgagtctgcnttggcttgtattgagtggtagctttcttttgcacaaaagcatagtatccaataccactcttgttgtttttcataacagtgttcataagcagctcattnttgagagattgaccc

SEQ ID NO: 12666 - DNA, 420 bp, Zea mays
ttaagcaccgcggctgcactttcaccatgcctgctaccaattttgttttacctccatcaatgatcaaacgacatgaacgctccttaatgacacactttgtttgaaacaacgtatgtcgctgattctgctctgccttctccatttgtgcactaagcacacgctgtacaatgaggctctcataatgctctgcatcatctgcaccaatctgttcttcgggtggttccttagtgcctgcatcatcagccgcaagcaaagcaagtgtagcttcatccaaatcactagcagaagaatacccaccatcgtcttttaccaccaaaacacgctgattaagacaatcacgctgcacgtgtccatagcccttgcatcgataacacagaacatctcttgttctacctgtggaagctactgaagaggcactac

SEQ ID NO: 12667 - DNA, 429 bp, Zea mays
  unsure (1)..(429): unsure at all n locations
agctttanatctcgcgagaccttntcccatatttttttaatcatggtgagttcattatcgtatgtgatattctatgcgtgttcactttatttgttcccttgtatggtgtactgtttgtttcctaatttgaatggatgaatgtatgtatgcttgcaatcgcataaagaacgatccggttgaagagcccgaggaactcgcatgagaagaccctgagcagcagtcggttggtggaggcaagtgtcccttgacctatctctgtcctattcattctttaattcacctcccgctttacacatttatgcctaaagattgactagctttgatatccatgtccttgtttacctatttgggttggattattattgtttagctttatgctattgctcaaactctaatcaatgaacatgatgagattatctatgatacgct

SEQ ID NO: 12668 - DNA, 415 bp, Zea mays
agctctggctggattggtcatggggagaactttttattttttcttgattatagctcaacctgacggttctgagttcagtgttgagaattgccttgtgttgggttaaccaattcatacccagaattacatctatattctggcttttcagaacaatcatgttatcaggaaagttccttccggccattattactggcacttcataggccacttttcgggtaaaaatgtgtcccccaggtgaatgaattttaaatccctcttttgattcatgacatgtaatgtgatgttgctccacaaatttcttgctaatgaatgtatgtgaagcaccataatcaaaaagaataattgctggatgactggccacagaaaacgtacccatcatcaccggctcttctttcggtgtagtagccacttgagt

SEQ ID NO: 12669 - DNA, 74 bp, Zea mays
agtgcagccgtaaccaactatatgttagcatcttatatctaaatactgccttattcgattattatacttattga

SEQ ID NO: 12670 - DNA, 355 bp, Zea mays
  unsure (1)..(355): unsure at all n locations
tcaacaatgggagnnggaagctggagaaagctcttatctctgacatgcacacaaattgtgtgagggatgtcgcctgggcaccaattttgggattgtccaagtcgaccattgccagtggttcacaagaccggaaggttgtcatctggaccaagggaaaggatggagaccagtgggagggaaagctcatgcgtgacttcggtttccctgtctggagagtgtcgtggtccttgactggcaacatattatgcatagctgctggcgagaacaacataaccctttggaaagaaaggtcatataggcactgggaggaggcgatgaatgttaaccatatgatgaccggcaagggttctgaatt

SEQ ID NO: 12671 - DNA, 387 bp, Zea mays
agcttgaagccatggtaagtagcacaagttagtttatgcgaatagactcaagcctagctacgggtgcataggtttcaccgaaatccaaaccttcaacttgtgaatatcccttggccacaagtcaagctttgttccttgtcaccacaccatgctcatcttgcttgttgtggaagacccacttggttcctacaacattttggttaggacgtggaacaatatgccatacctcattcctcgtgaagttgttgtgctcctcttgcattgccaacaccgaatctgaatcccttaatgcatcttctaccctgtatggctcaatagaagacacaaaagagtaatgttcacaaaaatgagcaacacgagatccagtgggtacccccttttgaatat

SEQ ID NO: 12672 - DNA, 298 bp, Zea mays
aaatatctgcagtacacaaccgtcaccaacacaacatccatcctgtctagtcgtgacgcatatctcttcacacaaaacataccgaggctcacaatggaaggacatactcgtcacactctggtaaaacaccacccaacagtgcaaaatgggaagtccttgactgacccggcttcccacctacgatgacgcgtcttctaagcggagcctattggggccatcactggggcatcttctgaacattatcactatgacaaactcctctggtggggagatccgtcttcaaaccgatctcctgcgc

SEQ ID NO: 12673 - DNA, 100 bp, Zea mays
acctgaggcatgcaagcttctaaagggagaacacgtgataggtttgactatcgtacaattcgaaaaagatagaccttgcgcaggttgtcaagcttgttaa

SEQ ID NO: 12674 - DNA, 433 bp, Zea mays
  unsure (1)..(433): unsure at all n locations
agcttgcacttacgaccaaaccgcacccacatctatattacattcaatggctcaacaatagtggtaaggtcaaggtaaccaagttggtacgaattaatattgctattggttcatatcgcgatgttgttgactgtgatgttgtgcctatggatgcttgtaatattctgctaggtagaccatggcaatttgattcagattgtatgcatcatggtagatcaaatcaatattctctcatacaccatgataagaaaattattttgctttccatgtcccctgaggctattgtgcgtgatgatgttgctaaagctaccaaagctaaaactgagaacaacaagaatattaaagctgttggtaataacaaagatgggataaaattgaaaggacatcgcttgcttgaacananactgatgtaatgaatatttgcttcactact

SEQ ID NO: 12675 - DNA, 350 bp, Zea mays
cggatcttaagcactgagcatgcactgacatggcatacggcctgtgatttcactcaggctcaaatatttgaatggccatgtaacataagacctcgcattcggcttggctgggattcatgtgccaaactgcataccgtaataccaagccgtggtgtgtgggcttcaaaagcctaaggccatgcgaataagaagggaattactttagtcctactgtcagaaaatacaggttatgtctactaaagcatcaaagcaaatgactctagacttccataatatcttgagatattgcacaggatggaagccttcttcctacaatttcctgtaaagaatatcccaagaggggataatga

SEQ ID NO: 12676 - DNA, 266 bp, Zea mays
accgaactagcactcgctcaacatacaatttctcgaaatattttatatttaatcgatctcacacattgagtatgctgactgtgctctctctcttacgagtcatttgaagaactcgttcgcgcctaccggacatgaacctctgctgaaaggcttatgacttttaatatttcagttctttcaccttctgctccttcagaattaaaggcctccggctcaactgatttggcatgggatgcctttggcatcgcaaccggatcttcagcttt

SEQ ID NO: 12677 - DNA, 352 bp, Zea mays
gcagctttgaagaatttattctacatgtgcaagacggcggggccagagccagcccatattagtcttagctattaaacatgcatctagaacggcattctctttagagaaatcaactaaatagagcttatcgtctaatacacctttaaaagctaatgaaccatcacttcttctaaagacagatacatcaatatttgtgaatagaccattatatcacatatgtcataattgacttacagaaagtaaattgtaaccgagtgattgaactaagaacacattataaattgaatgctcgggagtgatagctattttacccaaacctttgaccttggcttgattcccatcttccaatatg

SEQ ID NO: 12678 - DNA, 481 bp, Zea mays
  unsure (1)..(481): unsure at all n locations
agcttctatagggagagcacattntagggataacaaatgtttattttgagaaagacaggatttgtagcgcatgccaagccgggaagcaagttggcactcatcatccacacaagaacatcatgacaagtgacaggccactggagctcctacacatggatttattcggcccgatcgcttacataagcatcggcgggagtaagtactgtctagttattgtggatgattattctcgcttcacttgggtgttctttttgcaggaaaaatcccatacccaagagaccttaaagggattcttgagacgggctcaaaatgagttcggcttaaggatcaagaaaattagaagcgacaacgggacggagttcaagaactcacaaatagaaggcttccttgaggaggagggcatcaagcatgagttctcttcttcctacactcctcaacacaatggtgtagtggagaggaagaatcatactctcttggatat

SEQ ID NO: 12679 - DNA, 444 bp, Zea mays
  unsure (1)..(444): unsure at all n locations
agctctatcaaatggacgtgaagagtgccttcctctatggaccgatcaaggaagaggtctatgttgagcaacctcccggctctgaagacagtgagtaccctaaccatgtctataagctctctaaggcgctatatgggctcaagcaagccccaagagcatggtatgaatgccttagagatttccttatcgctaatggcttcaaagtcggaaaggccgatcctacgcgtcttaccaaaacacttgggaatgattngtntgtatgccaaatttatgttgatgatattatatttgggtctactaacgaatctacatgtgaagagtttagtaggatcatgacacacaagttcgagatgtctatgatggcggagttgaagtatttcttaggatttcaagtgaagcaactccaagaaggcaccttcattagccaaacgaagtatacacaag

SEQ ID NO: 12680 - DNA, 199 bp, Zea mays
aaatcaatgaagaaatcattttggatctcaatatatcaaaatgaccacatcccccagaaatagcttatgtggataaaaggcctatattgatcggctttacaacttaacatgaggtggcgtcaaaaacaatcccctattgttgcttgaaacattaacgaccccacgagccctgttgagaataatggagtcctcttacttc

SEQ ID NO: 12681 - DNA, 394 bp, Zea mays
  unsure (1)..(394): unsure at all n locations
tctaagtcanctgaggcatgcaagcttgccaatactngtcaaagcaacaacatctactcatcttattttctgcagaccataccggtgacttggcccttcgcatgctggggattagatatgataggacctttcaagagagcttaaggaggatacactcacgtgttggtagcaatcgacaaattcactaaatggatagagttcaaacccattgcttctttaacctcagctatagccgtggaattcatacaagacataatattcaggtttggaataccgaacagtatcataaccgacttggggtccaactttacaagttcagagttcttcgatttctgcgagcacaaaagcattcaggtcaagtatgcttctggagcacacccgagagccaacgggc

SEQ ID NO: 12682 - DNA, 245 bp, Zea mays
gctaaaatgtgacttagagagaaatagagagctctagctctctatccacttggagatttgaaatggggtttctccaggggcctctttgcaatatttcccttctctaattgatggttataatgttgcttaaggtttgggtaaaagttacacatgctttacccacttgatcactctcttccctcccttacttaaggttttggaaggtagggctatggagagatctaaggttctttctcccctatggt

SEQ ID NO: 12683 - DNA, 385 bp, Zea mays
gcttcggggagccgaaggtccaaaaacacctttcctgagctcgttgccgagaaacgattcactctccctgcgcgtagcggccccaccttgcagagttactgttcggtctctgtggtccaccgttcagcgagtgcgagcgggtgtccgcctggtgtaaaacttctggcgcttcgccttattacctgcggcactatataaacagacgagtaggtgtgaagctaccacagcattcattgctatttgcactgttttcctgccaaaatttttaaccatcaccgaagcttgtctgttagaaccgaacgaagctccagtttgaaacctgcttcggaggaagaaaaatttatagtttcacaagttcataattaaatggccagagtccgctcta

SEQ ID NO: 12684 - DNA, 393 bp, Zea mays
agcttataacaggagaatagaagcaagagctcgaccatatgtcataatagaaggggagttatacaagcgcgaggtctgttccccattgctcaagtgcttatccagatccgaaggtatagaattaatgaaggacatacatgcaggtctgtgtggatctcacattggatctaggcccttgcttgggaaagtttttcgccaaggattttattggccaaaagcagcttcagatgcagcggatttatgtcaaaagtgcgaaggttgtcagaaatgtgcaagagatcataaacaaccttcgtctttaactcaattaatacaacccacttggccgttgctaaggtggggtctggatatgctaggtccattaccaccaccacaagggaacttaaggtatgt

SEQ ID NO: 12685 - DNA, 319 bp, Zea mays
  unsure (1)..(319): unsure at all n locations
tgaccgcggccggtgacctagcttggagcgtggtgtggtcaaattttnttttaaaaaaaaaactggctctaccttcgcgggcgtgctgctctttccgcggtggtcgtcgcggtcgccgtcgccgtgccgtacgggcaggagaacgaacaccatgctgcgcaggtgctctagtaactcgatcataagcatggtccgccaagcccccgttcggaccggcagctaccgcacttgtaccttttctaaaagctataagggcatctctaacaaattctaaaaataaatcttccagtacacgagaattgagatctctctgaatgac

SEQ ID NO: 12686 - DNA, 274 bp, Zea mays
tctggcaatgccaaagacgactaccttaacgcttgtgcccattacataaaccctgattgtcaactagagaaaaaggcgcttgctataatgcttatagatgtgtcacacaatggacaaaacaatgctgatcatggtgctggtgcgcatgctgattatggctatactaataatgtgattgcttttaccctagacaatgcatgatctaatgctgctgccatgaggttgactacacctataatgtcccatatccttgaatagaaatggggcagaatct

SEQ ID NO: 12687 - DNA, 355 bp, Zea mays
  unsure (1)..(355): unsure at all n locations
agcttatgaagattcttcattccaacatgagctagtcggcggggctagagccaacccatgttagtcttagcaattaagcaagtgtcgagttcagctctatcaaaatctaccaagtatagctgaccctctaacactcccttaaatgctattgaatcatcacttcttctaaagacagtgacacctacatcagtgaatagacagttgtagcccatntgacataatcgtgaaacggaaagcaaattgtaatctaaagaatctacaagaaaaacattggaaatagaatggtcaggagatatatgctatttaccaagacctttgaccaaaccttgatttccatccccgaatgtgatagctc

SEQ ID NO: 12688 - DNA, 466 bp, Zea mays
  unsure (1)..(466): unsure at all n locations
agctntatcanatggacgtgaaaagtgccttcctcttctgaccaatcaaggaagaggtctatgttgagcaacctcccggctttgaagacagtgagtaccctaatcatgtctataggctctctaaggcgctttatgggctcaagcaagccccaagagcatggtatgaatgcctaagagatttccttatttctaatggcttcaaagtcggcaaggccgatcctacactctnttctaaaacgcttaaaaatgacttgtttgtatgccaaatttatgttgatgatattatatttgggtctactaacgagtctacatgtgaagaagttagtaggatcatgacacagaaattcgagatgtcaatgatggcggagttgaagtattntctatgaattcaagtcaagcaactccaagagggcaccttcattagccaaacgaagtacactcaagacattctaaacaaggttgggat

SEQ ID NO: 12689 - DNA, 309 bp, Zea mays
agctctacgaatcctaagcgacaagagagtgtcacttattctgtaacgcacgttctacagggcagcgattaagcatgttatgttatatggagctaagagatggcctacaaagagatgacatatccaacaattaagtgtctcacagatgcatatgttgcacaggatatgtgggcacacaagatcggaccaagtgagaaatgatgacatacatgatcgactatgagtagcgccaattgaagaaaagcttattctacaccgattgagatagaatgggcatgtccactggagaccccagagacaccgatgcac

SEQ ID NO: 12690 - DNA, 473 bp, Zea mays
  unsure (1)..(473): unsure at all n locations
agctnggcccctacctggcgtgccaaatgtcggtgagtaaatctccccggccgggtggcggattgtacccgccctatattctaaagagaggaggggcctaagcgtnttgcttgctatgagactggtggatcaacacacgagagcacgcgagggtttagagtggttcgggccgccggagcgtaataccctactccactatgtgatgcattgcttgggagcttgtatgaacttgagagtgtctgcctagagattggtctgagtctggtaacgtcgcatgcctccccttttatagctgaaggggcatgcacaaaggtactgagccccgacacgtggtcccagagacatagagaatataacacttgggactataaatatttgctggcggggcaatcctcttgtgtcctgtcgtccgagatctatgtatctttggcgtataagggaagcttcttgtanaaaggataacacagtgcgct

SEQ ID NO: 12691 - DNA, 479 bp, Zea mays
agctcttgcccggaaagtctggcccatatgcagaccatccggctatccctatcggacaatccaggaccgcaccagggctactgcgtggcgccccaataatagcgaacacaaccgatcagttcggatgtaccactggacagaccggatacgcatacgcaaaacttactggtgcacactatgcaccaaattattacacaccacagcagcagtacgttctggcccctacgtatttaacccacatcacgccttacgatcacagggcgatcaacattatcgatcggtcacagcaagaaggtcgtcataataatgcccgaccgaatgagcctcacagcctatggtccgatggtctgccaccgggcgcaatatagaatattatggaagagatgactgaactattttgagatatgctccgagttagtgagctagaaggggcaatccgatattaaccacatgatcaccagttgacttgtccatatcac

SEQ ID NO: 12692 - DNA, 460 bp, Zea mays
  unsure (1)..(460): unsure at all n locations
agcttgtgaagattcttcattccaacatgtgcttgtctgcgatgccagagccagcccatgttagtcttagcaattaagcaagtgtcgagttcaactctatcaaaatctactaagtatagctgaccctctagcactcccttaaatgctactgaatcatcacttcttctaaagacagtaacacatatatctgtaaaaagacagttgtaacccattttacataattgcgaaactgaaagcaagttgtaatctaaagaatctacaagaaaaacatttgaaatggaatggtcaggtgatatagctattntacccaatcctttgaccaaaccttgattcccatccccgaatgtgatagctcgttggggatcttggttnttctcgtaggaggagaacatcttcttctcccctgtcatattgtttgtgcacccgcaatcgatgatccaacttgagcccccggatgcat

SEQ ID NO: 12693 - DNA, 439 bp, Zea mays
  unsure (1)..(439): unsure at all n locations
agcttatgcgatagaatcatacagctgaattatgtntcaataggataggaaacgaaacctggatcttctgatcacttcacgttttgtcagcatgaaagttgggtgaaatacgaaaaatacattgaaagaggcataatctcttttttgtgatggtatatgctgatgaaactcttcagagtgaaattttatgcaaaagcacaatcgattacatggaatttacattcagccaacacacagttgtgcatttaatagtataacattttatcaaaaataagtttcatatatccaaatgtattcagcatacatacagctgtgcatatgacagtataggaaatctaatgatagttaaacatacttctggcaattgtataatctgatttctaatttgatcaaatcaacctccaagaggcattcttggatactcattgagttctaatta

SEQ ID NO: 12694 - DNA, 408 bp, Zea mays
gcttaatgcccctaagagattgtctaactttgttagggcaaggctcccatggcccaggataacgagggttatattatataccccgccaggtatcccgagcacaaaattatgagaattcactctatgaagtctcactctggctctcatcatgcttatatgtataagagtgaggcatctagctctaggcaatcaacccatgctaaattgcctaagacaaaaactccaattgcatcaaatgaacctaacatttcatttaagacttttgatgcatcatatgttttaactaacaaatcaagcaaaatagttgccaaatatgttgggggcaaacacaagggctccaagacttgtgtttgggtacccaaggtgctttgttctaatgtgaaaggacccaagaccgtttgggtacct

SEQ ID NO: 12695 - DNA, 375 bp, Zea mays
agcatgcatctataccggccctctcttattgcaaatcaactaaataaagtttggcggctaatacacccttataagctaatgaaccattacgttcttttaaagacagacacatctacattaggaaagagacaattatatcccctattacataattgtctaacatatagcatattatatccaagggactcgaccaaaataccttacagatagagtgctcatttgagagtgcaatactgcctaagcctttcaccttgccttgattcccatcaccaaaatgattgagtttgggaaccctgttttgacgacgaagtgacatctcttctccccgctattgtgtggcatcctgtcgaaaccacctgacctcaatgataacct

SEQ ID NO: 12696 - DNA, 373 bp, Zea mays
  unsure (1)..(373): unsure at all n locations
agcttcaagaaccccatacttctactctatctccgacagacagataattctctgttctttgggaggcagtacaagaagtcatcttcatctgtgccattaaacactaaagcccctttcaggtacttcagttctcgggcatagtgtttagctacaaaaatttcttcttcacataatctttttcccgaagcatgtccaataatataatcaatgacttcggaagacacttcgggagtaggtgcgacagctctttcaagcaaaatctgttttataacctcttctcccgccgccttttctctattttccgaggatgtatccctgacgggctctaaaggcccagctttggcaatagcctggctcattgtaacttcngctt

SEQ ID NO: 12697 - DNA, 385 bp, Zea mays
agcttgctataggccttcttctttttctccatgataggaaccttattggaacactaccccacttataatgaatgagggtagatctcctgaatcttggggatatgaactccttgaagtacctcataacaagggtgttacggggcctccttctactgttgctgcttgaccaggctgcagagagatgactggcacagggttgattctgggagaaccttcttcttatcttctcttcactatcttcttttcactgactctttctttccctttgctcttcccactgaaggattctatcaaagagtattactatcatacactggaggaaaccaaagactatgaaccatgtgcaacagtcttcaacccaagaatcaccaagcattgtgatctt

SEQ ID NO: 12698 - DNA, 477 bp, Zea mays
  unsure (1)..(477): unsure at all n locations
agcttggtgccgatggaganacaaanatccttgaaatcttggctgtcaaactgcttgccgttgtcaactgttagctcggacggtactccgaagcggtaaacgatgttctgccagaagaatttctgggcagtctttgatgtgattgtggaaacagccctcgcttcaatccatttggtgaagtattcgacggctacgaaggcgaacttatggtttccctgagcggtgggcaggggcccgacgatgtctaggccccagcgctggagaggccatgtatgggcaatcagctttgtatattgcgaggggttgcctgaccgaggggagaacttctggcaggcttcgcaggacctcgtgaaccgatttgcggcgcatatcattgagggccagtaaaaccctagtcggatcaccttggcagccatggcccttgtgcctgcgtgcgagccgacgtgccactatggacttcgcgtatgatctgcatgc

SEQ ID NO: 12699 - DNA, 497 bp, Zea mays
  unsure (1)..(497): unsure at all n locations
agcttgtccgaagaggatctccaacacacttgttcggagcaatgtccaagggcagcaacagacttcagcttctggcaagagattcagtattgccagattcaaccaagttagtgttgatgctactgctgatagagccgatattgttatcggtacgttttatattaattcagttcctgcagctatattatttgattctagagctacacattcgttcatttctgctcgctatgtcaacacaaatgagttaccactgcatactatgcaaaaacccatgatagtaataacccctanagggcctattgaagcaaatcatatgaccaacagattaacactgacaatcatgggaagagagttctgatctatgttcgtagtattagaggaaagcagtatagatctaatacttggtatgtcatggttaacgaaagcacaggcagatatacattgtgctaggggaaccgtagaactcaccagtccacaaggagaaagatttgaagtca

SEQ ID NO: 12700 - DNA, 411 bp, Zea mays
  unsure (1)..(411): unsure at all n locations
agctntataagatcagagacgtcggattccgatcctatggctgcccttgcgtaccggttcacatgaaggccgatataatacgatccgttggattgtgatccaacggctagagtttcccgtaccccttcgcgggtcaatttttctaaagagaccctcatctctctggaaatcaacccgcagtccacctggtgggtattctgagtcttagtaacatttgctccagagccctcgcgctttctgcaatattgtcgcccagtccagaggagaataaaatagagaaatacatattgaaattcatttttaatacaataacaaatctagaaacttgtaaaattcatagagaatccatttgtgatccagattgaaccatttcaatttctaagattttggaataatattctctatcatcta

SEQ ID NO: 12701 - DNA, 362 bp, Zea mays
  unsure (1)..(362): unsure at all n locations
agcttgcagatatattagaatattagtcgccattctcttgtacacgtnttagtcccctgaggcctgtggcgctatattggcctactgtgacacatgtctttgtcatcgaacagcgatgtctggccttccgtcctccacccatgagttgatcattgagactggtaaagctgttctggccttccgtgagctataactaaaggttgttattgtcgaccgaccattattatgaccgcgattctgcacaccagttatggtcccctgagcacctttaagcagttcttgggctcccgtggctataacacacatttctgtggcaaaaagccaatttatgatttcacctgccccttcgtttaaaccgacat

SEQ ID NO: 12702 - DNA, 416 bp, Zea mays
gatactctgagtcacctgaagcatgcaagcttggaggcgtcaattgggagcctatttgctgtagactcttccttcttctctttcattgccttgaaagcaacgggttgcgcctcgatcgtggaatggcgccttgctccaagttgacaatatgtttggagtctttgatcataagttcaaagctcacaaacttgccaatgacctactcgggagacatttgtttatatctaggatctccacgaattaattgaacttgagtgggattacgaaaaacaagagatcttataataaccttgatcatttcatggtcatcccacttggtgctcccgagggtgcaaacttggttggccatcgtcttgagccggttgtacattgcttgcggctcttctcctttgttgaggatgaatcgactgagttct

SEQ ID NO: 12703 - DNA, 452 bp, Zea mays
  unsure (1)..(452): unsure at all n locations
cgaaagaatctctgtcaaaattatctctcgagggacaaatgagcatgctgatttgcttgctaagtcagcagcaccagggctgaccttaccttcagatgtgttcttctgaacaataaaagcacctttcgtggaacttcttgaaagagcagtactcaatatatctcctgtttatagcgaagattggagaactgagatcatctcttaaccttanggtaaattccttttcaataacgagacttataacaggaggatagaggccagaactcgtacatatgtcatgatgaaaagggagtttgactagcatggaagttgtgctccgctactcaagtggttatctagaaccgaatgcatatatgtgatgaaagaatacatgcatgcctgtgtggatctacattggattacgccgttacttgagaagtatccgtcagggtatattggccgacgcacttcga

SEQ ID NO: 12704 - DNA, 397 bp, Zea mays
aataccgatattatgagtaacaagatgcttgctctcgctttattgaactaaaagttgcagtcacacaaagtagtatcagacaagtgccgtgaaacgcaaacatcaattcaacaaattgcattgatctttgaacaatggcggtcacggatttcaattacacgtgggtaaaactcaaaaactagataacataattcacatcatatctgaaaaggaagaatgtggaatcaacactggttagcatctgtactgccagcaactattgtgtcaaatcctgaatccaaagggccaagttcaccatgagagcagctcaagacactaaagcatcccaacggagctcatctaactaattgcaagaactcaaattgaactgcaggaaccctatagtgccactacacat

SEQ ID NO: 12705 - DNA, 418 bp, Zea mays
  unsure (1)..(418): unsure at all n locations
gctntacaacagttcgacccgaggacatccctatactctgtagcgacacctccccgcttgcccctacccggtaaggtaatttcaccctagctttcctaattacttgtccaaggttgtcccattccacccttgtggtagcactatttttccaggtggatctccatgttccaattaacaatatgatcttaccatgaacaataattaaacaacaacataattggaacatgatcataataaaacattagtttctcgaatccaggtagagcaatagcaaatctaccccatagttcatctatttccaaggtgggggataaacaatgctatggaaacgtattangtcccaatcaaattaacctgagcatgtcacagtgattaacaataatattanntatgtaaaaggagtgatcaaggacacaac

SEQ ID NO: 12706 - DNA, 367 bp, Zea mays
  unsure (1)..(367): unsure at all n locations
agcttcagacttatctatattatggatggccttngaaatccgccaacttccttcggctcttctggcagcttcttgactcccatgtacagcaatgggcgccttgttccaaaggtatcttcatgcaaaggtatgctgggtggagtattgcttccaaggcattgagcgttcctcgaccaatgattgcattgtatggatactccatatcaacaatatcgaagacaacctgctctatccttgtgttgtgaacgtagccgaaggtgaccggcatggttatcttgccgagtgccacaatatgtctttctccaaaaccacaaagagggtgtgttgcatcatgtatcttgccatccggctcttgcattcgtctgaa

SEQ ID NO: 12707 - DNA, 416 bp, Zea mays
agcttgagagtaagaagtgagaaagaaaagtatgccaaccaagcaaacaagagcaacaagaaacacaagtgatcctcttccaagccctaatgcgctagaattgaattcaggactttgagtggatcgatcgctcgatttgtgtcttggagtgaagtctattgctcttgtattgaatgcaatgtatggaatgcttggatggttggagtggaggtggtttatagccctcaaccaccaaacaaccgttggggaggggctgttgtcgatgggcgcatcggacagtccggtgcgccaccagacgctgtccgatgcgccagccacgtcacccaaccgttagggttcgggcgcagacgaccattagaggtattgtattctattggcaccgaacagtccggtgccgaccggacaagtactgttac

SEQ ID NO: 12708 - DNA, 444 bp, Zea mays
ctctaatgactgccgctcagctaatgccctaagaatatactaactttgtatatggcatgctcccatggttcacgatagagagggctatattttgtatcctgcaaactatcctgagcacaaaattaggaaaattcatgctaggaaacctcattatctctctcatcatgcatttatatataaaaatgaggcttctagttctaggcataccactcatgtaaaatgccttataagaaaattcctaatgcatcaaatgagcatagcatctcatataatacttttgatgcttattatgtgctaacaaacaaatcaagcaaattagttgcctcatatgttggggccagacacaagagtccaaagacttgtgtgtgggtaccccaagttcttgtttctaatgtcaaaggacccatgacccgttggtaccttaaacaacgctacatatgttgt

SEQ ID NO: 12709 - DNA, 436 bp, Zea mays
tagcttctaaagggagaacacattataggatttattatgttcattctgagaaagacagggtttgcagcgcatgccaagtagggaagcaagatggttcccaccatccacataagaacatcatgacgactgacaggccactggaactcctacacatggacctattccgcccgatagcttacataagcatcggtaggagtaagtactgtctagttattggggatgattattctcgcttcacttgggtgttcttattgcaggaaaaatctcattcccaagagaccttatagggattcttgagaccggctcaaaatgagttcgtcttaaggatcaagagaattataagcgacaacgggacggagttcaagaactctctaattgaaggcttccttgaggaggagggcatccagcatgaggtctctttccctacacccacaac

SEQ ID NO: 12710 - DNA, 470 bp, Zea mays
agcttccacccgaactaccgcgctcgaaccctattctactatgtccagcagacatggaagggaaactcaccctggtgaagacgcaaccgcgcagatcccttgcccacaccgcgatggatacaccgtggattccagacgccgagtcgccaagccgccttcggcgccgccctaggaagtcacgccgcgcccggactcatagtggtctcacgaatcgaaggcgagcagacaacaacggtcggcgatgtgcactcacgctctctcttctccgcactcctcggcgacaaatgacgggcacggcagcggcgctatggttcacgtctgtggtcgtggaagcaccatagcgtgcaccattggcgtttatagcccgaggactctgaccccacgcgaggtggacgttgtgtagcccgaactcttgggtgaggccggtgtgcctcgtccgccgctgtaacaactccgcagagagaagaccc

SEQ ID NO: 12711 - DNA, 365 bp, Zea mays
agcttgtggcgccctcgggtgtcttgtcgcattcgaagtaccaagtctcccacttggaagcctcggggccgaacccttctggcgttgtagcgtctcagagactgctgatatcgtgccgagtgtagtaaggctacttcccaagcctctttcagctggtccaatgaatcttttcggttggtctggatgttttggttgtcagatgcctttgtcctcggggaacctgattccaagtccctgggtaagatggccttggccccatagactaggaaaaacggcgagaaacccatggcccggctcggcgtcttcctcacactccaaaccaccgagggtagctcttttatccaccgttcgccgaacttgttgag

SEQ ID NO: 12712 - DNA, 336 bp, Zea mays
tgaagacctaccaaatcatccttcatcagatcacccccgaagccataataaggatggtgagtttcgtctaagcagtaaggagccaacggctagagccaaacgcggagtgcttctgcaatatgcacgaacttctatatgaaaccaaggccatgggtaaagaacagtaccataacaacttcggttgttatagatttatcgctcgccccaacacaagccacccgatgccaacatttcggaagagatggcccggagcttggatggaagaatggttttatgtaaagaatgatttgaaagcgagggaagatattaaggaagctattatgcgccccatctggt

SEQ ID NO: 12713 - DNA, 496 bp, Zea mays
tgcaagcttaaagtcatggtaagtagcataagtatgtaatatacgaattgactcaagcctagctacgggtgcataagtttcatcataatccaaaccttcgacttgtgaataacctttggccacaagtcgagctttgtttcttgtcaccacaccatgctcatcttacttgttgcggaatacccacttggtacctacaacattttgattaggacgtgaaactaaatgccatacctcattcctcgcgaagttgttgagttcctcttgcattgccagcacccaatccagatctcttagtgcatcctcaatcctgtatggctcaatagaggacacaaaagagtaatgttcacactaatgagtaactcaagatctagtgtgtaccctcttatggatgtcgccaaggatggagttgacggggtgatctccttgaattgcttggtggactcttaagtgtggcggtctttgaccatgtatctcttgatcattcttcttgtcatta

SEQ ID NO: 12714 - DNA, 446 bp, Zea mays
  unsure (1)..(446): unsure at all n locations
agctttaagggagccatcttgatactctctttatatccattattatatgaaaactccgccaaaggcatacattcatcccatttctgtgagaagttcagaacacatgcccgccacatatcttcaagtatttggttcactctctcagtctgtccactggtttgaggatgataggccgaactgtggagtaacctattacccacggatttatgaagctcctcccacaatttggatacaaattgtggtccacgatccgacactatagtccttgggacaccatgcaaactgagaatattggcaatgtacaactccgcatatgtaagtaccggataatatgtcttgaccggtagaaagtgagcaatcttttgtagttcatcaacaatcaccccaatagaatcatacccttgtgctgncgtatgccatctcacaatgaaagccatactgatgtc

SEQ ID NO: 12715 - DNA, 429 bp, Zea mays
  unsure (1)..(429): unsure at all n locations
agcttctaaagggagagcacattntatgattatcaaatgttcattntgagaaagacaggattcgtagcgcatgccaggcatggaagcatgttggagtccatcatccacacaagaacatcatgaagaccgacagggccgcttgagctactccacatggatcttttctgcccgagtgcttacataatcatcggcgggagatagtattgtcttgtaatagtggatgattattctcgcttcacttgggtattctctttacaggaaaaatctcaaacccaagagactttaaaggggttcttgagacgggctcaaaatgagttccgcttaaagatcaacaatataagagagcgcaacgggacggagttcaagaactctcatatgaaagctttcttgaggaggagggcatcaagcatgagttctcttctctctaca

SEQ ID NO: 12716 - DNA, 368 bp, Zea mays
tcttaagcacctgcggctgcagcttctaagggagaacacgctgaaggtttgactaacgttcaattcgaaaaggatagaccttgtgcagctggtcaagcaggtaaacaagtgggaggagcacatcacagcaagaatgtgatgaccacttcaagacctctggagctactgcatatggacctcttcggacccgccgcctatctgagcatatgaggaagtaagtatgggctaattattgttgatgacttttaacgcttcacttgggtggtctttttgcaggataagactgaaacccaagggaccctcaagcgcttcctcatgagagctcaaaatgagtttgagctcaaagtgaagaagataaagagcgacaa

SEQ ID NO: 12717 - DNA, 364 bp, Zea mays
  unsure (1)..(364): unsure at all n locations
tcttgtattgcatctanggcttgtctaacctggttgagataaccacctacaaagcgagtgaaaaagcttaactcggatcaaactcgacaagtcttagttttaagctttttgcacttaaattcttactttctatgcaattgttggatcttgaaatatgcatgaagtactgcacttatggggagtattcaaaactcaaatcactcatgaaaacccctagtgcaaggccaaaataaaaaatttcaccatttgcctattttctctaaaaattatctagcctatggcaaaatattttgaaaattatgtgaaaatatatgagggtgccaatacctgtcccaacaagtgctattttgtgtgattataagtt

SEQ ID NO: 12718 - DNA, 263 bp, Zea mays
agcttaacaacttaagcctgtgttgaaggtatattttccttgtggcaaacaatgaaactattatatgagatttaaaaagtgtcttttattgcacagaatataaaactgaatggaaaagactactatcaaggtaggatatttgtcaataaatgtgcttcgactctggcacaatgctattgactgtgcgagcttcagactgttctctgaagtccctttgttgttgagcatattggcccccttctggctgctggcctttgtgcatc

SEQ ID NO: 12719 - DNA, 458 bp, Zea mays
  unsure (1)..(458): unsure at all n locations
agcttcgcacctctgaactaactcggctgcgttactctgtcgctcgttggcacgatannaatctcacgacgctgatagactcttctccgactacgcgtctctgtatgctgcgtgtattccacattgtccagcatggacctcatctagaagtcgtttcccagtagatgagagaatgcatttcatgaggacgcctgatgcaccccttctgtatagtgtctacctcatgagcgtgtaatgagttgactgtctatcgatgcgctcggctgcattattgtcatctggttcctcttcattctgtatatatttgacgatcggccttctccagccatcaaagtctgactctggtcgattcactatattacacttctctgcctgatcattgagatgcttgtgtgaggtattcttgtacaatacacccagtggacttgagtttactggacctagcttggcaatacatc

SEQ ID NO: 12720 - DNA, 226 bp, Zea mays
agcttttataataagtggtgatatgtggcttatattgttcataccttctatagtgacaccctaatgtttcaaccgcaatatacgagttctcctatgttttcccatttgcccctaactggaaatactttgtatttgagtcaccttctaacaagttttttaccttagccctttgatcccatttgacctcttctcattacacatgtgcttcatcaatatttaaagcatg

SEQ ID NO: 12721 - DNA, 459 bp, Zea mays
  unsure (1)..(459): unsure at all n locations
agctntgaaatcttctgatctgcttcagagattttattgaaattagcttcattcgtctatagcctttcgactaaagaaagaagaatcttatctttttcaagggcctcattccgaagcattatgacttctgagcgtatatttccgaaggctantttagtgctctcatcctcacattctttttgcgccttcaaagctttacttaaaataagtccctatataacgagaaaaagaaaacaagtaaatactttactcaaaatgattattaagaccctgaaggaaaaagtaagcacaaaccctcaaactggtgtatgctaagcagtctgctagatggtccttcgacattaaggataacccaagctcaagcttcaggtgacccatggtggccatcatttctcgacaaacattatcttcttgttgtaagaaacagtatatgaaatatcttcgtccttgcttcataac

SEQ ID NO: 12722 - DNA, 484 bp, Zea mays
  unsure (1)..(484): unsure at all n locations
agctngttaccatgtatgcttagaaagaacatacttagttaatctaatgatgctagaaagtgaaatgctaaaacttgattttagaaacagctagtgcttttggcaaaccagacccctcagccaaacagctgcatggtctataggtagaggagtagtttcctcacaccgggtaagtctagttgagtattagtatactcagccttgcttgtggcataattttgcaggtatgttgcatgatatggttgatggtgtgacgtggcctaccaccctgccactgggttggacggtcgagtgggatgctgcttccatgggagaggagcacgaggagtagtgggctatgccttgcccatttcctcgctatcgacaacatcgattattcgctgcatttatcttgtgacttttattcctactcgaaaactccgatctatgaaaattcagtacttatgtgacgttcctatttattgatttctctgtgactcactcg

SEQ ID NO: 12723 - DNA, 446 bp, Zea mays
  unsure (1)..(446): unsure at all n locations
gacccgcgacctctgagtcacctgcggcagcaagcttgacaacaccatttgacatcttacatataatttctgagatcaagaatatttagttcattcctcaacatgcaaaagcgggtcttatcaagaggcttagagaaaatgtctgctaattgatctttcgatctcactccttctaanatgatatctcctttagcaacatgatatctaaggaagtgatgactgatatcaatgtgcttggtgcgagagngttgtacatgattattaagcattttaacagcactctcattatcacacaacaaaaggtaccttttctagaactactccatagtctagaagaggttgtttcatatataataatttgtgtgcaacangcacacgcgtcaatgatttccgctctgcagtgacaaggcacactattttgctttggatgccatgaactagtgact

SEQ ID NO: 12724 - DNA, 480 bp, Zea mays
tgcagcatgctagcttattcaaaggtgtagatagaactaatattgacatgatcaatgaattaattgatgctctgtatgagaagaatagattcttagagaacatgaggatctttttatatgaagagcatgataaatttgttagtgcgcaaaattctcttgctatagaagttaaaagaaatgaaatgttttcatgtgaactatctacatgccatgaatctatttctaacttaaagagtattaatgatgatctaaatactaaggtagaaatatctaataaatcaagctcttatgtagaacatgttgtgatttgctataggcgtaaggattttattgttgatgctttgtgtgaacacttaatttccatctccacattaaatgatgaagtggctagtcttaatgcccaacttaagactagcaagagtgaatttgacatactcaaaattgcaagggatgcctacactataggtcgacacctctcaa

SEQ ID NO: 12725 - DNA, 322 bp, Zea mays
  unsure (1)..(322): unsure at all n locations
gcttgagggtctctgcgtanatgatgtttatgcatctgtccccgtccatcangaccttggtgagcctgacatcgccgacaacggggtcgacgacgagcgggtatttccccgggctcggcacatggtcggggtggtcggcccggtcgaaagagatgggcttgtcggaccagtctaagtagactggcgccgccgtcttcaccgaacagacctaccggcgctcttgcttgcggtgccgagccgaggtattcgccgcatgccctccatagatcatgaagcagtcgcggacctcggggaacccccctgctgggtgatcttcgttctt

SEQ ID NO: 12726 - DNA, 379 bp, Zea mays
  unsure (1)..(379): unsure at all n locations
tgggaactatgcccgaatcaatctgtctgattctgttcataagcgctgccagatgccaccgttccggtcgaccacgaccagcacgcaacataagactttcctaggtatttagccaagaccagaggcacgatagntctcatggtatcactgaactcccgggtggtcactccatgttccaataataagcgagaatactgtttaaccttctggttaacaacaataatgttaacttaccatttggaacattactatgagacatgagcgaccgcataaacataaagtatgagacaatagcgtagcgtccagaccagaagataagtgccccgctaaacaaggagtaatgttggaacggttagggtgatctatatacagaacccat

SEQ ID NO: 12727 - DNA, 221 bp, Zea mays
  unsure (1)..(221): unsure at all n locations
tctatagacnacctgctcgcatgcaagctcttatgagttctcacatcgggttatgtattacccctctaatccctatttagggtgaagatccctatacacggtgctatttgcataatgctattacaatacaacttgtttcaaaatttacctagtgaaagcactctatgtgtgtctaacatatgcaatgcccatgtgtatgatgttatgctcacagtttagtt

SEQ ID NO: 12728 - DNA, 406 bp, Zea mays
gcttcttcaagatttctgtcaaaatattcctcgaggacaaaatgagcatgctgatttgctagctaagtcagcagcacaggggctgcctttacctttggatgtgttcttcgaaacaataaaggcaccttcagtggaactccttgaaagagcagtcctcaatatatctcctgtttatagcgaagattggagaactgagatcatctcttacttacagggtaaattcctttcagatgacgaagcttataacaggaggatagaggcaagagctcgtccatatgtcatgatagaaggggagttgtacaagcatggagtttgtgctccgctactcaagtgtttatctagaaccgaaggtatagagttaatgaaagaaatacatgcacgcctgtgtggatctcacattggatct

SEQ ID NO: 12729 - DNA, 425 bp, Zea mays
  unsure (1)..(425): unsure at all n locations
nagcttaacttgtgtctgatatggatgaaaatgcttgttgtatataatctagaatccattcttcaaggcaccgaaagctctctctattgttactccaatggaataatgccttaaattgaagagttctcttggattgaatggatgatttcctccaccaaattctcttagaagatatcttgtgctacggtcacagaggtagatataccagttctaacagcataaccgcgcgcatctaaatatatattttctacttcaaatacgtctaattactttgatcgtgaagatatttaaaatcttattcaaacatgtcatcgtattacctggtggcacactgaggccatcagatctttcctatgcatctgatagaatcaacgcatcatgatctgaacctttctagccatcaagaacatatgtatacatcaaat

SEQ ID NO: 12730 - DNA, 407 bp, Zea mays
tgcttatcaagtctactttcatatggatccgtatttatagtcatatctgttctgaggccggcgtagtcattgttcttttaccgagacatttcctgccttttctagccatggtgctgcgtcaccctatattggcccaatgggtcgtgtatcaagatatgtccattatggacgcatcctagggttgcagcacgacctcaatacccttgtggtcggcctcccatgtttataaaccccctagccgccaccaagaacagcgggttttgtttagatcaaggttatctctcgctacttgcttgcaagcgcgcgtgctagttcagccgcccgtcttcttgtcttccgaacaccaccatattggagtttgatctttacacctacatttagactctggaatatagtacatgttctac

SEQ ID NO: 12731 - DNA, 456 bp, Zea mays
atcctctaagtcacctgctgcatgcaagcttcgcccacccttcgtctagatatgtgttatgaatctatttcctatgcttcgggccaggctagggatatcagttaaatctgctggtgataagctgaagttacgtttattgacgatctttccatgcgtgcaaccagtttacatgaaagcaacagctgtgccccgagaagctagaagagcacagaagtcaccatgcccagctataacttcgtcaactgcatcaacttcgccctcaatatgttcgaaggtgcctggcaggtcttcaactgaaggttcaaatatcttagaactggctccaactgagttgaaaacctgctttagccgttgcacgcatcgggtgccgaaatctaggcatttatcctaaagctccttcaatgatttctggaaatttgaactcttttcgacttcggcattaagcttcgtatcaag

SEQ ID NO: 12732 - DNA, 369 bp, Zea mays
agcttcagctgaagtgggaaggaccctttctggttgtatcttcgtcaagacccggttcttacagattataggacatggacagctacgacaatcctagatcttggaatgcggatgagcttcgacgatattatgtctaaattgacgtaatctttttcattttttctatggcccccttttcctttccacacggggagaaaggttttcaatggagccataagtcgtaacttctccttcttattcagctctacgagagcgaaatcccctcagatatgttaatgtagaatctgatcatgctccatcgggtgcagaataaagaaataaaatagagagaagctcgaacgtcatcgctcatgtgatgcagagcacgac

SEQ ID NO: 12733 - DNA, 489 bp, Zea mays
acctgcagcatgcaagcttgtgactcataacaagaggatacattatgttggagtgctctctgtgaagggctcttgcgaatcacttgaagcgttatgacttttgtgaatgattctgtacagtgtttgcaaatatgtgcaatacataataacatgtgtaggttttgtgaatgatattgttgcggtgcttgttgatggttttatgtgatgaggatctattattgtgcaatactaattaaattagatatctatgtgagtatatataaccagtgttgaatgctaattaatggtatattatcattattaacgactataactaggggcaactttctgttgggtgctaaatgtatattataacgactcacgattggttgttaatctatatacaacaaccacggtggtcgctaatatacataaagcaaggacggccgtcgctaaaagaagtggtcgctaagccttagtacagacttacaggaccatctatggttgtaa

SEQ ID NO: 12734 - DNA, 345 bp, Zea mays
gcaagcttctgcatatcctttgcacatttgataagcatagtggttgcatcaacatgtgcgcccttcacaagcatggtcatgctctcgctacatagtgtagagaccatgatgtcacaataattccgtttgaaaatgcacgtacccactctttacacattgcacagagattattaagagtaatgttatcgtggacatggaaatcatcatgcattattgccatgcagactcgaactccatcttaggttaaggatgattgtatatagattcgaactctgtttgaaaatccacctcttcaaacctcgcatactactcattagaaaaaagcatatacctcatttgcacatg

SEQ ID NO: 12735 - DNA, 330 bp, Zea mays
agcttatgaagattctccataccaacgtgggctagtctgcgatgccagagccaacccatgtgagtcttagcaattaagcatgtgtcgagttcagctctatcaaaatctaccaagtatagctgaccctttaacacacccttaaatgctattgaatcatcacttcttctaaagacagagacccctacatcagtaaagagacagttgtagcccatttgacataattgagatacagaaagcatattgtaatctatagaatctacaagaaaaacactgtaaatattatgggcaggtgagataacaagtttacccaatcctttgaccaaaccttga

SEQ ID NO: 12736 - DNA, 283 bp, Zea mays
acctgcggcatgcaagcttatttcagttagacaacacaaatatccttttgtctatttacttatgctgcaatgagtaaactttgttagcgaacgcaataccataatatgctcaaaagttaaaaaaaacgctgattagacgccataaagatggaagaaactgcgaatagctattgtgctgaattatagatcattaatcttgataatgcattattgattaatctagaagggaagcctaatgcaatggtgagaattgtctaaagtccccaggtcatgggttcaaagc

SEQ ID NO: 12737 - DNA, 368 bp, Zea mays
  unsure (1)..(368): unsure at all n locations
agcttctaaagggagaacacattntatgactaaccaatgttcattttgagaaagacagggtttgtagcgcatgtcaagcacgaaagcaagttggtgcccatcatccacacaagaacataatgacgaccgacaggccattggagctcctgcacatggatctattcggcccgatcgcttacataagcatcggcgggagtaagtactggtctagtattgtggatgattattctcgcttcacttgggtattctttttgcaggaaaaatctcaaacccaagagaccttaaagggattcttgagacgggctcaaaatgagttcggattaaggatcaagaaaattagaagcaacaacgggacggagttcaagaac

SEQ ID NO: 12738 - DNA, 447 bp, Zea mays
  unsure (1)..(447): unsure at all n locations
tagcttgacaacaccatatgagagctctaataatatattcgagatcaaggatattcaagacagtgctcaacatgcataagcggggtttatcaagacgcttacagaaaatatccggtaattgaacttccgacctcactcctactataatgagtgctccttcancaacatgatctctaaggaagtgatgacggatatcaatgtgcttgtggcgagagtgtcggatacgattattatctattataacaacactctcattgcacacaactaaggtaccttctctagaactactccatactctagaagagattgtctcatatagagaaactgcgcgcaacaagcacccatggcaatgtatccacttctgcggatgacaggcaacactatattgcttttgatggacatattctagtatctctcaacatatggacccccaagagacctatatat

SEQ ID NO: 12739 - DNA, 519 bp, Zea mays
  unsure (1)..(519): unsure at all n locations
gacccgcgatctctgagtcacctgaggcatgcaagtctgaagtacatctttacccagtcgagctgatatgaggcatacgagatggcttgagctgattaaagattatgaattggagattcactatcacccaagcaaggccaatgtagtggcaaatgcactcagtcacaacgcttactgtcattgtcttatgatgacgacttcttacattacattatgccaagaaatggagaagttgaacctgtgaatgattcaacatggaactttagatcacttgaagcttgagtcggttcttctgcaaagaataattgatgcacacagaaatgatgatggtatgaaacacattcatgagaaaataaaagtcggtaaggcaatattgttttatagaagatgatcaatgccgtgtatggtttaacaaccgcataattgcgcccaagaatgatgagatccgtcagccaattctagatgaaacacatcttagtccgtattctattcatcnntcgagcactaagatgtatcatg

SEQ ID NO: 12740 - DNA, 448 bp, Zea mays
  unsure (1)..(448): unsure at all n locations
agcttgaanagtatntggatatggttcgaagagttgatgcttctttcgaggggatttctgtcaaaaatatccctcgaggacaaaatgagcatgctgatttgctagctaagtcagcagcacaggggctgcccttaccttcggatgtgttcttcgaaacaataaaagcaccttcggtggaacttcttgaaagagcagaccttaatatatctcctgtctttagcgaagattggagaaccgagatcatctcttaccttcagggtaaattcctttcagatgacgaagcttatacaagaggatagaggcaagagctcgtccatatgtcataatagaaggggagtngtacaagcatggagtntgtgctccgctactcaaatgtntatccacagccgaaggtatagagttaatgaaaggaatacatgcatgcctgtgtggatctcacatcggatct

SEQ ID NO: 12741 - DNA, 173 bp, Zea mays
  unsure (1)..(173): unsure at all n locations
agcttccatctataccgtctcagactgttgataactagctgtaagtcttcgatgaagtcttccgaattctccgtttngattaccacatcatctacgtaggcctccacacgcttgccctagtgatcggctaagcatgtttgaatgctctctgataagttgctccagcgtttttg

SEQ ID NO: 12742 - DNA, 454 bp, Zea mays
cacttgacattgtctctcttttggaagacaatgtcattctttattccacggcgtgtcccactatagagcatgcttctagcaaatttaaatttttcatattctaagacatgctcattaattctagcactaagttgagctatgtgatcattatgttgtttaattaaggcttggggagcatgaatagcatcaacattaatatctctacatctagtgcacatagtaatatgctcaatggtagatgtacagggtttgcaagtatttaattcaacaatcttagcatgtgaaatagcattctcatctctaagattggaaatagaaatattgcagacatttaagtctttagccttagcaattattatttaatctcaatttgaggtagagaagatgcatcaactatcaatttagcaacaaataacatatcattttaagttaacattgatcatacaacattaac

SEQ ID NO: 12743 - DNA, 438 bp, Zea mays
agcttgtgatacttccaattgaaagacacaatctctacttatgaatttccatgaaatatcttaaaagagattggattagtaacacaagcaatagttttctatttagcaacctctagtatatgaatgacaagaatgttactaaaataaagaaacctcatgatatgaactaaattacccttacaagcatcatacataacatcaattgctaaaaagatgaaagtagcatgattatttaattaagtttacatggcaagtttaattcatagcatggtgagtgattaatgtagaatactcaaaaccaatttaaacacgaatgaatacattacatagtattggttcgatcttctttgaatgttgaatgtgacactccattcgcgaaacacattcttatgttgtgagactacataaacactcggatagaaacattagtctcacaac

SEQ ID NO: 12744 - DNA, 380 bp, Zea mays
  unsure (1)..(380): unsure at all n locations
cactaagagtactcttaggcatatgtccgaaggttcctacgtctgagggcacaggcaccaatagtgcccaatgaaattgtcattgaggccatgatcaaggggcttctgccaggaccttcagctcagtactttgccaggaagcctactcaaactctggagaagctgctccagaagatggacgagtatattcgagctgacaatgatnttcgccaaagaagggaggaagctctcaggttctctgaaatgaccaggggcttctgaggaagggtttatccgaggcatgtcacgtcaattcataattctactcaaaatgatgacaaagggagtcaccagcanaggccacagtgntcctcgcaagcttcggagcaacaacaaagctc

SEQ ID NO: 12745 - DNA, 404 bp, Zea mays
  unsure (1)..(404): unsure at all n locations
agcttcttgtagctgctgccanaaatgggaggtgaactgcgtccctcgatctgacactatcttcttcggcacaccatgaaggcagactatctgtgacatgtataactcagctaacgttgctccggtgtatgttgtcttcacgggtatgaaatgggccacctttgttaagcggtccacaaccacccagatggaatcatagccggcccgggtacgaggtaggccaactataaaatccatcccgatctcatcccacttccactgaggaatccgcaatggctgcaacaatccggcgggcctctgatgctcggctntggttctttgacagctatcacagatggcgacatactccgcgatctctcttttcatgccataccaccaaaaccttcttttaaatcctggacatc

SEQ ID NO: 12746 - DNA, 469 bp, Zea mays
acaacagatctgatgtgtattagcgaatcaagaaataatccaagcataaaatctgtctgtgatgaccttgcaactaaacacaacagatctgatgtgtatgattgtaacaatcaggccaacaagatctgaggttaacaatcattctaaacaatcaggccaacaaatagaggaattcgagttgggccaggcaacatatctaggtgcagatctaggtaaataatcattctaaacaatcattctaaacacaacaggaagatcaagaaatagaggagtgtgaggtaaagactggcctgtgtatgaggtactagcgaatctaggtcaggcaacagatctatgtgcacggggagatgaccttgcaacaagaccgaaggatagtataatcgtagcacaaatacaagatcatgtttaagaacaacatatcgatggggacaaacctgagaaaataaatactattgtgctgtgtgatctg

SEQ ID NO: 12747 - DNA, 280 bp, Zea mays
  unsure (1)..(280): unsure at all n locations
acctgangctgcaactataaatattgcacaagcagtaataacgatgtgcctttgatcacttgtggtatttaaaaaagttcatacttgtcacatggcatgagcaagtattatgtgctccacatgtcatagagtgaaagtagtgcatgtacatacacgcccaccaacgccgattgcatgatcatcaataaagcatagcaatcaatactgatcaagcaaatttacagtggcagcagcctgaatactcctacctacccaacccccaaaaagatcttgcaatctt

SEQ ID NO: 12748 - DNA, 196 bp, Zea mays
  unsure (1)..(196): unsure at all n locations
acatgtgctaagcggcgatgccacattcagcccatgtctttcttagctattaagcatgcatctagaccggcctcttctttggcaaaatcaactaaataaaggttggccggctaatacacccttaaaagctagtgaaccatcacttcttctaaagacagacacatctaccttnggtaatagacaggtataccccatg

SEQ ID NO: 12749 - DNA, 277 bp, Zea mays
  unsure (1)..(277): unsure at all n locations
gcttgtgtgcaaccaacttgtactattactgntagaaatatgcccaatagataatcatagagatgagcatatttctctgatccatgatatatatatatatatatattgcttaattgaatatctaggaaaggcacattgtattgattagcaattatgtgaattgtttgtgagaatatntacttgtatgggtattctaaatgacgtccctagtcagagtcgatgactagcacatgtattatttgatgactacatttcacaagtcatggacatgaaaatg

SEQ ID NO: 12750 - DNA, 230 bp, Zea mays
ttttgtatcttcaatagaaaacgcagcttcggcttgtgccagaatcttcacatgttcgcatcctgccttctctaagatagtcgcaatccccctagcacctgagaaggcgcggacatctccgcggccactcaaaactttctcaaaggcttcagcttcgtcggtgatccattcgattggaccttcgggatcgcctactatgaagttgtcctcattcgagtatgcgccaatat

SEQ ID NO: 12751 - DNA, 396 bp, Zea mays
  unsure (1)..(396): unsure at all n locations
gccgagtatgcctctggagcacttatattnganactntaccgctgagaatcatttcaagtcggcttaccaagtcaacagaaggaattctcctattggtaacccgagttgagtcggccagccctcgatacagatatgccggataggccctgtctatcagtggctgaatgttcttgaatacaaaatcagtgaccacaacttcagcagtcagacctctatctttcagtaatccgactttagtaagcagcacgcctgcctcagccacctcctgatctgtgggagactcagtccaactctgagtgcgaacgtctgggctgtcttctgaccgggaggggagagaatctccataattatcaactataaaccactccaaacgccaccctttaatgctatctttg

SEQ ID NO: 12752 - DNA, 182 bp, Zea mays
  unsure (1)..(182): unsure at all n locations
tgcagcttagtgactgtggagagattgctnggttctttaagctcttgcgctnggattgctttcttctttcttgattctttattgcgatcaaactcacttgtaattgaggcaagagacaccaatcttgtggtggtccttgtacgaactttgtgttccaagtgattgagaagagaaagctcact

SEQ ID NO: 12753 - DNA, 232 bp, Zea mays
  unsure (1)..(232): unsure at all n locations
ctaagcttgggattcctttntatgttctggagctagacagcaaggcagtttaattntaattaacaatataactcatggccatatatgagttattggtgcactattttcttcccgttgcaacacacgggtatttacatagtgaccttatgaagaccctaatgtacaaacattttaacgacgcatcccacactaaagatccgacctccagcattaataagatatcactaccgga

SEQ ID NO: 12754 - DNA, 437 bp, Zea mays
  unsure (1)..(437): unsure at all n locations
agcttctaaagggagaacacgtgatatggttaactaatgtgcaattctaataagatagaccttatgcagcttgtcaagcaggtaaacaagtgggaggagcacatcacaccaaanatgtgatgaccacaacaagacctttggagatgcttcacatggacctcttctgacccgtcgcctatctaaatatatgaggaagtaagtatggtcttgttatagttgatgacttttcccgcttcacttgggtattctttttataggataaatctgaaacccaagggacccttcaagcgcttctaaggagagctcanaacgagttgagctcanggtgaaaaagataaggagcgacaatgggtctgaattcaagaaccttcaagtggaggagtaccttgaggaggaanggatcaagcacgagttcttcgctccctacacaccacaac

SEQ ID NO: 12755 - DNA, 166 bp, Zea mays
tgctgtcttatttgcgccttcgaaagtcaaaacatgttatgcaccaaggattgacttcagttgcacaaataatattgccgaataccaagcacttctgtgtgggcttctgaagttaagggccatgggaataagaagggccatcctgaaaactgattctcaagtcatt

SEQ ID NO: 12756 - DNA, 206 bp, Zea mays
  unsure (1)..(206): unsure at all n locations
agcttcngatgtagatggatcatcaagctctgtgatctttctcgagccttcgatcatgcactcaaaacttacaaaatgcccgattactttcttcggggtcattttagtatatctaggattaccacaaattaattgaacttgagtaggggtaaggaaaataagagatcttagaataaccttaaccacttcatggtcatcccacttta

SEQ ID NO: 12757 - DNA, 190 bp, Zea mays
  unsure (1)..(190): unsure at all n locations
gcttctaaagggagagcacattntgggactaaccaatggttcatttgagaaagacagggatttgtagtgcatgtcaagcacgaaagcaaggtggtgttcatcatccagacaagaacatcatgacgactgataggccactggagctactccacatggacctattcggcccgatagcttacataagcatcga

SEQ ID NO: 12758 - DNA, 171 bp, Zea mays
  unsure (1)..(171): unsure at all n locations
gcagggcaaacagggtgggaagctctcatcacaccacanatgtgatgaccacatcaagacctttagagatgcttcacatggacctcttcggacccgtcgcctatctaagtataggaggaagtaagtatgggcttggttatagtgatgattttttccgcttcacttgggtat

SEQ ID NO: 12759 - DNA, 250 bp, Zea mays
  unsure (1)..(250): unsure at all n locations
gcaagcttcggtgatgggtaacaatattggcagcaaaacagtgcanatagttttatatgctgnnggaacttcacacctactcgtctggttatatagtgctgcaggagagaatgcgaagcggcagggttnttacaccaggcgggcagtaacttgtactcgctgcgcagtggaccgcanagaccaaacagtgactctgcaaggtgggaccgacacgatctcgggaaatgaatcgtttctcggcaacgagctc

SEQ ID NO: 12760 - DNA, 410 bp, Zea mays
  unsure (1)..(410): unsure at all n locations
atgcaagcttgtggaggttcttcatccncacatgtgctaagcggcgatgccactaccagcccatgcaagtcttagctattaagcatgcatctagaccggcctcttctttggcaaaaatcaactaagtaaagttgccgtctagtacacccttaanagctagtgaaccatcacatcttctaaagacagacacatctacatttgtaaataaacagttatatcccatattacataattgactaacagatagtaaattatatccaagactctncactaaaaacacattagagatagaatgctcatttgatattgcantcttgcctaaaccttcaccttgccttgttccatcaccgaaatgatgaatctgggaatcttattcttgacgggaggtgacatcttcttctccccgcata

SEQ ID NO: 12761 - DNA, 289 bp, Zea mays
  unsure (1)..(289): unsure at all n locations
tgcagctgcaactttaagagtttgtgaacaaatggacgaatatcattttgtttcttccggcattcgaagncaaatggacttgtcgaaagagctaatggcattataatgacaggaataatgaagttaatcttcaaccagcccagcgggaagtggccggacgaattactcaaagtggtatggagtcacaacacaacaatatcaagggcaactgggtttacaccattcaatatgntgtgtggtgacgaagcaataaccccagaagaagctaatgcatgatcaataagaacag

SEQ ID NO: 12762 - DNA, 183 bp, Zea mays
tccccgcacacagtcattcagacatcgggggcccactggcatccgctcatcgcgcgcgcttgagtcgctgcagagtcgggccaacatgtcatctctattgcggcgacaacaacaacccacgcgagaagctcgccaccattggcggaaatcgagcgcgtcgttacccctatcccgagccgagtc

SEQ ID NO: 12763 - DNA, 222 bp, Zea mays
  unsure (1)..(222): unsure at all n locations
caagtactcaagttattctgtccctcatgcactaatgacatttagatgcttggggacctctattgctcctatgtccctaaatgtccccaaccttgaaacacaaacgcagaccgggcccaaaccctttatgtctcaaagccccatggaaacaagggattcaacatggctaagcataatcgaattgtaagacaaaaggattaactgggcctagtanggatagta

SEQ ID NO: 12764 - DNA, 260 bp, Zea mays
  unsure (1)..(260): unsure at all n locations
cgtttcttaatccccccgacatgatctttcctcacgcggntaatcgttataacgaggattaggctctgataccaattgaaagtgcctagaggggggtgaatggccagttaaaactttttcaacaaaaactaaaagcaaactgggtaaaactgaattgatctcgaaattcacccggttaactttggaaatgagatgttctatatgatccacagggttcaaagtagtagatctgagaanggcacttctcaaaatccacacac

SEQ ID NO: 12765 - DNA, 448 bp, Zea mays
  unsure (1)..(448): unsure at all n locations
gcttcggattacaaaccgacttatagatagaatgaccttttagtccataaaagtctgagtcaatgttgtaaactnttataaggggtatacttgtaattcctcacaggctgcgtcctgtgcctataaatagtgaacagtattcctttactgttcacgcattctggtaattgcaatcgcatctttcgggaaccaacctttgccaaggcagaggtattattgtattcaataattcaatatattaagtaaatataatataattcgtctatgatttatttacccttttatacnnccttatttattgtatctcatacaatctattgaaattttattacgaagattaagcttcgtaatatattctcataaccttcgccaaagctcatatcctcanggaaaatattcatggtgaggacgtaacattaacatttatgtgccttgtcttaatcataca

SEQ ID NO: 12766 - DNA, 169 bp, Zea mays
tatgtgcaaaacatataacatgtgtaggttttgtgaatgatattgttgtggtgctctgttgatagttatgtgatgtggatctatcattgtgcaatactacattaaattgtatatctatgtgagtatgtgtataaaaaatggtgatttgtgatgcttttgtatatataac

SEQ ID NO: 12767 - DNA, 181 bp, Zea mays
  unsure (1)..(181): unsure at all n locations
attgtctcttattgtctctattttcaaaagatggcttcttgtggggagaagtgttgattattggaaaaagggggagtntttgaaatccgcggtcaaattcttttgaaatgactctctntatgcttcaatatgtgtggttgacttatagatagagatttgagtttgatttgcaaaaacaaac

SEQ ID NO: 12768 - DNA, 299 bp, Zea mays
  unsure (1)..(299): unsure at all n locations
agcttcaactctatgtctcttaagcttgggatctccttcatgtgacattttaagaatattccaaatgtcacgggcatcttctcttccttgaactttccggtattcttctggacaaagacttcctttaattatgctcactgcttgagcattgcgatgaacctcttgcatcatttccggagtcatctcttctccttgngcgggcttatacatacctacattaacaatctcccanagactatgatgcacaccgattaaatgcgacttcatcttgtcggcccactcgtcatagntcaactcac

SEQ ID NO: 12769 - DNA, 278 bp, Zea mays
  unsure (1)..(278): unsure at all n locations
agcttctccttgtcgtcatcaactttgacgtagaaccattccgatttctagcctgccagccacttgcttcggtagctgatcacaggagatattgtagttttccgatatgcaaaattgtaacaaccaaaaatttcatgtagcccatcctttctggccttagattggtagtgtagctcgtgtactcggcagaagccttcggcaaatggctccacccnctggcttcggagagcccaaatataaacactaagcctaacaatagcgttaggagctagttgatg

SEQ ID NO: 12770 - DNA, 359 bp, Zea mays
  unsure (1)..(359): unsure at all n locations
gcttataaaaatntctacatctaagagttgaagccatgtaaatntgtatatattttatgntgtgaaacactatcaattcagtcagcccttcctctcaactatatcaacttcacttttggtttgtagctctgtatctcacttctacttcttgatgtggtggactcttagcatatataaagtgtcttcaatattactttgtaatggcttctatgagtcttataatgtcttctttgaggggttgcatcctcaaagcctcagtccaatccacttcgcatcctgtgaactacaacacacaaatacttgggaattacattagtccacatgttatgttgatcatcanacaccacaacctattgagc

SEQ ID NO: 12771 - DNA, 154 bp, Zea mays
agcgagtgataaagcttaactcggatcacacttgacaagtcttagttttaagcttctagcacttaaattcttactttcaatgcaattgttggttcttgaaatatgcatgaggtactgcacttatggggagtattctaaactcatatcactcatg

SEQ ID NO: 12772 - DNA, 367 bp, Zea mays
  unsure (1)..(367): unsure at all n locations
gcttcacatgtctcgtatgattcanaatcaaacgaagttaanagcttatcataatgaagcttcttcatgcgattctcacttatatgacccacacgacagtgccacatgtaggtaggacttatatcattaggccgaggccttttagcactaatattacagataggtgcatcatcaagaattataatgaataacccattcataatggatgcanaagccacaaacatgccattcttagagatcacacaaccattgttttcactcgcaaatgaataaccatccttcatcanacatgaaagagacataatggtttcactcatactangaactagataacaatttattaactccaaaataaatcctgatggga

SEQ ID NO: 12773 - DNA, 198 bp, Zea mays
tctatttatctttattgtatttagactaaatatattaaaaatatattagatctaattgatcgatctcaccatgggtgatgatagaggatgagttttatattcccgtctcgtgaaccctgttagtttggctcgatgcctgccctgcaaggggcttgtattctgtttatatagatgtacagggtacatgagtatggtaac

SEQ ID NO: 12774 - DNA, 220 bp, Zea mays
acttcgttatcaagcgtgctgattgcatccgactgaaagagatccacatatctagcttgagaattcacgcggctggaagctctagaacaagccctctatgcagcagcggacaaggtaacagacacttcctgattgaatgctgtgaactctgattgatagcagcggacaaagatggtgattatagcagcatttcactgacttgtgctgcaaactctgattg

SEQ ID NO: 12775 - DNA, 303 bp, Zea mays
  unsure (1)..(303): unsure at all n locations
atctctgagtcacctgangcatgcaagcttagctggtgacgaagctcgaagtcacctcaagccggtaataaactcatacctggtgcttnacctttccttgagacttgagtttaccttataatgctntgntatgtacaggatgacgaagccgaagagcaatgatccgaagcttggtggatggtgatgaagctgaagacattgctatgaaaaaactctagagaaactcttgaattatccttgtaaagaatatcgtaatttaagaatcagatactactctatttaattgccataccttgcaatata

SEQ ID NO: 12776 - DNA, 231 bp, Zea mays
aagaagagcttcggaagagaacggtattaatttgcaagacatatttcaagaaattcataattaaatggccagagtgcgctctactgctagagttgacggcgagggagacgaagcctaacgtgcggaaactggtcctatctctgaagcaatgaagcgatctggattgatgacatcggaagacacacctgctgctgaagcagaacaagcagatatcgatgaggctgattctga

SEQ ID NO: 12777 - DNA, 422 bp, Zea mays
  unsure (1)..(422): unsure at all n locations
gcaagcttgtggaggttcttcatccccacatgtgctaagcggcgatgccacagccagcccatgctagtcttagcaattaagcatgcatctagaccggcctcttcttttgcaaaatcaactaagtaaagcttgccgtctaatacacccttaaaggctagtgaaccatcacttcttctaaagacagacacatccacatttgtaaaaaggcaattatatcccatattgcatagttgactaacagaatagcaaatgtaaccaagagactcaactaaaaacacattggagatagagtgctcattagaaanttgcaatnttacctaacccttttaccttgccttgattcccatcaccgaatattattgaatcttgggaatccttattcttgacgtaggaggtgaacatcttcttctcccccgtcatat

SEQ ID NO: 12778 - DNA, 273 bp, Zea mays
  unsure (1)..(273): unsure at all n locations
agctngacaagagattcatcactaacatttaatttctcaaccttagcaattaatttatcattntcaaatctaagggtggaaatagtgtcatggcaagtgcttagctcactagttaatttctcacattnttctatctcctgagcataagcacttttaactctaacatgcttcttattntctttaataaagaagtcctcttggctatccaagagttcatccttctcatgaatcgcactaatcaattcatttaaattttcttttttgtgcatgttt

SEQ ID NO: 12779 - DNA, 356 bp, Zea mays
  unsure (1)..(356): unsure at all n locations
ttcaaatctgattccacaatttgaagaatgagaatccacattcaactcacactcagacaatcaataaaaaatgcttcgcatgcaatgcacattacaatatttattattattattattattattaatttatactcgccacattatctattttgaggaaaaatgtttaaatgcataaattactcccatccaaatagttcatttgagaaaatttatttaaacttcacaacatgaaatttatgtattatatgggaagtggagcacgacgacgaattttcatgatgcttcatcctattgctgcgcacaatgatgttctactgcgatgattnttctcgatgnttcgcacatgatcgaaatga

SEQ ID NO: 12780 - DNA, 364 bp, Zea mays
  unsure (1)..(364): unsure at all n locations
agcttgaaccatggtaagtagcatatgctaataatattcgaattgtctctagcctagctatgggtgcataggtttcaccaaaatccaaaccttcgacttgggagtatcccttggccacaagtcgagctntgntccttgtcaccacaccatgctcgtctntgttgttgcggaagacccacttggttcctacnaacatttggttangacgtggaactaaatgccatacctcattcctagtgaagttgttgagttcctcttgcatcgccaccacccaatccgaatctttgaagtctttctctaccctttgtggctcaatagaggaaacaaaagagtaatgctcacaaaaatgtgcaacacgagatct

SEQ ID NO: 12781 - DNA, 449 bp, Zea mays
  unsure (1)..(449): unsure at all n locations
gaaacacttccaatttagtcagcccttcctctcaacttgtcaagtcacttttgtttgcatctttgtatctcacttctacttcttgatgtgttggactcttagcatgtataaagtgtcttcaatatgactttgtaatgtcttatatgggtattataatgtcttctttgaggtgttgcattcttagagcctcagtccaatccacttcacattctgtgaactacaacacacaaacacttggaaaatacataagttcacatgtttgtgtaatcatcaaacaccaaaatctattaagccaaatggccgggggccattttccttataatctccctttttggtgatgtgaaacacacccaagcagcaatatacaacattgatataaatacattacttgtangtgctgttgtccatatggaatatgataacctctctactcatatcatactctatta

SEQ ID NO: 12782 - DNA, 100 bp, Zea mays
ttgtagcgcatgccacgcacgaaagcaagttggcacccatcatccacacaagaacatatgacgaccgacagggcgcttgagctactccacatggatctat

SEQ ID NO: 12783 - DNA, 241 bp, Zea mays
taagtagcatatgccaataatatgcgaatggactctattctatctactggtgcataggtttcaccacaatccacaccttcaacttgtgaatacaccttggcacgagtcgagctctgtttctttgtaccacaccatgctcgtcttgcttgttgcggaagacccacttgtgtcctacaacatattggttaggacctggaactaaatgccatacctcgttccttgtgaagatgttgagctcctc

SEQ ID NO: 12784 - DNA, 447 bp, Zea mays
  unsure (1)..(447): unsure at all n locations
tgcagcttgatgcatcatatatngaactatgattattgtttaatattattcagttaactattatgatgggttaacctgtcccggttaaaactgtcacaaccgggtttcagaggcaccaagacccgggcgtgggataatcaccaagtgtgctaggactaagtctcatgcatatgatgactcatggtacagaaatgaatgttacatcattaatatatgacagagttctgtacaaaatagttaaataattatatcatatgaagacaacgatccagcaactcannagtattatgagacgacgacttagacctctacgaactcatcacagcatccttcatgcacctgatcctgcgatacctgttcttgacctatggnggtgtgagacagcanaggtgagctcacatacattcatcgctcaacanagtgtgaggaataatgtgcatgaactca

SEQ ID NO: 12785 - DNA, 253 bp, Zea mays
  unsure (1)..(253): unsure at all n locations
cagggatatgatcacgcttttgtttaatgggctgctgtaaatgtcttccctgtccttttgtgtccagtagcaagttaattatgggtgtctttgtgtaattaagcaaatccgaatgttactacttatggtacctacctgatggtattatggtcaggtcaagtgtatttttgttttcttcttaatccgagagcactacgtattttcaaaactctacacttgntntgcactatatggacaagtctggcaaagtgat

SEQ ID NO: 12786 - DNA, 282 bp, Zea mays
  unsure (1)..(282): unsure at all n locations
ttgtagcccctactgcaagcacnccggtgcaagataatataagcctcatccctcctcttgtgtgtcatcttgcatcaacccatctaggcagggacacacggcacacaattactattcggttcngttgagggtgcccacgtccgaaacgccgacaggtactgtgtctgatgttgatccgcgggcgtcggattgggatcggacggtttcagttgcataacggttcggcaggagtgaagaagtaatcgtaactgtgcacggcagatctgaccgctgggatttcat

SEQ ID NO: 12787 - DNA, 178 bp, Zea mays
caagctccttctcgggtcttatatttccaaactgcggatttatacaatcaacacagtacatgacaagaggccaagagggcgcacttgaagtctattaatataattacacagatgcgtggtggaatgtgagttgcaagatattcccaaaatattgtaagcagatatataacattcaatg

SEQ ID NO: 12788 - DNA, 332 bp, Zea mays
  unsure (1)..(332): unsure at all n locations
cgatttgatgcttaatccctcaaataggatgtagtccacccggagtttcttgtggaaacacgtcttcaaagtcctgccaaagatcagccacaacactaggaagagatgatatgtcgttaggagagatcanaacatctttgctcacaagtacaaagagtacttgatatgggtngaccctcacctctctcagctgcgatantgngctagcaaactagatgttctcctcttcctttatatctcgaataggcttgagcactcctcaccgaatcgggatggactcaattcttttgctctttctactctactgctgactaattcagtttctatgaaat

SEQ ID NO: 12789 - DNA, 238 bp, Zea mays
  unsure (1)..(238): unsure at all n locations
cacgtgataggtctaaccaatgttcatttctataaagatagaccttgtgcagcctgtcaagcacggaaacaagtgggaggctctcatcacaccaaacatgtgatgacaacatcaagacccctggagctgctacatatggacctcttcggacccgtcgcctatctgagcatangaggaagaaagtatgggttaattattggtgatgacttttcccgcttcacttgggtattctctttac

SEQ ID NO: 12790 - DNA, 80 bp, Zea mays
gctttattattattatatgcgcaacatcagctgacacacacaccatagcctatctagctctacatgcgcgtctatccatc

SEQ ID NO: 12791 - DNA, 399 bp, Zea mays
  unsure (1)..(399): unsure at all n locations
agctngatcccgttntggtgcttgatgccacagggggagaaaataatatcctaagcaatagatggatcagctaccacttgagaaattctgaanatagtagaatagagcttctgggtttgtcaaaactcttttattgtctcttatgtcaaaagttggcctcttgtggggagaagtgttgattatggaaaaaaggggggagttttgaaatccttgatcaaatttctctggaatacctctctttatgtctctacgagtggatttgacttagagataggaatttgaggttgatttgcaaaaacagaccaagtggtggcataaagtgatccatatatgtcaaaattngaatcacaacaatttgagttcttaattgaattngatttgacttgtctacttgcttat

SEQ ID NO: 12792 - DNA, 307 bp, Zea mays
  unsure (1)..(307): unsure at all n locations
agctngaacttggcatgtctgcaatgtctaaagatcaacttgcanactgtcnttcttacaatagcctgaaggtgtgtatactntgatttgtcattctgcaatatgtgctatgatactctcattcttgtggcttttcttatcgtcgntacatgctcactcttcgttttctagggctttgatttaagcaagggctttgaaagcccanaaagatgcagaggatgagagcttccgaatagctcttggaaaccttcgctctgagggtattacattaagaaacgaagctcttgaaaaggataaaatattactc

SEQ ID NO: 12793 - DNA, 228 bp, Zea mays
tgctcgtcttatcaattaagcatgcatctagaccgggctcttcttttgcgaaatcaaccaaataaagtgttggcgtctagtacacccttaaaagctagtgaaccatcacatcttctaaagacagacacatctacatttgtgaatagacaattatatcccatattacataattgactaacagatagtaaattatatccaagagactcaactaaaaacacattagagata

SEQ ID NO: 12794 - DNA, 252 bp, Zea mays
  unsure (1)..(252): unsure at all n locations
gtcccacttacttgatgctaacaagacatttccttcactttagccatcttcaacacttcgcccataaaaaagatcaattatcatcttcaattgcatgtctacaagacaagtgataattgcaataagtaaattataatctacatntatataatctagactaccaaacagctacatatagacatatagttgactaacgaacagcttggtatgctagctgctgcagtgagccaatgaagtacaagatgttctatg

SEQ ID NO: 12795 - DNA, 177 bp, Zea mays
ctagtcaccgactgagtgtgattctgatgcaatgtaaatattttggtccttgcagtctgggagggctagcttgggtgaaatatgatcacgctataaccacagattatattcctgtagaggaaatatttgtttcgctcagtttgaaaaccgagcatagtgtgctcgagactattaacc

SEQ ID NO: 12796 - DNA, 312 bp, Zea mays
  unsure (1)..(312): unsure at all n locations
agcttatgacattactgannggttntttcttctatagaaacatacatgcatgccagttttttattattacttctgactaggctaacttcttcacttgagtaaccggaatccgcttacctgttngtcttctttgtgattatctcattgtaaaagccatctgggtctaatcagaaattggcagggaattccaacacacatttgtaattattcaaacaggttngcttgctctttctcttcccttcctgcttgataattcctgaattgtggtaggccttgtgctattttatttttgtcacatatgcatggctttca

SEQ ID NO: 12797 - DNA, 358 bp, Zea mays
  unsure (1)..(358): unsure at all n locations
gaacgtgaagacttgttcggtccacggggtcgctttttccgaacgcgagttacttatcgcagaaggtgatgagtgaggtatccgtatcccggaggcgtatgagccccttggctcggtcagccttggctgcttacgtgtactccgtcgtttccaggatccgctttccgaagtagtcaagaagcacgaaagaaattctgctaanaagagatctttnttcgaggaanaattcgacgcagaggggggtctcccccttttagcccncganggaaggtcgggctttaccgaggcgaggccgaccctttcttgatgactaaactttgcgtgggtgcgaggtatatgaataacttgaaaacatctt

SEQ ID NO: 12798 - DNA, 254 bp, Zea mays
catgtgcaagtcggcgatgccttagccaacccatgttagtcttagcaattaagcaagtgtcgagttcagctctatcacaatctaccaagtatagctgaccctctaacactcccttaaatgctattgaatcatcacttcttctaaagacagtgacaccaatatcagtaaaaagacagttgtagcccatatgacataattgggatacggaaagcaaattgtaatctaaagaatctacaagaaaaacattggaaata

SEQ ID NO: 12799 - DNA, 134 bp, Zea mays
tttggtacaaaaagcctgtccgaaatgcatgataaaggtttaaaacctactttactccctccttcaaaggttcgtttaagtttaaacctgtacaccccatttttatctattttaaacttttattggacgacacc

SEQ ID NO: 12800 - DNA, 144 bp, Zea mays
cggatcttacacgagctcacttaaggaacatggatagctacatgtatttaaaaaaacctgcacttgcacaggaacaggggagacgctcacacagaagtatgaccttagacccgagcgtctatgactttgaccgcgctattacta

SEQ ID NO: 12801 - DNA, 285 bp, Zea mays
  unsure (1)..(285): unsure at all n locations
accttgttaacaccgtgtctgcatgaaatctttcctatggactccattcaaaagaacttgtgaagaaccggagccaagaatcatataaacccagtggatccacttatcaccgaaccccttgtgcctcaagatctccataagagctgcatgctccaatttatcaaatgtcttttcaaaatcaagctntaaaatgaccatttccttntctggattgtggcanagggaaatatattcaaaagcccatgcgtangcaatctggatcgatctatccttgatgaaaccata

SEQ ID NO: 12802 - DNA, 418 bp, Zea mays
  unsure (1)..(418): unsure at all n locations
gatatgcaaacttgaananaaatatttcctacaggnttcttcaatctgatgcaacatctacttgttcacctaccatacaaagctaaggtaggtggtcctgtccagtatagatggatgtatcacatcgaaaggacactaaagaagctatgtgcaatggttggtaataagagacgagttgaaggatgcattgctgaagaattaaatacaaagagatagcatcgttcacgggcctgtactttgcagaggagattctgcaactgggtctggatcttctcgagtttggaaaatgaagaagctgcattttgtggaccaccactagaagcttcacccgaatctcaagttntgataaagccaagtggaaagtgagtgacatnagtcttngtttaatnggtatcgaaagtatgtctttatttcaaca

SEQ ID NO: 12803 - DNA, 170 bp, Zea mays
ctgcttttctaataatctattcttatcattcaaggcatcaatcaactcattaatcttatcaaccttagttctatctaagcccttgaataaacatgaatagtctatttcattatcatcactagactcatcatcacttgaagaagcataagtagtattccgagtacatacct

SEQ ID NO: 12804 - DNA, 478 bp, Zea mays
  unsure (1)..(478): unsure at all n locations
gtagaattcattgagncttttccttacattattaaacacacgaacaggaaggacaatgttattgctgatgctttgtctcgtcgctataccatgctgtcatagntagatattaaaatctttggtttgacactgtgaaagatcaatatgttgacgatgctgattntaaagatgctntccgccattgtattaatgggaaaccatggngcaaatttcacatataggatgggtttctgtttcgcgctaaccaagttgtgtggttccagctagctccggttcgtctttttggtggtacacggaagcgcaatggaggcggtcttcatggnngcactttggcgtctacaagacacatgangtagtggctgcccacttcttttggcctcgatcccgctgatgttgacgccttgtgccnctgcatacttgtagaaagtatgtacgggtgacaacatggtngatataccttgctgtctactcctttgat

SEQ ID NO: 12805 - DNA, 376 bp, Zea mays
  unsure (1)..(376): unsure at all n locations
ctgcagcttctaagggagaacacatntttgggctaacaaatgttcattntgagaaagacagggtttatagcgcatgccaagcangaaaacaagttggctcccatcatccacacaagaacatcatgacgaccgacaggccgcttgagctactccacatggatttatttggcccgattgcttacataaacatcggcaggagtaagtattggctttgaattgtggatgattattctcgcttcacttgggtattatttttgcaggaaaaatcacaaacccaagagaccctaaactgattcttgagatgggctcannatgagttcagattgagaatcanaaagaatagaagcgacaatgggacggagttcaagaactcaca

SEQ ID NO: 12806 - DNA, 56 bp, Zea mays
acttatcaaggtacaagaccacttaagccactagtaaacttaggcacgaactctta

SEQ ID NO: 12807 - DNA, 54 bp, Zea mays
accgagctgaactcgctgagagaaagaacgctgaagaaaattttaccgtgatct

SEQ ID NO: 12808 - DNA, 135 bp, Zea mays
  unsure (1)..(135): unsure at all n locations
aaacacgtttatgataacaaaagtcattnttgtatgacaggatttgnagcgcatgtcaagcaggagagcacgttggagcccatcattcacacaagaacattatgacgaccgacaggccactggagctactccaca

SEQ ID NO: 12809 - DNA, 470 bp, Zea mays
  unsure (1)..(470): unsure at all n locations
gcttcgtanaataatctccgaagctatacctcgaanatcaatattgtttctccctgtaacttggcatgattagccctctttcaaagcattgtccgaagatcgataacatgctcgcttcttgtgccacatgcagcatgatgtatgatgattatgctatgcacaatgatgcgatgatgttatgttatgcaaaatgatattttgtgccgaagataccgacattccgcgaatcgggcaccatctnttgtatcaatactgactgtctcattatcacgctcgcttacgaccttgntcgcctgttacttcagcgggaatcagcgttattcttcgctgtaagtctgcatcccctangaacgtctttgacttcttcgcctttactaggcggataagcttgcatccctaggacgtcttgagctcttccctttactaggcggatcacgtgactttcgtgatgcctgatcctttgaacactt

SEQ ID NO: 12810 - DNA, 211 bp, Zea mays
  unsure (1)..(211): unsure at all n locations
agctngtggaggaccagatcatcanagcatataagtttctggatgagaagtgatcacccacagtttgttgatgaagcaccagaagaccaatcaaggaaggaatccatgtgggagttcgcaagagaaagggttgcgtgttggcatcatgcttccttaataagctaagcgaatcctanaagcctgaagatgatcttcgagtaccagaatcagc

SEQ ID NO: 12811 - DNA, 247 bp, Zea mays
  unsure (1)..(247): unsure at all n locations
tacttgtcaaaacaacaacacctaccagcacagcaactgcttaccataccagtaacttgtgctttcgcatgctgtggactagatatgattggacctttcaagaaagctcaaggaggatacactcatgtattggtagcaatcgacaaagtcactaaattgatagagttcaagcgcattcgttctttaacctcagctaaacgccgcgctattctctcgagcacataatattcanacttnggataccaaa

SEQ ID NO: 12812 - DNA, 146 bp, Zea mays
gaattctgaatttcagagcttgagccatagatcaagcgtgttcaccttgatccctaactcagatcctaatggacccagttacaaaaatgtgcataactaacccctctgtcacatgccagaagatggcattggaacacgagccctag

SEQ ID NO: 12813 - DNA, 166 bp, Zea mays
  unsure (1)..(166): unsure at all n locations
agccctataactttggtgcttagagatgacccagtcgtaatgcacaattntgagaacaatggccctaaaccgtggctgtcaaggtgtctgatgaccctcgccatggtacagtagttccaaactgaagaagatcacaggttcacccccttgctcgtcgccggtgact

SEQ ID NO: 12814 - DNA, 146 bp, Zea mays
tactgagctgcgcttacaatggtgtaaagtgcttctaatggaccatcatgaatagttatgtgagcacctcccgcttttgagatagtgagtacgctaaccatgtctataactcttaagggcgcttatgggctcaagcaagccccaag

SEQ ID NO: 12815 - DNA, 112 bp, Zea mays
ttcaatagtacaaaccctgaccatctactaatctatctaattatataagcccaactactgtttctgaagtaattcatataattcatcggctacataattttttatatacacc

SEQ ID NO: 12816 - DNA, 410 bp, Zea mays
  unsure (1)..(410): unsure at all n locations
actctcgttaacaatacaagatccctacatatacttatattccagaaataagatattgacagtgtactgagtacagcttataacacatcaaataatgctcagagtgcacaacatacctttgagatgtaacgaatgagctcgaaccttgaatttctcgatgcatcatctccatgtacaaatctttcagcaaagggactcttctcgtggctgccgccctgcgtataatacaaagcgtanctgtatgtgtgcaanccctgaccttgctctcttcccgtcataatacctggaataaattgntgtacatcatgtgacatatcaagtatcaacccattgatacacccaaataaatagtccacctgaatgttacaatgaagagaatcgggtgcctccttgtgctgacatttctacat

SEQ ID NO: 12817 - DNA, 348 bp, Zea mays
  unsure (1)..(348): unsure at all n locations
agctgngaagccaatcacaagtttattgaagagtgacattaaattcaattggtcttctaagtgtaatgaagcctctgaacaattgaagacactattaaccactgctccgatattggctcaaccggacatcaccaaaccttttgatgtatattgtgatgcatcagcgagnggactcgcgtgtgtattaatgcaagaggggcgagtgattccatatgctcttcggcacgttgcgccgacatgaggagcattacccaccgtattgatccggacttagctgctgtggtgcatgccgtagaanattggcgtcactatctgctgggaaatatctgtcacaattatacagatcat

SEQ ID NO: 12818 - DNA, 178 bp, Zea mays
  unsure (1)..(178): unsure at all n locations
agcttgagatttcnccaccggaaccatatcttcgtttttcgcaacgaatatgtcttttcgcacgtcacccattccgaaaacgcttttcgntgtcgtacgtcttccattcccaaaacaggtgtcgtggtgcatacaaagcacgagattttcgcaacgaacatgcgcaatccactacttt

SEQ ID NO: 12819 - DNA, 192 bp, Zea mays
  unsure (1)..(192): unsure at all n locations
tactggacggtgtgatgtgtaatgagggtgcctgtttctcggcgggctcgatttatagnttccagggacggtggcgcttgaatagaggatggcgcggtggcgaccggagaagaagtgagtcaccggcatggtgattcgtggcagttcacgggatgagaagcccctacagtcactgtgaaatgatcatagttc

SEQ ID NO: 12820 - DNA, 63 bp, Zea mays
gactcacactttggaactgaactatgccaacacaaatacatcttcttgggaactgcctcgact

SEQ ID NO: 12821 - DNA, 205 bp, Zea mays
  unsure (1)..(205): unsure at all n locations
gctntaccaaatggacgtgaagagtgccttcctcaatggaccaatcaatgtttatgtctatgttgagcaacctcccggctttgaagatagtgagtaccctaaccatgtgtataaactctctaaggcgctntatgggctcaagcaagccccaagagcatggtatgaatgccttagagatttcttatcactaatggattcaaagtcg

SEQ ID NO: 12822 - DNA, 203 bp, Zea mays
gcttatataccgagtgagctctgcttcttaatcaacgggtcactttatattctttacaaggaccaccacaacttggggtctctcgcatggattacaagttgcttcggaacaagaatagatgaagaagaaaagtgatccaagcgacaagaactcaattgaacacacatgtctctctctgataagccactaagtctttgcaatga

SEQ ID NO: 12823 - DNA, 98 bp, Zea mays
ttttgacgaaagcacttgctcgtgcttggaaggagtaacaaaagccaggtgaagtccttatgaaatcgcaagcgtaatgaatagatgggttagcaacg

SEQ ID NO: 12824 - DNA, 85 bp, Zea mays
  unsure (1)..(85): unsure at all n locations
acattctgggtctaactcttattatttgtggtaacgaacatattttctaacanaggctattngtccacagaagttacttttgagc

SEQ ID NO: 12825 - DNA, 228 bp, Zea mays
tttgattataccaagctctctgtggtgaaataattaatattgcctggcgttgtaaagtcttcgtattggtactcaccatcatcattgattatgcttaatggatgaagatcatcatgctgctcagtctggtttagtctctcacttccgatgctctgaatatcaattataacatgataatgtagaaacattgaacggacaatatctgcataattatatgacgatcatcta

SEQ ID NO: 12826 - DNA, 107 bp, Zea mays
  unsure (1)..(107): unsure at all n locations
caggatntgtagcgcatgccaagccgggaagcaagtaggcactcatcattcacacaaaaacatcatgacacgcgacaggccactagagctcctacacatggacctat

SEQ ID NO: 12827 - DNA, 149 bp, Zea mays
agagcaccatttatgattaacacatgctcattttgatatagacagaatttgtagcgcatgccaagcagggaagcaagttggtgctcatcatccacataagaacatcatgacgactgacaggccactggagctcctacacatggatctat

SEQ ID NO: 12828 - DNA, 444 bp, Zea mays
tggacgtgaaaagcgtcttggctaatggacctattttagattaggtctatgtagagcaacctcccggctttgaagatagtgagtaccctaaccatgtctataaactctctaaggcgctctatgggctcaagcaagccccaagagcatggtgtgaatgccttagagatttccttatcactaatggattcaaagtcggaaaggccgatcctacactctataccaaaacacttgaaaatgatttgtttgcatgccaaatttatgttgatgatattatatttgggtctactaacgaatctacatgtgaagagtttagtaggatcatgacacagaaattcgagatgtctatgatgggggagttgaagtatttcttaagatttcaagtaaagcaacttccagaaagcactcttctaagccaaacgaagtatactcaagatattctaagca

SEQ ID NO: 12829 - DNA, 455 bp, Zea mays
ctatctgaagtgcaggacagtttaagacaggaacttctattccactgcaacctactcgaaggattcttcattccactgcaattctgtcttcgagtagagtaagaatttaagttttaaagtgataattttcattcgcctattcaccccccccctctaggcgacatccagatcctgttctcgggcatagggaactttcatctacgccgagaccttaaggctcttggggatcgatttgtccacgatccaagccggtgcagcaccctttcacgggattgtccccggcaagcgtgtcctgccccttgggcaactcgatttgcccgtctgcttcagaactccctccaacttccgaaaggaaaccctcactttcgaggtggttgggttccgagggacctaccacgcggtgctgggaagaccgtgctacgccaagttcatgtgcgtccccaactacacgtacc

SEQ ID NO: 12830 - DNA, 466 bp, Zea mays
  unsure (1)..(466): unsure at all n locations
ntgtcaaatgctcaaacaccttttctgatggaagtgttgtttatgccatattatatttcaattttaaatntctcagtgaagtgaggccaccaacgcaaatagctaaagcttcatctgtaatactgcatgaagaaagggaaagattacagagtcctgacggtagaaccaatggcatctccatggtccttccataaatgaatcttatcctctgctcatggcaaaagagccatgccttgatgatgttttctttcatccatactttatcttctctttcctgcaaaccactttcaataatttgaagatgctttgatatatcatcatccatcatcaatgtcatcaactgcttcagagatgaatagtctctccacagtatactccaaacttcttttcctgaatccactttccacatcaattgcaagttagatgccaagtcgtctgcctttcgtattatattttccctcaagtc

SEQ ID NO: 12831 - DNA, 434 bp, Zea mays
  unsure (1)..(434): unsure at all n locations
tgtgaacagtacaaattcagaagggagaaagcagctttctgctgatcagccgaagcccatgctcttatgtgaggatatagcaaagcagaaggtgctgttgggctcccaattatccgaagaacaggagaaaaccttgataaggtttttgttcaacaacaaagatgtttttgcatggtcagccaatgatctttgcggagttaacagggatgttattgaacactcgctcaatgttgacccgtccttcagacccagaaagcagaggcttcggaaaatgtctgaagacaaggctgaaggagctcggaatgaagtcaaaagactcctcagtgcaggagttatcagagaagtaaagtacccagaatggctagctaacactgttatggtaaaaaaggccaatggcaaatggcgaatgtgtatcgatnttacngatctcaaca

SEQ ID NO: 12832 - DNA, 417 bp, Zea mays
aatggctagggtggccggtctactgtggtcaggtctcgggcggccgctggcacgccgtgcgcaaagcgatcgctggtgatcttgcgctccggcgaggttgatagcaagcggtggcgtacggtcgaggcctcactcggctttataggcgcgggcgcgggcgtgggcatgggtctatcttggtgcagcgcggcgcgcgcggggccgagcgccggggcgtgctctggcgtcgccagggcgcgtcgaacacgtggcggtgttattctgcccacgttcttgcgcctgctgagcacccaaacgtgcgaatcttgccatatggcttgtgtaagatttcttccctacacctagagctacctaattcatgtgagttccaaggggagatcgggtctggcttataagatatggtggcgccaagtctta

SEQ ID NO: 12833 - DNA, 165 bp, Zea mays
gcttggaagattcttcattcaacatgtgctagtttgcttgccagagccaacccatgtgtagcgtagcacttcagcaatgagttcacgcgcagctctatcaaatgctaccaagtatagctgaccctctaacactccacttaatgctattgaaccatcacttcttct

SEQ ID NO: 12834 - DNA, 387 bp, Zea mays
acctcgaaactcttcttgcctccgtccttggcttgaacaattgtctccgagctacgcacccgagtatcacttttgcaatgtccaacttacttgcgatggccattatgtatccataatccagttcttggaccatcacatttgttcacttgtgttgaaccctgtaagctttaccttaagcacctgttcaacacttagtacacttgttagtcctttaattgaggtgtcatccaaacaccaaaactcacaagagagctttcaatctccccctttttggtgattgatggcaacacaattaaagcttacatacgaataagatttgagcacatatttgaattctaagattatagaatgcctcccctaaatatgtgcttacttcaaaaacataat

SEQ ID NO: 12835 - DNA, 432 bp, Zea mays
aggtcattctattgctaactgtaccgaaaatgatatttatcacgaccaacggaacacataggagaagaagaagcattacaagaaggccaagggcgaagcacacatcggaaagggaggggactcggactggtcctccttcgactccgacaatgaaggactcgccgccaccgccttcaacaagtcatccctcttcccaaacgagcgtcacacatgcctcatggcaagggagaagaatgtgaatactctagacactacttatgcttcttctagtgatgatgagtctagcgaatacgaaatagattatcctagctttgtcaaaggaatggatagaactaataatgataaatcaatgaactgattgatgccttgaatgagaaagatagactcttagagaaacaagaggatttattgtatgaacagcatgataaattt

SEQ ID NO: 12836 - DNA, 460 bp, Zea mays
  unsure (1)..(460): unsure at all n locations
tcggaggagcgaggtaaggccgatactatcgtattctggtctctagccgagggatcattgctaggaacagggtgccgagggatcatgccaggaacagggtgctcccatccgagacaaagattgaccggcagagcgctccttactctgggttctccctatatagctgaatgaaacaaattacaagagtagcatagaatagaatatctggcaaatattttaaaaaattgagaacgcttatctaatcaggaggtagatgattcatacataattctagagatgcaatacatagtgcacaaccacattttattttcatgttcaatgtagcaacacaactcggtcctttgctcttaagaaacacagggcctgactntatgcaagattatacacattattctggaacacaacaagtgaaatctattacagtcaaaagtaatattgacactatcataagcaataccta

SEQ ID NO: 12837 - DNA, 455 bp, Zea mays
  unsure (1)..(455): unsure at all n locations
tcggtcatcgcacacggacagcttcaaccgattctgtttcttcctgtaggaccttcagcgacgaagcatggtcccaacagcagacgaccgttggcgcaggttaccgttgcttcgttggctcaccggacatgtccggtgcacatcggacagtccggtgaattatagcggagcgactcccggtaaaaaatccgatagtggcctgttcgcttggtgcttggcctagtgcaccggacactgtccggtgcgctacttggcagcacactctcaagttctttgctccaaatttatttgagtccccaacttaaattctttcttggtttgtgttgaaacttatgcacctgagataaatgacatctaggcaaactaattagtccacgtggttggtgatgggcgtcaaccaccaaaatcgattataggaaatgattaagcccatcntcctntcagtagtcttggct

SEQ ID NO: 12838 - DNA, 460 bp, Zea mays
gcttatcagttcaacccaagagttaagctgatgggagattgtatgcaatccactatacactttaacaacatatttcatatgtgtcccccatgtcctaaacatgtgtctcatcggtcggcaaccgcatcgacgacatgatccattctatcatgtccttgcgcccgtcattgtccccaggtttcagccaccatgtttagtcacctagcttctctagttcctcagtcaagacttaacgctgagccgctcatacttcgctgatcccggtccatcgatacgaactcgtatgaccttcaccttcgccatcgaccactgtcatcggactccacacttgcgcaccacaagccaagacacatgttgcaccaataatatcatgcctcgattagtccatccgactaaatcaaagacgctatacttactgatgagtactcatcagaactacaccacaacggcatatatcaac

SEQ ID NO: 12839 - DNA, 455 bp, Zea mays
  unsure (1)..(455): unsure at all n locations
tagcanatcacagtgcacaagagctaanaattgagtgtgctggagtggttggccagagagcgtgctaaatgagtttgcggtatggccgtatttatacgctcggtgcgttgaaaattcaaagaccccgcttgtcagtgaatgttgctattctagcaaagggaaggtgttttttcggaccttcggcgtaaagccttcgtccaggtcgcaatctgaattcgttattataaacaaattaatattgcgaggggctactgttggggaccttcggcatccgaaggtcctcaaaaacaggatttaacagtatttctggagtacaatgtgtgaacaggtatcctctgactaaagtcggcattgctgtagaccggaataatacgaatgttgatacagagccgaaggtgcgagcaggaaagcttcgacgtgacagcatagagtggaaccgacttatagatgaaaag

SEQ ID NO: 12840 - DNA, 227 bp, Zea mays
agcaggcaagaagacatcttcatctgtgccgtgcaacactacagccccgcccccgatacgatatttatcgggcatacagagtaactaccaaaatatattcctcagataaacaatttccccccccatgcatgacaaactaaacaagcatgtaatataatgcatgctgggcaggcaggctagctagcttactcacacaaaattcggcctgccctgtctgttcagtcacc

SEQ ID NO: 12841 - DNA, 425 bp, Zea mays
aagcctcagagggctaagtgcatgaaggaaccaatgttatcgtaccgcaagcggtaacacgtctcatggcgatgaagtcaaagtacaccttctccaacaaatgttacaacgatattgtgaaactgattattgatatcagcccaccgaatcataacatgccgaaagacctgtaccattgcaagaagctcgtagctggtcttggcatgaactaccaaaagattgatgcttgcgaggacaattgcatgttggtctggaaggagcatgagaataccacacattgcatccactgcagtaagtcaagatatgcagtggcgctagatgaggatggaaacaaggttacgacaaaggtgccgatcaagcaactccggtacatgcctatcactccacggcttaagcgtctctctctaaatcaagagacagcaaag

SEQ ID NO: 12842 - DNA, 440 bp, Zea mays
atgggctagtcggcgttgcctatttaacccatgttagtcttagcaattaagcaagtgtcgagttcagctctattaaaatcaactaagtatagctgaccctctaacactcccttaaatgctactaaatcatcactttttctaaagacagtaacacctatatccgtaaaaagacagttgttacccattttgcataattgagaaacagaaagcaagttgtaatctaaagaatctacaagaaaaacattggaaatagaatggtcaggtggtatagcaattttaccaagtcctttgaccaaaccttgatttccatccccgaatgtgatagctctttggggatcttggtttttctcgtaggaggagaacatccttttctccctagtcatgtgggttgtgcacccgctatcaatgatccaacttgagctcccggatgcataaaccta

SEQ ID NO: 12843 - DNA, 410 bp, Zea mays
gtcagctttgagtgtgaattcaaccatgatctagtgatcaaatgagctcagtcactatagtcaaaatgtaggtaatatatagctctacaactttgctgcaggtcactggatgtgttgccatttgaaattaagagaaaatgtgacctaaacttgctctgtcagttcatcagaatgaccatcgccatggtacagtaaatggtagactgaagaagatcccacccccctgctcgtcgccggtggcccgtcgccgttgattgttgctcgccgtgattcgtgtgtcgtggccctcagataagcatagcccagttaaaatcctcgccgccggtgagctggatgccaccccggccagccataatcccttccccttgctcaccgccgtggatacaaaggctcactatcgtcaagccttc

SEQ ID NO: 12844 - DNA, 468 bp, Zea mays
  unsure (1)..(468): unsure at all n locations
tctaaagggagaacacgtgataggtctaaccaatgttcatttcttaaaagatagaccttgtgcagcttgtcaagcaggtgaacaagtgggaggagcacatcacagcaagaatgtgatgaccacttcaagacctctggagctgctgcatatggacctcttctgacccgtcgcctatctgagcatatgaggaagtaagtatggcctagttattgttgatgacttttcccgcttcacttgggtgttctttgtgcaggataagtctgaaacccaagggaccctcaagcgcttcctcaggagagctcaaaatgagtttgagctcaacgtgaagaagataagaagcgacaacgggtccgaattcaagaatcttctagtggaggaagtccttgaggaggatgggatcaagcacgagttcttcgctccctacacacctcaacanaatggtgtggttgagaggaagaacatgacgct

SEQ ID NO: 12845 - DNA, 427 bp, Zea mays
  unsure (1)..(427): unsure at all n locations
tgcgtacagcttcggctgccctcgaccttcgtcttgctcagccttcgtcctggtcatgctccatatccataattctgaatccgaaaatacctgttcatataattcacttggaaaacactgtcaaatcatgtttttgaggaccttcggaggacgaaggcccccaacagtagcccctcgcaatattaatttgtaaataataaattcagattgcgatatggacgaaggccttgagccgaaggtccgaaaaaacaccttccctttgctagaatagcaacattcactgacaagcggggccttttaactttcaacgccctaggcgtataaataagaacacatcatgaattcatttggtacacacgcttgccttttgcttcggcccactaaaaatttttagctcttgttcattgagatttgctggtctntttga

SEQ ID NO: 12846 - DNA, 88 bp, Zea mays
ctgattgtgtctcggaatggattgctagctcttgtattttatgtggaagattggaatgattgggtgatgcgaatggaggtggttgccc

SEQ ID NO: 12847 - DNA, 433 bp, Zea mays
  unsure (1)..(433): unsure at all n locations
tgatagcagcagctctgatagtagctcatatgatgattatgttagaaaatntgaggtctacatctcaaagtatccacacaaaaaatacaagatctcataaatgcaatttaaattatgaccaatagttgcactatgcaaaccacctaaaataggtattctaaataggccagtcctagagccaccagtgttactcccaccacttcaaggagtgccaacatcatctgtttagtggcattgatgtccctgcttcacgtagattcaccaaatgtgtcagggtgcccaaacggtaatagcttatgaaagaaaacatttctccaatttttaaaaataagaagcatggagatttatgagtgagcaggtgagcattgtcgtagttcattgccaccagcatacacttcattatagctgctcgtaattactgtgagtctgtgac

SEQ ID NO: 12848 - DNA, 413 bp, Zea mays
tgcgatacatccaattcaaaacaagcaccatctctttatatatattttctatggagaaactgaacacaagagatgacattagtagctcaagcactagtctcttatttaacaaccctgtatatgtggaaggcaagcgagttgctaaaatagacaaacctcataatatggactaaatatcccttgagcccttatgcacaatatattttaaatgacatggataatatgcatggttgttcaatgaagtctaaagggctgacttaatccatattatggtgagtgtgtaataaagaagaatcatatccaaattaactagaaagagtacatcacatagttctggattgttaaccatatgataagattcattgttctcccaattggacttttacttcataatcaacaatagatgtataccc

SEQ ID NO: 12849 - DNA, 465 bp, Zea mays
tcattaaagcaaaccatggacttcaagcagccttagtgttgaccattctcttcccaaagaacaattctaacagggcaaaacaatgctgatcagaagccagccaacaaaaggtctattatttctaaaaagaaaacttttttaaacaatgtacagtatcaggactcatctattgagcgacttataagggaagtgacaaacgacaagttctggcataatccaggttgcttctttattgtcatgtttgatttggttgtatatgattttcaccttctggaaaatttagaacttcactttgtgaaatatacattttatacatgcatgcaagatttgtggaatttgcttgggtcctggcctttaacaataactgcccatgttttcgtgttcctcattagcagtttgacacaagtaggatcatgacttgacacagggaaaatattaccccctgttcaattcattataaatgat

SEQ ID NO: 12850 - DNA, 460 bp, Zea mays
taaaggatactattcaactaaagtaagaagaagttgatataggccaaggtatgaaaacttcctctccttcagttgttttagtattctatccttagtgggatgtaccatagtataggttaaattccttgcaatataaaatgttcaatagtgcatataactttgacatcaactatatgtgtgcactaatttaaaggaatttagtctatccttttgggtttcaataatgatgattcatttgccatccacatataaggatcatcatttgtgaaaccctctcttgtgtttttaatgctctcttttctaagtgttacaacgaggtccttccaagagctttcaagatggattcaaaatctacaaaaaatgaatgaagttcaagatcacttggttggatgaaatcacaaagagaaaagagatcacagtgaatcaagaacggagttattattttttgtcaaccaaataa

SEQ ID NO: 12851 - DNA, 393 bp, Zea mays
tctctttgtgccgaacaatgaagagatcgaaattattcttatagaacaagttggtatataatatgaggagaaatatttgccctgctggcaacaccataaagaatgactattgctataagttctctctcaaaattattatacctaaacatgttgcattaatcgatacccaatttcagagcggtatgagtaagtgggtaaaccatgggcagcgataaaaacgagctggactatacatctctgcatataaaaatatttgcttggcagcattggcctgatgtcgtgcacactactaccaatataaacacacatttttctatgtgcctcaaagcacagtgcaaccagtgaatgtctttgtgagcgttataccctgatggtcgtttactagttgatctg

SEQ ID NO: 12852 - DNA, 467 bp, Zea mays
  unsure (1)..(467): unsure at all n locations
tgtgaagattcttcatcccaacatgggctagtcggcgatgctatagccaacccatgttagtcttagcaattaagcatgtgtcgagttcagctctattaaaatccactaagtatagctgaccctctaacacacccttaaatgctattgaatcatcacttcttctaaagacagtgacacctatatcagtaaaaagacagttgtagcccatttgacataattgggaaacagaaagcaagttgtaatctaatgaatcaacaagaaaaacattggaaatggaatggtcaggtgaaatagcaattttaccaagacctttgaccaaaccttgatttccatccccgaatgtgatagctcgttggggaatcttggttttctcatatgaggagaacatccttttctcccctgtcatgtggtttgtgcacccgctatcgagtatccaacttgagcccncggatgcatacacctacaaa

SEQ ID NO: 12853 - DNA, 442 bp, Zea mays
cacaaactaagctcggttccgcttgctgcttggtaacggaccttatttcttgtgagcggattgacgattgcgcttcttattcccatatgccttcagtttccgaagcacctagagaccggctctgtactgtgcgatattatttgagcaattgaactcgaactttgctgcataatgagacttgattttacacggtgaaatcagaacagcagtctctgctgcaccataggtaacccatgaccgatagcagaatattgaccacgctccatcatctttagctctttcttcatactgaggacctggcgtacaatcatgtacgaagtctgctaacgcttgtgatcgtgacgtatatctatgaacataatcactaggggcttcgtttatctctacatacaactctcccactcctcctatggcttggatatttctcattatatcctcgaga

SEQ ID NO: 12854 - DNA, 459 bp, Zea mays
  unsure (1)..(459): unsure at all n locations
ctcagcttctaagggagaacacatcttgtgactaacaaatgtttattttgagaaagacagggtttgtagcgcatgtcaagcaggaaagcaagttggcactcatcatccacacaagaacatcatgacgaccgataggccgcttgagctactccacatggatttattcggctcgatcgcttacataagcatcggtgggagtaagtattgtcttgtaattgtggatgactattctcgcttcacttgggtgttctttttgcaggaaaaatcgcaaacccaagagaccttaaagggattcttgagacaggctcaaaatgagttcggattaaggatcaagaatataagaagcgataatgggacggagttcaagaattcacaaattaaaggatttcttgaggatgagggcatcaagcatgagttctcttctccctacacacctcaacanaatggtgtagtggagag

SEQ ID NO: 12855 - DNA, 402 bp, Zea mays
atttctgcttatttgtaattttatccacttcagttttcaggcttgcttcaagatatttcttctcttgctcgaattattctgactatcggagcaattcattctctaacttgttattctcagtttggacttcagccaaagaaccctccatggtctgaataacacaatctttcttttctaatgcaccttcgtgctctttgaccatgatttcaaggtcctggattgtgaagtctttctttttcagattagcttcgcaattctcaatcttttcagcccaatcttgaatgacggctttgtttttctcttcttccagatcccgttgcatttttagaacctcgcttaataatatgctctgtcgaaatgaacttcgttagaacacgacctaacagatcataaccactcgta

SEQ ID NO: 12856 - DNA, 456 bp, Zea mays
  unsure (1)..(456): unsure at all n locations
actcaagcttctatagggagaacacgtgataggtttaacttatgttcttttccgaaaagatagaccttgtgcagcttgtcaaacaggcaaacaggtgggaagctctcatcacaccaaaaatgtgatgaccacatcaagacctttggagatgcttcacatggacctcttcggacccgtcgcctatctaagtataagaggaagtaagcatggtcttgttatagttgatgatttttcccgcttcacttgggtattctttttgcaggataaatctgaaacccaagggaccctcaagcgctttctaaggagagctccaaacgagtttgagctcaaggtgaaaaagataaggagcgacaatgggtccgagttcaagaaccttcaagtggaggagtacctngaggaggaagggatcaagcacgagttctccgctctctacacaccacaacataatggtgtggt

SEQ ID NO: 12857 - DNA, 452 bp, Zea mays
  unsure (1)..(452): unsure at all n locations
cttgtttaccaaggagacacttaaatcattataagcttctcttagtntagtagacggattatctcaaaaaaaatctagcatacgacaagagtcagtggctgtacctggggcacaagtcctgcttccgtgtccacgccacacacaacggatccatagccaatttatacaatagaaatatagaaaggggaagtgcttcctggatcaaaaaaattgtgcaaaagcattaacaagctcctaagttattatggtacagttaattcacctttggtgactgcacagagctgcttgtaacagtaaatgaataatttaccttaactctatagttcctagattaacatctacagagtgtgacataggatggacagattattataactacaaaatgtacaatatcgttttcataagacttcgactaactcacctcccatcttattagtgaatcgagccaatac

SEQ ID NO: 12858 - DNA, 476 bp, Zea mays
agacactatacatgtctacctctggatgtaagaggacctagatgtagcacatgctgtgttctttggtccatgaacacgatgataaatgcactatttaacgatatgcgcctgcctcttaggtactaggctataccccactgggggggtcgcgagggtgctggcgtcatcagtccgcttggggttggcacgttgcggggaagcgacgctcgtcgttgtctcaagcgcgaggacaacacccgacatgtcccccgcaggagtgccggcgtcgtcaactcgttctggtccgacagccgacgaggtgccgccttctgcatggccacggttgccccgtctcctcctcctctggcgaggagggtggcgggacaaaccaaggtgttcctcttctgccacgaggggaagtcgtcgtctagttcgtcgtcgccgggcgggccgacgaccatcgttgctgtcgcgctgcgaggggagaagtaccatgt

SEQ ID NO: 12859 - DNA, 430 bp, Zea mays
  unsure (1)..(430): unsure at all n locations
ggcggtgaccactcgttgggaaaacggcggaagcatctctctttcattccggaggtagaaccaccggcgctgccaccctttgttcgaggacgcgaggatggcggtgatgtacagcgacgcccgcgactgcctcagctggagaatgcaaccgccggcccgcaccgccgcgcgaacccttctctctcccgtcggcgaagcaaaaagctccgcggagaagagatgggtccacaagtcccagtggggggcgatccccaagtattcttcgcacaacgctacgaagatggcggcctgcgaaatggagttgagactgaggttgtgcaactccacctcatagttgtacaggatcgcccgcataaagcggcttgccggcacgccgaacccccgctcgtggaaggagacgaagctcacgacgtaccccggcggcggngac

SEQ ID NO: 12860 - DNA, 436 bp, Zea mays
  unsure (1)..(436): unsure at all n locations
tataaaantatctacaacttcttttaccaaccctctgtttatttctgttgataaaattgtctaaatcttaagagaacagattctgcacagaattatgagactgaaaaactgctatagtaaaactgcaataactttctggtcggatgtccgattgaggtgttcttcgcggccacggaaagatctacaaattatctacgactcatacgtagactttgtatttttttgaggccactaagaccacggaaaactggcatgaacagaaactgtcgaatctgccattctgcagaaaactaaattcgagattaaaatctaaccccacatcacatccaacctctaatcttttaattcccatgatccacaacctccataagcctataattacanggaggaacactgatctcatccatacctatggtttccccaagaaatcttcaag

SEQ ID NO: 12861 - DNA, 460 bp, Zea mays
  unsure (1)..(460): unsure at all n locations
ntattaaatggacgtgaagagtgcctaccttagtgtttcaatcaaggaggaggtctatgttgagcaacctcccggctttgaagatagtgagtatcctaaccatgcctataaactctctaaggcgctttatgggctcaagcaagccccaagagcatggtatgaatgcctaagagattttcttattgctaatggcttcaaagtcagaaaagtcgatcctactctctttactaaaacaattgcaaatgatttgtttgtatgccaaatttatgttgatgatatcatatttgggtctactaacaaatcaacatgtgaagagtttattatgattatgattcaaaaattcgagatgtctatgatggcggagttgaagtattttctaggatttcaagtcaagcaactccaagagggcagcttcatcagtcaaacgaagtacattcaagacatactcaccaatgttggg

SEQ ID NO: 12862 - DNA, 446 bp, Zea mays
  unsure (1)..(446): unsure at all n locations
tcgcacctctgaactaactcgggtgcatcacttttctttatcggcccatagaatcctgacctgaagaccttcccgactagtgtccgggatgctgcgtgtattccacattgtccagcatggacctcatctagaagtcgcttcccagtagatgagagaatgcatttcatgaggacgcctgatgcaccccttctgtatagtgtctccccaatgagtgtgtagtgagctgactgtctgacgatgcgctcggctgcatatttgtcatctggttcctcttcattctttatatatctgatgatcggccttctctagtcatcagaatctgactctggttgattcatgatattacactcttctgcctgatccattgagatgcttggctgtggtagttctggtacaaagactccangtgggacctgagttcgactgggatctagctaggacaatac

SEQ ID NO: 12863 - DNA, 432 bp, Zea mays
tcttcttgatgtgcgtgttccagcggatcttgatctcattgtctgttcttgcaggtaacttggcagcgatctgggaccatctgcacaggctcaagtcattaggagcacacaaagcggatgtgatattatttttagctggctgttgtgatattatgtttctacagaacgaaacacatgagcagaaagggggcagctaatcctttccacccatgtttgagccagctgaacttgaagcaaatgcataaattttacagtcttccattggtttcgcaattgcgtgcttcatggattagaactggagtttgcgctacaagtgaagaagttgagaatcacctgagcggtgcgtggactatcgaccttcaattctagtgagctcttcaattcacatgcacgcatgaaagccacatccgtgtatcattaactatcaattca

SEQ ID NO: 12864 - DNA, 464 bp, Zea mays
tcggcaccctgaccgtttcaatgtacctggactggtgtgtcttaactttaatctttttccccttcggcgtagcagagatggccgaagtagcagcttttcttttctttccctgctttcgcgagggataacaatagtctgggtatacaaaaccaattacatcaaaaactctgtttaatctcctattgccttgtcctccgaaagctaatgtcatggcatcatcttcggcccttgtgaaggccccaagcaattcgtcactagtcacctctatacgatccagccagtcatcgctcgactcatcaaattgatctctgtacccgaaggtgtatttcagataaactaagccgccttgactggacccggcagcagcttccttcggcatctcccagccacttgcaagaggccatactctataagcaatatgctcctggactaagtctcttgtgccaataaaagtgcatatagtg

SEQ ID NO: 12865 - DNA, 463 bp, Zea mays
  unsure (1)..(463): unsure at all n locations
taaganatgctaattttcaatactgaatttgcactactagtattgttttaaatacacgtcaaacggttgtcagcagacgacacaattggctgctattctagtgtttttttgtttaacttgctaatctagtaattgatcctctttgcagcttgcgagtttctgaaattcttatattgcccttctgtaagttgagaagatggtgcttctggcatgtggatggcgctatacgattactgtttgtgactcaagtaatctatacacttatggttggcgcaaatacgttcaactaggacatattgattttgaagatgatttagttccacataaactagaagcattgaaagatagcactatatctcaggtaataccttntacaaacattccatgacatggtttcaaaacttcaatttcgctcttctaggatacttacaaagactagttccatacttctatgcacatgttg

SEQ ID NO: 12866 - DNA, 466 bp, Zea mays
  unsure (1)..(466): unsure at all n locations
tcctccagcattcttgagcccctcaggcatccgaatgttctatttgttccactaggggttatgaagctggttnttggctcatcctccttcttcatccaaatttgatggtagcctgagtaatagtctagcagactcataagctctgacgaagctgctgtgtctactagagaatctatccttggtaatggaaattcatcctttggacaagccttattgagatcagtaaaatcaatacacattctccatttaccattggctttcttcaccataatagtgttggctagccactctgggtatttcacttctctgataaccccagcgctaagaagtctttttacttcattccgagcaccttcagctntgtcgtcagacattttccgaagcctctgctttctatgtctaaaggatgggtcaacattgagcgagtgttcaatgacatccctgttaacaccacagagatcattag

SEQ ID NO: 12867 - DNA, 367 bp, Zea mays
tagcgcatgccaagctgggaagcaagttggcactcatcattcgcataagaacatcatgaccactgacaggccactggaactcctacacatggacctattctgcccgattgcttacataagcatcggcgggagtaagtactggctagttattgcggatgattattctcgcttcacttgggtgttctttgtgcaggaaaaatctcatacccaaaaaactttaaagggattcttgagacgggctcataacgagttcggcttaaggatcaagaaaattagaatcgacaacgtgacagagttcaaaactctcaattgaggcttccttatgaggaaggcttaacatgagtctctttcctacacccacacaaat

SEQ ID NO: 12868 - DNA, 445 bp, Zea mays
  unsure (1)..(445): unsure at all n locations
tgtaagactgcatagccccagcagcagtggcttgaatttctgttgcttcacaggctcaaaatctaccaccagacaaccagttgccctatgaacaatggcatagaatggcttgcctgaggtcttgcattgaactaggataggattcagcaaagaaacatcagcaaatcctagtgccttctgcagtgctgtagcaccagggtcagtgaaaagggagcgcacattggtaccaattcctagctttgggggatcatcaacgttcggcacagcatggctgaccgttgtaagcatttcaagtgcattctcactgaatgcaatgaccctgaagctcttctcgtcaagggccaacaagcaaccgaatggttggattagctttcctctttgaatatgctgcaagtaggctatgaccttttccgatcgcccttgctgctcangtggagtgctccgt

SEQ ID NO: 12869 - DNA, 464 bp, Zea mays
tctaaagggagaacacgtgataggtctaaccaatgttcatttcgaaaaagatagaccttgtgcagcttgtcaagcaggtaaacaagtgggtggagcacatcacagcaagaatgtgatgaccacgtcaagacctctggagctgctgcatatggacctcttcggacccgtcgcctatctgagcataggaggaagtaagtatggtctagttattgttgatgacttttcccgcttcacgtgggtgttctttttacaggataagtctgaaacccaagggaccctcaagcgcttcctaaggagagctcaaaatgagtttgagctcaaggtgaagaagataaggagcgacaatgggtccgaattcaaaaaccttcaagtggaggagttccttgaggaggaggggatcaagcacgagttctccgctccctacacacctcagcaaaatggtgtggtagagaggaagaacagga

SEQ ID NO: 12870 - DNA, 461 bp, Zea mays
  unsure (1)..(461): unsure at all n locations
tctaaagggagaacacgtgataggtttgactaacgtgtctttcgaaaaagatagaccttgtgcagcttgtcaagcaggtaaacaagtgggaggagcgcatcacagcaagaatgtgatgaccacttcaagacccctggagctgctgcatatggacctcttcggacctgtcgcctatctgagcataggagggagtaagtatggtctagttattgttgatgacttttcccgcttcacttgggtgttctttttgcaggataagtctgaaacccaagggaccctcaagcgcttcctcaggagagctcaaaatgagtttgagctcaaggtgaagaagataaggagcgacaacgggtccgagttcaagaaccttcaagtggaggagttccttgaggaggaanggatcaagcacgagttctccgctccctacacaccacagcaaaatggtgtggtagagaggaagaaca

SEQ ID NO: 12871 - DNA, 377 bp, Zea mays
tctaagggagaacacgtgatatgcttgactaacgttttttctaaaaagatagaccttgtgcagctggtcaagcaggtaaacaggtgggaggagcgcatcacagcaagaatgtgatgaccacttcaagacccctgtagctgctgcatatggacctcttcggacccgtcgcctatctgagcatacggggaagtaagtatggtctagttattgttgatgacttttcccgcttcacttgggtgttctttttgcaggataagtctgaaacccaatggaccctcaagcgcttcctcaggagagctcataatgagtttgagctcaaggtgaagaagataatgagcgacatcgggtccgagttcatgaaccttcaagtggaggag

SEQ ID NO: 12872 - DNA, 460 bp, Zea mays
  unsure (1)..(460): unsure at all n locations
tcgcaaaatgtcagacgaatagacagaggccgctctttctgatgtgcatcgcctcctggaggctaaattcatcgagccagtggcttaccccacgtggctctccaatgttgtgatggtgcagaaaaaaagcggaaaatggcgcatgtgcatagacttcaccagtctcaataaggcctgcccaaaggacaatttcccgttgccgcggatcgacaaaatagtcgatagcgcagccggatgcgaggtcatgtccctcctcgactgcttctccggctatcaccagatatacatgaaggaggaagacaaggctagcaccagctttataacacccttcggcacttattgctntgtcagaatgccggagggtctcaagaatgccggatccactttctccagactcaccaaaacggtgctcgaggggcaggtcggcagaaatatattcacatatgtggacgacatcgtc

SEQ ID NO: 12873 - DNA, 440 bp, Zea mays
tcaactagcgtgctccttcactcttagtcctctctcttgttgtagtccctcatacctttaaggattccttcccttggtgtgcgcaatgaaggaagacaattgtgtgatgttgctatgacaggtgatgtggtttacattggtttgggttaaccggcgagtatgttgtttgatgattaggtccttagtaattccgttgttgttgtcctgctcacgtcaagtccattcatgttgtgtttgctttcttttcctccttatcgctaaagtacttgctgcggtgtgcttgcagttgcctgtaatctgtgagttgccacaaatatgtaaaggttttccttgttctccttaaacatgacgtcattaaatcaatgaaattcaagtgggagcttctccctctgttgacagtcacaaaatgtgtactcattgagagacactaccaaccacct

SEQ ID NO: 12874 - DNA, 443 bp, Zea mays
  unsure (1)..(443): unsure at all n locations
tgtcgtatatgacatgcgccagagctacatnagctatttttatcgtttccagtgtgaaataggagacacgatatataactataaatgatcatatttgacgttatttatatagtgaagttgacaatataggatgcgatagttgatgggatatgacatcagctagaaatagcctaagcctgtctgtcctctattggccccttatatgtcactctcacgctatgccatccaagatctatcttctactttacttttcttacaacggttacccaaatttctcccccgtataccccactttaaccataaaatatcattatccatatctatttataatcatgtatctattgttcttcaactagcaactcctaatgtgcacacaaatccacgcgaatgaagcatggtgtcgctaccctgcttctggtggtgccctgtgctatttctcacca

SEQ ID NO: 12875 - DNA, 460 bp, Zea mays
  unsure (1)..(460): unsure at all n locations
tctaagcttacacctctggactaactcggctgcatcgntcttcgtggttttctcatagaatcctgatctgaaaacctttccgactagtgttctggatgctgcatgtattccacattgccctgcatggacctcctctatgagttgcttcccggtggacgggagaacgcacttcatgaggatgcctgacacgccccttctgtacaatatctccccaatgagtgtatagtgagctgactgcctggcaatgcgctctgccgagttcttgtcatctggttcttcttcattctttatatacttaataatcggccgtctccagtcatcagagtctgactcgggttgatctatgatgttgcactcttctgtttgatccattgagatactcggctgaagaatttcctgcacgaagaccccgggtgggacctgagttcgaccggatccgagcttggacagtacatcggct

SEQ ID NO: 12876 - DNA, 402 bp, Zea mays
  unsure (1)..(402): unsure at all n locations
tcaaccaactgaaacaattcctgagaaatgaacggtgttcttattttatcagaatatnttgaaatatgaattcctcaaatggacaagaagcaagcacacgctctcacaaagccgcagtccgttcttcagggcccgtttggtccgcttttattaatttactttgtagtttacaatcaaacgacaaattaaatgcgttttacatagacacgcaggccataggttgggaatgcagcttccaagaagctaccatcggtatccgccagcatgttttctggtcaaagcttactatntattattcgcagccggtattactggacgggctcgataaaacttcacgaatagcgcttaaatgggggaccgtatcgtataaacatgtacaggtatgtgcacatgagcaatcct

SEQ ID NO: 12877 - DNA, 466 bp, Zea mays
  unsure (1)..(466): unsure at all n locations
tctcaagtggggattcaatanggaattcttaaattttttttctgaatttcagccctcgagctaaagaccaggcgtgttcaccttgatccctagctcaaatactaatgaccctattgacaaaaacgtgtctaactaacccctctgtcacatgccagaagatggcattgggacgcgagccctagacacgacaaaaccctagatttgcctcgggttcgagaagagagacagaccggatttcagggctccaaatctctgaaaccagtaggcaaaatcctatgacccccacacaagatcggtagcttgtagggaggagaagaggttttgtgcactaaccaaggtgagaacaggctcggatgaatgaccacacgcgccagaacttgngcagaacgaacgtgcacacgtgttcgaccctggtcggcacgccggcgttcgcctaacccgtgcgcgcgctcgccccagcgttcag

SEQ ID NO: 12878 - DNA, 457 bp, Zea mays
  unsure (1)..(457): unsure at all n locations
tcaattctatgtctcttagctgtgtggtctccttcatgtgtctttntaagaatattccaaatgtcacgggcatcttctcttccttgaatttccggtattcttccggacaaatacttccttttattatgctcaccgcttgagcattgcggtgaacctcttgcatcattttcgaagtcatctcttctccttgggcgggcttgtacatacctatattgacaatctcccaaagactaggatgcacaccgattaaatgtgacttcatcttatcggcccactcgtcatagttcaacacgctaagagttggtaactttccaagtggggcggaagagaatttggggataaaatttctagaataatcaaattgaactttactgaattcgttacctttacttgtggtagatgatccttcggtgttgagacttaccttgctcatcaccttcgacgccaaaagtttcac

SEQ ID NO: 12879 - DNA, 472 bp, Zea mays
gacctataaaactcagctgccttcgcttatgacccccgcaatccacggtttgtggaacacgccaacggtaaaattttcacagtcgtcaagaaaatgctcctcgacgacaaaaaaggcaagtgggcagacctgttacctgaagcggtctgggcgctgaacacgactgagtgcagggcgactgggttcacccctttccgccttctatatgaatcagaagccatgactccgcaagaaataaaacatgggtcaccgcggacagtcgcgtcagccgtccccgacgtagacgagcctacttcgaaggacctcatcgatggagaccgcgtctttgccctacaggctctaaacaaataccaagctcatacaaaagcatggcgcgaccacacagtcatcccgagggaattcagcgaatgagacctcgtactcgtcctgacagctcggacagagttccagtgcaagctagagccaaaatggg

SEQ ID NO: 12880 - DNA, 473 bp, Zea mays
  unsure (1)..(473): unsure at all n locations
gaaactcagcttatattggtgattggtggttagacgaagcacattgttcttctgatgaagcagataacaagaagacaaagcaagggccaaacaacgtgcacgtctctaagaggaagagatagcggcacactcgatagtcactatagatcacatatatatgatttgaggacataaatttaattttatataaagttatatgtcgcctcgtccctacatgatacaatacccatgcacttgggaggctttttcttcaaaccacattcgaacactaccaagatatcattttaagtgtttgtaagaccatctctagtagcttatccgtacacataccaatattcaaactacactctacaaacaatgcgatctacagtacaaaatgtggtnttttatcatataagtgaactattgtacattgcacctatataatcactggaaaataccgtatgtatccttttatattgtagtttgcactg

SEQ ID NO: 12881 - DNA, 454 bp, Zea mays
  unsure (1)..(454): unsure at all n locations
taagaaactntnttcacggatcaagctcgttattattttctatctagcaccgcgaaaggtgctactgttgggtctatgcttcgtcgccgaaggtcttatagaaagaagtgatcctcggatgaagctgttcgcacaagatagccgaaggtgccttttcgcagagcttctgcattacaaaccgacttaaagatagaatgaccttttagtccataaaggtctgagtcaacgttgtaagttcttataaggggcatacttgtaattcctcacaggctgcgtcctgtgcctataaatagtgaacagtattccgttactgttcacacattttctgacattttgcaatcgcatttctcggaatacaacctttgtcaaggcataggtatcattgtattttatgattcaatatattaagtgaatattatataatgcatctgcggatcatttattcattcttacc

SEQ ID NO: 12882 - DNA, 449 bp, Zea mays
  unsure (1)..(449): unsure at all n locations
tagagcaaagcacaagtagtggtagccatcggagccttctctccattngggaaactgtgttatcagccaccgcaaagaagtaatccggcatgccaattttcaggtttagccgggtcactaacaccagatcaagcattcctgccagacttgagagcacttgaccccataatagcatgctccgaaaagtatagtcctttagggtgctttggtatagtaaaactccaattagtgaaccaactgaaccaattgaatagatgagaccaatatatccctgtaccaatgcaaatgttacataagtgataagtccacctggcaacaaagcataactgattaagtgtaataatggaatttcaatattatatatataccaaatatatggaaaagtatatcatagatttgaaagcctttntgtcaagcttcttcatcaaaactaaatatatatcgttctg

SEQ ID NO: 12883 - DNA, 430 bp, Zea mays
tctactaatgctgaagttaaattctgtttgcataattattcacttcctactagcattagttaccaaaaacaattgtgaatgccgttgataaaattagaactttcttttggcaaggtggtgttaataaaaaaaaataagtattgtctgatcagatggaccaaaatctgtaagagcttgaaaaaggggatcttggtatccaagacatcaaggatgggccggtttgcactgtgaaacatatgcaaactgactcgcccatttggccagatgactcagatctactggaggtcaaagatataaacttgcaaaggaggaaactttccattaaaatggacaaaagctctcttctggaacgatatctttctttatgacaaacctctctatcagttacatcttgaactgcttatagcgtgtaaacaagatataactgtat

SEQ ID NO: 12884 - DNA, 423 bp, Zea mays
  unsure (1)..(423): unsure at all n locations
tcgcacctctgaactaagtcggctgcatcacttttcttcgtggccaatagaatcctgacctgaaaaccttcccgactaacgtcttggatgccgcatgtattccacattgcccagcatggacctcttccagaagtcgcttcccagtagatgagagaatgtacttcatgaggacgcctgatgcacccctcctgtataatgtctccccaatgagtgtgtagtgggacgactgtctggcaatgcgctcggctgaatttttgtcatctggttgctcttcattctttatatacctgatgattggcctcctccagtcatcagagcttgactctagttgattcacaatattacattcttctgcttgatccattgagatgctcggctgtagtatttcttgtcaaagattccangtgggacctgagttcgact

SEQ ID NO: 12885 - DNA, 443 bp, Zea mays
  unsure (1)..(443): unsure at all n locations
acctataaaactcagcttgacatgaggaaatggcgctcgtcgtcaagagctttctccaaatcctcaagcaaaggagggggaaagactaaaagtcctgctccaagaaggtttgctacaaatgtggtaagcccggtcattttattgctaaatgtcctatatctagtgacagtgaccgaggcgacgacaagaaggggagaagaaaggagaagaagaggtactacaagaagaagggcggcgatgcccatgtttgtcgggaatgggattccgacgagagctcaagcgactcctccgacgacgaggacgccgccaacatcgccgtcaccaagggactcctctttcncaacgtcggccacaagtgcctcatggcaaaggacggctaaataaaggttaaatctaaatcctccactaaatatgaatgctctagtgatgacaatgctagtgat

SEQ ID NO: 12886 - DNA, 327 bp, Zea mays
tggcgcgcgaacgaccacagagaaacctctttttttcttcatcgctcagatgcgacgggctgcacctcaagcaaggaggatccgcccagctcgaccacaagactgaagcctgggatcatcaactcagagcgcacaaactcgcctatcacaatctacggagacagaagcctatatctaggatcaccacgcattaagcgaacacgagtaggatcgccaaatacgagcgatctaagaataaccctgaccatttcatggtcataccaactggtgctcccgatgaggcgcactcggctgaccaaagtcttgagccgggagacaaggcttgcg

SEQ ID NO: 12887 - DNA, 425 bp, Zea mays
caaaaactcaagctcaaaggagaaccgtgaaggccaaccaaagtcactctaaaagaagaccccggcagactggcaacacggaaacaggggggaggagcgcatcacaccaagaatgtgatgaccactacaagacccctggagcagccgcatacggaactcatcggacccgacgcctatccaagcataaggggaaagaagcatggtctagacattgatgacgacactgcccgcagcacttgggagtgcgtttagcaagataagcctgaaacccaagggaccctcaagcgcttactcaagagggctcaaaatgagtgcgagctcagagcgaacaagacaaggagcgacaaccgggccgagtcaagaaccttcaagcggaggagctccctgaagaagaagggatcaagcacgagtactccgctccccac

SEQ ID NO: 12888 - DNA, 448 bp, Zea mays
ctcagcttacacctctggactaactcagctgcgtcactctttgttgtttgtcttgttaaaccagacctgaagaccttcccaaccagagtcctggatgttgcgtgtatcccgcattgcccagcgtggatctcatctagcagttgcttcccactagccgtaagaatgcacttcatgaggactcctgttgcaccccttttgtacaatgtttccccaatgagagtatattgagctgactaccttgcgatgcgttctgctacgtctttgtcatctggttcctcttcattctttgtatatctgatgattggctccctccagtcatcagaattcgactctagttggctcagaacattgcactcttttgccgatctaatgaaatactcgggtgcggtacctcctggacgataactctatgtgggacctgagtccgactggatcctatgtttgacac

SEQ ID NO: 12889 - DNA, 428 bp, Zea mays
  unsure (1)..(428): unsure at all n locations
taaaccaactcttccctggacacatatctgaaagtgttcttttctttccctnttagncgagtcaaggtcatttttagcctctcattttcttctttgagctattgatatgtatcatcgcttgctcctgcagattctagctcaaaggaagatttgcttgtcgacggacaacaagcattagcacatggtaatatagtttcaattcgaatgcatgtgcaagagtcgaggctgctgggatattaagttctctatcacaacctcatgagctatatttaatatgatatgatcatccataagattctcatgagaacttagaagcatatcataattatttcgaagagctagattgtcactntgagctttctacctgggccttaagcaaggaattcctatttactaattgagcgatacacatgtaaagcgttatcttg

SEQ ID NO: 12890 - DNA, 425 bp, Zea mays
  unsure (1)..(425): unsure at all n locations
tactcagctcgtcggctcgcggaatctattctgatgattntncttttttttattgcacgactataaaagatcagctaagaacttttattattcctgtgctaaaaattgaacattccttagcctagtgggatcttgctaaacaatcgaagactagtgggcaccttgagacgcatattgggttaacactggtatagcgacttattgagtcaacactgttgtgactcggccgcgactgcctctgtagaaaaggccttctgagctatgaatatgatcagaactgacttgcgcaacaagatgtccgaaggttggctaaatgacttgaaggtggtcacattaaaagagatttttttatggactggaccttcataaaatcaagaaaacacttctaaatatgaatattagaccaatgcaattgcctagatctc

SEQ ID NO: 12891 - DNA, 451 bp, Zea mays
  unsure (1)..(451): unsure at all n locations
tgccaatacttgtcaaagcaacaacacctgccatctcttttactgcagaccataccagtaacttggcctttcgcatgctgnggactggatatgatcggacctttcaagaaagctcaggggggatacactcatgtattggtagcgatcgacaaattcactaaatggatagagttcaagcccattgcttctttaacctctgctaaggtcgtggaattcatacatgacataatattcagattcgggataccaatcagcatcataactgacttaggatccaacttcacaagttcagaattcttcgacttctgcgagcaaaagagcattcagatcaagtatgcatctgtagcacagccaagagccaacgggcaggttgagcgagccaacgggatgatattggaagcactcatgaaaaaggtcttcgataagaatgtaaaattcgcagaatagtgga

SEQ ID NO: 12892 - DNA, 463 bp, Zea mays
  unsure (1)..(463): unsure at all n locations
tgtggaggttcttcatccncacatgtgctaagcggctttgccacagccagcccatgcaagtcttagccattaagcatgcatctagaccggcctcttcttttgcaaaatcaactaggtaaagcttgccgtctagtacacccttaaaagctaatgaaccatcacatcttctaaagacagacacatctatatttgtaaacaaacagttatatcccacattgcataattgactaacagatagcaaattatatccaagagactctactaaaaacacattagagatagagtgctcatttgagattgcaattttacctaacccttttaccttgccttgattcccatcaccgaatattattgaatcttgngaatctttgttcttgacgtaggaggtgaacatcttcttctcccccgtcatatggtttgtgcatccgctgtcgataatccagcttgaacccccggatgcata

SEQ ID NO: 12893 - DNA, 425 bp, Zea mays
  unsure (1)..(425): unsure at all n locations
nggtgganatctaatatatatgtaaatatatatgtgttctatatgttntcaaaaactttatatgtaaatatatattagatatataatatatatagagagagataataggggcctctaaattagttttcgcctagggcccctaaaatgctaggaccggccctaggtcccaagtgtggttggccaacaggtccgagtacttctcctccatagcgcggcgacagtggggatctacgagagtggcgcggacggggggagggaatcgaggaggcagccgaagcagagacagtcatcagaacgaaccgatcgacacggcagagaatgttggccgagcgacgtgtcaccattatgtggacatggccaaggtcacggtggatggcgaccgggtggtacaccgagggctcgacatatgaacgagccaatgggga

SEQ ID NO: 12894 - DNA, 462 bp, Zea mays
  unsure (1)..(462): unsure at all n locations
tgccgaggccagcaganattcgaaacagagctgtcattctagctgatcctgcttgatagcagtatagtaacctcacggaaagcattacaacgcactgcactcagctctacctaaaaacatacaagaaccctcgtacaaaagacgccggcaggtcgcagagtgatgtcagaaacaaagcaactcaagcgacatgggagagttgccaacagatgacgaaaccaatgactgattgttaacgatcgcatgatcatcttgaaccttnttttaattcgatatgaagagaactcggataggcagacctactcatcattttcctgaacattntccagaacggtaacttgtacattatgtctactgctgccattttttaatgagcccaggtatctgagaaaagtgaaatgtcaaatatcacggtcaggcaaggagaaagataacgtggagaaactgcatattcttcaaacc

SEQ ID NO: 12895 - DNA, 461 bp, Zea mays
  unsure (1)..(461): unsure at all n locations
tgtcgattgatccacgaatcatggctgtagagacctatattgggatgctcctccgatccagaagctgtgattcagccctcagacggagagggcgcatatcataaaagcaaggacgcgccgctaccagagctggaggaagcataggcgtttgcaagaagatgaacaaccagcgcatgggagataaatacacaaaacagcggcaggattttatcgcangctaaagcggcgcacggataacgccggcgagctggaggaacgcgcggcaaaactagcgcgcaagggagctgggtgagcggtcggccggcaggggaaaggggcgagctccacgcggtgcttggagatgaggaagaagactgcgcgcgttcagcgaaagataaccagatcgattcagcggtgtagagataaagaagaaactcgtgcgcgctataaaaaatctgagcacagacagcccgtgattttgc

SEQ ID NO: 12896 - DNA, 458 bp, Zea mays
  unsure (1)..(458): unsure at all n locations
ttatctnccttgcactgtgcacctaattntctttctttatcttcctatcctttctacaaatagcaaaggaagcatttaaagcatgataaatcgtagagggtccattcataactttccttggaacatgaacaatattctttctaggcacatgatgaatatttttcctatgcatatctctaccatgtatataggaagaactgggatcaaacatagcataagaatcataggcatgtgaatcacaagcattacaactcctatgagactgtcttctatcattgtacataanagcatggttctttttagtactacttgccataggggccttccctttctccttggcggagatgggagccttatggcttgttaagttcttggcttccctcttgaagccaagcccatccttaattgaggggtgtctaccaatcgtgtangcatccctagcanattctagtttatca

SEQ ID NO: 12897 - DNA, 434 bp, Zea mays
tgaagccatggtaagtagcataggctaataatattcttattgactcaagcctagctacgggtgcataggtttcaccgaaatccaaaccttcgacttgggagtatcccttggccacaagtcgagctttgttccttgtcaccacaccatgttcatcttgcttgttgcagaagacccatttggttcctacaacattttggttaggacgtggaactaaatgccatacctcattcctagtgaagttgttgagctcctcttgcatcgccaccacccaatccgaatcttgaagtgcttcctctaccctatgtggctcaatagaggaaaccaacgagtaatgctcacaaaaatgggcaacacgagatctagtggttacccccttatgaatgtcgccgaggatggtgtcgacggggtgatctcgttggattgcttggtggact

SEQ ID NO: 12898 - DNA, 215 bp, Zea mays
tattggtgaccacaatgccaagctgagcagctcgatccactattttcttgcgctccttagtggacacgttgagtgcgatatcagcgcaatatgtcctgttgcgaaggaatacaaatattagtaaacaattgatggttttgatacaaaagggggcgctcctgaaatatgctagtttactgaagaaccctcaccctccccccaagaaactgtaactc

SEQ ID NO: 12899 - DNA, 462 bp, Zea mays
  unsure (1)..(462): unsure at all n locations
ttgaggtctgggttctactggccaacaacaaagaatgatgctttcgagttagtncagaagtgcgaggcgggccaattcttatcgaagcagcagcatctacccgtgcaacagttgtagactattcttgtgacctgtccatatgcatgtatgggggctggacatgaatgagcctttcaagagagctcaagggggatatacacacatactggttaccattgataaattcacaaagtggatagaatacaaacccatcgcctctttgacctcagcaaaggcagtggaattcattcaaggaataatgttcacgtttggaatacctaacagcatcattacagacctaggatctaacttcactagctcaaagttcattgacttctatgagcagaggagcatctagaccaagtatgcatcagtggcacacccaagagctaatgggcaggtggaaagagccaactggatgat

SEQ ID NO: 12900 - DNA, 388 bp, Zea mays
  unsure (1)..(388): unsure at all n locations
actcaagctcgatgtctcgggttcgccaccatcttcagacttcgatcctttctatgtagancagccaatgcataagatattcatatgccatccaatccctgactcaattaactatcttaactcacttttaaacgatcctacattctaattggccaaaaaatcctagctggattgagtagcctccttactcttcacatacttcagggatatgagtaccctagctcatatttcaccacaatcgagcggcaatgcatcattaaggaagcagcggtccaatccttgggcactcaaatacgatatgacgcgtcactaaggggtgatgactagatccttggccatttaacaccgtcgtagagcaaatctccaaccaggcggcggagtgcacccg

SEQ ID NO: 12901 - DNA, 425 bp, Zea mays
  unsure (1)..(425): unsure at all n locations
nctaaagggagagcacattctgggactaacacatgttcattctgataaagacacggattgtagcgcatgccaagcaaggaaacacagtggtgttcatcatccacacaagaacataatgacaaccgacaggccacttgagctccttcatatggacctaattcaggcacgatagcttacataagcatccgcgggaagtagtactggctaaatattgtggatgatgattctcgctgcacttaagtattctttctacaggacaaatctcaagcccaagagactttgaagggattcttgagactggctcaaaatgaattcggctggaggattacaaagataagaagcgacaacgggacggagttcaagaactcacacatagaaggctctcctgacgaggagggcatcaagcatgagttctcttattccta

SEQ ID NO: 12902 - DNA, 463 bp, Zea mays
  unsure (1)..(463): unsure at all n locations
tgtgaaggttcttcatcctcacatgtgctaagcggctatgccacagccagcccatgccagtcttagcaattaagcatgcatctagaccggcctcctcttttgcaaaatcaactaaataaagtttgccgtctaatacacccttaaatgctagtgaaccatcacttcttctaaagacagacacatctacatttgtaaaaagacaattatatcccatattgcatagttggctaacagatagcaaattgtagccaagagactcaactaaaaacacattagagatagagtgctcattagaaattgcaattttacctaacccttttaccttgccttgattcccatcaccgaatataattgaatcttgggaatctttattcttgacataggaggtgaacatcttcttctcccncgtcatatggtttgtgcatccgctgtcgataatccagcttgaacccccggatgcata

SEQ ID NO: 12903 - DNA, 462 bp, Zea mays
tggagggctaagcagtgtgcgtggaagatgatatatgttgactgggagtctgggtacgagcagctacctgttcttttaaatgcaatgaaggcggtcaatccaggcatgcattatgagtacatccctaaaccaaatgcatcgattgatgggagacagatattcttccgtgcgttctggtgctttccccagtgtgtggatgccttccggcattgtcgtcctgtcttttcaattgacgacacgtttcttctcggcaagtatcagggcactcttctaattgccatatccgttgatgcaaacaacaagctagttcccctagcatttgctctggttgagaaagagaacaaagacagttggggctggttcctgcgactggtccggatacatgtgtgtggcccaggacgggaagttggtgtaatatcagatcggcaccagggaatactcaacgcggtccgtgagcagatc

SEQ ID NO: 12904 - DNA, 444 bp, Zea mays
  unsure (1)..(444): unsure at all n locations
tatctatattgcccaatgctgttctcaatggtgtcactaattaaacccaacgatcttttgtttcaccatctataaaaccaaaagcaattgggtacatccaattatgcccatctagtgcagttgcagcagctaaatgcccattccatctaccattcagacacgtggagtccacgctgaggtaatgtctacaacttccaaggaacccttgtatacatgggccaagtgcacaaaaaaatctatggaagtacactttcccatctacaacctgtgtgtctatctccacaacactattgggggacctcaataaaacctctgccttccattgatacaacaacctaaaactatcatcccatgtaccatacattnttctcagtgctttctgcagccctttatatgcagtgtcataagttatctgtaccttatatcgtgcttgaagtctctctc

SEQ ID NO: 12905 - DNA, 410 bp, Zea mays
  unsure (1)..(410): unsure at all n locations
tccgcatggcccactctatcatagatggaaacacttcgtatgccaataaatcctgcactaagtccctagtgccaatgcgctctgcgataaccccaaaatcagccaacgcaatctgggttggaccctctggtgccatattgcacgggggtctggtctctccgaagatcaactataacggactctgaaccagcttctccttatcatcgtcaactttgacgtagaaccattcagatttccaaccctctggccacttgcttcggtagctgatcacgggaaatcttgtagtcttgcggtaagaaaatgatgggcctatgcttcgtcgccgaaggtcttataggaagaagcggacttcggctgaagctgtntgtataagatggccgaaagttcctcttcaagaagcttcggaatta

SEQ ID NO: 12906 - DNA, 451 bp, Zea mays
ttaactctcacgagaccttttctcatttctttctattcatggtaaactcattattgtatgtgatattttatgcatgtctaatctactgattctcttgtatggtgtaatgttggtttcctaatttcaatggatggatgtatgtatgcttgctatcgcttagagaacgatccggttggagagcccgaagaactcgcatgagaagcccctgagcagcagtcggttggtggaggcaagtgtcctttgacctatctctgtcctattcattctttaattcacctcccgcattacacatttatacttaaggattgactagctttgttatccatgtccttgtttacctatttgggtcggattattattatttagctctatgctattgctcaaactcttatcaatgaacatgatgagatcgtatatgatacgctgttttcccttctcttattatgatgtt

SEQ ID NO: 12907 - DNA, 325 bp, Zea mays
atgacgcttcaagtgggtgggatgttctccaaataaacttgatggtggatccatcatggtcgcgatgggttcaacatcggaaaagatgtacctttgccacgtaccaaactttgggttgaaattgataaagctgagaccgggctgttgacttgcacgagaaaggagtctcggtgtacatgtttcgtctgagtcgattaacgatcgtctctatgtacgcctgctgaccgaggacactttaactggtcacatgcctcatcatgagtaagctttgcctccggcagactaataccagaattagacaacgcccactgggagtggagagatg

SEQ ID NO: 12908 - DNA, 446 bp, Zea mays
tgtggaggttcttcatccccacatgtgctaagctgttatgtcccaaccagcccatgcaagtcttagccattaagcatgcatctagaccggcctcttcttttgcaaaatcaactaagtaaagtttgccgtctagtacacccttataagcgagtgaaccatcacatcttctaaagacagacacatctatatttgtaaataaacagttatatcccatattacataattgactaacagatagtaaattatatccaagactctccactaaaaagacattagagatagaatgctcatttgatattgcaatcttgcctaaacctttcaccttgccttggttcccatcaccgaatatgattgaatcttgcgaatccttattcttgacataggaggtgaacatcttcttcttccccgtcatatggtttgtgcattcactgtcgataatccagctt

SEQ ID NO: 12909 - DNA, 458 bp, Zea mays
  unsure (1)..(458): unsure at all n locations
cgacaatgaggagatggcgctcatcatcaagagtattcgtcttattctcaagcaacggagggggaaggattacaagccccgctccaagaaagtttgctacaagtgtggtaagcccggtcattttattgcaaaatgtccactatctagtgacagtgacaggggtgacgacaagaatggcaagaggagagaaaagaagagatactacatgaagaagggtggcgatgcccatgtatgtcgcgagtggaactccgactagagctcctccgactcttcctccgacgaggacgccgccaacatcgtcgtcaccatgggactcctcttccccaacgtcggccacaagtgcctcatatcaaaggacggtaaaaggaagaagggtaaatcaaaatcctccactaaatatgaaaccactagtgatgaggataatngtagtgatgaggacgataatctgcgcacccttt

SEQ ID NO: 12910 - DNA, 436 bp, Zea mays
cttctctgggcacctctttctgtattcttattgctgcggattcggatttctttgacatggctctcttgccatgttcagcagcatattctctatcagtcaggatcagctctagatcacatgaggaggtttgggacctcacgggggtttacgggcctcagctagacaatgaaaaaatgattttcctttctgaactccgtaacatccaagccatggtcagaccagaatgggtattacttggtgacttcaacatgatcaggagagcaagggagaaaaacaaaggatcaatcaacagaagagtcatgagacaatttaataacacgattgattacctacacctacttgagctagagctcaccgatagagcatccacctggtcaaatgaacaaattaacccaaccatgactaagattgacagattcttagcgacaacagagtg

SEQ ID NO: 12911 - DNA, 451 bp, Zea mays
tgagcagtgaccggcttcgtttgatacccttggaagctggttatcatcatgtccttcaacttttgccacgaggtgattgttcctggccgaagagaagagtaccatgtttgtgcaacactcttgacagccatgacgaaagactttgccatgactgcaataatgccaccatactaagatatggttgcttcataactcatcaagaattgcttccggtctgaatgaccgtcgtacatggggagctggggtggctcgtaagactggggccaaggtgtagcctgcagttctgttgacagaggagaagtatcatcaaaagcaaaatttccatgatggaaatcttcataccagtcgtgctcgttgtagaagccctcctgatgaagctctctgtgcgaagtccttcggttctggtcatcttgagcaagatgacgaacttcttcagagccttcgtctatct

SEQ ID NO: 12912 - DNA, 466 bp, Zea mays
ggaacttaaatctcaacttaactctgcgagacctttctcatttcttctaattatggtaagctcattatcgtatgtgatattctatgcataattactttaattgttctcttgtatggtgtactgtttggttcctaatttgaatggatggatgtatgtatgcttgcaatcgcatagagaacgatccggtccaagagcccgatgaactcgcaggagaaacccctgagcatcaatcggctggtggaggcaagtgtcccttgacctatctctgtcctattcattctttaattcaccttccgcattatatacttatgcctaaggattgactagctttgttatccatatccttgtttacctatttgggttggattattgttgttagctttatgctattgcttaactctaatcaatgaacatgatgagaatatctatgatacgcttggttcccctctcttattatgatgttata

SEQ ID NO: 12913 - DNA, 425 bp, Zea mays
  unsure (1)..(425): unsure at all n locations
tctagtagattgagaagcagaaacatatagtaacatattatcctctagtgaaggtggagataaagttatgagttgaatcaaatattgctttaactcttcaaatgcttgttgatgaggtggtccccactaaaatactttggttggtttcaatgcttcaaagcatggaaaacatcatactgtagaccttgaaatgaatctgttcaaggatgccagtctgtctaccagtcgttgagctccttttcatgactttggtggctccatttgaagtatagcttctaccttgcttgggtttgcttcgtttccttttatggaaactagatagccaaggaattttccttttcttactccaaacacacacttttcaggattgagctttagacctgctcttcgaaaacttgcanacgtttctttgcaatcttgaatgt

SEQ ID NO: 12914 - DNA, 461 bp, Zea mays
tggttagccgcgacatggtaaagcgtctggacatgctgcttacgacggtgatggttccacggcggtgagaatcttatccgaggggtggtgagcaagaggggaggcacgacggctagccggagtggcgtccagcttaacggcggcgaagaattttctaccccgcgacgttatctatccactccgggcacgaatcgggacggcgatggcacgaatcgcggcggagggattgtcggcggtgaggtccctgcgctggcagtctgatccactcaacgcactgtaccatggcgagctcggttcagacagctgacagagtgatttgtagggagattttctcccaatttcatgtgacaacataaccaatgctctgcagcaaagttggagagctacaaaccagctacaatttttccataacagctatagccaaattcctattgaatcaagcttgaattcatgcccaaagt

SEQ ID NO: 12915 - DNA, 481 bp, Zea mays
gacctatgaaactaagcttggaaggttcttcatcctcacatgtgctaagcggttatgccacagccagcccatgctagtcttagctattaagcatgtatctagactggcctcttcttttgcaaaatcaactaaataaagtttgccgtctaatacacccttaaaagctaatgaaccatcgcttcttctaaagacagacacatctacatttgtaaatagacagttatatcccatatgacataattgactaacagatagtaaattatatccaagactctctactaaaaatacattagagatagaatgctcattagaaattgcaattttacctaacccttttaccttgccttgattcccatcaccgaatataattgaatcttgggaatccttattcttgacgtaggaagtgaacatcttcttctcccccgtcatatggtatgtgcatccgctgtcgataatccagctggaacccccggatgcataa

SEQ ID NO: 12916 - DNA, 459 bp, Zea mays
gtggcataccccacttcctcaacgttaggaatactctgttggctaagtattcctagacgaggtccctagttccaatatgttcagatacaattctaaactcatacacaacatcttggcatggatcccccggtgtcatattgcattgaggcctagtcagcccgaagattagcttcaacgggctctgaactagcttctccttttcttcatcaattttaacataaaaccattcagatttccaaccggtcggccatttagtatgatagctgaccaccggtgtcttcatatccttctgataagcaaaattataacagccgaagttctcatgcaatccgtcttctctagccttcgtctcataatgaagttcatgtactcggcagaatgcatcagcgagcggctctaccccttgacttcagagggcccagatgtacacgatgagcctaacataggcgttatgagtca

SEQ ID NO: 12917 - DNA, 397 bp, Zea mays
aaccctgacctgaagaccttcccgactagcgtcttggacgctacgtgtatttcacattacccagcatggacctcatctagaagtcgcttcccagtagatgagagaatgcacttcatgaggacgcctgatgcaccccttatgtataatatctccccaatgagtgtgtagtgagctgactgtctagcgatgcgctcggctgcatttttgtcatctgggtcctcttcattctttatatatctgatgatcggccttatccagtcatcggagtctgactctggttgattcatgatattacactcttctgcctgatccattgagatgctctggtgtggtatttcttgtacaaagactccaggtgggacctgagttcgactggaccctagcttggacaatacat

SEQ ID NO: 12918 - DNA, 454 bp, Zea mays
tgcacggcggcgggtctgcgagtcgtggcattgttctctttctagcgatgagggtctgtgggaggttccaatttgtagctgccgggacccagggctcctcaaccgattccacgatttgcgtcatggacccacggtcgagtttgtccgagcggcgcggcgaagataggggaggggtagagctgacgtgcgggacccacgtggaggtaagaccgcatttgcgtactgcgcgtggtgggtggctgacagcatgggcccgcgtgtcatcgatgggcgaatggagtggggagtctgacggggtggccatctcgtcagttgcgagcgcgcaggtgctggtattgtgccgcacagagaaagctagtgggccgactcctgtgcattgagcccaagaccacgacttctacttttctttctctttctcttgctgtgtgggttcttttattccttcaacttaact

SEQ ID NO: 12919 - DNA, 376 bp, Zea mays
  unsure (1)..(376): unsure at all n locations
catggtaagatgcatatgcatttaacatactaattgtctcaaacctaactaccggtgcattaatttaaccaaagtcccaaccttttacctagtgaataacccatggccacaagtcgggcttagatccttgtcaccacaccatgctcattttgcttgttgcggactacccacttggtacctacaacattttggttaggaacgggaactaaatgccataccttattccttgtgaagtcgtggagcactttttgcatagccagcacctatccaaatctcttagtgcatcctncaccctgtatggctaaaaaaggacacaaaaaagaatgtccaacaaaatgtgcacatcgagatctagtggttacccccttatgaatgc

SEQ ID NO: 12920 - DNA, 443 bp, Zea mays
  unsure (1)..(443): unsure at all n locations
atcctcagagacacctgcagctgcagcttacaggctactggcggagctagtcgtttcgctggctcgacttgnggggagctggagtgggctggccacggtggccgaagctctggcggcaatggcgggcggaattgagctcgccggagctaaggagagggggctggccggtgaaggtgagcgcggggtgaagtggggcgcgcctgggaggctttataggcacggcgcggtgcacgggcggtcgtggaccggcgagcgcgcgcgggcgtgcactgggaggcgtggtgcacgaacgggcgtgaaccggaggtgtcagccacggtcgaacacgtgttcccgttgcctctgcccatgttcaagcgctggttgggtgcaaatcttcgccaatttgggcaagatacgtgtgaaggagttgtcacttgaccatgctttgtcttttgtgtatg

SEQ ID NO: 12921 - DNA, 392 bp, Zea mays
gaataataaagataagggtattttacttcttcaatattcgtgtacaaagactacacaaataaggtagctctcggagtaggtccgcgcgggcgtcttatttcccatcataacaagaatatattactacatacctcaaccgtatcactggcatgtagtatgggcttctaataatgtagacagtggaacagattaattgtgagtactcaagaccgctctagttatctcggtccgatttaatctggcaccaacactcttattgccgagcgtttaatatagattgctcgggttaatatcacaagagcgggcgaggtacaaattcgatgcgttaatcgataaattgacgtgagcaggctcgatattcatgaataatacgcagatgatcaacatcgaat

SEQ ID NO: 12922 - DNA, 439 bp, Zea mays
  unsure (1)..(439): unsure at all n locations
agcttaaagccatggtaagtagaanaggcatgttatatactaattgactcaagcctanctacgtgtgcataggtttcaccgaaatccaaacctttgagttgtgaatatcccttggccacaagtcgggctttgttccttgtcaccacaccatgctcatcttgtttgttgcggaagacccacttggttcctacaacattttgattaggacgtggaactaaatggcatacctcattcctagtgaagttgttgagttcctcttgcattgccaacacccaatctgaatcccttaatgcgtcttccaccctgtatggctcaatagaagacacaaaggagtaatgttcacaaaaatgagcaacacgagatcgagtggctaccctctttagaatatcgccgagaatggtgttcacagggagagctcgttgattgcttggggactctc

SEQ ID NO: 12923 - DNA, 438 bp, Zea mays
  unsure (1)..(438): unsure at all n locations
agcttgtatccnctactacgagcaccccggttttagatattataagcctcatcctccctcttgtgtttcatcttgcatgaatccatctgggcagggacacgcgacataaaattcactagttggttgagggtcccccgggtccgaaacaccgacatctttgttgctcttgttgcctggattggtttcttcttctcactctaattcttctaaatgctttgtaaagctagcaagagacacctaattgtgtggtgatccttgcagggtcttagtgacccgtgtgattaagaagaaacgctcgaccggtctaagtgaccgattgagagagggaaagggttagaatagacccggtctttgtggcctcctcaacggggagtatgttccttggaaccgaacctcgggaaataaatcaccgtctttatttgtgttaatcttcatcac

SEQ ID NO: 12924 - DNA, 418 bp, Zea mays
tgaaactaattttcctatgcttgttattttccatagtatttaataaaaatagttgtgtgatttttagtggaagttagaaattttaaggtatttaaagtggttaaaaatattattatggatttttagagaataattggtaagtctaaaaatgcccaaactttttatgggaactttaaacattatttataagccttgggtagagtttgagttgatttggaccttgtttgatcaccaaaccccaaaccacccccctgtcctatgaactcctttaccgactccggaaactctaagttcccggaattctgtgaaggagagttgtattccagacataaataataagtttatgctatctctgcatcctcatgagcattccatggcatccattcttatacttatgtatgggtatgattagaacgtg

SEQ ID NO: 12925 - DNA, 433 bp, Zea mays
  unsure (1)..(433): unsure at all n locations
agcttcggcattgcaaaccgacttaaagatttaatgaccttttattccttaanggtctgagtcaatgttgtaagtttttataaggggcatacttgtaattcctcacaggctgcgtcctgtgcctataaatagtgaacagnattccgttactgttcacgcattctggtatttacaatcgcatctctcggaatacaacctttgtcaaggcataggtatcattgtatttaatgattcaatatattaagtgaatataatatgatacatctgtgattcattcatctatttggtaccttttatcttacattattttacaatggttattgaaagttattacgaaggttcaacttcgtaataataatctcatcaaccttcgtccaaacccattatccttaaagaataatgcttcacggacgaatgacagtatcatttaaca

SEQ ID NO: 12926 - DNA, 445 bp, Zea mays
aggaccttaaaactcagcttatctatctgcctctgaaggtcagctaggcgagccatcttctccttctttctctgcacctattgatggagcatctccaggttttggatttcctggtccaagtcgtcctccggaggcgttggactggtggccttcctcttcggcttcgggcctccctaagagaaaggacgtcctgattggggtccagcggctgcagagtggcagcccctgtcactgaagcttttttcggcggcatgacgaaggtgatgcttgccgaagatgttcaaagctcaagaaatggaagtgagttcacccactgtgggcgccaatgttggggacttgttctcaaatactaaaagttaagaacagggcaacataaaaagtgttaaatgttaaagtccttcgtgcttataaacattatatcccttcggatataatgaactctgga

SEQ ID NO: 12927 - DNA, 416 bp, Zea mays
tcactatcctagcatcctgtcggcggagaacactaacaatcatttttctcttttgcccttcggcacccttgtttagtcgttcatagtcagggtattcaaagtttaaagcatccattacccgattcaaccttcgattgggtcgggtgcccaaggttgcagtcatcaatggatcttcttttttagggtaattgcccaaaattttgttgcacatatgctcaatcatttctagccactattggcagggctctttgaattgtttctcaaacttgaagtgatagggcaattgaacaagttcattcttcttccttgttcccttcatgtttggcatactccattcactcaatgttggagataccttgttggctaggtattcttgcactagatctctagtgctgatctgctcagccaccaccctg

SEQ ID NO: 12928 - DNA, 308 bp, Zea mays
  unsure (1)..(308): unsure at all n locations
ccctcaacatccttgtttatctgcgcataatcaggatattcgaaacccaatgcatcaagcactctgttcaaacattgcttangacaggtgccgaacgctgctgtcattagttgaccttcttttttctaataattttcaagaaatttattacacattaacttaactgtatccagccactcttggcagggctttttaaaatatttcttgaatttgaagtggtaaggaagccggacaagatccccttccttcttcttcccctttaactttggcatttcccattttttcagaatacggaagactttgaatgc

SEQ ID NO: 12929 - DNA, 386 bp, Zea mays
ttctagcgtggaccggttccatggggcgtcaattattgcgtgcaatggaagtgcaatgcactgcacatgcttgcactctgtcctgcacgacagacagggagcatggcagaaaaacttcatcagccatctcacgtacacgtagggtggccaaaagggttcggattgggacttaaggtgcacctcaattattgagaaggccacttggcttttggggcaaaagaaagttacgttggtctctgctctacaaggcaaggcaaggcaaaagcactggtcgccggccttcatcatctcattcatctgtgctgtacccggtaccccaccattcaacctatgttgaacacgagtcatattacctgattttagacacttgcatcacatgctatgct

SEQ ID NO: 12930 - DNA, 443 bp, Zea mays
  unsure (1)..(443): unsure at all n locations
tgtgaaggttcttcatccacacatgtgctaagcggcgatgctcacattctgcccatgctagtcttagctattaagcatgcatctagaccggcctcttcttttgcaaaatctactaaataaagattgccgtctaatacaccgttaaaagctagtgaaccatcacttcttctaaagacagacacatctacattngtaaatagacagttatatcccatattgcataattgactcacagatagcagattatatccaagagactcaactaagaacacattagatatggagtgctcattagaaattgcaattttacctaaaccttttaccttgccttgattcccatcaccgaatataatngaatcttgtgaatctatattcttgacgtacgaggtgaacatcttcttctcccacatcatatggtgtgtgcatccgctgtcgataataca

SEQ ID NO: 12931 - DNA, 419 bp, Zea mays
agctggggaagggtcttcatcttcacatgttctaagcggcgatgccacaaccagcccatgctagtcttagcgattaagcatgcatctagaccggcctcctcttttgcaaaatcaactaagtaaagtttgtcgtctaatacacccttaaaagctagtgaaccatcacttctcctaaagacagacacatctatgtttgtgaataaacaattgtatcccatattgcataattgactaatagatagtaaattatatcccagagactcaactaagaacacattagaaatagagtgctcatttgagattgcaattttacctaacctctttaccttgccttggttcccatcaccgaatattattgaatctcgcgaatatcttattcttgacgtatgaggtgaacatcttcttcctccccgtcatat

SEQ ID NO: 12932 - DNA, 488 bp, Zea mays
tctgagtaagttgatacttctcctttcgaagagatccgattgtattcttagaccatcctcgaaggtattgacgcaaggatctaatattgcctttaccatttcttcatcgctgaaaatccccttgtacgctgttcgcaaatcgatgcaaccatatcatggaacccattcctaataagctatcctaactcagatttaaacaaagattgagtgccaaaatgtgaggcaatcttgacgatgagtaataatggcgtatggtccgagcatgatcgatgaagcgcttcaacagttacattatgtcccgtttgtttcctttcattttgaggaattggaatcttactaatagaataggctaatttttagaatgtgacattccaccactttccaaagctatcatattagcctatctcaaatcattgggttagagatggaaatcgattatatagatatacatgctatatttccgtatacaacttatagcacactcttat

SEQ ID NO: 12933 - DNA, 400 bp, Zea mays
  unsure (1)..(400): unsure at all n locations
acctgcggcatgcaagcttcgcgggagagggttctgtcttgaagttagctatctgagttagcctctctcgcgtctcttgggaaggccctgtgcatccccttntatagatacaaggggatggtccagctgtacatatgagggtgtagctacgtgctaacgtggccagcggagaagtgctcgagccctgtagaagcgtaactagcggggcggcccttggtcctgctgacgtttctttgctttcgtagagagctgagaacaatcgacgtcatggacgcatgcagggaaccatcattacctgttgccggagtaatctagatgtgacactggtcttgttccttcgtagcctgaggcggctagctaggggtagggtaatgatgtatcccctgtagcgtattcggtc

SEQ ID NO: 12934 - DNA, 471 bp, Zea mays
  unsure (1)..(471): unsure at all n locations
tctaagggagaacatgtgttaggactaaccaatgtctgttttgagaaagatagaccttgtgcagcgtgccaagcagggaagcgggtgggaagtaatcatcaaagcaagaacatgatgtcaacatcaagaccacggaactcctacatatggatctcttcgggcctgttgcttatcacagcatcgggggaagtaagtatggtcttgttgctgtaaatgatttcgcttcacttgggttttctttttgcaggataaatctaaaactcaagggactctaaagcgcttcttaaggagagctcaaaatgaatttgagctaaaggtgaaaaagataaggagcgataatggatctgagttcaaaaaccttcaagtcaaagaatatcttgaggaggaaggcatcaagcacgagttctccgctccctacacaccacagcanaatggtgtagtagagaggaagaacatgacgctaattgatat

SEQ ID NO: 12935 - DNA, 392 bp, Zea mays
  unsure (1)..(392): unsure at all n locations
agcttcatgaagctgctgcctattatgagatgtgaactgcgtncntcgatctgacactatcttcttcggcacaccatggaagcagactatccgtgacatgtataactcaactaacgttgctccggtgtatgttgtcttcacaggtatgaaatgggccaccttttgtaagcggtccacaaccacccagatggaatcatagccggcccgggtacgaggtaggccaactataaaatccatcccgatcttcttccactttcactgaagaattcgcaacggctgcaacaatccggcgggcctttgatgctttgctttggttctctgacagctatcacagatggcgacataatttgcgatctcttttttcatgccctaccacacaaaacctccttttt

SEQ ID NO: 12936 - DNA, 412 bp, Zea mays
cgagtcaattcgtatattattggcctatgctatttaccatggcttcaagctttatcaaatggacgtgaagagtgccttcctcaatggaccaatcaaggaagaggtctatgttgagcaacctttcggctttgaagaggcgagtaccctaactatgtctataagctctctaaggcactttatgggctcaagcaagccccaagagcatggtatgaatgcctaagagattttcttattgctaatggcttcaaagtcggaaaggtcgatcctactctattcactaaaactcttgacaatgatttgtttgtatgccaaatttatgttgatgatattatatatgggtctactaacgaatctacatgtgaagaatatagtatgaacatgacacaaaagttcgagatgtctatgatggggg

SEQ ID NO: 12937 - DNA, 424 bp, Zea mays
agcttgccagtacctgtttaaacaacatcttttgccagcacagcagctaccaaccataccagtaacttggccttttgcatgctggggattggatatgattggaccttttaagaaagctcaaggaggatacacccattgtttggtggcaattgacaagttcactaaatggatagagtttcagcccattgcctccataacctctgctaaagcccgggaattcatacaaaacataatattcagatttgggataccgaacaggatcatcactgacttgggatccaactttaccagttcagaagtctttgacttctgcgagcaaaaaaacattcagatcaagtatgcatctgtagcccatcccagagccaacgggcatggtgagcgagcaacggaatgaattggaacacttataaaagggctttataaa

SEQ ID NO: 12938 - DNA, 431 bp, Zea mays
  unsure (1)..(431): unsure at all n locations
ntgggtgcttgagagagtcaattcaatttttattaactctatctatcaatctacaatgatctacatatccaagaatgacccaaggttatttcaaattattatgtctaaaactcatatcatctcgggaagatatcatgttgtaggaaataaagaattaattccatgtcgaagagtcaagacctacaacatggaggaaagccatagaatggtaacaattatgcttttaagtgcaaatatcttaaattatcatttcttatgtgtcttgtgtagttacatagaaaaggaagcacttaaaatgttcttaaaattatgtcaccattctttgaagatattcctcccatatggtagattgtatactcatcattcctatactatggcaatctacatgttttaaatcattcatggcatgtcttacacttattatcttatta

SEQ ID NO: 12939 - DNA, 391 bp, Zea mays
agctttcatctttcttcttcacaaacagggcttgacatccccaaggcgaactacttgggcgaatgaatcccttatccagcaactcctgcaattgcttcttcaattctgccaactcagagggtggcatttcggtaggcctcttggaaattggtgttgttcccggttgcaactcgatggcgaattcaatatcccggtctggtggcattcctggcaattcatccggaaagacatctgcatactcacagaccactggaatcttcttcagaggtaactctgtcatagagaaaatacatgactgagtggaaccttgactgggcagaattaaggtgaagtttcccacaaacagggagttgatttccacgatgcggctggctacatcatgcactacttg

SEQ ID NO: 12940 - DNA, 383 bp, Zea mays
  unsure (1)..(383): unsure at all n locations
tctcgtataatggatgatggacacagtacgccgcttggcacaggtgcactttatgacaatggagtggacaagtgcgccggttgcaggatggccctgacaccgcctgccagcggagtggataagaaccacgaatgctgaaggggcacatctcctgtcaacagggtggacaggaggcgcatcctctacgcaataaatgcatagaccgcgcgacctataggccttacgtcaggctccgcccgttggcttatgtcacgggcaacaagccacgtgacagcttctagtatccgactgaacggtgagcgcaagcgcacaagataatgcatggacatgtgtcagtaccggacccttgcttatgccaaggtctccactgttcttacanctta

SEQ ID NO: 12941 - DNA, 300 bp, Zea mays
caagcacctgaggcatgcaagctgttgatattaataatgtgtattacatgtattaatctatatcttacatttgagggcacagtatactaaactgaactatgatctgtacttgtaagttacacttatggaaatgatatcctattaccacatgaagttaattcatgctatagatgatgttatacttcaaattcattatgcggtacgttgttatgcgctttgttatataactttttctatggcagggatatttaccgcgatggtaattggtactggacaaaagaatagaatgcatccttgctt

SEQ ID NO: 12942 - DNA, 454 bp, Zea mays
  unsure (1)..(454): unsure at all n locations
ccgatggagaaacanaaatccttgaagtcttggttgtaaactgcttgtcgttgtcaactgttagttcggacggcactccgaagcggccaacaatgttttgccagaagaatttctgggcagtctttgacgttattgtagaacagccctcgcctcgatccatttggtgaagtattcgacagcgacgaaggcgaacttaaggttcccctgagcggtgggcaggggcccgacaatgttcaggccccagcgctggagaggccatgtatgggcgatcagctctgtatactgcgaggggctgcctgaccgaggagaaaatttctggcagggctttcatgaccttgagacccgatttgcggcgcagatcattgctggccagtaaagaccctgtcggatcactttggcaactatggaccttggtcctgcgtgtgagccgcacgtgccactgtggacttcacgt

SEQ ID NO: 12943 - DNA, 446 bp, Zea mays
  unsure (1)..(446): unsure at all n locations
agcttcggctccatctatgttgnggattgattttgaatctgtccagtttccttcggcctttctggcagcttcctgacttccatgaatagcaataggcccttgatccgaaggtatcttcatgcaaagatatgctgcatgaagaattgcttcgaaagcattgagtgtcccacgaccaatgattgcgttgtcagggtattccatgtcaacaatatcaaacacaacttgttcagtccttgtattgttgataaatccgaaagtcactggcatcgtgatcttgccgagtgctacaatctgccttcctccgaagccacaaagggggtgtgtagcatcatggatcttatcttcgggctcttgcatctgtctgaaggccttagcaaatataatatccgttgtactgcctgtgtcaaccaaaacattatggaccagaaatcctttgataacacaag

SEQ ID NO: 12944 - DNA, 435 bp, Zea mays
  unsure (1)..(435): unsure at all n locations
ctggcataatgtgatgtcagaagtctttactgtatgataatggctggaagctttatgacttagtgcatctgccaccacgttggccttgcccggtgatagtgaatttctaattcataatccttaatcagctcaagccatctcctctgcctcatatataattctgactggataaaaatgtacttcaagcttttatgatctgtatatatatggcagatattttccaacagataatgacgccatattttaagggtatgaaccacaacagctaattctaatnatcagtaggataatgttcctcatgccggcgcaactgtcttgaagtattatgctataactcggcctcntgcattaagacacattcgaggccactgtttgatgcgtcanaatananatcataacgattttcaatgtctggttgagccaatatcggagcag

SEQ ID NO: 12945 - DNA, 433 bp, Zea mays
agcttcggcttcatctatgttatggatagcctttttatctgtccagctcccttcggccttcctggtagcttcttgactcccatgaacagcaatgggcccttgttccaaaggtatcttcatgcataaatatgctgggtgaagaattgcttcaaaggcattgagcgtccctcgaccaatgattgcgttgtatggatactccatgtcaacaatgtcaaagacaacttgttcagttcttgttctatggacgtaaccgaaggtaactgacatggttattttgccaagtgccataatctgtcttcctccgaagccacaaagagggtgtgttgcatcatgtatcttgtcttctggctcttgcatctgtctgaaggcctttgcaaagatgatgtctttacactgcctgtgcaaccagaacattgggactataaatcccttg

SEQ ID NO: 12946 - DNA, 245 bp, Zea mays
gctagctgccttctgtgcgggacaccatctgtctgaaattgcagctccaaccacgtgttcggcatggtcctgtgtggaccaacaactgtgaataaatagaagtatggtggtttgcaattgcaactacacatataaacaatgtgggttcttttctggtttttcaaattcctcatggcctttgcgcataataccctaatccggctcacgtgggcacgttttagcctacacacggaccgactttggct

SEQ ID NO: 12947 - DNA, 438 bp, Zea mays
agcttgacattgtctccctgttggaagccattgtcatccttattgccagggtgtctcccactataaagcatgctacgagcaaatttaaatttctcattttctagttcatgctcggcaattttagcatctagtttagctatatgatcattgtgttgtttaatcatagcaaggtgatcatgaatagcatcaacattaatatctctacatctagtacaaatagtaacatgatcaacactagatgtagatggtttgcaagcatttaattcatcaatcttagcatgtaacatggcattctcatttctaagattgaaaatagaaacattgcaaacatctaattctttagccttaacaattaatttttcattttcaatcttaaggctagcaagagattcattcaacatgtcaatcttactaattaaactagcattatcatttcta

SEQ ID NO: 12948 - DNA, 447 bp, Zea mays
aactgcgttcctctatctatcactatcttcattggcacaccatgaagacaaacgatccgagacatatacaactctgccaatactgcactgctatagttggtcttgacaggctgaaatgggctgacttggtcaagcggtccactactacccaaatggaatcgtaaccggctcgagtgcgaggcattccgactatgaaatccataccgattccgttccattttcactgagggatctgcaacggttgtaacaatccagctggactctggtgctctgccttagttcttcgacaactatcacacatagccacatgctctgcgattccctctcattctgtacaccagaatttttcttagacctgatacattttcactggcaggtgaatcaataggctgtctatgagctctcttacgatcactcacaatggatggcattggaaccacatcggct

SEQ ID NO: 12949 - DNA, 366 bp, Zea mays
agcttcccctgcacgccgatactacgtagatctcatatgtcatggcgcaagaagattgctcgagcggcgaacattagtagctccaagtactacatccgttatgttcctgggcccacatgtcggggctcagtacccttgtacatgcccccttagctataaaaggggaggcatgcaacgttacaaaagaggaaaaaaaggaccaaacttagacagagactctcagctctcaagcttccatagcaatccaatacatagtggagtagggtattacgctccggcggcccgaaccactctaaatcctcgcgtgttcatgtgctcggtgatcgcttagcaagacaaacaaaatgcttaagccccttcctcatc

SEQ ID NO: 12950 - DNA, 469 bp, Zea mays
  unsure (1)..(469): unsure at all n locations
nttgtgatccgtgaagaatttgcacttggttccaaccatatattgccttcaaatcttcaaagcatgcactacgtcagctagttccaaatcatgcgtatgataattcttctcatgcttactcaactgtcttgaagcataagcaccacctttcgatcttgcattagcacacatccaagtccaaggtgtgatgcatcacaatacacatcaaatcccttgtggatgtctggcattaccaatattggtgcagtggataaccttttcttgagttcttcaaaacaattctggcaagcttcatcccatttgaactctatacctttctctagtagtgaggtaagaggtttcactaacttggagaaaccttcaataaatcttctatagtatcctgccaatccaagaagacttctgatcttggacgcatccttgggttgcttcaatccaggatctcacttatctttcctgggtccacttt

SEQ ID NO: 12951 - DNA, 378 bp, Zea mays
tgcaagcttgacattgtctccctgttggaagcctatgccattcttaatgccacggcgtgtcccactatagagcatgcttctagccaatttaaatattttattttctaagtcatgctcattaatcttagcactaagttgagctatgtgatcattttgttgtttaaataaagcttggcgatcttgaattgcgtccacactaatatctctacatctagggcaaaacatgatatgctcaatgggagatgtagagggtttgcaaacatttaattcatcaatcttatcatggaacaagatattttcatttgtaagagtgggaataacattattgcgaacatttaaatctttagccgtaacaattaagttttcattctcaatttt

SEQ ID NO: 12952 - DNA, 442 bp, Zea mays
tctaaggggagagcacatttatgactaaccaatgttcattttgagaaagacaggatttgtagcgcatgccaagcatggaagcaagttggcactcatcatccacacaagaacataatgacgactgacaggccactggagccctacacatggatctattctgcccgatcgcttacataagcatcggcgggagtaagtactgtctagttattgtggatgattattctcgcttcactcgggtattctttttacaggaaaaatctcaaacccaagagaccttatagggattcttgagacgagctcaaaatgagttcggcttaaggatcaagaaaataagaagcgacaatgggacggagttcaagaactctcaaattgtaagctttcttgaggaggagggcatcaagcatgagttctcttctccctacacgccacaacaaaactgtgt

SEQ ID NO: 12953 - DNA, 382 bp, Zea mays
  unsure (1)..(382): unsure at all n locations
ttatgtttttgagtaccttcgaaaggagaaggccccctactgcccctcgcaatattaatttgttttttgtaacaaattcagacttccacaataacgaaggcctttatccgaaggtccaaaaaacactctccttcgctataataacgatcattatgacccgcggggcccaccgagctgtggggctctgagtgtatatatagagacctatgtcgngagtatttttcgtgctatctaactgtttgtactgtgtgtgctattttaactttcttcactttctcgagctcgattgacttttgagcttcgacatctgcccaaccatcgtctgaatggttgaggagaagaagatcactaactgtcggtgttttgggtccgaccgtgcacc

SEQ ID NO: 12954 - DNA, 438 bp, Zea mays
  unsure (1)..(438): unsure at all n locations
tcagacanaatcttatgccaatgtttaggagtatcagatattttcttttttatcaaattaatcaatgtcctattgctagactcggcctgaccattggcctgagcataatatggagatgaattaagcagcttaattctgtcaattcagcaaattcacgtacctcctttgacataaaagaagtaccttgatctgtagttaaggtctggtgaatgccgaatctatgaatgatatgctcagttataaactcaattaccttcttgtgtgtcatgttctttagagcaacggcttcagtccatttggtgaagtagtcagtggcaactaacacaaaccgatgccccattgatgatgaaggatgaatttctccaataaagtctaatccccatcctctgaacgggcaaggcttgataataggatgtaattcggctgcacggaccaact

SEQ ID NO: 12955 - DNA, 226 bp, Zea mays
ctcgggcgaagcgtgaattcgtccgggactactgttcccgcccgaggccgcgctcgggcgaggcgagattgcgtcccttggtagacgaggccttgacctgaaccgtgcccatcagtctttgtagtttgtgctgaaggtgcttaccagccgtgtttaggagtgttgggggtacccctaattacggtacccaacagtagcccccgagcctcaaaggagtgttggactc

SEQ ID NO: 12956 - DNA, 473 bp, Zea mays
  unsure (1)..(473): unsure at all n locations
tactcctctcgggaagggtcgttcatcatcgccaagatttttaagcccggaacatacaagctggccaacgatcaaggcgaggtctacagcaacacttggaacattcaacagctacgtcgcttttacccttaacagtttcaagtcgttcatatacatcgttctctttacatacataaataaagtctaaccgtcaaggaagggtcagccttgcctcggcaaagcccgaccctccctcgagggctagaaggggggaaccccctctgcgtcaaattcttcctcggtaaattnttctaccaagaaagattttctaccaaaacgactntcgtgccttctcgactatatcgataacagaatcctgcaataggtaagagtgcgcgtaagcggcaaggtcgaccgagccgagggactcctancgcctcgggatatggatacctcactcatcaccttccgtgaaaagtaactctcgctcggat

SEQ ID NO: 12957 - DNA, 422 bp, Zea mays
  unsure (1)..(422): unsure at all n locations
ngcttaactgttggagcacaatgtaatcctattgttcttaagaggcaccaacatataagcactacaatcaaaatgccattttgataaataacctaaagtaatgtcttaaatttcatgttgtagagcaccaaaatgaggagcggactgtttaatcataacagggtgatcatgaatagcatcaacattaatatctctacatctagtacaaatagtaacatgatcaacactagatgtagatggtttgcaagcatttaattcatcaatcttagcatgtaacatggcattctcattggtaatattgaaaatagaaactttgcatacatataattctttacccttaacaataaatttttcattttcaatcttaaggctatcaagagattcattcaacatgtcaatcttactaattaaactatcattat

SEQ ID NO: 12958 - DNA, 461 bp, Zea mays
tagtgccgatggagaaacaaaaatccttgaagtcttggttgtcaaactgcttgccgatgacaactgttagttcggacggcactccgaagcggcaaacaatgttttgccagaaaaatttctgggcagtctttgacgtattgtagaaacagcccttgcctcgatccatttggtgaagtattcgacggcaacgaaggccaacttaaggttcccctgagcggtgggcaggggcccgacgatgtccatgccccagcgctggagaggccatgtatggccgatcagctttgtatactgcgaggggcttgctgaccgaggagaatatttctggcacgcttcgcaggaccttgagacccggttcgcggcgcagatcattgcgggccagtaaataccctggcggatcactatggcatccaacgcccttggcccagcgtgtgagccgcacgtgccactgtggacttcacgta

SEQ ID NO: 12959 - DNA, 195 bp, Zea mays
  unsure (1)..(195): unsure at all n locations
agcttgaaagtttgcggaggatcttcgaattattaaaaatccttcgaagtaacaaaaagtcgttctaaggaacgcagagtaagttgctgaagttacaaaaagccgttccaaagggagcgcagtgtaagtttttgctccaaaaacgttcctataggaatgcagagcatacancnaaaagtctacgctgataccgcc

SEQ ID NO: 12960 - DNA, 482 bp, Zea mays
  unsure (1)..(482): unsure at all n locations
cgcgctctntattaattggtacattgactctctccttgctctccaagtgcgcaagtatgaaagtgatggttttctcccaacccacttctcataaagggttttctcttctttgcccataggaattctattcagaaccgacatgaagtcatgactgcctccccccaccatgccttaaataaaccacaagtgtctaacatggcattcaccangtcagtcaacgtacgggtttttctttcagcaaccccgtttgactcgggtgaatagggaggagtcctctcatgaataatgccatgttctacacagaaatcatcaaagactttgggaaagaactcgccaccacgatctgatctaagacgtttgatctttctctctaattggttttcaacctcagccttatagattntaaagtagtctaaagcctcatctttatgttttagcaagtatacatagcaaaatctagacgcatcatcaatcaatgtcat

SEQ ID NO: 12961 - DNA, 422 bp, Zea mays
agcttcgttacttgagatacaagcgtcttgtgttgatagatattattacacctctccagagatattgccgctggagaacctgcaacactgattctgttcatgagctcaaccgaaagtgcttttattgtctaaaaacttacttccgagggtcgaaggagcccctgagccgctgatttggctagcaaatctgcatgttcattcccacctcctggaatattcttgacagagaaaccttcgaaggaagcttccaaccttctaactgcatccaaatatctgtcaagcgtgggatctcttgccttgttacttttgtccacgtggccagcaataactagagaatcagtctttacgatggcccttcttcttcccattgcccttagtttccgaagccccaatagaagtgcttcgtactcggcaatattatt

SEQ ID NO: 12962 - DNA, 226 bp, Zea mays
agctgtcggacaagctgaatagcggtgagctaattgttcatatacaacatagaactcttgggtggtgggttatgttgataatcataaatattggttaattctcgaagcttttgttcttgattacaagaaagaattttttgattgtacacttaaagaaggtgatgttttctgacattggcataaaaagtgaagatccggcatctgtaaactttgggccacttttatg

SEQ ID NO: 12963 - DNA, 235 bp, Zea mays
  unsure (1)..(235): unsure at all n locations
tcctgggacaagagacaaaacagttaagactttactgctcccaattcaccaacacagtccaattagatatttttagtggtgagggagcctctagaacttttgctatgtacttcgtctatattttcatctataccagcattcaacatataagcatagcacaggatgagaggatctncttcaatcacttgaacagactctgaatccaacttatcagtcctgctgctccattccattc

SEQ ID NO: 12964 - DNA, 339 bp, Zea mays
acatgtgctaagctgcgatttccattcagcccatgctcttcttagctattaagcatgcatatagaccggcttcttcttttgcaaaatcaactaaataaagtttgccgcgaatacacccttaaatgcgttggaaccatcacttcttctaaagacagacacatctacattcgtaaatagacagttatattccatattgcctaagtgactaaccgatagcaaattatatcctagagactctactaaaaacacattagagatagaatgctcattagaaattgcaattttacctaacccttataacttgccttgattccatcaccgaatataattgaatcttgg

SEQ ID NO: 12965 - DNA, 442 bp, Zea mays
  unsure (1)..(442): unsure at all n locations
agcttatcaagttagcttntccaatgcaaccatgtcccacgttatttttaagattcctaaaagaagttattgccaaaatactgaaggctgcgcagaagtcaaacaaccacacgaaaatcagctctgcagatcttccgaagaggctccttcacattagctcgtgaaaatacttttattttgtgtttatacctcgctaaggctggttgttactagtataaataccccctatgtctatgatgtaaggcagctcatgataatctaaaacagaaccccttttgttcagttgtgtgctaacaaatattgagagtgatctctacccctttgctcttgtgaattccttcgcgggattgcagaagcggcggcttcatccgctcccaattggtgctcctactcccttcgaggtctcctcgattgattgtangttgtgttggctggatctttg

SEQ ID NO: 12966 - DNA, 383 bp, Zea mays
actaagcttcgttcatgacgtaggaaggcagcatacggagaatgtgttgttcaagctgctaagtgcaaatgacaatattatccttgggttaattgtaaatgttgtgtgtaatctatgagggcatgaatgtaacatcgtatgaagctgcacgatcgtctataaatagaagaacagtacctccgtactgttcacgctgaaatggaattgcatgcatgcctttaccttcgagcaagacgaaggtatcaatgtagtgtgcattgtgtatcattttgtaatatatggaatgtatcttaatattctttgtacattcgatctaaaatgaataaatgacataatgttacatttggtactatgtttatatatttctgaatgttgacgatctt

SEQ ID NO: 12967 - DNA, 444 bp, Zea mays
  unsure (1)..(444): unsure at all n locations
agctntgaagtanttgaaagggcaagccattctgaaccgttgtcatgccaaatgggttgagtntatcgaaacatttccatacattgtgaaatataagaaaggtaaggacaatgtggtcgctgatgccttgtctcgaaggaatgtgttgttgaaccaactataggtaaaagttttgggtctcgaaaatttgaaagaaatgtataatgatgatcctgaattttcagaaccatacaatcattgtaaagatggaaaaggttgggaaaatatcatatacatgatggatttttgtttaaagctaacaaattttgtgtaccaaattcttcggttagattgcttttattgcaggagtcacatggaggcggtgtaacaggtcatcttggacaaaagaagacttatgaaatactcagtgatcatttctattggcccaagatgaggagagacgtc

SEQ ID NO: 12968 - DNA, 307 bp, Zea mays
tcacccagaagctcttctagtgatcgccacactcccgatgaccacctactcgtgtatgtgatgccgatcacaaagagcaagaagcattaactctcacttgacctaaccaagtctaatgaagatggtggatgcacacaccctactattaattcactaataagtgaaagtcgcctagaggggggtgaatagggcgaatctggaatttacaagcttaagcacaaactacaagccgggttagcgttagaaatatagacgagtccgagagagagagcataacaaatcgtgagcgaataaagagtatgacaca

SEQ ID NO: 12969 - DNA, 467 bp, Zea mays
caagcttggctctatgcagcgcaatcctcagctctggtctggcacactcatactagtgtccggtgcgccagtgctggtcacacgtgataaaggcctgctctcgggaactcgacaacgtgagtaatggctatatattcaactcggactggtccggtgaagtcatctagcggcagaacctcgtctgcttctcgtggaaatagcaacagggggctgaactttgcgctatatattcaaccggaactggtccggtgaagccaaacggtcgcccagcgccaacgtgtcggccacgcaatcttcgcgcgacacgtggactgctccaacggtcggctggtgcaccggactgtccggtgtgcaccggactgtccagtgcgccaaccagcctagaggagcaacggtcggatatgcctaatttggaaggagatcacgcaccggaccgtctacaggacctgtccggtgggcaccggact

SEQ ID NO: 12970 - DNA, 433 bp, Zea mays
  unsure (1)..(433): unsure at all n locations
cctgatcaaatgtatatgctatcccctttatgtccttaaaagtaaatgcatcgaaatcaattctttcaattacctgatgcatatctttagggggagtccattcttatattcgattatgttgagactattgctttatcttagtaatttcatatagtctcttgcttgagaataatgtttctcatatagtatgctacttcacatcaatcaaacttgttaaagtaatatcgcttttatcaaggattgttactttcatttctaacagtagcatgcttattggattctcctatatttaagcttgattganagtttaatgtccttgttgctctcttgatcgcatattggttgatcattaaacaacttcgagtatcacttatgtttcttagagcctcatgtaattttngatctcaattggtaattataatcgacatctatc

SEQ ID NO: 12971 - DNA, 358 bp, Zea mays
agcttatggtaaaactaacacataccagctttttaataaagatactaatcagacactggaagcacaaatctaacatcctaaccataccactctctcagtctcactattaacaattcaaacatagccacgggtgtacagaaactcattcctattgattttggagaggctaaacattcccgctagtaattagaaaagcacaaaaggaaattgtaccacatgtaatagttcatgataagcacatgtttattcaattgttgtggtcaaagtctcaacaacatctggaggtcgcctatatgtgaaaacaaggtggaagcggaatgcacaaagagatggatctttttttttggggggggggggg

SEQ ID NO: 12972 - DNA, 425 bp, Zea mays
  unsure (1)..(425): unsure at all n locations
tgccacaacgtgatagtccctggcttatgagattattttcatgtttgggctacattccgaactgccatgatgaaggacttcgccatgactgcagtattgcccccatacgaagatatagttgcttcgtagctcatcaaaaactgctttggatctgagtgcccatcatgcatggggagctgaggtggcttgtatgatgggggccatggggtancctgcagttatgctgcctagggataatcatcatcagaagtgaaagcatcatgattaanatcatcataccatccatcctcgttgaacaagccttcttgacgaagctccctgtgttggggccttcaatcttgttcatcttnaacaagatgacgcacttgttcagtggcttcatcgatcttctttgaaaacagtcaggtctgccttttttccttttt

SEQ ID NO: 12973 - DNA, 369 bp, Zea mays
tcttggaacagactatggctcacctacgttgaacattgtctgatacataagggagccagtatgctgcacaccagagggatttcagagagcagtccgaagctcgtacagtcaatagcactgtgccagagtcgaagcacatcattgacaaatatcctaccttaatagcaatcttattgattcagatgtatattctgtaatagaggacattgattacgcttcatgtgagaagtttcggtgattcctacaaggaaaatatattttctttacaggcttatattgataacaaagaggaccttcgaactatcggatattcttcgaagcaacatacagtcggtctaatgaacgcagagtaagattgccgaagtcaca

SEQ ID NO: 12974 - DNA, 422 bp, Zea mays
  unsure (1)..(422): unsure at all n locations
agctntagccttatgtacagactaaagtggtatcccgctctttgcagaaactgtcgttccactactttggcacttatctcatcctggctcgagtgggtagtgtggcttacaaactggaactccatctacccaagtgactactgatctgcccgaccccaatgatcatttgtaggttcccattgagattctacagaagcgtgtgatcctgcgcggcgtggagctgtttcccaaggcttgatcaagtggtcatcgctgccatcatctcttgctacctaggaagatctggaacctctccatcagcgctttccttcagcaccagcctagggacatgctggtgctaaagaggggggcgatgtcagcactccagctcaatagatgaagcaaaccaacattggagccatggaggagaatgaatctggaca

SEQ ID NO: 12975 - DNA, 272 bp, Zea mays
tgagggctatatgagggcgtgaacgttacatcctatggggctgcacacacgtctatacatctaacaacaatgccgtccgaccgatcactctgagttggaattgatgcatgcattacattgaatcacacaaatgtggtaatgacacgagcatggtatgatttgctggatatggagtgatctaagatctatgtacatcgatctaaatgatatactactaatgtacacagtaacttgttatatatttgtgatgtgacatcttaacgttgaaattg

SEQ ID NO: 12976 - DNA, 454 bp, Zea mays
ttaagtcacctgcggcatgcaagcttccttgatctcgtagggtccaatatatcgaggagctaacttgcccttgatcccgaatctctgaacacccttggtgggtgataccttaagatagacatgatctcccacctcaaactgtagaggcttccgcctcttatcatgatagctcttttgcctggcctgagcagcttccaagttcttggtaataactctgacttttgcctctgcctcgagtaccaagtctggcccaaaaatttccctttctcctgcttgagaccaatttagtggggtcctacaccttctcccatataatgcctcaaaaggtgccatcttcagactggattgataactgttattgtaagaaaactccgccaaagacagacacttgtcccaatcttttccgtagtgtaatgcacatgctcgcaacatgtcttccaaaatttgattcacc

SEQ ID NO: 12977 - DNA, 338 bp, Zea mays
cgacgtttgctgtgttcataattattgcatagcatattggcactatggatttggtgcatgaactttggctttcaaagtatttccaactattaacgaatgggctatgttgaatcttaaatgagagaatatagagggggaacttgtccggttaccctatcattataaattcaagaaatactttaacgcccgtgccagaatggctcaaacaatctaaatatgagcgcaaaattttggaattctctaacaagagaccaattgatacacaccttcggacccgtccaacgaagctaaacgagtcttgatgctattgctctgaattctaatttgtcaatggccga

SEQ ID NO: 12978 - DNA, 329 bp, Zea mays
ttaaagccctttttactattgtcttgctaaacacataaaaaagttactttccttttaacttcttacatactccacatttaaaatataacgacatattttgttggaaaatgttttgccgatgcttttagtagtgaatatatctctactatacttaaagcaccagtttcaaccgtcatcatctttttacaaaagagtccctacatttatctcaaatcaactcagcgtaaaatgttaaaaagcaatgaaggaggtgggtgttgaacccacaccctaatggaagaagggtgtgatacactgggcgaaactgtcttaccagtagaacatcatgc

SEQ ID NO: 12979 - DNA, 324 bp, Zea mays
cactttaatactcagcttgccaagcgtgaaccgaggatacgcgccaccgatatatcgaaatcgtgctcgctgtagttcaaaaccccgccggcgcacgtggaccgggtaaatcactgcaccatttttcgattcaatgcagagatagtcttcgatcaccccatgaagctcaccgtgccattggattgaactaagtcgccgtgggttgggcggcacacccgccattcacgagaacactctcctgcgcacgtatacccgacaatttcgggcacccccgtcgtggagccgtacaccgttgtgaccggcagagacttcccgagccaaacc

SEQ ID NO: 12980 - DNA, 404 bp, Zea mays
  unsure (1)..(404): unsure at all n locations
agcttacatgtctcgtatgattcataatcttacgaagttaatagcccatcagaatgaagcttcttcatgcgattctcacttatatgacccaaacgacagtgccacatgtaggtaggacttaaatcattaggccgaggccttttagcactaatattacagataggtgcatcatccagatttaaaatgaataacccattcataatggatgcaaaagccacaaacatgccattcttagagatcacacaaccattgttttcactcgcaaatgaataaccatccttcatcaaacatgaaggagacataatgtttcgactcatactangaactagataacaattatntaactccaaaataaatcctgatgggaggtggagttgcatcgtcccgacggtcaacgcaacaac

SEQ ID NO: 12981 - DNA, 432 bp, Zea mays
  unsure (1)..(432): unsure at all n locations
agctntatcaaatggacatgattagtgcatttctcaatggacctatcaagaaagaggtctatgttgagcaacctcctggatttgaagacagtgagtaccctaaccatgtgtataaactctcaaaggcgctttatgggctcaagcaagccccaagagcatggtatgaatgcctacnaaatttcttgatcactaatggcttcaaagtcagaaaggtcgatcctactctcttcactaaaactgttgcaaaagacttgtttatatgccaaatttatgttaatgatattatatttgggtctactaacaagtcaacttgtgaagagtttagtaggatcataatacagaaattcgagatgtctatgatgggggagttgaagtattttcttggatttcaaatcaagcaactccaaaagggcacattcatcagccaaacta

SEQ ID NO: 12982 - DNA, 388 bp, Zea mays
atgcagaagagttgtgctattccgatctgttgcgggaccccagttgccaaagacaactgcagtattttacagtgctttgtaggttcttttccactaattatctgggactgcctatctccaataaaaagcacaggaagagtgatctcttgttgtgggtagaaaagatagccaaccggcttcctagttagaaggcacctcttctcaaccttgctggtaggacggctctggtccggtttgtcctatcagctatcccggtgtaccttcttattgccatgaatgtgcctaagtgggtgatcaaatctatcgacaagctgcggcggggggttctttggaaaggaaggaaagaagatgaatggggcagattgttaatgtcatgggacaaagtact

SEQ ID NO: 12983 - DNA, 402 bp, Zea mays
agcttagtagaaagactcagtagtacttatatgaacatttgctctaagatatcatacctagtgtagccacttgattattaggacatgttggaagtaacaaacaagattgctatgaagtctaacaactaaggatcgtcctaaacctagtcaacctcaaacttgtccctctcactaaattatggctagggtggtgtatctattatctgctcccccattggtaagggcatgaaggtcattttataagtataatttaatattaaaaaaggaaaacatggtcaaccaggtaaggtgctataatctgaaaagaattgcaccagtgagtggtatttcagatgccttctagtgagaaacatttctggatggtcaagttaggagtgttattaacaaaagttcccctataca

SEQ ID NO: 12984 - DNA, 395 bp, Zea mays
tacctttagtcttatgtgactaagtgttttatgacttttataaagggagaaataattaacaaaaaggggaagggaaaaatatttaacaaaaaggggaagtcattataaaaacattagatgaagaaagtcataagtgcattccatgtcatgagcatcacgtttattttatgacacactgcaccctatgaatagtatgatataagttgtctatactttaacctaaatatgtgcttttggcatttgagtacaaaagtgttatattttgaaatgcacatatttatggggaggaaactatatcatacgaattaaaatcttatttatcaaatcttatgtaagctttaaatgtgttgtcatcaatcaccacaaagggggagaatgaaaggcattcatccctt

SEQ ID NO: 12985 - DNA, 284 bp, Zea mays
ccactctaaatcctcgcgtgttcctgagttcatcgttcatattccaacaggcaaaacgcttaagcccctttctcatcttaggatttagggcggtgcactccgccacccggccggagaattccctctccgacaggtgcgttctgacttcctgctctgacttctgaccacatactgttcacttttgcagtcgaccgttgcgagcaggtgaccgttgctccgttggctcaccagacactgtccggtgcacaccggacagtccggtgaattatagcggagcgactcca

SEQ ID NO: 12986 - DNA, 424 bp, Zea mays
  unsure (1)..(424): unsure at all n locations
agctngnnggcgccctcggcgtcttgtcgttatcgaagtttcatgtctcccacttggaagcctcgagcccgaacccttcgggcgtggtagcgtcgcaaggactgctgataccgcgccgagtgtagtaaggccacgtcccgagcctcttccagctggtccaacgagtcttctcagttggtctggttgctttggtcgtcgtaagcctttgtcctcggggaaccgtattctaagtccgtgggtaggatggcctcggccccatagactagaaagaacggtgagaaactcgtggctcggctcgacgtcgtcctcagactccaaaccaccgagggtagttcttttatccaccgcttgccaaactttgtgagggtcgtgtagatcctcgactttagtccctgcaaaatcataccgttggcgcgctccacct

SEQ ID NO: 12987 - DNA, 432 bp, Zea mays
  unsure (1)..(432): unsure at all n locations
cttatcccctaccccagcaaactgacggcgcccaacggcggtgaacagattcttcgtggtggcgcccatggccggcgatgagccatctggctgacacccagtctatatttcgatccagtagagctatacgaagctagggctgcggcaagttaatggaattattcttaccgtgaatcgcgccgtcgtcgcttctgtacacggtccgcaggggttccatggcggcacttgagcgtcggcgagcaattaccctcccaccgagcctccactttcccctgcagggccacgaccctaacccgcgagcatgccccatcttcccaacccggttactgcgcccacattggaggtcagacgggaatcacccacggcggaacgcccgcgctggtgcccggtcaaaaacagggggttgcgaccctactntatacatgagaagag

SEQ ID NO: 12988 - DNA, 397 bp, Zea mays
  unsure (1)..(397): unsure at all n locations
agtctgccaatacctgtcaaagcaacagcatatgctagctctttttttacagaccataccagtaacttggcctttcgcatgctggggattggatatgatnggacctatcacgaaagctcaaggaggatacacccatgtattggagtgcaatgacaaaatcacttaaatgatagagttccaccccattgcctctttaacctctgctaaagccgtggaatttatacaaagcataatattcagattcgggataccaaacagttatattactgacttgggatccaacttcaccagttcagaattctttgacttctgcgaagcaaagaacatttagattaagaacccattttgtagcccatccgagagccaacgggcatgttgagcgagccaacggaatgat

SEQ ID NO: 12989 - DNA, 394 bp, Zea mays
acatgtgctaagcggcgatgtcacagccagcccatgctagtcttagctattaagcatgcatctagaccggtctcttcttttgcaaaatcaactaaataaagtttgccgtctaatacaccctgaaagctagtgaaccatcacttcttctaaagacagacacatctacatttgtaaatagacagttatatcccatattgcataattgactaaccgatagcaaattatatccaagagactctactaaaaacacattagagatagagtgctcattagaaattgcaattttacctaacccttttaccttgccttgattcccatcaccgaatatgattgaatcttgggaatccttattcttgacgtaggaggtgaacatcttcttctcccccgtcatatg

SEQ ID NO: 12990 - DNA, 445 bp, Zea mays
acctgaggcatgaagcttcacgtgttaacgcgagctggcattttgggctctctatagcacgcccgtgcgcgaacccccgcgcatccgcggccgcccgtgaccacgcccgcgccacagctataaagcccgccccagtgcttggctgccttccccgttacctcctccgtacctcgccggactcgcccgagccagccattaactccggcgaccttcccgcgacccgccagtgccgtccgagagcaaccaccgtggccagcccctcttccgtcctcctccgttcgatccaagccctcagagagcttactggtgaagccgtgagtcttgctcaagcttgacccaaggacccgcgtcaccggaatagcccagtcgtgctcaccggagttcaagaacccgccggcgcacgtggaccgggtaagcccctgcaccgttttcaattccttgcgcg

SEQ ID NO: 12991 - DNA, 58 bp, Zea mays
actactccggctcggcgactaccaacgcggccgtctggtatgtggatggccggccacg

SEQ ID NO: 12992 - DNA, 420 bp, Zea mays
  unsure (1)..(420): unsure at all n locations
agcttctaaagggagaacacatnntgggactataccaatgttcattttgagaaagacagggtctgtagcgcatgtcaagcaggaaagcaagttggaacccaccatccacacaaaaacatcatgacaacggactagccactggagttactccacatggatttattcggcccgatagcttacataagcatcggcgggagtaagtactgtcttgtaattatggatgattattctcgcttcacttgggtattctttttacaggaaaaatctcagacccaagagaccttaaagggattcttgagacgagctcaaaatgagtctgatgaggatcaaaagataaaaacaacaatgggacggagttcaagaactctcttgaagaggagggcatcaagcatgagttctcttcttctacacacctcaaca

SEQ ID NO: 12993 - DNA, 368 bp, Zea mays
gcttctcctgtccggaataatctacggtattccggacagtctatttagtatagttgtatatgaacctttgacacctgtagaacatataatctagagcaaactagttagtccaattatttgtgttgggcaattcaaccaccaaaactattacgaagtaggtgtaagcctaattcccttacaccaccggacactgtccggtgcgccaaccacgtcatcatgctgatgggttccgaccgttggagctctgacgtgtgggcccgcctggctgtccggtggtgcaccggacatgtcatgtagactatctggtgtgccacccacgcgtgctctgctactctacatgcgctggcgcgcatttaatgcgttgcagt

SEQ ID NO: 12994 - DNA, 346 bp, Zea mays
acgctttgttgcagcgcttggtttttctttttgatttcggagcatagagtatcctggcctccaactatggatgaatagagggtcaaacaaacctgtgcaccatatacctgcaggtccctatttgtatgtatagcaagtccgtgacggcaagaagctgtgcaacgactagagtataaccgtttgttacaaatctaaaggcatttaaatttagaccggtaatacagtatagtatgtccgtatgttggctgacttttggatttatttgatccagacccatatatattgcgacccaatctaacgattgacccgaccggtaaacagcagactcggaatctgcctatgatgt

SEQ ID NO: 12995 - DNA, 433 bp, Zea mays
  unsure (1)..(433): unsure at all n locations
gttccttgttggaccattcccaggtttatcttctccatcgcttaacataaagtgttgtcagaggtctttaccgtaagacagtgacaggaaaccttacggcttagtgcatctgccaccacattgctttgcctgngtgataatgaatttccagttcatagtccttaataagctcaagccatcgcctctgcctcatattcaattctgactgggtgaagatgtatttcaagcttttatggtctgtgtaaatatgacagacatttcccagcagatagtgacgccaaatttttatggcatgaaccacagcagctagctccagatcatgagttgggtaatgctcctcatgtcggcgcaactgccttgaagcatatgcaattactcggccttctgcattatcacacaaccgagttcactgcctgatgcatcacaatataca

SEQ ID NO: 12996 - DNA, 379 bp, Zea mays
ctattggataaagcttctttacaggtctgttctgagcccatcttttaagaattatgccaaaaagcctcgaggccagctcaaaaattatttccccatgccaccacctatcagtccaaaacaaggtgttttcatcgtcccccacttcggggatcaaggccctggcaaagaaaacacgtgctttggtcgggatttggatagaaaggccagaccaagggcgcccaggctcaattttttgcaaccacagccatatcatacggagagcccagcagagctcctaaagactagaaatactcaggccttccagattaaggggtctacaaacctttacccatgctaccaaacagtgttccctgacgatcctcattggcatcctgctatg

SEQ ID NO: 12997 - DNA, 383 bp, Zea mays
ctaagcttaacacgtgcgagatctggatcaatgaagtcctgttctttgtgtatattacaaaccgagagggattggctgtacattccaagaaggtaacaactatcttggactggaaagcaccaaaagatgtctgaggaatcaagacttcatcggaatggctggttattatcggcgtttcattgaaggtttctccaagattgccaggacaatgactgctttgttggcaaagaaggttgagttcaagtggaccccagcatgccagaagttctttgagacattgaaggagaagatgaccacggcaccagtactgattttgccacatgttcacaagtcattcttagtgtattgcgatgcttcgtataacaaaataagatgtgtgttga

SEQ ID NO: 12998 - DNA, 368 bp, Zea mays
agactactacatgaaatagacttgaaaagaggtattagtctcaaagtcttagattatagagtaatctccccctgaaagtgtgcatacaaagtttgaatacttgtaagagacatgcactttgatttgatatcaagaggggcagattatccataattccgagccttggcacatataagttaaatgataccaattgaggatattagcttttgaagcattagtgtatttacttagagatgtaaataagctatgtgtcatgcttaattaaacattttaaaccatgtacgtttgctcaagaatattgttgggggcctttcggcttccgaagggtcctcaaaacatgatttggacatgtttttccagtttgtgag

SEQ ID NO: 12999 - DNA, 459 bp, Zea mays
  unsure (1)..(459): unsure at all n locations
tcngcatgatgatagaaaagaggaaaccgacttaaagaggaaaagactatttaaaccccgatagattactatagagttattatcaaaagcaaagggcctggatgtaattatacatgggctgtgacccgtgcctactaaaggtgaacagtactcccgtactgttcacgctgacttggaatttgtttttgcatcactcttgtacttttaccttctttcaagtcaaaggtatatttgtaacccagcgtcattcctattcttctatgtcaatgaaataaaaatgagttgataataatacataattattcatgttatcttttatattccatgtaattccctttttattatgatatgtaatgtntatgaaggtatgtccttcataaccttcgtccaaaatcattatatctcaagggaaataatgctttgaaggacgaanggccttaacgtttaacgttttctatg

SEQ ID NO: 13000 - DNA, 412 bp, Zea mays
  unsure (1)..(412): unsure at all n locations
ggaccttaagtcactgngctgcagctcttaagggagaacacgtgataggtttttcttacgtgcatttcgaaaaagatagcccttgtgcagcttgtcaagcaggtaaacaagtgggaggagcgcatcacagcaagaatgtgatgaccacttcaagacccctggagctgctgcatatggacctcttcggacctgtcgcctatctgagcatatgagggagtaagtatgggttagttattgttgatgacttttcccgcttcacttgggtgttctttttgcaggataagtctgaaacccaagggaccctcaagcgcttcctcaggagagctcaaaattgagttgagctcaaggtgaagaagataatgagcgacaacgggtccgaattcaagaaccttcaagtggaggaatttcttga

SEQ ID NO: 13001 - DNA, 473 bp, Zea mays
  unsure (1)..(473): unsure at all n locations
gtgtctaacggtacagtatagacacactacttctttactactgaactgaaggtagcaaaagtttaccatggcttttctttgcttagtgtgtttgattagtagactatttgtggagcatccatgcatcactatattacctagttcagggaacattcaaaccgaacgcagcgttaatattntcccttggcccagggcccaggcaacctcaccactcgggaagtcatccaccaggaacaaagaacacggaatcggaggactggccgcgacgcatcatcaggctgctggcagctcatgcctcatggtgcgccctcctgtgcccacataccaatcgcatcccttattgatngctgtgctgctcatagatggagcgcactgcgcacctgccattctgccggtccttggtcacgacgctcacactggaaaaaacaacaattttaaatcgcgaaaccaatgaagcgtgcacatattttgca

SEQ ID NO: 13002 - DNA, 452 bp, Zea mays
  unsure (1)..(452): unsure at all n locations
atcctctgagtcacctgcggcatcaagctgtcgacgtagagtctcggctctacttatttttgctcaacatggatggaggtttacaaatcgaattgcttcgtagttttgtctatggattgtgtgtctttttctggttatcaaaccgtggtcttctatggtgtgtttcgggaggtctgtccctccatatgtggctagtcgtgtgactacttcatgtaaaaacttttggtgtattggctaatcctccaaacgaggagaagctggactagtatccattatctaaaaaaaaggtagcatatttctagccgtggaaaatatgagtgtagatagaatctgatataattcttgngtgttttctagtgccttgaagagtgcagntgctagagcctcagaagatttcatgcctcgggaaccaacactgcaaactctgcacattgcgtctgtggcattcaata

SEQ ID NO: 13003 - DNA, 492 bp, Zea mays
  unsure (1)..(492): unsure at all n locations
tcggcgtaacagcaaagagtggaaccgacttatagatgaaaaggctattcagacctcgatagtctactatagagttattatcaaatgtaaagggcatgaatgtaattttgtaagggctgtgtcccatgtctataacaggtgaacagtacccccgtactgttcacgctgacttggcattcgctttgtgcgtcacgcttgtactatcatttccttccgattgaaggtacacttatagttcaataatatttttgtttacgttcaataacaataaataattgttcatgtgttcttttacattctttatattttatccttcgtcattgtttaatgaatttatgaaggtatgtccttcataaccttcgtccgcaagtcattatatcctaagggaaataatgcttcggaggacgaanggcgttaacgaaataacatttctatgttgccttgttcttaactcttagcacttgagaacaagtccccaacatggacatcatt

SEQ ID NO: 13004 - DNA, 427 bp, Zea mays
agcttatgaataaatatgagctcttgtgttctctaagaacattaaggatactttaagatgtaaattgcaatttgggatatgtaaaatcgtacgaccaacattactcattgtcgtatcttatccaccagtattgtggacttgatcgtgttcctttacttatcacagaccatcatattctctacctctaggggcaaagctaggtactaagttgtgggtgcacattcacccacaaaaatttgcaaaactagtgaaatcgactagattttcactatatatgcactagctagaagatattattatgcaccctcaaatcatatgcaccctactctgatttactctagcttcgccactgtccacctcggtagtgatgtgatcgatggattcgctataaggtacacatttgatgtaatgttataggtcgctaaat

SEQ ID NO: 13005 - DNA, 482 bp, Zea mays
  unsure (1)..(482): unsure at all n locations
ntatcaaatggacgtgaagagcgccttcctcaatgtgcctttcaaggaagaggtctatgttgagcaacctcccggctttgaagatactgagtaccctaaccatgtctataaactctctaaggcgctttatgcgtcaagcaagccccaagagcatggtatgaatgccttagagagttccttatcactaatggattcaaagtcggaaaggccgatcctactttattcactaaaactcttgaaaatgacttgtttgtatgccaaatttatgtttataatattatatttgggtctactaacgagtctacatgtgaagaatttagtatgattatgacacagaaattcgagatgtctattgatggngagttgaagtatttcttaaggattcaagtagagcaactccaagagggcaccttcctagccaacgaatatactcagatatctagcaagttgggatgaggatgccagccatcaaacaccatggg

SEQ ID NO: 13006 - DNA, 234 bp, Zea mays
  unsure (1)..(234): unsure at all n locations
acccggatccttanagcacctgcggcatgcaagcttctccttgtccttatcaaccttgacatataaccattctgatttccagcctgccggccatttgcttcggtagctgattacaggaaactttgcggttttccggtaggcaaaattgtagcaaccgaagttttcatgaagcccatcttttctggcctttgtntgataatgcaattcatgaactcgacagaaactgtcaacaaa

SEQ ID NO: 13007 - DNA, 434 bp, Zea mays
  unsure (1)..(434): unsure at all n locations
acatttgatttattggaactcatacatactgatgtgtgcggaccaatgagtacgacagcttggggaggattccaatacgcataaccttcactgatgattttagtagatatgggtatgtctacttaatgaaacacaagtctgaatccttataaaagttcaaagagtttcagaatgaagtagaaaatcagcgtggcaagaaaattaaagcactgcgatcagatcgtggtggtgaatatttgagtcatgagtttagcaatcatctaaagagttgtggaattgttccacagcttacgccgcctggaacgccttataggaatggcgtgtctgagcgacgtaatcggactttattggatatggttcgatcaatgatgagccagtcggacctacctttgtcgtttnggggatacgctctagaaacagcagctttcacacta

SEQ ID NO: 13008 - DNA, 440 bp, Zea mays
  unsure (1)..(440): unsure at all n locations
agcttttagaaagtcctagattactatttttggatgncctatttgtgagttatgagctaaacaaatggttgctgttctgctgtccaaattcagctagtattaaaatgaccatatgaagtttcttttgtgtgaatacctagatttggttagctcttgtcttaattaatgaagtcttataactgcatatggatgtttcttaatgttcggattacgttcgagtaagttggagaacatgatcgttgtgttggggtatttgatttgattcctatttggctaagtaggagtaatcagtttttgattcttgagtgatgaagacttatgacatgtgaaatgtttatccaaatgtcttgttgcacatggttgagtctttctttcttaatgtgtgctctaaacctattagttggagaattaatactttgatgaatgtattggaactagta

SEQ ID NO: 13009 - DNA, 393 bp, Zea mays
tggattgatcctgagctccagtgctcccatacctagtacatatgagtatatattatctgtggtaaactattgcacatcgctcttatactgcatattaatagaataagtactcactatgcttaagaggtcaactgattggtccgagggactgtatttcctacctgtgaccatctccaggatcaaaacaccaaaactgatgacatccgacttgaccgagtattgtccgtgcatggcgtattctggtgccatgtatacactgagatgatacaaaccaaacgcagcttttatgagaatatcgatatattgtagtaggctgtatataacaaattactgatatatgatatcttgatgctttgtttgtggatgatatgaaaaacatataataagacttac

SEQ ID NO: 13010 - DNA, 444 bp, Zea mays
  unsure (1)..(444): unsure at all n locations
ctaagccacctgaggcatgcaagctnggaagattcgcgatgataaggggcgatgagccaacctttcatacaaccggctcaagaccctcatcaacaaaatacggagctacggaagcacgcgatggacggaccacgacgtcgtccgcctaatgctaaggtcctttactgtacttgatccacacttggtaaacaatattcgtgaaaatcctaggtacaccaagatgtcgcccgaagaagtccttggaaagttcgtaagtgggcgaatgatgatcaaggaggcaaggtacgtggacgacgcgttgaacggtccaatccatgagcttcaacccattgctctcaaggcaacgaggagcaaggaggcgctacctagcaaggtggcgcaagttgaggcggccgggctcaatgatgaagagatggccctcattatcaagcgcttcaagacgtc

SEQ ID NO: 13011 - DNA, 480 bp, Zea mays
  unsure (1)..(480): unsure at all n locations
caccaatctggactgaagtgggccttagagttctcttttgttatttctnggaagtcgaagaaacagaaacatcagaacaaattttggctgaagaaactggcactgccgcccccgaagcattgtccgaagttctcgattatattttacgacatgcttcggggaaaaagttgactgaaaaagaaaagcaagaggcccagttttacgcccaaaaactgaaatatccaaagggggtgttgatattcaacggcagcggagaagaagacttcttgtattgtctccctgacagcaaggagatttctgtctgtcgggagatgagcaagagcttcggattcccacattagaagaccggctatcggtattgtctaaaaacgagctggccgacagctcggcgtacaatatcttaaaggttgcaaaatgagatctttgattatttcatgaaaccaatatctttcgtttgcttgacttatngactcacacaca

SEQ ID NO: 13012 - DNA, 366 bp, Zea mays
  unsure (1)..(366): unsure at all n locations
ctggaaancaagcaccgagcagcacgtgagcccctctcaagcgcctcttatttttttacacccacggcattagcaccatgaggaagcctctctctgtggatgctgccactggaccagcaacaacaaaacaaccttcagatcgggtcgtcacacaaaacaccatacggattctaaatcagctcaacatatcaccacaaagcctacgatgaaaaaaacgctacgacctgttgtaacaaacaacggcaaacaaaaagaaaaaaaagaaacacctacaaagggactgacaccaactaggaaacacggaattaaacatggaatccatggcatgcccgaccataaaatttcagcccgacacgacaagaagcc

SEQ ID NO: 13013 - DNA, 406 bp, Zea mays
  unsure (1)..(406): unsure at all n locations
tgtctaccgcttcactagtagtatgagtagattcggccgtatcttnttcattaatagggttcgactctttcaactctttttccgctttttcatgccccaaagacccgccgccttcgacggtcttcttctcgtcttcttcgccgatgttgaaccttcaaaggcagcacctccaagacccaaaataggtgggctctctacttcttcctcagatgaaatttctttgacctctgagagttagtcgcctttgttagttcccttcatagttggcataaattgagtcactgtatgtcctaagggacctaaaggggaaatggtaatggttgtgtcattacctcgagtatccatgtacaacccatagaagaggtgattgtagcactccccttcccttgatcttgcccagcagcag

SEQ ID NO: 13014 - DNA, 396 bp, Zea mays
agtcacctgcggcatgcaagcttctaaagggagaacatattttgggacttacaaatgtttattttgagaaagacagagtttgtagcgcatgtcaggcagggaagcaagttggtgttcatcatccacacaagaacatcatgacgactgacaggccactcgagctcctacacatggacctattcggtccgatagcttacataagcatcggcgggagtaagtactgtctagttattgtggatgattattctcgcttcacttgggtattctttttgcagaaaaaatctcacacccaagaaactttgaaaggattcttgagacgggctcaaaatgagttcggcttgaggatcaagaagataagaagcgacaacgggacggagttcaagaactcacaaatcg

SEQ ID NO: 13015 - DNA, 443 bp, Zea mays
  unsure (1)..(443): unsure at all n locations
ttatcanatggacgtgaaaagtgccttcctcaatggaccatttaatgatgaggtctatgttgagcaacctcccggctttaaagatagtgagtaccctaatcatgtgtataaactctctaaggcgctttatgggctcaagcacgccccaagagcatggtatgaatgcataagagattttcttatcactaatggcttcaaaagtcgaaaggccgatcctactctattcactaaaactcttgacaatgatttgattgtatgccaaacttatgttggtgatattatatttgggtctactaacgaatctacatgtgaggaatatagtatgatcatgacacataaattctagatgtaatgatgggggagttgaagtacttcttatgatttcaagtgaagcaacttcaagagggcaccttcattagccatacgaagtatattcaaaacat

SEQ ID NO: 13016 - DNA, 423 bp, Zea mays
  unsure (1)..(423): unsure at all n locations
cacctgcggcatgcaagcttggcgacgctagatctttctgagcgcgtatctcccttggtcgncgngcaggctcctgacatccaatcctcctatttcgtctaatcagagattagatgtagcccttgttgtaggttacggcatagcctgatatgttgtcgtgcgtagttgtgggtggtgtcgttgtgtctcctccgcccgtctcttcatacctcggtgaaaggatcatgatgcccaaaaggggggtgattgggcttttctaaaaatcaacattaattaaaacctaagcaagagtccaacttcaccccaacaactagcactaagagaataatactagaaatacaacaatgctaatacaatacttcaaatacttgctaaacaaatacacaatgtaaaatgcttgaattaagtgcggaatgtaaagca

SEQ ID NO: 13017 - DNA, 392 bp, Zea mays
  unsure (1)..(392): unsure at all n locations
aaatcaccttattatcatgcagtatgtgtttatatatgagattacatcatgtctaanaagacaaataagattagtttctgtagtacatatatgaataaatagctacaaatgatatggccatggcgcacgttgggaataaattttgcaatactagcattcagctgtagattatggcgcaagggacatggttgcctttntaccttgcaacaatagcattgacagtgtcaggacctattaagtccgagggcaatctaaaagttatgtgaaattgagcaccatggcattgtctggtaatgattttgataaataatatatggctcttcttagaagcatagatagatngataatgtntttttggacaaatagtgtttnttgttttatgtagaagtgga

SEQ ID NO: 13018 - DNA, 419 bp, Zea mays
agcttggcagaaaaaagaaatattgaaaatatggatctatattaggctgaaactagtctgactcggcccaagtctaggcgaaatgtgcccgcgcacgcgcccgcgctggtgattttgcgcagaggtccctggctattcgaagaaacagtaaagaatccctacgcactattcacacgtctcactgacgatttcgcataccccctaggtttctatttcttctccaacttaggccctggcgatggcgcgttcgcccgccggccatctcttcaccggaatccatccaaaacaacgacaaccgccagaactaagcatcgaatcaccatcctcgagcccaggcgagtccagtccatgccctaattgaactaatccggccctggattctcctacccacgacgacgacgaacattgaggacaaaccg

SEQ ID NO: 13019 - DNA, 410 bp, Zea mays
  unsure (1)..(410): unsure at all n locations
ngtataggccttcttctttttctccatagctggaacctttctataacactaccccacttaanaagaatgagggtagaactcttgaatcttggggatttgaactccttgaagtacctcataacaagggtgttacgcggccttcttatgttgttgctgcaggctgcggagaaatgactgacacaaggttgattctgggacaaccttcttctcatcttctcttcgctatcttcttttcttttctcacttttcactgtctctatctttctctatgctcttcccactggaggattctatcaaagagtattaccatcatacagaggaggaaaccgaagatgttgaaccatgtacaacagtcttcaacccaagaatcaccaagcattgtgatcttatgggcgagggagtgggaaatg

SEQ ID NO: 13020 - DNA, 281 bp, Zea mays
gccatgtgacaactcccgcttgagatagagagaccctaaccatggctatgaactcttaaaggcgctttatgggctcaagcaagccccaagaacatgatatgaatgactgcgagaacttcctaacactaatggcttcaaagtcggaaaatccgatcctaccctctttaataaaactgttgcaaaagacttgtttgtatgccaaaattatggtgatgataatatatttgggtccactaacaagttcacttgtgaagagtttagtacgatcatgatacaaaaat

SEQ ID NO: 13021 - DNA, 488 bp, Zea mays
taatacttcggagacaaaatatactgggacttgctttttatttgtccttcaagcttctcctgtacaagcgccacacttactgcagagtgcgaagctggcacatacaatagcagaggtgagagcacctataggcgggtgaataggtgatcctgggaaacttaaaacttaagacacaaaacttggttaagtgttagcacaataatcaccaagtggctagagaggagtctcaacaaaacacaataaccacaaagatatcaatcacagagatggcacggtggttatcccgtggttcggccaagaccaacgcttgcctactccacgttgtggcgtcccaacggacgaggattgcaatcaatccctctcaagcggtccaaagacccacttgaataccacagtggtttgctttgctttcttaatcccgtatgcgaggaatctacacaacttggagcctctcgcccttacacttgtaagtcacaaagaagcacgga

SEQ ID NO: 13022 - DNA, 353 bp, Zea mays
gtcacctgcggcatgcaagcttctcctgtccgtaataatctatggtattctgtacagtcgatttagtatagtttgtagatgaaaccttggcacctgtagaacatataatctagagcaaactagttagtccaattatttgtgttgggcaattcaaccaccaaaatcaattaggaaaaggtgtaagcctatttccctttcacactgctaacccgtgtcggtccattggaggaggtgcagtgcgtccagctcttcatgagcggcctcctaccgccgctcagccacgcggtacacatccacaatccgcattcgcttcctgcggcaatgagtctggcgcgctaagtggagctgatgga

SEQ ID NO: 13023 - DNA, 459 bp, Zea mays
  unsure (1)..(459): unsure at all n locations
tattgaagagctcgacggagacacaaccaagctgtctgtgttactgttacctccaagagtaataaggcaatgatgcttgcttgatgatccacctagtgccttaagatcacacggataatgcaacacactatggacattcaatgactcactaaaatgtaatcccatgcaatggttgtgggtgagagtgtttggaaagctcaaatgtgctcaaagtgtgcatagaatggccaagagagttgtttgtcatgagcaccacttctatntataaccttccaaacaaaactagccattatgggaaaattgtctcctttctgcgcacttgcaaacagtccacgccctatatctagaatggatcaacattttggaagtcaccttatatgctacattgtacgtggacttgatgtatgtatagtacaacccatacgtgagtgatggaatttactccatatattgttgcat

SEQ ID NO: 13024 - DNA, 427 bp, Zea mays
  unsure (1)..(427): unsure at all n locations
catgcaagcttcttcttcattctgatgaataccaagttctttgatcacttcatcaaaacgaatgttccnactaaaaaatgcttgcttcaacccataaatggatttttgaagtttgcatatctttccagcattgatcggatcgacaaaaccctcgggctgtatcatatacacatcctcatctaggttttcattaaggaaagctgttttgacatccatctgccaaatctcataatcgaaatatgcggcaatagctagaatgatccgaatagatttaagcatcgctactggtgagaatgtctcgtcatantcaactccttgaacttgtcgaaaaccctttgcaacaagtcgagccttatagatgtgaacatttccatccatgtttttcttcttcttatagatccatttgcattctatgggtctaacacca

SEQ ID NO: 13025 - DNA, 357 bp, Zea mays
  unsure (1)..(357): unsure at all n locations
tcggctatggttaaaatatttggcagcaaaactgtgcttatcaatgaatgctgtggtaacttcacacctacccgtctgtttatatagtgctgcaggtaagaaggcgaatcgtcatgatttttacaccaggcaaacgctgcttacacccgctgcgcggtggaccacagaggccatacagtaactctgcagggtgggactgctacgcgttcggaaaatgaatcgtttctcgacaacgagctcacggaatgtgtttttcggaccttctgcttcccgaagcctaagagacttttttcacggatcaagctcgttacganaaacgatctatcaccgcgaaggggctactgttgggaccatgct

SEQ ID NO: 13026 - DNA, 331 bp, Zea mays
tcttagcaattaagcaagtgtcgagttcacgcttattaaaatcaactaagtatagctgaccctctaacactcccttaaatgctactaaatcatcacttcttctaaagacagtaacatctatatccgtaaaaagacaattgtagcccattttacataattgagaaactgatatcaagttatagtctaaagaatctacaagataaacattggaaatagaatggtcaggagatatagcaattttaccaagtcctttgaccaaaccttgattgcatcctcgaatgtgatagctctttggggatcatgggctttctcataggaagagaacatcttc

SEQ ID NO: 13027 - DNA, 475 bp, Zea mays
  unsure (1)..(475): unsure at all n locations
tgccatccaaaggttttccacagactatttgtgtgtcttagtatgtcataaatactttattgaaatatgatatcatgaccagtcagttatgtacagagtattgagtgaagttattatgacataaatggtcgcacaaatagcaaaagaagagttaaaccataaccaaactgaaataccaaaagagagaatgaaagcaatgaaaaatttatggtgatttcaagtagccccttctatgtagaaagcacgaagactaaacccttaataatactcttttgtgcaaagagcactaagatgctggctgcacaagacatagaaatttggcaaactaacttgaactgggacctgcagtcaagaattgtacagaaactggatggccacactaatattgtcattacagtttcatggcaccccaaggaanacatgatcgcattatgcgcttgacaacaataagtcaatgaaagtttgtgtgaaatgg

SEQ ID NO: 13028 - DNA, 355 bp, Zea mays
agcttcggcatgacagtagataaggtgaattttcttatagatgaaaagccaaattagaccctgaagaattactgtagagttattgataaatgtaaagggcactaatgtaattttacacgggttgcgtcccgtgcctataaatagatgaacagtactcccgtactgttcacgctgacttggcatttgcatcacgcttgtaccctcgctttccttcagaccgaaggtacatttgtaatttgtcatcgtttatacaagtaaaatgaaatagaaataaatcaataataatgtttaaaataattatgttattctctctatttcatgcataaatcttttcttgtctcttattatgaatatg

SEQ ID NO: 13029 - DNA, 362 bp, Zea mays
cttctgcacgagaccaataagattgtaaataaccaaagacgccatagaagggaccagactttatgccctacatcacattcattagtatcaagtcgaaatattcaaatggcgtgatcggaaggtaagactataaaacatctagccaggacacttggtacttcatagagtggccaaccctgatatagtgggaaaaacttagcttaaatgggaaggtccttttttaatggtatcttcgtcaagacctgtgtcatatatgttgaaatacatggacaatcatgacattcttaaatcttgaatgcaaatgagcttcaagatatattgttgaaatttgtaatttctacttttcctatggaccctcttct

SEQ ID NO: 13030 - DNA, 435 bp, Zea mays
agcttcaagctctactctagggaaaattgccttggcttcaaaagtgcaaatggaaatcgaaacaaaaatgaccgaagtcgaagctacaatgagccaggctagcgccgaagttgggccttcagagcccgtcaaggagaaaccctcggaaattggaaaaaaggcagcggaggaagaagctatagaacagattttgcctgaaaaagctgccgctcctactcccgaagcgccttccgaagtccttgattatattattcgacacgcttcgggaaaaagattatctgaagaagaaatttttgaagctaaacactatgcccgagaactgaagtacccgaaaggggccttagtgtttaatggcacagatgaagatgacttcttgtattgcctcccagacaacaaagaattatccgtctaccgggaaatggccagaagtatggg

SEQ ID NO: 13031 - DNA, 431 bp, Zea mays
  unsure (1)..(431): unsure at all n locations
agcttctaagtcgtccctgggggatgcatattctacttctagtcgtncctaaggggatgcagagctgaaatgccacctaagtaaaaggtgaagaagctntaaagtcatccctaaggggatgcagagcttagctccaaagtcgttcctaaggggatgcagagatgaaatgccaccgaagtaaaaggtgaagtgactccaaagtcgttcctaagggaatgcagagtattggtttttctttgatgatctatgcataaacatcatttgcatcataccataatatcatattgcatagaatcacatcatacatcattttgcatcgacaagagcagtggagtagaaggaaaattgctccttcaaatatacctgccaactcatgaaagatcgtgccaataacacaagatatgcctttagcagaccacattttttatata

SEQ ID NO: 13032 - DNA, 421 bp, Zea mays
agcttctcctcaattggcgccactcctacttatctcgtatattattttccggactcgatctctccttgtgtggccacatatccagcgcaacatacgcatctttgccacacttagttgtgggacatgtcgtcttttagtgggccaacattctgctccatacaacatagccggacggattgctgtcctgtagaatttgccttttagtttgcgtggcacccggtggtcgcataagacacccgcagcttgtcgccacttcaaccatccggctttaattctatgactgacatcctcatcgatgtctccctccttttgaagcattgatcctaagtaacgaaaagtgtctttcttgggtaccacttgcccattaagactaacatcgccatcctcataccccatggcactgaaatcacacgttatatac

SEQ ID NO: 13033 - DNA, 420 bp, Zea mays
aagaaatttctagaatcaagaatattgagctcaatccttattctggtaaaagaaaggtcatcaagtggcttggtaaagatatcggctaatcgatctttactattaatgtaagaaatctcgatatcccccttttgcggtgatccctaagaaaatgataccgaatggctatgtgcttagtgcggctatgctcgacgggattgtcggccattttgattgcactctcattatcacatagcaaaggaactttggttaatttgtaaccgtagtcccgcagggtttgcctcatccaaagcaattgcgcgcaacaatgtcctgcggcaatgtactcggcttcggcggtggaaagagcgaccgaattttgcttcttgaagcccaagacccaatgatcttccaaaactggcagtcccgatggctcttcta

SEQ ID NO: 13034 - DNA, 406 bp, Zea mays
  unsure (1)..(406): unsure at all n locations
agcttactcctccctgngaagggccgttcattatctcctatattttgaagcccgggacatacaagctggccaacgaacaaggcgagcaacgcttggaacatccaacagctatgttgtttctacccttaaaatgtttcaagtcattcatgtatctcgctttctttacatgtataaataaagtctaaccgtcaagggaggatcggccttgcctcagcaaataccgaacctccctcgagggctagaaggggggaaccccctctgcgtcaaaattttcctcggaaaagttntccgccaaaacgactttcgtccctttcgactatatcgatagcggaatcctaaaaacgacgagaggaaccttaaacgacaaggctgactgagccaagggactcctacgcctccggcatac

SEQ ID NO: 13035 - DNA, 427 bp, Zea mays
ctaagcttatactcgctgcttattgatgccggaaaacgctttaggttatttgaggtgctcgcctccaggtgcggtgaagagaattcctgctcctgctccctgcaacctcagcgagccatcaaaatacattcgccataccctgcagtctctgggttatctggtacttgctgttcagtccactctgatacgaaatcaaccagtgcttgagtattgatggcagtgcgaggtcggaactcgatgtcatgagatcccaattcacaagcccatttggctaaccggacaatggcctccttgttgtgaagaatatcctctattggaaaaccggtgactactatgactatgcggtcgtcaaagtagtgacgtaacttgcgggcagttagaaatactgcatataatagactctaaacttgaggatactctttctttg

SEQ ID NO: 13036 - DNA, 417 bp, Zea mays
  unsure (1)..(417): unsure at all n locations
agcttctccttgtcatcatcaaccttgacatagaaccactccgacttccagcctgctgcccatttgttcccgtaactgattacaggaaactttgtggttttccgataggcgaaattatagcaaccaaaattgtcgtgcaatccatcctttctagccttcgtctgataatgcagctcgtgaacccggcaaaagctgtccgcaaatggctccactgcttggcttcnnantgcccaaatataaacactaagcctaacgatagcgttaggggtcagctggtgaaaatagataccgaacctcttcantacctctgcaataatcccatgtagggggaatcttaatccagcctttagaaagattttgaaaataacaatttcatccttctccggctttggggtagtctcttctcccccgaagcgt

SEQ ID NO: 13037 - DNA, 413 bp, Zea mays
  unsure (1)..(413): unsure at all n locations
agcttatgaagattcttcatcttaacatggtctagtcggcggngccagagccaacccatgttagtcttagcaattaaacatgtgtcgagttcagctctatcaaaatctactaagtatagctgaccctctaacacacccttaaatgctattgaatcatcacttcttctaaagacagtgacacctacatcagtaaagagacagttgtagcccattttgcataattgagatacggaaagcaaattgtaatctaatgaatcaacaagaaaaacattggaaatggaatggtcaggggatatagctattttacccaaacctttgaccaaaccttgatttccatccccgaatgtgatagctcgttggggatccttgtttttctcgtaagaggagaacatcttcttctcccctgtcatatg

SEQ ID NO: 13038 - DNA, 375 bp, Zea mays
  unsure (1)..(375): unsure at all n locations
agcttggtgccaatggagaatctttaatcctttaagtcttggctggcaaactgctngccgttgtcaactgttagttcggacggtactccgaagcggctaaaatgttttgccagaagaattattgggcggtttttgatgttactgtggaaacagccctcgcctcgatccatttggtgaaatactcgacagcgacgaaggcgaacttaaggttcccctgagcggtgggcaggggcccgacaatgtccaggccccagcgctggaggggccatgtatgggcgatcagctttgtatactgcgaggggctgcctgaccgatgagaaaacttttggcatgcttcgcaggaccgtgtgacccgatttgcgcgcagatcattgc

SEQ ID NO: 13039 - DNA, 401 bp, Zea mays
gagattttttttgcgaaacacaataaccacgaggatatcaacacagagaggcacagtggtttatcccgtggctcggccacgacaaaacttgcctactacatgttgtggcgtcccaacggacgagagttgcactcaactcctctcaagtgatccaatgatcaacttgaataccacgatgttcttctttactttattgtttcccgtctgcgaggaatcttcacaacttggagtctctcgcccttacaataagaatcaaaatgaagcactatagttagggaggtgaagcacacactcaaattcacagcatatactcacacagaatgcctagactttagctcaaaagaatatcacgaggttcttactataacggagctcagatcactaagaatgtcaaacaagtg

SEQ ID NO: 13040 - DNA, 383 bp, Zea mays
gcaagcttatcgctgacagggatgtccatcatttattgttctcgccgaaaaaaatatcatctctagagatatatgtatgggcgtggttaccaaattaatgtgataaaatacattgatataccaaaattactggtttttactattataaattccgaagcaatgcacaagtatatacctactatccaaatgatagaacaccttcccatttcatcagatagtcatatatgaaatgaacaacacttttctacatatttcgacgacagaaaccagggcgaaatttttatctgtgcacacacattgggtgcgtgcaggcaagtttttattaaacacgtctgcgttattactcacacacatttattcacatccgggatacaccggatctt

SEQ ID NO: 13041 - DNA, 200 bp, Zea mays
  unsure (1)..(200): unsure at all n locations
ttacccccgaagcantaattaagatggggatgtatgtctgggctgtaagaaacctgggctggagcctagcgagaagcgcttttgactatgcactatctattatacgatactaagggtaccgtgtaggaacaataccacaacagcatcagttgtaacggatatattgatcgatctaatgcaagctaccaagagcgtacata

SEQ ID NO: 13042 - DNA, 411 bp, Zea mays
  unsure (1)..(411): unsure at all n locations
agcttggatggaagaatggttttatgtatatattatacttattgaaagggaagatattaagggggattatccaacaccctatttggtcttgcttcggcatcagaaggccaaccaatgctcttggaaatgatatcgaagcatgccagaaggctttcaatagtgtatgcacttttattggtacaagagacctagtccaggagcacattgcttatagagtgtggcctcttgtgaatgactgggagatgccgaaagagactgctgccggatctagtcaaggcggcttagtttatctgaaatatatctctaggtacagagatctgtttgatgagccaaatgatgactggctgaactgtgttgaggcaactagtgatgagttgcttgnggcctacacaacggccaaaatgatgctat

SEQ ID NO: 13043 - DNA, 391 bp, Zea mays
actagcttcggcacagcaagcttttccgccgcttcttcttagctttgcgccagggcttggcggagatttgggacaaccaaaagaacatttgcttgtctgggtgaaacaaggcatacaccactgaggctgttccatcagaagcaaggagatagcgagctcatgaaacaggtcagcgagcagatatgacactgttctatattcgcttacatcagaaatgtagcataccctgagttttgtgttcgcagcaactcagcttctgcacagccccgctcacaacgtgaaatgcaacagtgaagggggcatagtaacacaaggacttaaaaagtcaactcgcacagaaacactggcgagctacaattatgcaaatccactgaagagcttccttcattat

SEQ ID NO: 13044 - DNA, 221 bp, Zea mays
gccaggacaccctaagcccgacatcttgtggtacctggggctcacacaaatgaggttaacaagatggggatctattacaacgaaggacctcaccatgatgcgtccgatgtcacgaccacgatcatcttgtgcttgtcatacctcgatattttgtggagtacggacggagagcctggagcacgttctaaatgcttcctcatccctctgaacgcaaaagcata

SEQ ID NO: 13045 - DNA, 443 bp, Zea mays
  unsure (1)..(443): unsure at all n locations
tctcctgtctggaataatctacgggattccggttttttgtcttagagtacttgtagatgaacttatgcatctaagaaatgatcaactatgcaaactagttagtccataaggttggtgatggtcgtcaaaaacaaaatcgattataggaagtgttaagtacattttcctttcaatctcccccttttaggtgaatgatgccaacacaaaccaaagcaaatataaagtgtaggaatgtaactatgttgcaattttgacggatgtgcaaaagttacttgaatataaaccaactaaaagtaantttaagtatatatgattgctntcttctagtttaacatttaggaccacatttgcactactttgcttgttnttgcatcttttgaacagattttttaattcttttgcaatagccaatagttgagagttgattcaaaatgcatttaaga

SEQ ID NO: 13046 - DNA, 375 bp, Zea mays
agcttcggctcagcacaatgatgatattgttgatgaaaccgacctaaaaggaaaagactgcttaatcctcgacagtttacattttaactaacagtaaatgtcagggatataagtgtaattttgcttaagctgtgtcctgtgcctataaatagatgaacagtaacaccgtactttttacgctaacttgtaatcactcacgcgtcacttcaagatttttgccttctatcaagccgaaggtacaaatgtaatttaaatatcgttgataatcgcccatgatcatataatgataatatgaacaatataatgatttaaaatgaatattcatgcttattctgtgtttcatatgaccatggttatatctttgcatatagaaat

SEQ ID NO: 13047 - DNA, 484 bp, Zea mays
  unsure (1)..(484): unsure at all n locations
tagcctgaggtacattggaccgttctctatcttgttcctgtttggcatcaaggcttatcgcttgcaattgctagaatccatggcaagggtacacccgatattccatgtctctatgttgaggaagtattcggggatctgaaccatcaaatcaagttggaaccgattgctgtgtagcaagatctgattctggagtgtcgcctggtgcgtatcttggagtcctcggagcatgtcatgagaaggagaacaattaagtatgttaaggtcttgtggactaatcagtctgagcgcaaggctacctatgagctgatgcggcagaagtacaccgaacttttcgttatgggtgagtatttgtcttcgctgatctctcttttgtcgttccgatagaagcgttggaatttgaggtcgaattctttataagggcggtagagtgtgatacccaattntctataaagaagttaaatctcttttcccttctctttcgtgc

SEQ ID NO: 13048 - DNA, 442 bp, Zea mays
  unsure (1)..(442): unsure at all n locations
agctngngccaggatatcaccatccaccggtgccaggatatcacacttactnaattgccaagaatttcttcgggcgacatcttggtgtacctggggttttcacgaataaggttaacaagatggggatcgattacaatgaatgaccttaacatgaggcgcacgacgtcgtgatccgtccatcttgtgcttccatagcttcgtattttgtttactagggtcttgagcctgttgtatgttttagtttcctcctctcccctcttcatggaaaatcttcccaactccccttccaccaattccatcttggtgatcattgtagaatcgtttccctcatgagagatcttgagggtgtcacttatttccttggcgttgtccaaaccactaaccttgttgtattcatccctgcatagatatgctaacaaaacagtagtagcttgggcatttt

SEQ ID NO: 13049 - DNA, 447 bp, Zea mays
  unsure (1)..(447): unsure at all n locations
tcgtgaagatattntccgaagctatacttccgaagatcaatagtgtattttcttgcgacttagcatgattntcccctttttcaaaacattcttctgaagatcgatattgtgtccccctcttgtgccatatgcagcatgatgatgatgcttatgctatgcgaaatgatgcgatgatgttatgttatgtaagatggtgtttattccgaagatacacacacatccctgcgataaaacacataatctttttgaatcagcgttgtctttttgctataagcctcccttaggagcttcttcgccttttacttcagcggaatcagcgtttatttntcgctgtaagcctcccttaggagcttcttcgccttttactttcagcggtattcgcgttgactattcgcgcttcgccttttacttaggcggtatcagcgttgacttttcgctgtaagctct

SEQ ID NO: 13050 - DNA, 426 bp, Zea mays
  unsure (1)..(426): unsure at all n locations
agncttcgtctattctgtctctgaaggtcggctttatcgagctcttcttctccttcttgcgctgcacctgttgctgaaggatttccagattntggatttcttgatccaagtcatcctccggaggtgttggactaacagctttcctcttctggcttcgggcctctctaagagagaggacgtcctgattgggatccagcggctgtaaagtaccagcccctgtcgctgaaacttttttcggcggcatgacgaaggtgatgcttgccgaaagtgttcaaaattcaaaaaatggaagtgagttcaccggaggtaggcgccaatgttggagactcgttctcaaatgctatgaatcaagaacaaggcaacataaaatcttaaataccaaaagcccttcgtccttataatcattatttctcttcngatataatg

SEQ ID NO: 13051 - DNA, 497 bp, Zea mays
  unsure (1)..(497): unsure at all n locations
gcttctatttagaagaaatcctctaaantagagcatctatcattgctctttttattntataacacaatatccatatatactttactataactaatttaaaactactttcgaatcctctacaagtccatcctcgcatgatactcgacaaatcttagaaaatatcgcaagaatacgatatgcatccattataccaatagcattgaattattagagagaaataatagacattatatccctttcatttttcaaacattatcgacctcttatgttatgaaaataacctagagtaataccttatatttatagttaaattatctagcctctcgttataaaaaacctaaagtaactcattctactaataaggtagcacatgctctccactcctacattactaagctgtttggtttgaggaataagttagttcatcatcttctcactcctcactattttatggttggttcgtagaatggattgacgtgatctatcatcacctcatt

SEQ ID NO: 13052 - DNA, 416 bp, Zea mays
  unsure (1)..(416): unsure at all n locations
agcttgaaaaagctgctacatctacaagatagtctattcttgtttatggaaacatcccctctggacaggccttgttaagatctgcgaagtcaatacacattctccatatgcgcttggccttcttcaccaaaacagtattggctatcacactctggatattctacctctctgatgacagcagcactgagaagtctttatagttcattccgagcaccttcggctttattatcaaacattttacgaagcctttgctttcttggcttgaatgatggggagaccttgcgtgaatgctcaacgacgtctgtgctacaccatagagatcattggccgaccaagcganaacagtctttgtgctgaacaataaccttatcaaagctctctactgatgtttatatttatgagacctcaacaatacc

SEQ ID NO: 13053 - DNA, 427 bp, Zea mays
  unsure (1)..(427): unsure at all n locations
agctgtgcattgagatcttgtttgtcttgttcgaactgctcaaactggcggagaagcttcgggttcagttctgatatttttgcttcagcttccgccagtaaaccttcggctgcctggagctcaaagttctttttctcaaaagcatctgattgctcttttattatgctttccaaatttccaattataacttcatgctatttatcttcaagatcttgctgcatttgcaaggctttgctcaatagcatactctacataaacataaccttcgtcagacatgtttttattagaagcaataaaagataagggacaagtcattcaccttgaagttggagtaaaataaactaccaacgacatgttgtcgtcggtagcggctgatatctgtttctagcttcnggaatccaatactnctggacagagtgctgatgac

SEQ ID NO: 13054 - DNA, 378 bp, Zea mays
  unsure (1)..(378): unsure at all n locations
agcttgggttntagatacccaactctggttgggtcctacaatgttagtcacaataacttttggaacccaaatacaagtcttgtctcccttgcatttggatcccagcttcctagcaactacttttgcattcttacatgaaagtacaaaagaagtattgcgagcatgataaacagtagaaggtccatagcacattctcctaggagcatgagacgcaacatgatttctcctaggcctacttctaccatggacaaaagtagaactagatgcaaacatagtatgtgagtcattataagtagcatgatcataacatccattattacgagtatgactagtaaaattcctatcataaatataggcatggttcctttgaggactact

SEQ ID NO: 13055 - DNA, 417 bp, Zea mays
  unsure (1)..(417): unsure at all n locations
ctgacgcatgcaagcttcagctccatctatattatggattacttttgaatctgtccagngcccttcggcctttctggcaacttcttgacttccatgaatagcaataggcccttgatctgaaggtatcttcatgcaaagatatgttgggtgaagaatttcttcaaaagcattgagtgtcccacgaccaatgactgcgtagtaagggtattccatgtcaacaatatcaaacacaacttgtttagtccttatattgttgataaatccgaaggtcactggcatcgagatcttgccgagtgctacaatctgccttcctccgaagccacaaaggggatgtgtaacatcatggatcttatattcgggctcttgcatctatctgaaggccttagcaaatatactatgtgctgcactgtttgtgtc

SEQ ID NO: 13056 - DNA, 457 bp, Zea mays
  unsure (1)..(457): unsure at all n locations
cttcatccccacatgtgctaagcggtgatgtcttatccagcccatgctaggcttagcaattaagcatgcatctagaccggcctcctcttttgcaaaatcaactaaataaagtttgtcgtctaacgacccttaaaagctaatgaaccatcacttcttctaaagacagacacatccacatttgtgaatagacaattatatcccatnttgcataattgactaacagataacaaattatatccaagagactcaactaaaaacacattagatatatagtgctcggatgaaatagcaantttacctaacccttttaccttgccttgattcccatcaccgaatattattgaatcttgggaatccttgtatttgacgtaggaggtgaacatcttcttctccctcgtcatatgattngtgcatccgctgtcgataatccagcttgaaccctcggatgcataaacct

SEQ ID NO: 13057 - DNA, 345 bp, Zea mays
agagcacattttgggactttcatatgttcattttgagaaagacagaatttgtagtgcatgtcaagcacgaaagcaagttggtgttcattatccacacaagagcatattgatgactgacatgccacttgagctactccacatggacctattcggcccgatcacttacataagcatcggcgggagtaaatactgtctagttattgtggatgattattctcacttcacttgggtattctttttgcaggagaaatctcaaacccaagagaccttaaagggattcttgagacgtgctcataatgagttcggcctaaggataaaaaagatagaagcgacaccgggacggag

SEQ ID NO: 13058 - DNA, 387 bp, Zea mays
  unsure (1)..(387): unsure at all n locations
tgcaagcttatttcggggtcgtgctccggcctctattttcggcccgtgcgccatgggcgaacccctcattttcggcccagacgcaaggccgaacagccatgccgcccgtcgccttgcgcctccgtgccgtttttcctccgttccgccatgcccttcacccaagacatacatattaccttcggtgtctttccacacgcttggacttagcttatttccggggccatgcccgaacctcggttttccgcccctgcgccatgggcgaacccctcgttttcggcccaaacgcaaggccgaacagccatgccgccccgtcgccatcctgcccttcacccaaggcatacgtcgcagcttcggtgttcttgcacacgctnggacttggcttttttt

SEQ ID NO: 13059 - DNA, 271 bp, Zea mays
  unsure (1)..(271): unsure at all n locations
gcgtgtggaatgtggagaccacttttcttattttgttgttggcncgagagaagggcaacgtggaacggagggaaaaccggaggaggcgcgcggcgactggcggcacggctgttcggccttgcgtcgggctgaaaacgaggtgttctccatggcgcacgggccgaaaacggaggctcgggcacgaactcgaaaataagcttagttcaagcatgtggaaagacaccgaacatacagtgtatgtctttggtgaagggcacagtggaacggaggg

SEQ ID NO: 13060 - DNA, 380 bp, Zea mays
  unsure (1)..(380): unsure at all n locations
agcttggtcattntattgctaactgtcccgacaatgatagngaccaggaacacgggaacaagagggaaaagaagaaacatcacaagaaggccaagggcgaggcacatatcggaaaggagtgggattcggattgctcctcctccgactccgacaatgaaggactcgccgccactgccttcaacaagtcatccctcttccccaacaagcgtcacacatgccttatggcaagggagaagaaggtatgtaatcaaaacaatgtcacttatgattcttccagtgatgatgagtctagtgatgatgaaatagattactcttagaaaaacaagagggacctttgtatgaagagcatgacaaatntgtagaggcacaaaaatcttatg

SEQ ID NO: 13061 - DNA, 302 bp, Zea mays
  unsure (1)..(302): unsure at all n locations
atgacattggctccatcccgttattggtttattctatacctcctatggttcccactagccacaagggggaaatacttaatattagaatcaccttgaagaagttccttaattttcgctctttgcaccacttgaattcttcctctctaagcatatgggctaacttattctgaagaaattggttcaaataattttatcaactgccagaccaaccccctcttgctttttatccaagaaatctagtttattcagaataatcttcttcntctttttgtacgctccgctggatttttttgccaacccct

SEQ ID NO: 13062 - DNA, 138 bp, Zea mays
  unsure (1)..(138): unsure at all n locations
tgcttagcaagtgcgagttctggatttttgtttncctattcttgggtcacattataaaccatgaaggattggttgtacatccgaaaaaggtaacaactatcttggattggaaagcaccaaaagatgtctgaggaatct

SEQ ID NO: 13063 - DNA, 443 bp, Zea mays
  unsure (1)..(443): unsure at all n locations
cacctgccgcatgcaagctcttgaacgtacttatcgcatgtctctgaaatatggtaaccgcataacctaagtcctgagtgataccgggcgcggactttatccctcacacgacctgagactgggtctcccatgctagctatggcgggtacaagtgtggtcactgcacggcggcagccggggtcaggggagcattgtatgccaaggcggtgaggcctggacgcgaacggggaatccatgatgacggttgacgtgtgtggggtctgagtaccctgacatgtcatgtgtttaggtttaccttgcaaggataaaaactcgattcaatcggctgcttctcgcagctaatgagacttcttgaccccttgtactacattgagtaagaagtgaaatgaggttntacatgagataacttgtggattggactaaatgctcgctaccatgtatgc

SEQ ID NO: 13064 - DNA, 371 bp, Zea mays
ggttatctaaaaacgaataaaatattccgaacgtttgtctgttcaccgctcagttagtgtagacgggttggcggatcgacttctttccctgcaacactatataagcagacaggttggtgaggagttaccgagcattcattgtcactgcaatgttgtgctgttaaaaattttaaccaaagctgaagctttctggattgcgctttccaaacaagctcttcgtcattcgaaactagcttcgtcttaaggaaccaaaatacttgaaatggcccgagtaagatctactgctatggtgtaccacgagggagatgatgctgaatgacaaaaacagtgccaatatcggaagtgatgagacaattagatctacttatgct

SEQ ID NO: 13065 - DNA, 258 bp, Zea mays
tttctgcactgcatgtggatgacatattattgattgggaatgacatttctatgctggaatccctcaaggcttcactgaaaaagaatttttctatgaagacttatgggaagcaacatatattttgggcataacgatctatttaaataggtccgagaggcttataggattaactcagatacgtacattgacaagggtttgaaacggttcaacatggaacagaccaagaaaggtgtcatacctatgtcacatggtaaacac

SEQ ID NO: 13066 - DNA, 366 bp, Zea mays
acgtgttcgacgcgagctggcattctgtggctctcttttagcacgcccgtgcgcgaacccccgcgcactcgcggtcgaccgtgaccacgcccgcgccacggctataaagcccgccccagtgcttggcggccttccccgttacctccttcgtacctcgccggactcgcccgagccagccattaactccggcgacctccccgcgacccgccagtgccgcccgagagcaaccaccgtggccagcccctctcccgtactcctacgttcgatccaagccctcagaatagcttctggtgaagccgtgagccttgcgcaagctttacccggtgacccttcgcaccggaatagcccaatcatgctcaccggaat

SEQ ID NO: 13067 - DNA, 441 bp, Zea mays
  unsure (1)..(441): unsure at all n locations
agctngacaaaaagagctgcatcancctttttatgcagctccctaatcaccctctgcacgtatagaaagttgtcatgtattgatcggttctggatgaaggcgntctgagcgttggatataatttcgttcattcttggcgcaagcctatttgccatgatttttgttataattttcatgaagctattgatcagacttatcggcctaaacctatcaattctgtcagcattttcccccttgggtatgaggatgatgtttgcttcgttgatcaaatgcccgcttttggatctgtgatagaaaaaatcatttattgccatggagaggtcgttcttgatcaactcaaagcagcatttgtagaactgtccaatgaacccatccggcccaggagccttttcagattgaagcctcatgatcacgtccttaatttcactatcattaatcaag

SEQ ID NO: 13068 - DNA, 441 bp, Zea mays
agcttctcaaatcagtgatcccttgacccttatctattactactccttaagagagtaccgtaggcgtccacaaacttggttctgctagtctccccgtcgtcaacgcagatccgccccacactcctccgtcgcaggcaacaccgcctcccctctgctccgcgattatggggaccaatgccgccatcaacgccctccatcgtaggcaacatcgccagtcatggaaggttgccgaggatccccaccctcctccccctctgctacgcgattacgggcctctgctacgcgattacggggatccaaggctcaacgcgaaggtacgccgtcgcctcccgcctcccctcccctcccctccgcgatgttactgcgcaactggccacgctgttaggcgtgttccgcctctcctctccgtcgctgggcaactgagcttctctccccccgact

SEQ ID NO: 13069 - DNA, 478 bp, Zea mays
  unsure (1)..(478): unsure at all n locations
taatcctgagaagtgtgtcttcggggtgccccgaggcatgctcctattgttcatcgtctccgagcgaggcatcgaagccaacccggagaagatcgcggccatcaccagcatgggacccatcaaggacttaaaaggggtaccaaggtcatgggatgcctcgcggccctgagccgtttcatctcacgcctctgcgaaagaagtctgcctctgtaccgcctcttaaggaaggccgagtgtttcgcttggacccctgaggccgaggaagccctcggcaacctgaaggcgctccttacaaaggcgcctgtcttggtgcccccggcggacggagaagccctcttggtctacgtcgccgcgaccactcangtggttagcgccgcgattgtggtcgaaaggcaagaggaagggcatgcattgcccgttcagaggccggtctacttcatcagcgaagtgctgtccgagactaagatccgctacccac

SEQ ID NO: 13070 - DNA, 433 bp, Zea mays
agcttctaaagggagaacacgtgataggtatttctaactttcttttctaacaagatagaccttgtgcagcttgtcaagcatgttaacaagtgggaggagcacatcacagcaagaacgtgatgaccacttcaagacccctggagctgctgcatatggacctcttcggacctgtcgcctatctgagcattggaggaagtaaatatggataagttattggggatgacttttcccgcttcacttgggtgttcttcttgcaggaaaaatccgaaacccatgggactcttaaacgcttcctcaggagagctcataatgagtttgagctcaaagtgaaaaagataagatgcgacaacgggtccgagttcatgaaccttcaagtggaggagttccttgaagaggaagggatcaagcacgaagtctccgctccctacacacc

SEQ ID NO: 13071 - DNA, 349 bp, Zea mays
atggccacgttcgccaccactacctattactcggagctctaactgtcctcaccggagctacattcttcaccaatatggacttcaccatatatcttcttctagaagtatacattggtcctgcctccctcttgaactcgaccttcttgtattgcttcttggctacttgttccatcttattatgacaatccgctatgatatgcccacgttggccacatacatagcatgccctcttctgtcctttcctttggaacttgtcattgtttcttacaaatttcttgaatgttttgatgaacatagttgagacttcatcactttatctatcgtgatcacttgatgtctaaccactttc

SEQ ID NO: 13072 - DNA, 436 bp, Zea mays
agcttcgcacctctgaactaactcggctgtatcactcttttctgttggccaatagaatcctgacctgaagaccttcccgactagtgttctggatgctgcatgtattccacattgcccagcatggacctcctccagaagtcgcttcccagcagatggaagaatgcacttcatgaggacgcctgatgcaccccttctgtacaatgtctccccaatgagtgtgtagtgagccgactgtctggcaatgcgctcggctgaattcttgtcatctggttcctcttcattctttatatacctgatgattggccttctccagtcatcagagtttgactcgggttgatctataatattgcactcttctgcttgatccattgagatactcggctatagtatttcttgcacaaagactccaggtgggacctgagttcgactggatcct

SEQ ID NO: 13073 - DNA, 382 bp, Zea mays
tgaagccatggtcagtagcatacgctaataatatgcgaattgactcaagcctatctacgggtgcataggtttcaccgaaatccaaaccttctacttgggagtataccttggccacaagtcaagctttgttccttgtcaacacgccatgctcatcttgcttgttgcggaagacccatttggttcctacaatattttgattatgacgtggaacaaaatgccatacctcattcctagtgaaggtgttgagctcctcttgcattgccaccacccaatccgaatcttggagtgcttgctataccctgtgcggctcaatagaggaaacataagagtaatgttcacaaaaatgtgcaacacgagatctagtatttactcccttatgaat

SEQ ID NO: 13074 - DNA, 339 bp, Zea mays
agcttacaacaggaggatagttgcacgagctctaccatatgtcataatagaaggggagctatacaagcgtggggtctgttccccgttgctcaagtgtttatccagatccgaaggtatagaattaatgaaggaaatacacgcaggcctgtgtggatctcacattggatctaggcctttgctcgggaaagtttttcgtcaaggattttattggccaaaggcagcttcggatgcagcggatttagtccaaaagtgcgaaggttgtcagaaatgtgcaagagatcaaaaacaaccttcgtctttaactcaattaatacaacccacttggcccgtgcaaaggtg

SEQ ID NO: 13075 - DNA, 169 bp, Zea mays
agtggaggcatatgggtccttccttaataggcggacatctatgcctatattatactcctaataacttacgaatgaaggatgaggatcactaatccttcccaaccaaacaaaaaatagggtgtaaacaatggctatatctgtctgaaccaacagcttattaacagttaga

SEQ ID NO: 13076 - DNA, 375 bp, Zea mays
  unsure (1)..(375): unsure at all n locations
agctntgaggcggtgctctatgcaggagtgcgcgcgctaatggactgtgatcttgcactcgatgatctgcaccatcgctgcaggagctgctcctctctatgtacttccggatgatccgtgcataagctcgtttctagttggttctcaaaccaatcctgcagagtttgctaacaaatcgcacatgaaattaggatccccaactgaaagtgttccagcgcggaccgtccgagtcaccacaagagaccgtacggggtgtggaccgttcagactataaggtcggacgttcggccatatttggtgctcaacactcgccctagcagtggtggatctaggaatggactanaggaggtgttgattcttagtgatcaatgacac

SEQ ID NO: 13077 - DNA, 444 bp, Zea mays
tttctacgcacagcttcgtgatcatctagaccttcgtcattatcatctttcgtctcgttcagacttcgtcctgactgtgctcttgtatactcatgatccgattccgaagatacctgctcacatatttcacttgcaaacattgtcaaatcatgtttttgaggaccttcggaagccgaaggcccccaacaacgaccattgctattgttgtgtgagtgtcctcaaacaagatgtatgtagaggagtagcacatccggtggtgcaacgaccaggtgtactacctcgctgatgagctcagggtgcacttcatttggcagcccaaccaagagtcatcggtactcaccatgtcgcgcgcgtttgacgactactatatcaaggattatggcgtcatctcggcgccggaggtgacgcacaggaggaccgacaacaatgaccactcgtcaacgt

SEQ ID NO: 13078 - DNA, 397 bp, Zea mays
  unsure (1)..(397): unsure at all n locations
agcttgttcaccaaacttttctttttcttcttattaatcccacttgtatgctttgcccacccctaagatattggcataattttcgaatctttgcttgccatctatccataggggtattgccatccatttcggtagaccatatctattttaccatattcgagaaaccatcctgcaaaagccatcccaattcaaatttgaacataggtgggcctgattgcatcgtattgtctctggagtttagcaataatggagtatggtccgatatctctctagacaaggcagttaacgtggttgttggatatttntcctccaattccatactaattaaaattctatctaatttctcaaaagttggggttgtcgagaaattacccatgtatatngtctacctgacatc

SEQ ID NO: 13079 - DNA, 336 bp, Zea mays
ttctaacgatcttcacatccacatcagaaaataagccattattacccattccacaaagttgtgaaacggacatcaaattgtatcttatagaaacaccaataaaacatttgaaagtgattggtggtcacaaataggaaatttaccaataccaatcaccttactcttgccactatctccaaacacaatatcttgtgcttcttgagttagttgcaaggaatgaaacatgtcttcctccccggtcatgtgatttgtacattcactgtctagcacccaacttgacccaccagaggagtagacctgcaaaacaaatttatgctatgcttttatgtacccaaa

SEQ ID NO: 13080 - DNA, 306 bp, Zea mays
  unsure (1)..(306): unsure at all n locations
tcaccactgacaccagagctgcangctacaccatggccgtcactatatgctgcccacactacctatatcttcacttcgaacatcttagaaagctttggcttcaaattctatcccttaacttcgaacattccagacgaaattcccagacgcattgtgatacccgggttacaaagaagagaagatggaggttattcttttttttgcttttttctcatttggctgatgcgttttggggatttggaatttgtggaaacattcaccagtatggcaatataatatcttttgttatgcgcttgcgatggggtc

SEQ ID NO: 13081 - DNA, 205 bp, Zea mays
  unsure (1)..(205): unsure at all n locations
tttctgagtggatcatctggctgaccatgatgccttcttcaacttatacctggtanaattactggtgcttaggatcgattcctaagtccctaaaataccaatccgtctgtaactcaaantaaaatctggaagacgtgtagatctgatctactatctactgagaggaaccgggaaacacacctttattgttgttgctatcttcata

SEQ ID NO: 13082 - DNA, 377 bp, Zea mays
  unsure (1)..(377): unsure at all n locations
agagtcatgatagaacacagcacacatactcatgggtttatcccgaggttcggccaagcctgaaatgcttgcctagtcctcgctcgagttagccacacctgcgcttggagtctatttcaactccttcctacgtttgctcagaacagtcnatatcacacatagagcctttcactattgagtggggttacaacagaaccgcggatgcttacaaacttcttggcagcactccggcagagtaactatacgctcaagaccttgctctagatctaagcagcacttctactctctcttaaggcttatagctgtgccttctacacaaactatagagttacacacactacggagagtgagaattgattcgagtgacgactacactt

SEQ ID NO: 13083 - DNA, 413 bp, Zea mays
ctgcaagctgataaagtccaatatacccttggtattatcatcacaacaagatttgacacttagaaaggtcaaacaatgctaaacgtaaattctgtccaaacttggataaaattcaactactcaattcaaaaaaatccctaattggagtctcagtcatccaattcaggtgctcctagactttttagaaagctagtagaattgtctataattcatttataacatatcaggttaattcaatgcatatcaaggtcaaaagacatgagaaaggctctgctgtccaaatttagatagattcagagatcacacttaaaacagctgtaacttaacttatagatctccaaaaaaggtgatccaaaatttgttgaaaagattaagaaaagtactacaacttcttcataatttataagaactta

SEQ ID NO: 13084 - DNA, 318 bp, Zea mays
tctaaagggagaacatgtgatacgtctaaccaatgttcatttctaaaaagatagaccttgcgcagcttgtcaagcatggaaacacgtgggatgagcgcatcacagcatgaatgtgatgatcatctcaagcccctggagctgctgatatggaccttttcggacccgtcgcctatattagcatatggggaagttagtatggtttagttattgatgacgacttattccgcttcacttgggtgatctttttgcccgatagtatgaacccaaaggaccctctaacgctttctcacgagagcttaaaatgagtttcagctctac

SEQ ID NO: 13085 - DNA, 486 bp, Zea mays
  unsure (1)..(486): unsure at all n locations
actcagcttataactttccggtgagcatcgaatagctcgtgtcttatttatacccttattttcatctccaccaacaataccaacattgtcatcaccagacccatcgccaccaggaacaaactctgtgtctttttctcatcactttcggcgtcttgtataggagggactttcaaccttaatctcttcttcctttcctttaattcatttttatctaattgctttctcttgttttcaacacggggagagcgacagacagcatgagcgccttgctggcctgatacattctgatcttgatccattataaaaaacactgaaaaaatgggaatgcaaaaaacatgagggcacaaacacatggtacagatctcataaccaaaaattgctaatcaacatactataacacacagtacataaatatgaacaaaanatagttgcaatacacactaatgctgcacacatacattagtactgggacagaattgaacatgc

SEQ ID NO: 13086 - DNA, 438 bp, Zea mays
  unsure (1)..(438): unsure at all n locations
tgcagcttgttgggcagtcccgaatcatgtgcccaaactctctgcaacgatggcactaaatatcccgtgtacgtcctatggaagaaacggcgcctttggaaggggcgccgctggcttggtcgtccctgtgcgcggtgtaatgctaggcgtataaggtgcangtgtggaaggagttgggctgtgtgtcnaaccccggcctgcaaaagagttagtatatgtctttgatcgtcgtccctgcacttcacgttcagctttgcaagcatattcaaataatgtggttatatcaaaataatccttataatcaagtatatcctaaatttccctgttcaaaccaccacgaaaacgcgccatagcagcgccatccgactcaaccaaaccacaacaaagcatacccttttgtaactcctggtaatattcctcaatagaatgtgaaccttg

SEQ ID NO: 13087 - DNA, 459 bp, Zea mays
  unsure (1)..(459): unsure at all n locations
tctcctggacaagtgctgcacttaccgctgagtgcgaagctgccacatataataacaaagagcccctggcgttggtggagttaatgttgttagatctatcaaatattgctttagctcttcgaaggctttctgctggattggtccccattgaaagacttcagctgacttcagcacttcgaagaatggtaagtttctctctgctgatctggatatgaatctgttgagagatgccagccttcctgtcaatctttgagccccctttnttgtacttggtggttccattcgaagtatagcttcgatattgcttggattagcctcaattccctttgttgaaactaggcaaccaagagatttccncttctttactccgaagacacacttttctggattcagctttagaccagcctgtctaaaattagcgaaggtcttctataaatcagcataagttagcacattcct

SEQ ID NO: 13088 - DNA, 394 bp, Zea mays
  unsure (1)..(394): unsure at all n locations
agatcaatgaatgaatcgatggcttgaatgagaagaatagatcgttagagaaacacgaggatcttttatttgaagagcatgtatgatttgttagtgcgcaaaattctcttgctttagaagttaaaagaaatgaaatgctttcatgtgaattatctacatgccatgaatctatttctagcttaaagagtattaatgatgatttaaatactaagttagaaatagctaataaatcaagctcttgtgtagaacatgttgtgatttgcaataagtataaggattttaatgttgatgcttgtagtgaacacttaatntccatttccaaattaaatgatgaagtggctagtcttaatgcccaacttaagactagcaagaatggaattgacaactaatattt

SEQ ID NO: 13089 - DNA, 433 bp, Zea mays
  unsure (1)..(433): unsure at all n locations
taatatcttcgagatattcgagcttcgcggacttttagatggtcccgtttacagtggacttccaatgtctatacaactcggccaaagagtaccttgccttctttaggttccatcgtcaacctttttcccaaccatcatggtctcctcggtagctcgattgggattgcttgtatacatagtttggcttctgtggtccaaagagtaccttatctttaggttccgtcgtcagtcttatgcccaaccatcttggtctcctcggtagcttgattgnggttgcgtcctggcaaaatgttccatgatactgctgacgctattcggctactaagaatgtataactcgttttattcatggcgagatgntgaaaaaatgataataganaaggacgtatttgaagaatgttggaaagagtggagatgcgtttcgtattaaagct

SEQ ID NO: 13090 - DNA, 441 bp, Zea mays
  unsure (1)..(441): unsure at all n locations
agcttatacctntatctgacgtcatataagaaatgcatganttttctcttataagacagctctcatatacaattattaatatttatattattttttgagcatattaactatcttaaataaaaaatctcaaaattacaaagatgtagatctcaacgatagctataaattagtaatccaaaatcctgattttgggattagtaaaagaaagcaaagcaaagtgtccctgatgaataattatactttagaattcacactttttaaaataaatagtaatattaaaacaatgttagttaaaaaaatagaaacaaaaatttacttctgtttcaagaaataaataataaaaagagtttcaatttattagaatggattatcctcttcaaggactatgttggtccttgttctcaaatgatatatatcaagaacaaagcaacaaaattatta

SEQ ID NO: 13091 - DNA, 409 bp, Zea mays
  unsure (1)..(409): unsure at all n locations
cactcagctttccaagnttgggaggcttcctggcgaagtactgagctgactgacctggccgaagcccttgatcatggcctcgatgacaatttcattgggcaccgtcggtgcctgtgccctcagacgcaagaaccttcggacatatgcctgaaggtattcttcgtggtcctgagtgcactggaacagagcctgagcagtgaccggcttcgtctgaaatccttgaaagctggttaacaacaaatccttcagcttctgccatgaagtgatcgttcctggtcgaagggaggaataccaggtttgagcaacacttctgacagccataacgaaagatttggccatgactgaagcattgccaccgtacgaagacactgttgcttcgtagctcatcaaanactgcttctggtctgag

SEQ ID NO: 13092 - DNA, 438 bp, Zea mays
  unsure (1)..(438): unsure at all n locations
agctntgcactgaatcaaggcgcactgttcatcgatcttcataaaaatcgcgccggcgataagaacgccaccgccgcgtggatggtcgtcggcggccacggtaaaaggctgttgcaacgtggcgttaaaacagggaggtggcaggccctggttaatcggcggccaccatgccatcaccgtggtcctgtcgaagctaggctcgtcgcacctcccttgcgcgtcgactgatcggataagacctcgccgccggccgattactgccgtgcgccacgtgcttaagcactagtcctcgtcgtggtgactcatgggttgcatgtccggtgatcaccggaataactgccacggtgaaagtcatttattccacgcatggagctcgtctctcctccggccgccagcactgctcggccgaattcgtcaccgccgattaacttctctata

SEQ ID NO: 13093 - DNA, 440 bp, Zea mays
  unsure (1)..(440): unsure at all n locations
ntgcacacatagctcatttgaataccttgatcatatctcttctatatgctatgactaatgtgtttcaagtctatttcaaaccaagtcataggtatattgaaagggaattagagtcttcggcgaagacaaaggcttccactccgtaactcatgcttcgccatcactccgagcaactctctattccttgnggagaaatgagcatcaaagaaaaggacttcatccttcgaggagagagtaaaagctcaaaagcaaaaggaccggatttcgtctttggtataatcttaactcatttacttatgaccaaaggggaagaacttacttcaagggctctaatgattcccgttttggcgattcatgccaaaaagggggagaaatgagcccaaagcaaaaggaccgcaccaccaccaccaaattcaaaaacttagtgctttccaaaagtc

SEQ ID NO: 13094 - DNA, 437 bp, Zea mays
  unsure (1)..(437): unsure at all n locations
agcttcaccaaaatcctgactgataagttcatcggataatgatgaatgttaccatcagaaataacatatatgtgaagcttcaaactaacggggtgtttggttgctcctgctaaaagttagcccgggtcacatcaagcgtttgacttttaaataggagtatgaaatatatacccaaccaactggactagagtcgtctcgtcttttaatcttcgactgacaaattatgtttataatccgactacatttaatacccggaacgaaggttcaaacattcgatgggacaggggctaaattttagcggtgtgtaaccaaacaccccctaacagctctaaaagagtaaattgacatttgatttgacgaaatctctcacctatctcttatttaccaacatatattttacgcctcgtctaggtgtggttntaaagcatgatactacc

SEQ ID NO: 13095 - DNA, 504 bp, Zea mays
  unsure (1)..(504): unsure at all n locations
ggtgcaagtaaccagctgcggagcagcanagcctataaaaacgcatcctcttttgcggccaaagcaacggataaccggagcgcctgacgcgagcgcaacgaatggaacgccgacgtccataaattctccacgacgccggccaacttccgatccgcctcgcagaggagaggttgatccttccgtcagtgagtccggtcagggtgcgggtcttgccccaccagccagtgagccgtaggtagaagcgtgtccccaccttcaaacacctgcaattgaaacccgtgccaaccttctctccatacttctagactatgtccgacattacatggttgacataaaacatctccacgtatgcgtcatgtataaacatttaaacactaataatgtctggatactaaactagcacttaaattgggtaaaaaaaatagcatccaacagtaaatcatctttacatatagcatataacatcttcacatataacagtaaacaagtctatatgctaaactg

SEQ ID NO: 13096 - DNA, 372 bp, Zea mays
  unsure (1)..(372): unsure at all n locations
tcacatgacctgatctgtgattggcgcgccgttttagcgcgtctgctgacgcgcccgctgtcaatccttctttantcacgtcaactgccatatctgtccccgcggctgactaacccgcggtccccacgcctggtggtttcatcgggccacgcacggggcgcctcattgttgctgccttggattaaaagataacactttgttttctgcagcggccccgaggaggtgcgctatcacacgcggcggttcgtacggcggttcgctgtttccgcacctgaagtccagtacacaacctgtatgacctgtggacccgggctcccgtgtcatagagtgggctgcctggatcctangtgcgcgtcgggcgggatnttctgt

SEQ ID NO: 13097 - DNA, 409 bp, Zea mays
  unsure (1)..(409): unsure at all n locations
tgtgaagattcttcatcccaacatgggctagtcggtgatgccttattcaacccaattagtcttagcaattaagcaagtatcgagttcagctctattgaaatcaactaagtatagttgaccctctaatacttccttaaatgctactgaatcatcacttcttctgaagacagtaacacatatattcgtaaaaagacagttgtaacccattntgcataattgagaaactgaaagcaagttatagtctaaagaatctacaagaaaaatattggaaattgaatggtcaggagatataacaattttaccaagatctttgaccaaaccttgatttccatccccgaatgtgatagctctttggggatcattgnttntctcatangaggagagacatcatttctccccagacatgtgg

SEQ ID NO: 13098 - DNA, 431 bp, Zea mays
  unsure (1)..(431): unsure at all n locations
tgcaagcttatttgaagtgcatgacantttgagacaggatcttctattccactgcaacctactcgaagggtcttcactccactgcgttctagtcttcgagtagagtgagaatttaagttntaaagctataagttttattcgcctattcaccccccctctaggcgacatccagatcctgttcccgggccaaagggaactttcagaatgcaggcgccacttaccagaggtgcatgaaccacatattcggagaacacatcggcagaacggtcgaggcttacatcgacgacatcgttgtcaagacgaagagagcctccgacctcctctccgaccttgaaacgacattcaagtgtctgagagcgaaaggcgtgaaactcaatcctgagacgtgtgtcttcngagtcccccgaggcatgctccttgggttcatcatc

SEQ ID NO: 13099 - DNA, 399 bp, Zea mays
agctagtctgtcgggatcgaacatagctccagttggatacctgcttcggaggaagaaagtattaacgttccacaagttcataattaaatggccagagtgcgttctaccgccagggttgagcgtgagggggacgagactgaagcttcggagactgttcccatctccgaagctatgcaacgatccgggctggtgacttcggaaaagatccctcatgatgatgcagaacaagcagaacaagcaatcgctgaagcagaagaagaagatattgaggaaactgattctgaagatgattatcgcattgccacgccaagcaagcccaaccacttggacttcgggaaatctactgtttcgaaggctgatctgtccaagattggtaagtcagggctttttactgaaagt

SEQ ID NO: 13100 - DNA, 445 bp, Zea mays
  unsure (1)..(445): unsure at all n locations
cacacacacatgtgggaatcgaaatgggaagacaaaccttntggagaggtggattcatcgtttggtctccaccgttcattttcttcttcttccttgcaagggttagtatcacaaatactaaaggaagtagaagcacaaaatgaactatcatgtttggacttattaaatttgcttttaattctagtccaaatatcatgcgcatcatggattgattcgttataatttgatatgaaggcacgataatcttctttgctaatagaattagttaagatgtcaaaagctagatagtttaagcgataacatctttgatcctnctcggaaataattnttcattgaaattagaggaaaaaatactctcgtctataatttgttctaatcgtggatctatggntctaaaagcatttatcacactagtagaccatgagtncataattgaacaatcatc

SEQ ID NO: 13101 - DNA, 416 bp, Zea mays
  unsure (1)..(416): unsure at all n locations
agcttgacaataaggagatggctctaatcatcaaaagctnttgccaaatcctcaagcaaaggagggagaaggactacaagcctcgctccaagaaagttngctacaagtgttgtaagcccggtcatttcatatctaaatgtccattaccaagtgatagtgacaggggcgacgacaagaaggggagaaggaaggagaagaagaagcattacaagaagaagggcggcgatgcccatgtttgccgggagtgggactccgacgagagctccatcgactcctcctccgatgaggacgccgcaaacatcaccgtcaacaagggccttctcttccccaacatcggccacaagtgcctcatggcaaatgacggcaagaagaagaaggtaaaatctagatcctccactaagtatgcaacttctagt

SEQ ID NO: 13102 - DNA, 425 bp, Zea mays
  unsure (1)..(425): unsure at all n locations
ctgtaggttgcctgtgtgtgcgtgtgtgggtgctgtcattgcgttcgcactcacgccggtcctatcagcgggaaattgcgtgcgtgcggtctgattcgccattntctgctcatcggcggcgtcatcgtgcgctagaaacatcaggttgctcgcgaactaataatggcatcagagacagcgttgttattctatatgtgcgcactacgtctgggtacaggttaagggattaggataaactactgccgagccttcgatctgataaaaccttgcttgcagtatagatggccaatagtgctgggctaatcgggccggcccggagcacggcacggcccgtaatgcctgtacacttgatggcacgggtggagccgggcccgtgtctgcacggctctatggctagtgtcgcgcctaggctgagtgcggagcac

SEQ ID NO: 13103 - DNA, 429 bp, Zea mays
  unsure (1)..(429): unsure at all n locations
agcttctaaagggagagcacattntaggactaacaaatgttcattttgagaaagacagggtttgtagcgcatgtcaagcaggaaagcaagttggagtccatcatccacacaagaacatcatgacgactggtaggccgctcgagctactccacatggatttattcggcccgatagcttacataagcatcgacgggagtaagtactgtcttgttattgtggatgattattctcgcttcacttgggtattctttttgcaggaaaaatcacaaacccaagagaccttaaaaggattcttaagacaggctcaaaacgagttcggattaaggatcaaaaagatatgaagcgataatgggatggagttcaagaattcacanaatgaaggctttcttgaggaagagggcatcaagcatgagttctcttcttcctaca

SEQ ID NO: 13104 - DNA, 405 bp, Zea mays
  unsure (1)..(405): unsure at all n locations
tatgtccgatgatctcctaggcagccgtcggacataatgaagtcgtctgacttgagcgttttactgtagtgatggctaagtttcaggcttgttaggtaactcgaataaatggcgagggaaggggaccgcggaccgtgctatatatggccgtggagtcgagttcgaggggatgaagttagttacgccagcggaaatcgtggcggatcccaattaacaaccatggctacngcggctgtgaacggaggagagtgaggagaaggtgttgacttggtgaccccacctgtcatttacatatgcgcgcgcggcgtgggcagactganggggtggccgtgattattccaccctacgctcctncgtagaaaatgcaagctcgcttgatttcccccgacactccacgctcaatct

SEQ ID NO: 13105 - DNA, 381 bp, Zea mays
ggcttagagatagagtcatcgcttgtagacacactcagaagtgaagaagccgttattcttaatttctagaggcggagaatctcgaacatttatgaatatatcatgttcctcataaagaatatcttcttgcttttctagaagcctatctttttcattaagagcatgaatcaattcatttgtttatctaccttagatctatctcatcttttacatagatcactataatccacttcatcgtcagaagattcctcatcactaaaagaagtgtacttaggtgtatctcatgtacgtaccttcttctcattcgccataatgcacgcgtggtgatcgtggggaagcgaatgacttgttgatgctgaggcactagccttcatcatcgag

SEQ ID NO: 13106 - DNA, 395 bp, Zea mays
  unsure (1)..(395): unsure at all n locations
tgtgagattaataatatgtattacataagctcatctctattctttatttaggtcaccataaaataaatcgacctatgattatgcacttgtcaataacacttacgaaaataataatctattctcaaataaagttaatgtatgccatagtttatgttatactctgaattcattataccttatgtagtattgtgtctttttaagatgttctccaatgtttgtacatgttcggtgtgatgatcatttgcactttccaaatgtattgaatgcatggtcgctntatatatacaacgagcagtccgaagttcctgagtgtgttgttggagacctccctgagcagcaacctggtgaaggcaaagtgtctctgacctatngtgtctacatactttatattcact

SEQ ID NO: 13107 - DNA, 399 bp, Zea mays
  unsure (1)..(399): unsure at all n locations
agcttcaataaacaatctggaccctctccatcacgctacagtcagcagagtcagagctcccatcaggcaccctccgttgcaagcaaccagccgccagcaaacgcctgttggcactgcggagaccccagtcacttcaagaacaactgccctcagttgaaggcacccggaccaacttactccaactcggtgaatggccccaagattccatcggcacctacctccaaggcactcccttcaaacagccagcagagcaggactcagtatcagggtagagcccgggtcaaccacgtcgacgctcaagaagctcagcaagccccgggagtagtgctcggtgagttccttgttgaatttactcccgcttctgtgctttntgattcaggagcatcccattcttttata

SEQ ID NO: 13108 - DNA, 397 bp, Zea mays
  unsure (1)..(397): unsure at all n locations
agcacccgttccccacccgattgcccaccagctcgcctgaatttcgattgcccccaaatcggttctccgccgccgtagaagtgaactcaccgtcgccagcccaactccggtcagtgcccgcccttttcttcctcgtttgagcattctcatgcctctgtgatgctccccgacccctttaattgaactagaccggtgcccatcgccgggaacacaaccttattgccgctntgcttacggccaccgtggccggagctccctagtccaccaatagtgcaattaagttggggaaaacgttcatggggactcgganttggtctcagccgaagaatagcactggtcttagccccaatcggccggcgtagttgctcgccggagcgcgggcgtgcttgaacgccgt

SEQ ID NO: 13109 - DNA, 441 bp, Zea mays
  unsure (1)..(441): unsure at all n locations
agcttcataaaaacatcaatgcttcataaacaatagatctcttcttccacatcagagctgatgaagctgtaattctcagcttactttgtgccttagcaccttttcatttttgtaaagcattctccgaagattggcttcgtttccaattcatgtcattggtgtgatatgatgtatgatgtgatgctatacgatatgatgcaaagaatgatgttaatgccaaagacacacacccacattgaaacacacaatctctacatccccttaggaacaatcaaaatctctttgccgtttatttttcggcttcaccgcttattttttggtgtaagttctgcatccccttaggaacgtcttttgaacatcttcaccttctattttggcggtattnttcgcattgactnttcgcgtgtcgccttatatttcggcggtatttggctctacatt

SEQ ID NO: 13110 - DNA, 488 bp, Zea mays
  unsure (1)..(488): unsure at all n locations
tcctcccttctttggcgaaagtcattgtcagcccggatgtactcatccattttctgaagagcttcttcagagtctggggggtttcctggcgaagtattgagtcgtaggcccaggtcgaagacctttgatcatggcctcaatgacgatttcattgggcaccgtgggcgcttgtgctctcagacacaagaaccttcggacatatgcctgaaggtactcctcatggtcttgagtgcactggaacaaagcctgagcagtgactggcttcgtctgaaacccttgaaagctagtgaccagcatgtccttaatcttctgccatgatngtgatgtccctggccagagagaagagtaccatgtctgggccacactttggactgccatgacgaaggacttcgccatgactgcngtattgccccgtacgaagatataantgcttcgtagctcatcaggaactgcttcngatctgagtgcccatcatacatggggagctg

SEQ ID NO: 13111 - DNA, 443 bp, Zea mays
  unsure (1)..(443): unsure at all n locations
agcttatagccacaaaaactggttaagtgttagcacaataaatgccaagtggctagaaaggagtctcaacaaaacacaataccacaagagattaatcacagagatgacacagtggtttatcccgtggttcggccaagaccaacgcttgcctactccacgttgtggcgtcccaacggatgagggttgcaatcaacccctctcaagcggtccaaagacccacttgaataccacggtgttttgcttgctttttctcaatcccgtttgcgaggaatctccacaacttggagcctctcgcccttacaattgaagttcacaacaaacacagagcaaagggggaatgagcaacgcacacaagacttcaaaagatcagagcaactacacgcacacaagtcgcaacaagagctcgcaacacaactcanagagttcgcaactcaacaagagct

SEQ ID NO: 13112 - DNA, 500 bp, Zea mays
  unsure (1)..(500): unsure at all n locations
ngtacagggagagcacattctaggattaacanatgttcattntgagatatacaggatttgagcgctcgccaagcagggaagcaagttggcactcatcatccacacaagaacataatgacaaccgacatgccactggagctcctacacatggatctattcggcccgattgcttacataagcatcaacgggagtaagtactgtctagttattgtggatgattattctcgcttcacttgggtgttctttttgcaggagaaatctaatacccaagagaccttaaagggattcttgagacgggctcaaaatgagttcggcttaaggatcaagagaattagaagcgacaactggacggagttcaagaactcacaaattgaaggcttccttgaggaggatggcatcaagcatgagttctcttctcctacaccccacaacanaatggtgtagtggagaagaagaatagaactcttttggacatggcaagaaccatgcttgatgagtac

SEQ ID NO: 13113 - DNA, 437 bp, Zea mays
  unsure (1)..(437): unsure at all n locations
agcttgtgtaccaatacaccaagaagagggcgagcggtcccatatgccccgtcaccgggaagaagatccagggggtgagtgattacttgttagggcagctctactctgcttttgtcttcactgcggatgagtgtagtctcgggtgcttggtacaatattgaagtaattggtgtgaattagtagatcttatccattggttgcttaaatggtttacagtgtattttgtcctgtgatggtatatcagtatatggattgctgtggtactggcaatttgctgccacattgtggtatatgtctattggacgatgtgtattgctgtagtttacaaaatagtgttattgcttacctcatactttattcagagtgacacattattgagctgtcaagtaatcttttctgctgtttgcttcagattcatcattntgtgtatatntaaa

SEQ ID NO: 13114 - DNA, 510 bp, Zea mays
  unsure (1)..(510): unsure at all n locations
gcttgcatgacananacgtgaatgccgtanatctgactcatgagaaatattaacagaattcatcgtttattacacacatgatgcagtgataagcggaacaagcctccgcagtcatatcctttatcaacaaaagtaccatgtttcgacacaacacatttattagactcaagagcaactttgtatccatctcgacatagcatagaagcgctaacgagattcttcttgatagagggcacatgctgcacgctcttcaatggcaccgtctttcccgaagtaaacttcacaatgaccgtaccaacaccaagaacatgagcacgcgacccatatnccattaacaaggcgccagacctcccgacctgataggaagtgaacatagaggcatcagcacacacatgaatgtttgcaccactgtccatccaccactcaggtgaattacagactgagagaacaaatggtcaagaattaccatacccagatgctcctcttcagttcagtggtacaacatgagct

SEQ ID NO: 13115 - DNA, 434 bp, Zea mays
  unsure (1)..(434): unsure at all n locations
agctngaaggaaaaaagaaggaaggggagcttgttcaattgccttaccattacaaattcaagaaacatttcaaagtgccttgccaagaatggctggacacaatcgaagtaatgtgcaatgaaatacttggcaattactctaaaaaagaagatcggttgatgaccgcagccttcggcacccgtccgaagcgaaggttaaaccgagtaatggatgcactaggctttgaatatcctgattacgagcggctagacaagggtgccgaaggacaaaaaaggaaaagagtggctgatgttctgaataaagacgatgaagaacaaccaaagaagaaaaagctggaacctgaaccaaaaacgggtgtttcaaagaagagaaaagcttcgactccgaagcaaaaagcaattgacgaagaagaaaaactgttgatcaccctctac

SEQ ID NO: 13116 - DNA, 494 bp, Zea mays
  unsure (1)..(494): unsure at all n locations
tctgaagctgacaagcttgaagttggtctgttcacaatgctcccagtgtgcagctagccttcaaaaaagccgtagttgtgcctcgagaagctacccaggcgcagaagtcggcgtgcccaccaataacttcgtcaagggcgtcaacttcgccttcaatatattctaatgttcttggaagattctcagctgaagttgtaaatttcgaagagctagctccgacagagtgaaacacatccttcagccgctgcacacatcggctgccgaagcttaagcatttctcctgaagttctttgaaggatttctgcaaatttgagtatttatccacttcagctttcaggcttgcttcaaaatatntcttttcttgctcgaatntttctgattgtcngagcaactcattctttaatttgtcattntcagtttggacttcagccaaagagccctccatggttngaataacanaatccttcttttctaatgcaccttcgtgctctttg

SEQ ID NO: 13117 - DNA, 408 bp, Zea mays
agcttcagctccatctatgttatgtattgcttttgagtcagtccagtttccttcggcccttctggcagcttcctgacttccatgaatagcgatgggtccttgatccgaaggtatcttcatgcaaaggtaagcaggatgaagaattgcttcgaaagcattgagggtgccacgaccaataattgcattgtaagggtattccatgtcaacaatgtcaaacacaacttgctcagttctagtgttgttgatgaatccgaaggtcactggcatggtgatcttgcccagtgctacaatctgtcttcctccgaagccacagagagggtgtgtagcatcatgaatcttatcttctggctcttgcatttgtctgaaggccttagcaaatatgatatcagctgcactgcctgtatcaac

SEQ ID NO: 13118 - DNA, 476 bp, Zea mays
  unsure (1)..(476): unsure at all n locations
actcagcttcgctgacagcaanaaggggaaccgacctaaagatgaaaatgcaccttagacctcgagaattactatagagttattagcaaatgtaaagggtatgaatgtaattctacatgggctgcgtcccttgcctataaatagatgaacagtactcccatactgttcacgctgacttggcattcgctttttgtgcatcacgcctgtacccttactttccgtcaaaccgaaggtacatttataatttgttattgtggatatggtaatacaaataaaaataagttgatgataatgtttatattgttttttgtattttgtacatgaatcattcctcgtcatttattgtgcttacgaaggtcttttccttcacaaccttcgtccgaaattcattatatccgaagggaaataatgtcttgaaggacgaaggactttaacatttaacaatcttcatgttgccttgntcttaactcttagca

SEQ ID NO: 13119 - DNA, 416 bp, Zea mays
  unsure (1)..(416): unsure at all n locations
agctntgttggccaatcaacccttaataaacaaataaaatgtatttgtgagtttgagaaaacagaccaatcattcaacttatataggtaggaaagaaaaagaacacaaaccttctcatcgaagcaatagcacgaagagcagggcccacacctagaattcttgtccagaatttctgtataattgattgaccaacctttagtgattcttatacaattaatccttaaattaataatatgaaaatggagaaacatttatctgagagatacattactggctggcttcaaaaacctgatgtaactcttgctggatttctcanaaacaaattgaacccgcanaaatggctcggtgtccacctgtaattgtcttttctggtntgcaaccatttcctgttgcagtcattttcactctggaagaat

SEQ ID NO: 13120 - DNA, 460 bp, Zea mays
  unsure (1)..(460): unsure at all n locations
tctcagcttacgggctactggcggagctagccgaagcactggttgtgctgtatggtggctgagtgggctggccacggcggccgtagctctggcggcaatgacgggcggaaatgagctcgccggagctaatgaacggtggctggccggtgagggtgagtgcggngcgaaaagaggtgcgcccggngaggctttatatgcgcgggcgggcacggccgatggcgtgggcgcgcggcggacttgaccggacgccggggcgagcgcgcgcgcgggttgggcgagctctggcgtgccgaccagggtcgaacacgtgtgcccgtgcgttctgcccaagctctggcgcgtgtggtcgctcatccgagtctgctctcgccttggtcagtgcacaaaacctcttctccttcctacaagctaccattcttgtgtggaggtcatangattttgctactggttgagagatatg

SEQ ID NO: 13121 - DNA, 425 bp, Zea mays
  unsure (1)..(425): unsure at all n locations
acagtgttctgcgatggttcctggggaactttcggggcaggtgcggctgctgtcttagttgcaccttctaaagtcaaaacatgctatgcagtaaaacttgattttagctgcacaaataatattgctgaatacgaagctttgcttttggggcttcggaagttaaaggcaatggggataagaagggcggtccttaaaactgattcccaagtgatttctgatcatgttgacaaaagttgcagggcaagagacccgaagcttgagaaatacctggacacagttcgaaggcttgaagcttcttttgaagggttttctgtcaaaaatattccacgaggagaaaacgagcatgctgatctgttagccaagtcagcagcacaggggctgcctctaccttcagaagtattctntgagacaataagagcaccttc

SEQ ID NO: 13122 - DNA, 476 bp, Zea mays
  unsure (1)..(476): unsure at all n locations
tctanagggagaacacattntaggactaaccaatggttcatttgagaaagacaggattgtagcgcatgtcaagccgggaagcaagttggcatccatcatccacacaaaaatattatgactaccgacaggccactggagctcctacacatggacttattcggcccgatcgcttacataagcatcgacggtagcaagtattgtcttgtaattgtggatgactattctcgcttcacttgggtgttctttttacaggataaatcttatacccaagagaccttanaaggattcttgagacgggctcaaaatgagttcggcttgaggatcaagaagattagaagcgacaacgggacggagttcaagaactctcaaatngaaggctntcttgaggaggagggcatcaagcatgaagttctcttctcctacactccacaacanaatggtgtagtggagaggaagaatcgaactctattggacat

SEQ ID NO: 13123 - DNA, 388 bp, Zea mays
agcttgcttagctagccgccatggcctccctcgccgccgtctccgtgaagcccgtggccatcaagggtctcgccggcagctccatctccggaaggaagctcgccgtcgccaggccgtcggcccgctccatccgcaggccccgcgcagccgccgtggtggccaagtacggcgacaagagcgtctactttgacctcgacgacatcggcaacaccaccggacagtgggacctctacggctctgacgcgccctcgccctacaacccgctacaggtgccatgatgtttccaacccattcaattccctgcggtaactagacttgctagggtgatctgatctctctgctgcatgcgttcttcacgtcaccagagcaagttcttcgagacgttcgc

SEQ ID NO: 13124 - DNA, 462 bp, Zea mays
  unsure (1)..(462): unsure at all n locations
tatgaagattcttcaacccaacatgagctagtcggcggtgccatagccaacccatgtagtcttagcaattaagcaagtgtcgagttcagctctatcaaaatctaccaaatatagctgaccctctaacactcccttaaatgctattgaatcatcacttcttctaaagacagtgacacctacatcagtgaatagacagttgtagcccatttgacataattgagatacgaaaagcaaattgtaatctaatgaatcaacgagaaaaacatttgaaatggaatggtcaggtgaaatagcaattttacccaagcctttgaccaaaccttgatttccatccccgaatgtgatcgctctttgnggatcttgngttttctcatatgaggagaacnnatctttctcccctgtcatatggtttgtgcacccgctgtcgagtatccaacttgagcccccggatgcataaaccta

SEQ ID NO: 13125 - DNA, 393 bp, Zea mays
  unsure (1)..(393): unsure at all n locations
agcttgcgttattcttgtggaactgaatggattacggtcggtgatgcactgatgcaatgcaagtggctgctccatgctcaatcaacggtgtttgcaagataaccagcaaatcattgagtatcccaaatgacgattccaaggtcagggcgactgggggccatttgaggcccaaacatggcctgcatactgttgtcctaagtggtgatgtgctgcagcttttggaacttggaagacataaccagcagtttatcattggagtggtaccgaccaaagttgtttttttttaaaaaaaaaactgtagggataaccaactctacctaactttccctaaccatcgaattagctaagcgcttgtccggattctagggtccattntaaattttgagacacaaa

SEQ ID NO: 13126 - DNA, 375 bp, Zea mays
cataggtctattgaaagggaaatggagtcttccgcgaagaacaaggcttccactccgtaactcatgcttcgccatcactccgagcaactctctctttttaagggagaaatgagcatcaaggaaaaggacttcatccttgggggagagagtaaaagctcacacgcaaaaggacgttcgtcttggtataatcttaactcacttatttatgaccaaaggggaagattgacaccaagggctctaatgattcccgttttggcgaatcatgccacaaagggggagaaatgagcccaaagcataaggaccgcaccacctccaccatcatcaaaaacttagtgctcttcaaaagtctctatcatttggtatcctattatgttc

SEQ ID NO: 13127 - DNA, 398 bp, Zea mays
  unsure (1)..(398): unsure at all n locations
agcttcaataagcaatctggaccctctccatcgcgctacagtcagcagagtcaaagctcccatcaggcaccctccgttgcaagcaaccagccgccagcaaacgcctgttggcactacggggaccccagtcacttcaagaacaactgccctcagttgaaggcaccaggaccaacctactccaactcggtgagtggccccaagattccatcggcacctacctccaaggcgcttccttccaacagccagcagagcaggactcagtaccagggcagggcccgggtcaaccacgtcgacgctcaggaagcccagcaagccccgggagtactgctcggtgagttccttgttgaatttactcccgcttctgtgctttttgattcgggagcantccattcttttat

SEQ ID NO: 13128 - DNA, 498 bp, Zea mays
  unsure (1)..(498): unsure at all n locations
actcagcttgtgccctaaaaattgttaactntgttaagggcatagctcccatatattgtcaggataacgagggttacattttatatcctgctggttatcccgagcacaaaattaggagaattcattctaggaagtctcactttggctctcatcatgcttttatgtataagagtgaggcatctagttctaggcaatccactcatgttaaattgcctaaaaagaaaactcctactgcatcaaatgatcataacatttcatttaagacttttgatgcttcatatgttttaactaacaaatcaggcaaaatagttgccaaatatgttggggccaaacataagggctcaaagacttgtgtttgggtacccaaggtgctngtttctaatgtcaaaggacccaagaccgtttgggtacctaagaacaaggcctaaacttantttgtanggttatgcattcgagggctcaagttggatcattgatagcgggtgcacanaccacatg

SEQ ID NO: 13129 - DNA, 417 bp, Zea mays
agcttaatgcccctaagaaattgtctaactttgttaacggcaaagctctcatggctcaggataacgagggttacattttataccctgccggttatcccgagcacaaaattaggagaattcattctagaaaatctcactctggctctcatcatgcttttatgtataagagtgaggcatctagttctatgcaatccacacatgttaaattgcctaaaaataaatctcctattgcatcgaatgaacataacatttcatttaagacttttgatgcatcatatgttttaactaacaaatcaggcaaaatacttgccaaatatgttgggggcaaacacaaggggccaaagacttgtgtttgggtacccaacgtgcttgtttctaatgtcaaaggacccaagactcgttgggtacctaagaaca

SEQ ID NO: 13130 - DNA, 413 bp, Zea mays
  unsure (1)..(413): unsure at all n locations
tgtgaaggttcttcatccctacatgtgctaagcggcgatgcctcagccacccatgctagtcttagcaattaaacatgcatctagatcggcctcctcttttgcaaaatcaactaagtagagtttgccgtctaatacacccttaaaagctagtgaaccatcacttcttctaaagacaaacacatctacatttgtgaatagacaattatatcccatattgcataattgactaacagataacaaattatatccaagagactcaactaaaaacacattagatatagagtgctcatttgatattgcaattttgcctaatcctttcaccttgccttgattcccatcaccgaatataatngaatcttggggatccttgttcttgacgtaggagggaaacatctttcttctccccgtcatgt

SEQ ID NO: 13131 - DNA, 412 bp, Zea mays
agcttgctcaacagcatactctgcacgaaaacaaccttcgtcagacatgtcttcattattaaaaacaataaaagtcaagggaaaagtagttcaccttgaaattggaataaaataaactaccaacgatatgttgtcgtcggtagcggctaatgtccgtttctagcttcggaaagccgatactctttgacagagtaccgataaccttagctccagtttgatcccggatacagtctaatctttcatcatcaatacctccgaagaggagtgctcctggtttatatccgcaagatttggcatactctttaagctcttctatttcggttttagacaatttttctccaactaaattttgaaacatgaaggcctcgtcctctgaagcttcgtcagcaatttccttttctttccccgacac

SEQ ID NO: 13132 - DNA, 391 bp, Zea mays
tcactagaatcttgaggtaactgtgaacctcgatcagacacgatcttcttggtacttcgtgtaaacacacaatccgagccatgtataaccttgccagctgagaacctttataagtagtcttgaccggaatgaagtgtgccactttggtcagaatatctacaatcacccatatagcatcatatcctttcagggtgcgaggcaatccagtaatgaaatccatgccaatatcttcccacttccattcgagtatcttcaacgggtgcaatagtctagctggtctttggtgttcggccttgactctttgacacacatcacacatagccacatgtgtagccacatctctcttcaatccataccaccagtatttctacttcaaatcctggtacatctt

SEQ ID NO: 13133 - DNA, 436 bp, Zea mays
gcttgccttcgcttcagtttatcatccgctatccaacggggtcgtggaacgcgccaatgggaaaatcttcacagctgtcaagaagatgctccttgatgaaaaaaagggcagatggactgatttgctacctgaggcagtctggcactgaacactactgagtgcagggcgactgggtttactcccttccgccttctatacggatcggaggccatgaccccgcaagaaataaagcacgggtccccgcgaatagttccgtcagccgtccccgacgtggacgagccaacttcaaaggacctcattgacggagaccgagtcttcgccctacaggccctaaacaaataccaagcccagaccaaagcatggcgcgaccacacagtcatcccgagggagttcagcgaaggggacctcgtactcgttcgaacagctcggatggagt

SEQ ID NO: 13134 - DNA, 479 bp, Zea mays
tctggagtgtctactgaagccattgttgctgaagcttcaaagcaacaacctgaagctgagctgacgctgggccttcagagcccaccaaggaacaacctttggaaaccaaagaaaaaactacaaaggcagctttggaagccgaaaaaatgtcagagccaattgtggttgaagaaactgacactgctgcccccgaagcatcttcctccatacgcgattacattgtgcgacatgcttcggggaagaaattatctgaagaatagatttatgaagctgatcactatgccagagaattaaaatattcgaagggggcactagtgttcaatgggacagacgaagatgacttcctatactgccttcctgataataagaatatctgtctgcgggagatggcacgatatggggtttcaaactgaactggacttgcctatgacaaggacgactgcaatagctccatatatagctaacgatgaaacattatt

SEQ ID NO: 13135 - DNA, 439 bp, Zea mays
agcttgcaacaggccttctttttctccatagcatgaaccttactggaacactaccccacttaaaaagaatgagggtagaactcttgaatcctgtggatttgatctccttgaagtacctcataacaagggtgttacggggccttcttctgctgttgctgcttgatcaggctaccgagaaataactgacacagggttgattttggaagaaccttcttctcatcttctcttcgctatcttcttttcactgaccctttctttctctttgctcttcccactggaggattctatcaaagagtattaccatcatacagaggaggaaaccaaagactatgaaccatgtacaacagtcttcaacccaagaatcaccaagcattgtgatcttatgggtgagggagtgggaaaatggagttgcttgcaatttggcagaggggattttatc

SEQ ID NO: 13136 - DNA, 501 bp, Zea mays
  unsure (1)..(501): unsure at all n locations
tctcctggacaagtgctgcacttaccgctgagtgcgaagctgctacatataataataaaaagcccctggcgtaggtggagttagtgctgttagatctatcaaatactgcttcagctcttcgaaggccttctgctggattggtccccattgaaagacttcggctgacttcagcacttcgaagaatggtaagtttctctctgctgatctggatatgaatctattgagagatgccaaccttcctgtcaatctttgagcccccttttttgtagttggtggctccatccgaagtatagcttcaatcttacttggattagcttcaattccctttgttgaaaccaagcatcctagaaatttccccttctttactccgaagacgccattttctggattcaactntaagccagcttgtctgaaactggcgaaggtctcctgcaggtcagcaatatgattcttctgctttcgtgcttttacaatgatgtcatcaatataaagtagcacatt

SEQ ID NO: 13137 - DNA, 436 bp, Zea mays
  unsure (1)..(436): unsure at all n locations
agcttcttcttcattctgatgaanaccaaaccctttgaccacttcatcaaaacgaatgttccaactccgagatgcttgcttcaacccataaatggatttctgaagtttgcatatctttccagcattgatcggatcaacaaaaccctcgggctgtatcatatacacgtcctcatcaaggtttccattaagggaagctgttttgacatccatctgccatatctcataatcgaaatatgcggcaatagctagaattatccgaatagatttaagcatcgctactggcgagaatgtctcatcatagtcaactccttgaacttgtcgaaaaccctttgcaacaagtcgagccttatagatgttaacatttccatccatgtctttcttcttatagatccatttgtactctatgggtctaacaccatcaggcgggtccaccaag

SEQ ID NO: 13138 - DNA, 496 bp, Zea mays
  unsure (1)..(496): unsure at all n locations
ggctcatcttctttcttcatccaaaattggtgatagccggagtagtatttcaatgactcatgagttccgaagaggctgctgcatcaaanagggagtctattcttggtaaaggaaactcgtccttcggacatgccttgttgagatctgtcaaatcaatacacattctccatttcccattatccttcttcaccataacagtgttggctagacactctaggtatgttacttctctgataacaccagcactgagaagtctctttacttcattccgagcaccttcggttntatcctcagacattttccgaagtctttacttccttggcctaaaagatggatccacattgagagaatgttcaatgacatctctgttaacaccacagagatcattagctgtccaaacgaagacatctttgtngttgaacaagaatcttagcagagtcttttctcgttcattagataactgagatccgagcagtaccctttgatctgctatatc

SEQ ID NO: 13139 - DNA, 440 bp, Zea mays
  unsure (1)..(440): unsure at all n locations
agcttctccttgtcgtcatcaaccttgacatagaaccactccgacttccagcctgctgcccatttactccggtagctgattacaggaaactttgtggttttccgataggcgaaattatagcaaccaaaattgtcatgcaatccatcttttctagccttcgtctgatagtgcagttcgtgaactcggcaaaagctgtctacaaacggctccaccgcttggcttcggagagcccagatataaacactaagtctaacaatagcgttaggagtcaactgatgaaaatagataccgaacctcttcagtacctctgcaataatcccatgtagggggaatcttaatccagcctttagaaagcttttgaaaataacaatttcatccttctccggctntggggtagtctcttctcccccgaagcgtaatagcttcttctgattttcatt

SEQ ID NO: 13140 - DNA, 443 bp, Zea mays
  unsure (1)..(443): unsure at all n locations
gtcgtgttgcttctgctcacctgcaacccctgcgtggagtatgtatgccattgaatgctcctgtcccctgtggacttcngctgagtcttgtcctaggtttgtctttcttacccgaggcgggctcgggcgaggcggagactgctgttctggggggaagggacctcgtctgggacgtggattctctcccaagaacacaccctatccgagggcaggctcgggtgaggcggngttgtgatgacccctgagaggggccttgggtgaagcacgacttatgatccttcgccctanggtaatgtgccttgattgtagtctangggttaagcatgtattanggggtaatctatgtacccctaattatgatacccgacagtagcccctgagccttccaaggaagtgttntgatactttgttggaggctnttctgttcatcgtgcgggtatgat

SEQ ID NO: 13141 - DNA, 434 bp, Zea mays
  unsure (1)..(434): unsure at all n locations
agcttctcagatgatagtttctgttgtacctctaatacttgtaagcggtttgcatgaacttcagactggatttggctatatttttcaagttgttcaacatctattgcactttcccttgactttccttcttttttagaatctaatgccattttttgcatgtgggattttcatcgaacaggtggtaaccaaaggggagtatcacttctagggtgtgcacatgctacttggcaaggagataagctcagatcgcgtacgatatggagaacacaaccaaggaggaagctgctacttgccttgctacgtaccaggctgctggatccgttgcttcacttcgtacccatggaggagttgtcggtgaagaaattgcatgtccactcgtgaagttngggatgctgctgaaggcttggctcccagcgatggatgaagctgtgcta

SEQ ID NO: 13142 - DNA, 441 bp, Zea mays
  unsure (1)..(441): unsure at all n locations
ggcttcagccgaggggtcttttgtatctccaatagataaggtatctttggtttatgccaagctttcacgtggtcacagcctagtttctccaaaatagccacgattcccctggcacctgagaaggcgcagacatccccgcgaccactcaaaatttctaaaaggcttcaacttcgttgctgatccaatcaattgggccttcaggatcgccccttacgaagttgtcctcgctagagaatgcgccaacattggcgaagctagaatttatttgttgcacacactctatnggattttcttaacatttctcatttgaagaccgaagttctacaactgttttctcccaactaattttccaataattactggcgtctcggtccgcttcggcaattgcacactttaacttcgcttcaaccagctgtttctgaagatcttcaatttcgcact

SEQ ID NO: 13143 - DNA, 434 bp, Zea mays
  unsure (1)..(434): unsure at all n locations
agctngngaagatacattactgttaactgatatagaatgtgaagtctaggatgtgctcgtcttgtggaaggaacatgatttcaataatcagcgaaaataaaacacgtcaattagtccttgtagatgagctaataataggccaggtaagatgaaaccaggttaaggtccagtttttgctcctttagatatcgcctacagacaccgatttatagtatacgcaattcttacgaacaaactcatttttggggtgggggtgggggcttaaagttggactctattgaagggcaagagagaaattagacgcgaacacgacgagcttgacggaatcttacgaacagtgccgcatcgggtgcagaacaacggtcaggtaggctagttgcgggtagtccatagcagaaaccaaaccggagggagtaccaagaagccgaacagca

SEQ ID NO: 13144 - DNA, 458 bp, Zea mays
  unsure (1)..(458): unsure at all n locations
ctatntacttcctacatgcntttaatgtcttccttttctgtggttgatgccaaaggggagaagtttanggaccaaagcaatataaaatgtatcaaacaccaaacaccaccaaattaaaatttttaaatctgcaagtgtctttgcaagtgcttttggttatttggtccaaaatgggaagtaagtgaattatggagttagggggaggcttaagtccataatatcacattgtggggacaaacatgcatcctagtaagtagattgcatatttttattcaaatacttgtattatttgcttgctttggttgtgttgtcatcaatcaccaaaaagggggagattgtaggaaaatggaccccgtgctatttggctaattgagttttggtgtttgatgattaacacaatctgtggactaatggcgttgctagtggttataattatagttcacaggatgcgatgagga

SEQ ID NO: 13145 - DNA, 422 bp, Zea mays
  unsure (1)..(422): unsure at all n locations
agcttcatgaagatgttctctgaagctgtatttccgaagatcaatagtgtatctgcttgcaaattagcatgattttcccctttcaaaacatttttccgaagatcgatgtcatgtccccttcttgtgccatatgcaacatgatgtatgatgcttatgctatgcgaaatgatgcgatgatgttatgctgtgtaagatggtgtttatttcgaagatacacacacattcctgcgataaaacacatagtctcagcattgtcttataagcctcccttaggagcttcttcgctttttacttcagcggaatcagcgtttatttttcgctgtaagcctcccttaggagcttcttcgccttttactttcagcggtattcgcgttgacttttcgcgcttcgccttttacttangcggtatcagcgttgacttt

SEQ ID NO: 13146 - DNA, 405 bp, Zea mays
  unsure (1)..(405): unsure at all n locations
tctgactngtgggcccgtctggatgtccggtgcacacctgacatctactgttcctgtccggtgcgccagtatgggcgcgcctgacttctgcgcgcgctgcgcgcgcatttaatgcgccgcaggtagccattggcgcggagaaagtcgttgctccggagttgcacaggacagtccggtgcacaccggacatgtccagtgaattatagcggactagccgttggggattcccgaagctggcgagttcctgaggtcgctcttccttggcgcaccggacactgtccggtgtacaccggacagtccggtgaattatagcgcgccggcctgagaaattcccgaaggtggcgagttggcgttggagtcctctggtgcaccggacatgttcngtggtgcacctgacactggtct

SEQ ID NO: 13147 - DNA, 432 bp, Zea mays
agcttcctagaggacgggcatgtcagccaccaaagcctatgcaacatggactgacggttcagggggagcagcgccaagctgcacccctatagccacggcgcatgggttgaagcgtacgcgaaacccgccttcgtcattatcgttgtgtccttcattgacttatgtaggacatgagtgctaatctaaaagtctgaaagaagcaaaggcaaaggacgaaagcccacagcaaaaacacaagaccgacgacccaccgagaggagcgctttcggtaggtcacccttggcgcagcagcctggtcggctcctccctcgaagcgctcgaagacggcaacctccatgcggcgtgttattaacacctcagacgtagcggggccatggccagtacctccctcgggccgtcggcactagagctggcctgtgcatcaccatgacc

SEQ ID NO: 13148 - DNA, 383 bp, Zea mays
  unsure (1)..(383): unsure at all n locations
tgaagccatggtaagtagcatatgccaatgatatacgaattgtctcatgtctatcacgggtgcataggtttcaccgaaatccaaaccttcgacttgggagtatcccttggccacaagtcgagctttgttccttgtcaccacaccatgctcatcttgcttgttgcggaagacccatttggttcctacaacattntgattaggacgtggaactaaatgccatacctcattcctagtgaagttgttgagctcctcttgcatcgccaccacccaatccgaatcttgaagtgcttcctctaaactgtgtggctcaatagaggaaacaaaagagtaatgctcacaanaatgtgcaacacgagatctagtagttacccccttatgaatgt

SEQ ID NO: 13149 - DNA, 427 bp, Zea mays
  unsure (1)..(427): unsure at all n locations
agcttctactcagggattggaatttatagtgcgccacacggtaggaaaaaagctgttagaggagcaggttgccaaagctaggcaatatgctaaggatctgaagtatcccccaggatccctggtgtttaatggtactaacgaagacgattttttgtactgccttccagacaacaaggaaatatatgtttgctaggagatggcagaaaatataggattctcgaagctagagcttggcctgtctgccatgtcgaaggatgaccttgcagacagccttgcctataacagtctgaaggtgaggatgttttagcttgtaagcagattatttntgtatcttttcttattattgtatgttgatccttcattntttgtagggcttaatcctaagcaaggctttaagggcacaaaagaaagtggaagatgaaagctg

SEQ ID NO: 13150 - DNA, 418 bp, Zea mays
  unsure (1)..(418): unsure at all n locations
tcaggccgtcatacttcagctntgtcatatttcagcttcgttgtacttcagcttcgtcatcctgcacatattaaagaacagaataagaaaggtgcaaatgtcaaggagaaggtaaaagtaataaatataagtttctcactggcttaaggtggcttcgagcttcgtcaccagccatttttcgcccgccatttacccaaatttgggtcataaatctatttccgatgcttcgggctaagcttgggatatcaaccaaatctgttgctgacaagctgaagtttggcctattcacaatctttccgtgcgtacagccagccttcagaaaagcggtagctgtgcctcgagaagctaccagggcgcagaagtcggcatgcccaccaataacttcgttaagagcgtcaacctcgccttcaatatgttc

SEQ ID NO: 13151 - DNA, 372 bp, Zea mays
  unsure (1)..(372): unsure at all n locations
ctaaatggagaacacattttgggactaacaaatgttcattttgagaaagatatgatttgtatcgcatgtcaagcaggaaagcaagttggtgttcattatccacactaagaaacatcattgactaactgacangggccacttgagcctacttcaccatggatctattcgacccgattgcttacatatacatcagcgggagtaagtattgtctagttattgtggatgaatattcctccttcacttgggtgttctttttgaggaaaaatcttcaacccagagaccttaaaggaattctcgagacgagctcaaaatgagttccgcttaaggatcaaaaatattagaagcgacaacgggacggagttcaagactcac

SEQ ID NO: 13152 - DNA, 408 bp, Zea mays
tcttcttaataccgcccagaccactgcaatatatatgaggaatatccacggttaatagttgatgatgtcacaacatagagaataggaagtgtaagtttctgtcagggaccaaactgtccgcgctaggggggcggattgtccacgccagggggccggactgtccgtgccatcctggcggacggtccgcgaccgtccaggggcgatttctagaaccctagccaccccattcgtccaatcatcgattcgacagagaataatcattcaaatccattcaaattttttcaccatattcacaatgagtaacacgagcaattccaccaatcaaaaatgtaattccactgcccaattctagatcagagagaaaaccctatgaatccccaaagttgaataaatcagacaaattccatg

SEQ ID NO: 13153 - DNA, 406 bp, Zea mays
caagcttggaattagaagttgatggttcaacacacatttctctgactccaaccaaacatttcccgatatcaggctgcagctgcaatccagaaaagattggatcctgatgctcccttgcagtagccggttcgtggatagcccaattccctgcagttattccttggctttcctggacactgtaggacgacgagcataccttagcatattgaacggctgctagctactacgatgttttttttatatagtgtgccagatgctacttttgtattgtatcggcagaattttgaattccagttattcagactcagttgtttgtttcccatgttcgaactaccatcgtcattcatcacatgcgtcgtgctcttctgttgcattatttttcgacctgccctaccggtcgtccccc

SEQ ID NO: 13154 - DNA, 415 bp, Zea mays
  unsure (1)..(415): unsure at all n locations
tggaagccaatgccatccttaatgcctgngcgctcccactatagagcatgcttctagcaaatttaattntttcattttctaagtcacactcattgattttagcactaagttgagctatgtgatcattttgttgtttaattaaactaggtgatcatggatagcatcaacattaatgtctctacatctagtacaaatagtaacatgctcaacgatagatgtagagggtttgcaagtatttaattcaacaatcttagcatgtaaaatgacattctcatctctaagattggaaatagaagtattgcaaacatctaaatctttagccttagntaattaattttcattntcaatcttaaggctagaaagagagggcattcatttttcaatcttagcaattagactagcattatcatttcta

SEQ ID NO: 13155 - DNA, 451 bp, Zea mays
  unsure (1)..(451): unsure at all n locations
catgcaagcttcaagtggaacactacacatttaatctggttacaatattaatctaatagataataggtgagcgaaccttaagttagattatctaaaatatatgacatgatgtataatgtcgttaacatgagtgtttataagcggtaaactatttattatcacgcgcagacgccgtgcgactgtacgaaacagcgcgcggtcggcacgtgatacaacgtgcacgacagcgtgcgaacagcacaaggacgcgcaaacgatgcaacacgtgaacaacgacaacaaatgattagataaaattatttaagttggtattagtcaagctaattaacatttatatntataaaagcacgaattaaagctatagacttgttcttgttaaatcgttattttaaataaccaacagctaaacaagaattgactaaatagcgcaagcgaccataatggatataat

SEQ ID NO: 13156 - DNA, 494 bp, Zea mays
  unsure (1)..(494): unsure at all n locations
ntatcanatggacgtgaagagtgccttcctcaatggaccaatcaaggaagaggtctatgtgagcaacctcccgactntgaagatagtgagtaccctaaccatgtgtataaactctctaaggcgctttatgggctcaagcaagccccaagagcatggtatgaatgccttagggatttccttatcactaatggcttcaaagtcggaaaggacgatcctacactcttcactaaaactcttaaaaatgacttgtttgtatgccaaatttatgttgatgatattatatttggatctactaacgagtctacatgtgaagaatntagtaggatcatgacacanaaattcgagatgtcaatgatggnggagttgaagtatttcttaagatttcaagtaaagcaactccaagagggcaccttcctaagccaaacgaagtatactcaagatattctaagcaagtntggaatgaaggatgccaaacccatcaagacacccatggg

SEQ ID NO: 13157 - DNA, 401 bp, Zea mays
ttatgttatcgcttccgcatttctttatctccgatgctctgtaatgtctgcaagacgggtgaaacgttcctggtcaggtaaggaaagataccgaacttgtcaagtgacttacgaacatctacagggtgtctgatgtctggtggacaacgacaaccgtaggtgggcctaattactagggagggttcgtcacacatgatgaccgcgtcaaaaaggtgcgccacgtcgttcaatttcgtatccttttcctcttcccctttctctctcttgctatagggaccgggaaaggggatactccgaaagggatccttctccgcgaaagaagtgggcctcgagccctcctactgatcagaggttcgaaggctggcccctcggaagggttcgacagccgcctcaggccactc

SEQ ID NO: 13158 - DNA, 397 bp, Zea mays
  unsure (1)..(397): unsure at all n locations
ntgagctaatgatcaaaggctcaaagaanatcaacgagcttgatggtccctccacatccaagcacaaccggtcgcattcaaggcgacagaagataagaaggaggaatctacatcaagtagaacacccatcgacgcctccaagctcgacaacgaggaaatggtgctcatcatcaagagcttccgccaaatcctcaagcaaaggagggggaaggattacaaatcccgctccaagaaagtttgctacaagtgtggtaagcccggtcattntattgcaaaatgtcccatttctagtgacaggggcgacgacaagaaggggagaagaaaggagaagaagagatactacaagaagaagggtggcgatgcccatgtgtgtcgcgaatgggactcggacgagagc

SEQ ID NO: 13159 - DNA, 433 bp, Zea mays
  unsure (1)..(433): unsure at all n locations
agcttctaaagggagagcacatangangactatcatatgttcattctgagaaagacaggatatgtatcgcatgccaagcaggaaagcaagtcgggactcatcatccacacaagaacatcatgactagtgacaggccactggagttcctacacatggacctattgcgcccgatcgcttacataagcatacgcgggagtaagcactgtctatttattgtggatgattattctcacttcacttgggtattctttttacaggagaaaactcaaacccaagagaccttaccgggattcttgagacggactcataatgagttcggcttaaggatcacgacaataatatgcgacaacgggacggagttcaagaactctcaaatcgaatgtttccttgacgacgagggcatcaagcatgagttctcttctcactacacacc

SEQ ID NO: 13160 - DNA, 443 bp, Zea mays
  unsure (1)..(443): unsure at all n locations
agcttcacacaacatggaaggtggatgtagagcaatngaacagaatactatacggtgaacaaaaacagacaccaaatgctaaaaagtatactaaactaaaataataaatcaacaaatctagatggcatgaagttaaaacaaaaagaaatattgcatcctaccatcaacaataagcaaaacaaatgagcacaagttctcgattaacatctagtaatacaaaattggcaatcaaatattattttatagcaaaagccaaaggacataaatagaacaatggccagaaagaacatgaaccaatgctaaacattttttctgatacaatactaataaaaagaaattgcaatcctattcaagaaacacaaaccttatacagcagcatttcattgtgttcatatcgctcattctctggaggataatcatcttccagtgttccctcgtatgcc

SEQ ID NO: 13161 - DNA, 514 bp, Zea mays
  unsure (1)..(514): unsure at all n locations
ctcagcttctaaggggagaacacatttgggactaagaaatgttcattttgagaaagacagggtttgagcgcatatcaagcggggaagcaagttggtgttcatcatccacacaagaacatcatgacaaccgacaggccgcttgagctactccacatggatctattcggcccgatcgcttacataagcatcggcgggactaagtattgtctagttattgtgatgattattctcgcttcacttgggtgttctttntgcaggaaaaatcacaaacccaagagaccttaaaaggattcttgagacgggctcaaaatgagttcagcttaaggataaaaaagattagaagcgacaatggaacggagttcaagaaactcaaaatgaaggctttcttgaggacgagggcatcaagcatgagttctcttctccctacacgccacaacaaaatggtgtagtggataggaagaatagaactctacttgacatggcgaggaccatgctngatgagtacaagacttca

SEQ ID NO: 13162 - DNA, 428 bp, Zea mays
  unsure (1)..(428): unsure at all n locations
agcttgtgaaggttcttcatccccacatgtgctaagcggcgatgccacagccagcccatgctagtcttagcaattaagcatgcatctagaccggcctcttcttttgcaaaatcaactaagtaaagcttgccgtctaatacacccttaaaggctagtgaaccatcacttcttctaaagacagacacatctacatttgtaaaaagacaattatatcccatattgcatagttgactaacagatagcaaattgtaaccaagagactcaactaaaaacacattggagatagagtgctcattagaaattgcaattttacctaacccttttaccttgccttgattcccatcaccgaatataatngaatcttgggaatccctattcttgacgtaggaggtgaacatcttcttctcccccgtcatatggtttgtgca

SEQ ID NO: 13163 - DNA, 464 bp, Zea mays
  unsure (1)..(464): unsure at all n locations
tacctccaaaatgagctcctctgaacaaagtctgaagacaataagagtggtattggatacaattcacttgtgcaaaagaaatcaacaaatcaaaataaggctaagcaaaatccaaatcccattaagtgttatgagtgtagaaaagaagaacactttgctcacaattgtaaagccacaccaccaactcccttgtcaaagcactcaagaccttttgcatttaatgctcactatgtgctccaacgaggactagaggagagtgtcgactcttcgatacctcaagaaaaatgggaggagtcttcttgtccctactttactttccgcatttattttgagcattntactttgtgtatttacttagatagtatntgcaataatgacttaagggtgttctctatttcatagcatttacttcttgatagtagttnggatgaaagtgggctcatgcttacgggttaatcttttat

SEQ ID NO: 13164 - DNA, 426 bp, Zea mays
ccggatcttaagcacctgggctgcacttagcttacgtagtctcgttattatcttagtaacaggagtttgtattcctggcattatgtttgtcatgatgaactatgttggctggatctttgtatgattgcaccagagtgtgggtatcccctgcattttggtttacctattatgtaatggagttagttatatagttgggaaaccctttttccactttcctcttttctgagaagctgtgtggtctgtgttggagatcagtgaagatgctcatctgttcagtgctgttgaagaattctattctctttccttatgctgcaagatttgccagatcagttctgatgtgtggttgcattctgcagatgtcagagaacaggcgcagaggaggaaggcgtgctcagcatgagcgagccgctccgcatgatgaggtgc

SEQ ID NO: 13165 - DNA, 493 bp, Zea mays
  unsure (1)..(493): unsure at all n locations
ctatcaaatggacgtgaaaagtgccttcctcaatggaccaatcatgaggaggttatgttgagcaacctcccggctttgaagatagtgagtaccctaaccatgtctataaactctctaaggcgctttatgggcttaagcaagccccaagagcatggtatgaatgcctaagagattttcttatcgctaatggcttcaaagtcggaaaagccgatcctactctctttactaaaactatngcaaatgatttgtttgtatgccaaatttatgttgatgatatcatatttgggtctactaacaaatctacttgtgaagagattagtaggataatggtataaaaattcgagatgtctatgatgggggagtngaagtattttctatgatttcaagtcaagcaactccaagagggcaccttcatcagccaaaccaagtatattcaagacatactcaccaagtntgggatgaaagatgcaagcccatcaaacacccatgggaa

SEQ ID NO: 13166 - DNA, 430 bp, Zea mays
  unsure (1)..(430): unsure at all n locations
gctgtgaacagtacaaattcagaagggagaaagcagcttcagcagaccagccgaagcctatgctcttatgtgaggacatagcagagcaaaaggtgctgttaggctctcagttatccgaaaagcaggaaaaaaccttgataaggtttttgttcaataacaaggatgtttttgcatggtcagccaatgatctctgcggagttaatagagatgttatcgagcactcactcaatgtcgatccatccttcagacccagaaagcaaaggcttcggaaaatgtcagatgataaggccgaaggtgctcgcaacgaagtcaaaagactcctcagtgcaggagttatcagagaagtgaagtacccagaatggctggctaacactgttatggtaaaaaaggccaatggcaagtggcgaatgtgcatcgatntacagatctt

SEQ ID NO: 13167 - DNA, 496 bp, Zea mays
  unsure (1)..(496): unsure at all n locations
ctaccaaatggacgtgaagagtgcctntctcaacggaccaatcattgaggaggttacgttgagcaacctcccggctttgaagacagtgagtatcctaaccatgtttataagctctctaaggcgctttatgggctcaagcaagccccaagagcatggtatgaatgccttagagatttccttattgcaaatggcttcaaagtcggcaaagctgatcctactttattcactaaaactctngacaatgatttgtttgtatgccaaatttatgttgatgatattatatttgggtctactaacgaatctacatgtgaagaaattagtaggatcatgacacaaaaattcgagatgtcgatgatgggagagttaaagtattttctatgattccaagtcaagcaactccaggagggcaccttcattagccaaacgaaatacactcaagacattctataccaagttggaatgaaggatgccaagcncatcaagacacccatgggaa

SEQ ID NO: 13168 - DNA, 418 bp, Zea mays
  unsure (1)..(418): unsure at all n locations
agcttatgaaggttcttcatccctacatgtgctaagcggcgatgccacagccagcccatgctagtcttagcaattaagcatgcatctagaccggcctcctcttttgcaaaatcaactaagtaaagtttgtcgtctaatacacccttaaaagctagtgaaccatcacttcttctaaagacaggcacatctacatttgtgaatagacaattatatcccatattgcataattgactaacagataacaaattatatccaagagactcaactaaaaacacattagatatagagtgctcggatgaaatagcaattttacctaacccttttaccttgccttgattcccatcaccgaatattattgaatcttgggaatccttgtttttgacgtaggaggtgagcatcttcttctcccncgtcatat

SEQ ID NO: 13169 - DNA, 431 bp, Zea mays
ctaagctcgacatgaggaaatggcgctcgtatcaagagctttcccttttctaagcaaggagagggaaagactacaagtcccgctccaagaaagtttgctacaagtgtggtaagcccggtcactttattgcaaaatgtccattatcaagtgacagtgacagggataacgacaagaagggcaagaggagagaaaagaagaggtactacaaaaagaagggtggcgatgcccatgtttgtcgggaatgggattccgacgaaagctcaagcgactcctccgacgacaaggacgccgccaacatcgccgtcaccaagggactcctcttccccaacgtcggccacaagtgcctcatggcaaaggacggcaaacggaagaagttaaatctaactcctccactaaatatgagtcttctagtgatgataatgctagtgatg

SEQ ID NO: 13170 - DNA, 429 bp, Zea mays
  unsure (1)..(429): unsure at all n locations
naagcttggaatagaaaaggcaaggccaagaattcgttttatttgggaaaaatcatcaattgctatgcttttgactaagcaaatggtgataacttcttggcaagagcgaaacaagaccgatattcgtctaggaccagtcttcaataacatataatactgcactcatacgaagaagtcatcaggactagagaggatacaacaggtctccacaagatcttcatatttctatcacaaattaccatcactaatagtgtagtggtcaaaacttatgctcttccggtgccaagaaccaaggacaagataatgcccaatttagcttcaagctctgtagtgatgtgggattttatggctattttctactcttcttacttctggtatattagagatagattacagtaagcatgttaaaagggtggaatccaatgtagt

SEQ ID NO: 13171 - DNA, 398 bp, Zea mays
  unsure (1)..(398): unsure at all n locations
tgtagagtcaaagtcaactcaagaacgccgtgaacaacctatgaaccaacctcgtttcttgctagcttcttgaatctcggngggggggggggcgagattcctattaagggggttagatctgtaacaccctgaatttgggggtataaaattctctttttaatatccaccaaattcaggtgttaccctctcttttccataattgtcttgtctttctcctaaatagtggagagctattttgtgtgtgtatatacatatgttgagtgtagtaaaatataaccctataaagagtccttgattgttgcatagcatgtcgaggcatgtctttccttcgtgatggtgcatttattcaaatttaggacacatgtttgaatttgaattcagaactaatacaatgtttc

SEQ ID NO: 13172 - DNA, 426 bp, Zea mays
  unsure (1)..(426): unsure at all n locations
agctntaagtattattaattgctaaataatttctgatcgagactaaacatcttggaactatttttattaaatataaggggaatttacaagtctagttaaattggtcccataattttattatttttctaagaattttctataaattttctaagcctggcagaaaaagaaaagggaaaatgatgaacagtgatgggctgaaaccatcccatgctatcccatggacagaaaaacgcgcctgtgcgcacgcgttagacaatttgcgcagagaccctcggggatttatgaaagggaaatagggttaacctattctcacaattaattttggtggttgaatgtccaacacaaatatatggactatctagtttctctaaaatacatgttctacaggtgcaaaaaggttcaaccacaaccaataaatattaaagt

SEQ ID NO: 13173 - DNA, 436 bp, Zea mays
  unsure (1)..(436): unsure at all n locations
tgtacctgtagagacaccacacttcgtatgtttaatctcctattatcacgccaaacaaaactcgcgaacaaattggtacctccacaatagcgctatatggcctatcaagctttgcagacatgtgcacaacatctgcatggaactgggaattctcaccaacacaaattagtgtcctgcactgtagatgcttcaagttctttgacaagtctnttctcctgtataaagcatcgcaaaataatattatctggnttcactcattcactgactcaggcaccgtatgaccgctagagttgaacatataagctttagagataaacaggacatactcgttgatagtttagataaatccgcacacattaatgcactgctgttgatctagacacttcatcgaataaaaggagggttaaagatcataaacaaatacaccataactgat

SEQ ID NO: 13174 - DNA, 391 bp, Zea mays
agcttctatggtctgaatatatgaagaattcaccatgttgaaggtactgtcgccacttatcaacagccatgagtatggcgagatactccttttcataagtggataatccctgatttttgacaccaagtgctttgctcacatatgccaaggggtgatggtcttgtaacaacacagctccaatacccttactggaggcatcagtttcaattgcaaacggtttggcaaaattcggaagagctaaaacaggagctgataccagtgactgcttcaatgtctggaaggttgtttcatggatctgtgtccaaaggaacactaccccttttttcagtagatctgtaagtggtcgagcaatcactccaaaattcttaacaaacttcctataataccccgc

SEQ ID NO: 13175 - DNA, 438 bp, Zea mays
  unsure (1)..(438): unsure at all n locations
tcgactggttgttcaggagtgacggcagccttcttcggaggggtgcttgaagatatgattgtttccagcacatctagcacattagccatcctccttcttttcggagtcactgctggcactttntgatttcttactgtttcaatgtttgccacaggactcaaaactcctgatgttttggatggcgcttcggccttctctttcatttctggtaacaaaatttttgattgctccaattttgtcttcgttggtatttcggctgtttctgtgacttctggcagcaaagttggctcggctggtttttcagcttcggtggccgaagaagtctctccggtaaactcaggcaccgaagctggttcaatataacgcggtcgataagaaagaacctttatcttcttcctttttcggtctggctcgctaggagcagctgcagtttcttct

SEQ ID NO: 13176 - DNA, 424 bp, Zea mays
  unsure (1)..(424): unsure at all n locations
agcttgccaatacttgtcaaagcaacagcacatgccagcacagcagctacaaaccataccagtaacctggcctttcgcgtgctggggactggatatgattggacctttcaagaaagctcaagggggatatactcacgtattggtggcgattgacaaattcactaaatggatagagttcaagcccattgcttctttaacctctgctaaggccgtggaattcatacaaggcataatattcagattcgggataccaaacagtatcatcactgacttgngatccaacttcaccagttcagaattctttgacttttgcgagcaaaagagcattcagatcaagtacgcatctgtagcacatccaagaaccaacgggcaggttgagcgagccaacggaatgatattggaggcactcatgaaaagggtcttc

SEQ ID NO: 13177 - DNA, 509 bp, Zea mays
  unsure (1)..(509): unsure at all n locations
ctcaagcttcgagataaggtcacatcacggcgagttacaccatcaacatgatgtattagctgttacacagcaacataggatgatatggctggtgataataggatggacaagatgtttaattgccggtattcccaaataaaacctaacacttaatgaagaaatatccttaagcagatcttgggaggttattttgtgaacaaactggaagcaaaagtcttaaactacatatacatgctgaagaatgtatgtatgtaaaaaataatccttgtgtcgcctctagtagtgactcgagtggtcactccatcccaacgatattgaaaaatagggaaattcaggtatactttaatccagaanaatattaatgatngtattgtgacattacacacatgcacttgtgagttaatcgcanacaagttaacgaccatcatcaggaattagttagtgatgccattaacanaaagccaatgggtagtggaagtanngtgatactgtcatcttgtactcaaaca

SEQ ID NO: 13178 - DNA, 453 bp, Zea mays
  unsure (1)..(453): unsure at all n locations
acctgcngcatgcangcttncttcgaagggtttgctgtcaaaaatattcctcgatgtctaaatgagcatgctgatttgctagctaagtcagcagcacaggggctgcccttaccttcggatgtcttcttcgaaacaataaaagcaccttcggtggaacttcttgaaagagcagtcctcaacatatctcctgtttatagcgaggattggaggactgagatcatctcttaccttcagggaaaattcctttcagatgacgaagcttataacaggaggatagaggcaagagctcgtccatatgtcatgatagaaggagagttgtacaagcatggagtttgtgctccgctactcaagtgtttatccagaaccgaaggtatagagttgatgaaagaaatacatgcatgcctctgtggatcccacattggctccaggccgttacttggaataatttccgtc

SEQ ID NO: 13179 - DNA, 432 bp, Zea mays
  unsure (1)..(432): unsure at all n locations
ggctggacgtcaccctcgtacctgggacgacggtgcagtcaggccccttcgtgactntacgccgctcgtcgaccaagaggtactgaccgattcccattccacgtcatttggattcagcctcaacccgcctagcaaccccgctttggcaggcgctctcgtagaggcgagtgcaaacccactggggtttcgtatgcggtcaccttgggaccggctgacgaacgtctcgacctacgggccctccgggtccgaggaagacgacgagcccagcttctgttgggatttctctggactcggcaaccccagtgccgtgcgggacttcatgaccgcatgtgactgctgcctctccgactgttccgacggtagccgtagcctcggcgacgaggactgcggcccaagtcgcgaatgcttccacgtcgatctaaggggtccctt

SEQ ID NO: 13180 - DNA, 438 bp, Zea mays
agcttgcttacttggtaagatgaccaaggcgcccttcacgggtttaccggagaggacgttagatttattggaactcatacatactgatgtgtgcagaccaatgagtacgacagctaggggaggattccaatacttcataaccttcactgatgattttagtagatatgggtatgtctacttaatgaaacacaagtctgaatccttagaaaagttcaaagagtttcagaatgaagtagaaaatcagcgtggcaagaaaattaaagcactgcgatcagatcgtggaggtgaatatttgagtcatgagtttagcaatcatctaaagagttgtggaattgttccacagcttacgccgcctggaacgcctcagaggaatggcgtgtctgagcgacgtaatcggactttattggatatggttcgatcaatgatgagccagtcgga

SEQ ID NO: 13181 - DNA, 463 bp, Zea mays
  unsure (1)..(463): unsure at all n locations
tcgtcatctgagagaaagttaccctgaaggaaagagatgatctcagttctccagtcttcacataaacaggagatatgttgaggactgctctttcaaaaaattcaactgaaggtgcttttattgtttcgaaaaatactttcgaaggtaagggcagcccctgtgctgctgacttggctagcaaattagcatgttcattttctcctcgaggaatatttttgacagaaaacccttcaaaggaagcctcaatcttttggaccgtgtctaaatatttctcaagctttgggtctcttgctttacaactcttgtcaatatgaccagaaataacctgcgaatcagttttaagaaccgcccttctaattcccattgctnttaacttccgaagacccaagagcaaagcttcgtactcagcaatgttatttgtgcaactganatcaagtcttgctgcgtagcaagttttaacttt

SEQ ID NO: 13182 - DNA, 430 bp, Zea mays
agcttcaggaattagtttctctatgtagcttagctgctctgctgctgtagaacttgctgggtattttcctttctatttttctttcccctccaagaactgcacccaccggttctttaggcaaggacggcagaatagcatgtcacctttcctgtgctgctgcctgtatatcacacacaacaatctcagcttgtatcgatgcaagaagctggcacggagtagatgtacctgtttgcatgaacaacaaagacaatgctatatggggatgtcatgccagacggtgcaattagttggattgtccgtggtcctgggcccgtgcccaataataccattctccccagcgctgctgctgcctcctctgccttttgatgccgctgctgccggctgttctattattggcgcctccattatggtcgctgctgctgctgctgct

SEQ ID NO: 13183 - DNA, 467 bp, Zea mays
  unsure (1)..(467): unsure at all n locations
gtcaagaagcagggccccaatatatttggatccgaagttattattttatcaagaaaaattatacagaattggagaaagtactgtatgctgttttgatggcctccaggaagctttggcattattttcaagcttacaacataattgttccttcttcacaaccgttgaaggatattatgagaaatcgagaagctactggaaggattggaaaatgggctgcagagctcaatgaattctgtattgattttgtccatagatcttcgattcagtcccaagcgttggcagacttcattgttgactggacgccaggggctcaggaggaagaaacgaataaagatgccgaagcatggacaatgttttgcgatgggtcttggngaaccttcggagcaggagcagctcgtgtgttggtttcaccttccacagttaaaacttgttatgcggcaagacttgatttcagttgtacaaacaat

SEQ ID NO: 13184 - DNA, 431 bp, Zea mays
  unsure (1)..(431): unsure at all n locations
agcttctaaagggagaacacattntaggactaaccaatgttcattttgagaaagacaggagttgtagcgcatgccaagcagggaagcaagttggcactcatcatccgcataagaacataatgacgaccgacagaccactggaactcttacacatggatctattcggcccgatcgcttacataagcatcggcgggagtaagtactgtctagttattgtggatgattattctcgtttcacttgggtattctttttacaggaaaaatctcaaacccaagaaaccttaaagggattcttgagacgggctcaaaatgagttcggcttaaggatcaagaaaataagaagcgacaacagaacggagttcaagaactctcaaatcgaaggcttccttgaggaggagggcatcaagcatgagttctcttctccctacact

SEQ ID NO: 13185 - DNA, 443 bp, Zea mays
tcggccttcgcaggccgaaggttgaaatgaatgaagctgtcgtataatgccagaagccttcggcgttgtttgttcttttataggaacaagggacttagtacaagagcatatcgccttcagggtgtggccgcttgcggagaaatgggaaatgccacaagaaaccataaaagaggccgacgaaggtggacttatcaggtttaagtacacttttaagtttggagataaatttattgagccagatgatgagtggttaaaaagcattgacaatttaagtgatgagctgcttgggacctattcgaaggccgaagacactgcaatgtcagcagccttcggaggccgaaaaaagaagaggctgaatcgggtatttgatgcaatcgggtttgttaccctgactattgctatcccatccgaaggcagaagagaaaaaacacaacttctgcaat

SEQ ID NO: 13186 - DNA, 421 bp, Zea mays
agctttatcaaatggacgtgaagagtgcctttctcaatggaccaatcaaggaagaggtctatgttgagcaacctcccggctttgaagatagtgagtaccctaaccatgtttataaactctctaaggcgctatatgggttcaagcatgccccaagagcatggtatgaatgccttaaagatttccttatcactaatggattcaaagtcggaaaggccgatcctagtttatttactataactcttgagaatgacttatttgtatgccaaatttatgttgatgacattatatttgggtctactaacgagtctacatgtgaagaatttagtaggatcatgacgcaaaaattcgagatgtctatgatggtggagttgaagtatttcttaggatgtcaagtaaagcaactccaagagggcaccttcct

SEQ ID NO: 13187 - DNA, 437 bp, Zea mays
  unsure (1)..(437): unsure at all n locations
actcaagcttctaagggagagncacatttgtgactaacaaaggggcattttttgattatatgaccgtagcgcatgtcaaacagtggaagctatgttggtgttcatcatccacacaagaacatcatgacgactgacaggccactggagatactccacatggagttattcggcccgatagcttacataagcatcggcgggagtaagtactgtctagttattgtagatgattattctcgcttcacttgggtgttctttttgcaggagaaatctcaaacctaagaaacattaaagggattcttgagacgggctcaaaacgagttcggcttaaggattaagaagattagaagcgacaacgggacatagttcaagaactcacaaatagaagggtttcttgaagacgagagcatcaagcattagttctcttctcctacacacca

SEQ ID NO: 13188 - DNA, 406 bp, Zea mays
  unsure (1)..(406): unsure at all n locations
agctntgcaacagtgatgcgttgctttctcttattgcatgcttctggcaccaaacagggctgactgtgcttcagcttcagttttcgttgcaattgccacaacgaaccaaccaaataatagatagaacttctgagtctgaatccataccaatagattgaaaccttgccgatggaagcttgggatccccgccggccaggagacaaaggccaaggagtgaaacgttgtgcatgtcactggccgcaggtcaccgatcaccagccaccggtcgttgcgcaggtcccggggcacaacccgccgtaagcgggatggagatcaagtgcgccgccgtgaacgtgaacgtgtgtgtggaaactaatatgttgtatcgaccctaaacatcttcaatgagtagcaaaaaaaaaaaaaa

SEQ ID NO: 13189 - DNA, 456 bp, Zea mays
cctagactctgcattcactctatctgatcatagtcttgaaatttgatcactttcgagttgtaaactcctcgcgatgtgtttgtgtgctcacttcctcacttgtgtgcgtggttatgctacggatttgagtcttgtgtgcgttgctctcccatccttactctatgctttctttgtgatctctattgtaagggcgagagactccaaattatggagattcctcgcaaacgggaaaatactctaaaggaaaagaccgtggtattcaagttgatcatcggatcacttgaaacgggttgagtgcaaccctcgtccattgggacgccacaacgtggaagtaggcaagtgttacttggccgaaccatgggataaaaatagcgtgtctcttgtgttgctttctctgtgatagttgtggtcacaagaactcgctccaaagctacttagttgcactaacacttcaat

SEQ ID NO: 13190 - DNA, 430 bp, Zea mays
  unsure (1)..(430): unsure at all n locations
agctntgatctaagcactagtccccactggatctctcatctaaccacaatgccaactgtccactgatattaatcccaaaggagagcacatcaacagaaggaaaagaggtattagtttatccaaggttctttacctggtcttcattatcatgtccctttgatttattgttattctgacagaaataatctgtaacgatgttattcatcctactccatgcaggttgtaaattcttttgctgaggggggtttgccctcaaaactaaaaccaaagatgacactcgatgcaaatgagatccttctagttaaaaagagaagtgttctatgaaaggatggtcctaacgtaagcctataacatggctggtatgtcaagttctaaccgcatgaataattttgtttcttggcttgaatcaacttttttcaccattatatat

SEQ ID NO: 13191 - DNA, 420 bp, Zea mays
actcagcttgaaaatctggttgaatctgcgatatcccactagccataaaactccgacttggtgaacagttgttgggggtttccactccagaatatctttgaccttgctaggatctaccgcaattcctttagccgataacacgtgccccaaaaatttaatttcttccagccagaatgcgcacttgctgaacttggcatatagttggtgttccctgaggcgcgtcaatacaatccgtaaatgctgagcatggtcttcttcattcttggaatatatcaagatatcgtcgatgaagactaccacgaacttatccaactcgggcatgaacaccgagttcatcaaataagtgaaatgggtagggagcattgtgagcccgaaagacattaccaggtattcaaccaatccatatcgcgtagtaaacgc

SEQ ID NO: 13192 - DNA, 423 bp, Zea mays
  unsure (1)..(423): unsure at all n locations
agcttggaggcatcgattggttgtctacttggtgtanactcctccttcttttcctctgttgccttgaatgcaacgggttgagcttcggatgtggtggcatcatcaagctcgttgatcttcctcgagccttcgatcatgcactcaaaacttacaaaattcccgataacttcctcgggggtcattttagtatatctaggattaccacggattaattgaacttgagtagggttaaggaaaataagagatcttagaataaccttaaccatctcgtggtcatcccactttacgctcccgaggttgcgcacttgattcaccaaggtcttgagccggttatacatgtgttgtggctcctcccctttgcgaagccggaaccgaccgagcctcccctcgatcgtttcccgcttggtgatcttggtgagctcg

SEQ ID NO: 13193 - DNA, 449 bp, Zea mays
  unsure (1)..(449): unsure at all n locations
cttgtggttgacaactcttgttatttgaaatcaatctctggtatatattataataaaagttgtagaacttcgaaagttattcaacattgtagttgacaactttttttgtttgaattcatttacggtctcgaatagtcaatttacgctcggttggttattaatatgtgtgcaacaaaactgtaatctaagaacaaggcacatcatagatgcgcgtggtagattagacttcacgtgagggtgaggttatgagtttggttcctagctaccctgctgacgcgaatttcgcgcgaaaaattgtcgcgactnttacgatttcgatgtcaccgacggtttattaaaaaaatgccagaacaaatatatagatttataaccgcttgtagagatttctctgtacttagtggcagtagcaataattagccaccgcccaccgagcatagtttcgatagcat

SEQ ID NO: 13194 - DNA, 426 bp, Zea mays
  unsure (1)..(426): unsure at all n locations
agctnganagggaattaagcttacacctagttcctaaataattnttggtggttgaattgcccaacacaaatctttggactaactagtttgctttagtgtataagttatacaggtgcaaaaggttcacacttagccaataaaaagaccaagagttgggttcaacaaaagagcaaagggccaactgaaggcacctctggtttggcgcaccggactgtccggtgcgccaccggacatgtccggtgcaccagatgactccaacgcaaactcgccaccttcgggaatttccagaggcactcgcgctataattcaccggactgtccggtgtacaccggacagtgtccggtgcgccaaggaggagcggcctcaggaactcgccagcttcgggaaacaccaacggccagtccgctataattcaccggactgtcc

SEQ ID NO: 13195 - DNA, 491 bp, Zea mays
  unsure (1)..(491): unsure at all n locations
aaactcagcttccatcagggagcttcgtagcgtatctctagatgcaccgacttattgtgaaatgaccaatcgacccatgaaaaccggtattacgattgtaatcatttgtagaggacatgaatgtaaattcacacaggctgcgccctgtgcctataaataggtgaacagtacccccgtactcttcacgctttcacatctcactnttatctttgccctctgccgagttcaaggtacaaatgtaatttgatattgctttcatgtactcatgattatttaataatagatgtttatattatgttttcatataattgtttatgttggttcctatgtttcataagcttcatcctctggttatacatgccatatntatggaggtatgtccttcataaccttcgtctgaagatcattatgtcctaagggaaataatgcttcagaggacgaaggacattaacatttaacactttgtgtngccttgtcttaatcatagcatt

SEQ ID NO: 13196 - DNA, 421 bp, Zea mays
  unsure (1)..(421): unsure at all n locations
agctnttgaatgaagctgccgacaaagtcctaaaggagagctgaagctttgtattttcgatagtttattgtctttgtgtataactcctgtctttgtaagaaacacttataaacaatctgcatgtatattgatgtaatatatttctttgtgaagcgtggaacttttgtacataccgtttttgagctggcggtgaaaaaacaccttcccttcttttcatgcttcagaaagaaatctcttttctttgccgaagcaattgtatgatgtttgattcttgttgtagacatctgcgtaaaaataacattgttgaaagtgcaaacttcgcatgacagtactgacacaggcatggacccagcctcttttatactctttcatgagtgtttgccgaatccgaaggaggaattctcatntgtttttcactact

SEQ ID NO: 13197 - DNA, 440 bp, Zea mays
tcttgggcccagctgccaccgccaccactgctagcacctactctggtatcagtcagcagccagaagggcatcaccacgctcagcaacagcgcgattttcgggatgagtccgaagctcgcacattcaacagcactgtgcccgagtcgaagcacatttattaaaggatatcctaacctgatgtattttcgttttgtttgtcattttattttcttgcatgaaaaataattcacgaaagtttgatctccaacttgatgtaataatattgtggtcacaccatcgagtgtagaatgccacccctcaacaacacttcagaagctacaaagtcgttcctaagagagcgcagagtaagttccaaagctacaaaagtcgttccaaagggagcgcagagtaagttccgaagctacaaaagtcgttcctaatggagcgcagagtaagttctg

SEQ ID NO: 13198 - DNA, 399 bp, Zea mays
aagacaacacacaatgggagtggagagatggtgagagtagtgtgtacccttcgtggcaagaggctggacggtggtgtatctgtgctcttggttggtgtgaacctgatatggtcttaaaaaccccggtggcgagttgacatatgcaagggttaagtgctacatatgtcgtgtgattggagatcctcagctaagtattaatcgattcggatcgccgttacttctcggacatgaagacttggtcactgacttacatagcattccagtgaacaagaagggttgataaaaagatggctagtttaggccaagtgcttgaactagggtagaaagaactctagattcaggtaatgacttaacttgctaataaaactgaatttttaaggatccactattagtaagcat

SEQ ID NO: 13199 - DNA, 518 bp, Zea mays
tatagacactcaagcttctaagggagaacacgtgataggtttaactaacgtgcaattcgaaaaagatagtatttggcagcttgtcaagcaggtaaacaagtgggaggagcacatcacagcaagaatgtgatgaccacttcaagacctctggagctgctgcatatggatctcttcggacccgtcgcctatctgagcataggaggaagtaagtatggtctagttattgttgatgacttttcccgcttcacttgggtgttctttttacaggataagtctgaaacccaagggaccctcaagcgcttcctcaggagagctcaaaatgagtttgagctcaaggtgaagaagataaggagcgacaacgggtccgaattcaagaatcttcaagtggaggagtttcttgaggaggaagggatcaagcacgagttctccgctccctacacacctcagcaaaatggtgtggtagagaggaagaacaggacgctcattgatatgtgcaggactatgcttggagagttcaa

SEQ ID NO: 13200 - DNA, 409 bp, Zea mays
  unsure (1)..(409): unsure at all n locations
taccacatntgaagcatgagcgtntcccttnggctttggtcttgtttgtttgtcccttgcagctntaagcgccgtcttgaatcttttgatgatgagggccatctcttcatcattaagtccggctgcctcaatttgtgccaccttactaggtagcgcctccttgcttcttgctgccttgagagcaaggggttgcggctcgttgattggaccattcaaggcgtgcgccacgtacctcgcctccttgatcatcattcgcccgctaacaaattntccaaggacttcttcgggcgacattttggtgtacctgtgattctcacgaatattattcaccaagtgaggatcaagaacagtataggaccttagcatcagtcggatgacgtcgtggtccgtccatcgcgtgcttctgtag

SEQ ID NO: 13201 - DNA, 423 bp, Zea mays
  unsure (1)..(423): unsure at all n locations
agctntgtgtggaatttgggagagggattgatctcttgagtgtgtctagaattgaatgcctagctcttgtaagtggttggaagtgtgaaaacttggatgcaatgaatggtgggtggttgggggtatttatagccccaaccaccaaactagccgtttggtggggctgtctgtcgaatggtgcaccggacagtccggtgcacaccggacatgtctggtgcgtgtcacacccggatttcggggcaccaagacccgggcgcgaacataatcaccaggtgtgctaggaccaagtctcacacatatgatgaatcatggcacaggatcgaatgtcacatctttactatataatcgaagttctatacaaaataaataaataattacattataaggagacaacggtccagcaacccaaagttgactgggaga

SEQ ID NO: 13202 - DNA, 476 bp, Zea mays
  unsure (1)..(476): unsure at all n locations
tagagcaccatgcctttggtcgccaaagcattagcaatttctctgcccccgtcaacgacgagcanaagtgcgcccacggatccggcgaggacacagcgccactcttcgctgaagcccctttgtcagcggacagcctcgctagcgccacaaccaactgcccaattttagtccctatacccgacatatatcaccatacaaaatccaaacaccaacaccctacttactagtaggcggtagccccatctaggcatcaaacatagtgacacccccaccaagtagtcgtccacggacaactcctggtcagtccctccagtttccgaaaccaccgcctcaacagcgcgtggtggcgaagacaacctctcggcggcagctagcaccggtggagggggcatcgcagcagtcgggacagaccccttcgtggtggacttcgtgtcacgtcgtggatccactagccgaagcggggccttcacttattc

SEQ ID NO: 13203 - DNA, 439 bp, Zea mays
  unsure (1)..(439): unsure at all n locations
agcttctaaaaggagaacacattntaggattaacaaatgttcattttgagaaagacaggatttgtagcgcatgccaggcaggaaagcaagttggagcccatcatccacacaagaacatcatgacgaccgacaggccgcttgagctactccacatggatctattcggcccgattgcttacataagcatcggcgggagtaagtattgtcttgtaatagtggatgattattctcgcttcacttgggtattctttttgcaggaaaaatctcaaacccaagagaccttaaagggattcttgagacgagctcaaaatgagttcggcttaaggatcaagaaaattagaagcgacaacgggacggagttcaagaactctcanattgaaggttttcttgaggaggagggcatcaagcatgagttatcttctccctacacgccacaaca

SEQ ID NO: 13204 - DNA, 497 bp, Zea mays
  unsure (1)..(497): unsure at all n locations
tactcagcttcgtaggtccagtagatcgtaggagtagtagtacttttggcaatgccccagccgataggcgacttccgggagaaactgccccctnttgcaagaacttcttttgtctagtcaatgtactttaaatatttatgttgcatgatccaatcccctgagagcctatggtaatgcatcagcttatctcctttacaccaccgtcaggtttgaaattgatagtcttttaaggtaattggagcggattcgaaccctcttcatccgagttcttcgttcaaatttgattccatagcactttnttgaacccgagtatctccgccccataactccatgtgtgcccaaaaatctcgctcaaagtgcaaacttgaattcgtggagaatcaaactctatgctcaatctgatgtcaaatccacaggcctcttggagctcaatggcggagccttcgattggtggcgcagccatcttcggtctacaagtgaagtccaccttttccccc

SEQ ID NO: 13205 - DNA, 431 bp, Zea mays
  unsure (1)..(431): unsure at all n locations
agctntntgcgcggcgcggggccggtggaggcagaacagcagttggcagaacacgtcggaggcagaacacgtcagaggcagactactattgcagccttaataagtagtagagaaaagaccacttatgtcatatatatatagtttatatattaggagccctgngcttccaataactagaagaagcccaggtcatacggtgcaatccggtcgagccggaccacatccggacgtctataaaataggacccggagtgctagggttcaattttttacgctccactccgattcattagcgacgccacgtgcgacgatggcggttgccccagagcgtgcgcggcggtggacccccagccggtggccgcaactccatgacctcgacgcacggtggcggaggttcctcgatccgaagtactggcggcggttcccaagtcg

SEQ ID NO: 13206 - DNA, 409 bp, Zea mays
agcttgccaatacttgtcaaaacaacaacatctgccagcacagcaactgcagaccataccagtaacttggcctttcgcatgctggggactggatatgattggacctttcaagaaagctcaagggggatacactcatgtattggtagcaatcgacaaattcactaaatggatagaattcaagcccattgcttctttaacctctgctaaggccgtggaattcatacaagacataatattcagattcgggataccaaacagcatcataactgacttaggatccaacttcacaagttcagagttctttgacttctgcgagcaaaagagcattcagatcaagtatgcgtctgtagcacatccaagggccaacgagcaggttgagcaagccaacgggatgatactggaggcactc

SEQ ID NO: 13207 - DNA, 480 bp, Zea mays
  unsure (1)..(480): unsure at all n locations
tcgcatctctgaactaactcggctgcgtcngtttttgctgtctgtcaatagaacctgatctgaagaccttcccgactagtgttctggaggctgcatgtattccacattgccctgcatggacttcttccagaagttgcttcccagtggatgggagaatacacttcatgagaacccctgatgcgccccttctgtataatatctccccaatgagtgtgtagtgagccgactgtctggcaatgcgctctgctgagttcttgtcatctggctcttcttcgttctttatgtacttaatgatcggcctcctccagtcatcagagtctgactcgggttgatctacaatgttgcactcttctgtttggtctattgagatactcggccgtgtaatttcctgcacgaaaactccgggtgggacctgagttcgaccggatccgagcttggatagtgtatcagctgctgtgttacgatccctttccacatgat

SEQ ID NO: 13208 - DNA, 429 bp, Zea mays
  unsure (1)..(429): unsure at all n locations
agctngacaatgaggagatggctcttatcataaagagttcctagcaaatcttaaagcaaaggaaatggaaggaattgttaagctactcgttaaggagaacaaaaaaattgttaagctaaaagatgcttttgctcttgaagttgaaaacgcaagaacttgactaaagagctaaaaacaagaaatgattcaatttcttgtcttaaatctgaaaatgctagtttaattgctaagattgaaaaattgaatgcttgccatgtccctacatctaccgttgagcattttactatttgcactagatgtagagatgttgatgttaatgttatgaatgatcaccttgctatgattaaagaacaaaatgatcacatatctaagttgaatgccaaaatttccgagcatgagcttgaaaataaaattnntaaaattgctcgt

SEQ ID NO: 13209 - DNA, 467 bp, Zea mays
tatgccatctacatcatattccagtctctacatgccatactaataattatttatagtacatatgttatgatgccaaattataaatagttactaccattaaatatacataatatctgcaatgtaataaatttagatttcatacctttctaacatccccatattgtgttccttcacaatcatcatttccaacaagcgtcatttgcagttcagattgatgatgtgcatcaatatttaagcctccatcctactcattagtgcattatagtcaatattacaaataatgtataaatcatcccatttgtttgcactatacataaattacattgtttttttgccataatattacctgttgtcgtgaatgtactgccacatgctcctcgttatcacatagcgatacatgttcatcttcagcgttttcaacatcattctcttcgccctgcaacgtttatattttacaattagcaata

SEQ ID NO: 13210 - DNA, 245 bp, Zea mays
agcttagaaacataccttgtcacttgattttttctttgtccatacatatgcatagattcacgtctaagcacttgagttggcacttaatcaccaaaatacttagaaatggcccaagggcacatttccctttcatacacctagttcctagttaattttggtggttaataatgtcacacccaaatctctggactaactaatttgttctaggggatataatatacaggtgccaaaggttcacacttagc

SEQ ID NO: 13211 - DNA, 494 bp, Zea mays
  unsure (1)..(494): unsure at all n locations
tacatggatgatgtggtgatcaagacagaanactcagtatactctattgaagattgcagctggtcttcaacagtctgcgacgatatcgatggaaactcaatccagaaaaatgtgtctttggagtaccggcagggaaattgctcggattcattgtcagccaccagggaattgaagccaacccggaaaaaatcaaagctatcatgataatggaagcaccacgatcacagaagaaagtacagaggcttactggatgcatggcagccctgagcaggttcatatcaagactaggagaaaaaggtttaccattctacaaattgctcaagaaggtggacaaattctagtggaccatagaggcacaagaagctcttgatgcactaaaaaagttcttgaccacgccgccagtactaaagccgtcgcgccaagctacaccgaatcagtcggccgaagatctactattatacatctcttgcacgactcacgtggtgagcaccacg

SEQ ID NO: 13212 - DNA, 430 bp, Zea mays
  unsure (1)..(430): unsure at all n locations
agctntctcaaagtcaagcttcaaaatcaccccacaatccttttttctacgcagctcgtgaatagtctcatgtagaaccactaccccttccatgatattcctgcctggtataaaagctgtctgggaagggcctattaccttacttgctaccctcgatactcgatttgtaagtactttggtaaagatcttaaaactaacatttagtaaacaaataggtctataatgttgaatagacatagcatctttacttttaggcacgagaataatgtggccaaaattaagtctaaaaagaggtaactccccttatggaaggcatcaaacaaagccaacaaatcattttttataacattccagaacacctgataaaattccgccggaaagccatctggccccggngccttattgtgttccatctggaaaatngcttctc

SEQ ID NO: 13213 - DNA, 492 bp, Zea mays
  unsure (1)..(492): unsure at all n locations
taagaacagacagaggtgggcggggttgttgcttccgtcttctgtgttggtgttgtcgtgccgcgcatcgagtcaaggtgtgccgtggacgagaggatgccggtcgccgcgaaaaggatactgcggctgagggcacagcagagagaaagactgctagaccgatgcgagtaagtgagggcctgtttggttacatagtatttttacatttttaaagcaatactatggtattgtacaatactatggttttagaagccaaaaggtgtttggttggtgctatcaaaacccttgtttgaataccatggtttatctaaaactatagtatnnttggagttttggatactgaagtctagacctcagttttccttggatttcttccatcaccagcctctgccacgatggcccgatcacccgttgtccactccccatgcagttaatactgcgttcttatacttggaaccaacaacatcggtttcatgaaactgtgaaaaaaca

SEQ ID NO: 13214 - DNA, 427 bp, Zea mays
  unsure (1)..(427): unsure at all n locations
agcttggtattcttttgaaggggttntgtgcatgctacggttgtccccttctcaagctttttcatcatattatcacggttatcttgagaaggttgagcatgacactttcccttcaaaatagttaagctccttcttagccttccaacttcttccttgagctctttattttcttgtgcgatagaaatatcactaattcctgaaatttctagctcaatggaagattggctttcttgagagcaacatttgttagcacatgataatatagtttctacttgagtacatgtgcatatgtgaggttggtatgatttaaaattagttaacacaacctcatgagccatttctaacatgatatgtgaatccataaatttattatgagagcacacaagcatatcatggttttcttgcanagctagaatttcaatattta

SEQ ID NO: 13215 - DNA, 150 bp, Zea mays
ccagagttttaaaattacggtacacaattgtccactggacctgtagctgacaagcggctaaacctgctaaaattagtagaaatatatataataaatatagggggtaacgcagggtgacctgacgggttcggaaacgcttcacggcgcacc

SEQ ID NO: 13216 - DNA, 389 bp, Zea mays
  unsure (1)..(389): unsure at all n locations
agctgtgacgtgacgcggagctcctacgcgcgcgcacctgtgccgtgcctgtcaccgcaactgctaaccgaacgcgcacgcatgagatccggcaagagctatgcttgcgtgcttgggcaccgccgcacagctagctaactgctccgtccaatcccaaccacgagaccggacgaggaacaacgcctncgtaccgcgcgcaccaagctgttggttcaggggtccctgcacagcggaggaagccacgcgcggcatgtctgagccggacggtccccgtcgcacatggcgctggaaaaaggctcgctacctcagtctgtgtctcatccactcacacgtgcgagagcatacgattgcgatcccattccccgtcggacgacgatgaaccgtacgtc

SEQ ID NO: 13217 - DNA, 496 bp, Zea mays
  unsure (1)..(496): unsure at all n locations
actcagctaatgcccctaaanattgctaatttggtaagggtaaggctctcatattcaggataacgagggctatattntatatcctgctggttatcccgaacataagattaggagaattcattctaggaagtctcactctggctctcatcatgcttttatgtataagagtgaggcatctagttctagacaatccactcatgttaaattacctaaaaagaaatctcctattgcatcaaatgaacccaatgtttcaattaagacttttgatgcttcttatgtgctcactaacaaatcaggcaaaatagttgccaaatatgttgggggcaaacacaagggatcaaagacttgtgtntgggtacccaaggtgcttgtttctaatgttaaaggacccaagaaccgttgggtacctaagaacaanggcctaaacttgtttgtanggttatgcatctggnggctcaagtnggatcatngatagcgggtgcacaaaccacatgac

SEQ ID NO: 13218 - DNA, 424 bp, Zea mays
agcttcggaggaagattcaactcacaaccgagaagattgttctgtttgttctgtggagaggataaggggcacacaactaggacctgccaagttataacatagaagcaaaaggagatagttgaggccgaagcacggcaaaatcagcccaaacaaatcctgcatactgcttcgtgttatccccatacattccagagtatgtgggcaatcagcaaccattttcagatcccacagtttcagtagctttagcaagccactctctagctgcttgggccttgccacagccaccggtcatggctccaacttcgtcccacaatcaacagcctgaagggcagcgtcaaactcagcaacaacgtgatgcaagagaagagtctgaagctcggacagttaatagcactgttccagagtcaaggcacatttactaaag

SEQ ID NO: 13219 - DNA, 432 bp, Zea mays
  unsure (1)..(432): unsure at all n locations
tcgaaggattccaggagattgttctgcttattctgtggggaggataangacacacaacaaggacgtgccaagtcacgatccaaaagcagaaggaaatcgttgaagccaaagcacgacagaatcagccgaagcaggtcttgcatactgcctcatgctattcgccatatatccctaaatatgtgggcaaccagcaacccacgacatcagttgcttcggcaagtcattctcaagctgcatgggctcagttaccaccaccaccactggcgcctaccttggttcataatcagcagccagaagggcatcgccaggcgcaacaacagcgcgacactcgggaggagtccgaagctcgcacagtcaatagcattgtgcccgaatcaagacacatctactaaaagcaacgcangggtttgaccagaaaagttcctcattcaa

SEQ ID NO: 13220 - DNA, 439 bp, Zea mays
  unsure (1)..(439): unsure at all n locations
agctntatcaaatggacgtgaaaagtgccttcctcaatggaccaatcaaggaggaggtctatgttgagcaacctcccggctttgaagacagtgagtatcctaaccatgtctataaactctctaaggcgctttatgggctcaagcaagctccaagagcatggtatgaatgcctaagagattttcttatttctaatgacttcaaagtcggaaaagccgatcctactctctttactaaaactattgcaaatgatttgtttgtatgccaaatttatgttgatgatattatatttgggtctactaacaaatctacttgtgaagagtttagtaggattatgattcaaaaattcgagatgtctatgatgggggagttgaagtacttcttaggatttcaagtgaagcaactccaagatggcaccttcatcagccaaacaaagtacat

SEQ ID NO: 13221 - DNA, 439 bp, Zea mays
  unsure (1)..(439): unsure at all n locations
ttggcacctggtaaacttatagactaaagcaaactagttagtccaattatttgtgttgggaattcaaccaccaaaattaatttagtaaaaggtgtaagcctatttccctttcaggcgcagcgaccccgctttatgagacggtcccgagccgaggggaggaatagaactgttcccgcgcgcgaatcttgcgaagttcgttgagccgaccgcgcgaatcgcggatcgcgcaagcctgttgcaaggcacagggaggatagacaccagcgcacaggggcggcggacgcagaccgagatctcggcgtggtttttggatcaagtggaaccacccggaagcactagcggcgcgatcctattntcctgngcgcanngcgacgcgatgatccggaaacgaggaaagaagaagctcctgacgaggatggcccaccagcagtgacaagca

SEQ ID NO: 13222 - DNA, 370 bp, Zea mays
tccagtatatttcgtctccgaagttcttagtttatcaaagaaaaactatacagaattggagaaggtgctgtatgctatcttaatggcctccaggaagcttcgacattattttcaagcataccatataattgttccttcatcacagcttttgaaggatattatgagaaacagagaagctactagaaggattggaaagtgggctgcggaactcaacgagttcaacattgattatgtgcatagatcttcgattcagtctcaggcgctagcagacttcatcgctgactggacgccaggggctcaggaggaagaagcaagtaaagatgccgaagcttggatagttttctgcgatggttcttggggaaccttcggg

SEQ ID NO: 13223 - DNA, 491 bp, Zea mays
  unsure (1)..(491): unsure at all n locations
tcgganagcctatgcttctcgccatctctcggcagacggatagctctttgttatcangcagcagtataagaagtcatcttcatttgttccattgaatattactgcccccttcggatattntagttcctttgcataatggatggcttcatgagtttcttcttcagatagcttcttccccgaagcatgtcgtatcatgtaatcacgcatgctggcaggtgcttcggggatggcggtgtcagtttcttcaactaatattggttccggaatatttactgcttcggcttcaaaaggatgttctttgaagggctctgaaggcccagcttcagcttcagcttgttgagccgaagcttcagtagaagcttcagcaacttcaacactctnttttggaattgtgcttgaagacttaattgtctccaagacgtctagtacatttaccattctttctcttttggggtcactgatggcccctttggttttttgtgtccaatgat

SEQ ID NO: 13224 - DNA, 419 bp, Zea mays
agcttgttattactgttatatgccaacaaatataacccttatgacagaactcacacctagttaagagttgtagtgcaaagtggcccatttacccaacttttgttatttttgtctaaggcatagcctttttattttgaacctcaaattcctagaacaggctatagtgaccaatggcaacccactgtaatttttacagaatttttggaaaaagttaaatcattattgtagttcaaacctacactagaatttataaatagaaaataaagaaggagaaaatgaatgatggaaactagtgccatcctaggaccctttgtaaattgtccactaaaatgcataagagaaataccaatctactatgcttatccttaacaaaacctaaacttagagcgataagcataacccactaaaagccacgtatg

SEQ ID NO: 13225 - DNA, 480 bp, Zea mays
tcatgattcctgatggaatgtgatgagcacggaagttctcctataattcctaccaagttaggtgtctgcgttggcgtggccgtagtgaaggcataccaccagtcggacgtggcactttcaagccatccagaaacgtacaagaccttttcccggtcattgcactaggtaatgtccagcttcttcccgatgatcttaagccaatcatcgacatccaagggatcaaccaaatgagagaaagcaggcgggtggtggctcatgaaatcatattgcttgtctcgagcttggggtgcattatgctattggttctattgattctattgattctgttgaatatgctgcactgaagcagtgaggccttggagaagttgcatctgtgcggcaatgaactgctccactgttgggttgggtggtggtggtggcaactgctgaccggtacgctgattctgttcttcctaggacctgagcgagcgttcaccatct

SEQ ID NO: 13226 - DNA, 246 bp, Zea mays
agcttagatatgttttccccagcggagtcgctcaaaaagtatgttgacgccttttcggagcgccaaatactcaagaagaaccggcggtggtgctctctgcacaggggtggacggtccgcgcgcggtgccggacggtccgcggcctggtgcgaggcgcggtggtactctctgcgcaggggctgagattttatagtctcaggccagacagtcctctgcctggtgcgcggctaaggcttctctgccaga

SEQ ID NO: 13227 - DNA, 483 bp, Zea mays
  unsure (1)..(483): unsure at all n locations
atgatatgaagctntggggtgctttagatagtttattcaatttaaccaagctatcaatttacaatgatctacatattcaagattgacccaaggttatttcaaattactgtgtctaaaattcatatcatctcgaggaaggtattaatgttgtaggaaatgaagaattatcttatgcggaaaaatcaaggcctacaacatggaggaaaatcaaaggatggtaacctatatgcttttaaagtgcaagtattttattatgtgtcttgtgtagtcacataagaaatgtgtagcgcttcanatgtcttanaatttgtattaccattctntgaagaatttcctctcatatggtagattgcatattcatcatttctataccatagcaatctatatgctttaaattgttgaaatatctcatggcatgtnttctttntactggatatcctattactgccatgaatctagatatagagagacatttcatgttct

SEQ ID NO: 13228 - DNA, 435 bp, Zea mays
gcatgcaagctgtgatgaaccagatcaagctcttagagttctacaaggttgaagaccctaagcatctctttagtgaaggcaagtgtcctctaacctacttatgtccttgtcacatgataattcattttctcgcattacataattaaaacctaaggattgactaggtttctattcaccttgtccttgattaccttttgggttattatggttagcattatgctagtgctctactttaatcaatgaacatgatgaggtatactttatgatacgaagattttattctggatatgatgatgaacttgtggcactaaaggaggcttgagttgtttcccgagaacctctcagtaaggacctgttcattgagagaccacctaagaaaatagtgcaaccatgtgggtggtatgagacgcccttagctaattaattagaggaact

SEQ ID NO: 13229 - DNA, 491 bp, Zea mays
aactaagctttcctgtacaagcccgcgcttactgcagagtgcgaagctgccacattcttatcagagaacccctggcgtgggtggagttagcgtcgttaggtctatcaggtactgcttcagctcttcgaaggctttctgctgagctgatccccattgaaagacttcggccgacttcagcacttcaaagaatggtaaatttctctctgctgatctagatatgaatcgattcaaagatgccagtcttcctgtcagccgttgagcccccttctttgtgcttggcggctccatccgaaggatagcttcaattttaattggattagcttcgatcccttttgttgaaactagacaaccaaagaattttccctcttttactccgaagacacatttttctggattcaacttcaggccagcttgcctaatattagcacatgttcccccagatcagcaatgtgaatttctgcttctgcttttactatgaaacatcaacatat

SEQ ID NO: 13230 - DNA, 432 bp, Zea mays
  unsure (1)..(432): unsure at all n locations
agcttggtcattntattgctaactgtcccgacaatgatagtgatcaggaccaagggaacaagagggagaagaagaagaattataagaaggcaaagggcgaggctcatcttggcaaggagtgggattcggactgctcctcgtctgactccgacaatgagggactcgccgccactgcattcaacaagtcatccctcttccccaatgagcgtcacacttgcctcatggcaagagagaagaaggtaatcactcgtaatgatatcacttatgattcttctagtgatgatgagtctagtgatgatgaaatagattactctagcttgttcaagggattggatagaaataaaattgataaaatcaatgaattgattgatgccttgaatganaaggataggctnttagaanagcaagaggatntgttgtatgatgaacatg

SEQ ID NO: 13231 - DNA, 481 bp, Zea mays
  unsure (1)..(481): unsure at all n locations
tctctgctgcctcgccaagaataaagatgtcttcgcctggtccgccctcgacctgtcggagtcagccgatccataattgagcacggcttgngaattgacccttcggtgcgaccaaaaaagcaacggcttcgcaaaatgtccgacgaaaagacagaggccgccaaggcggaggtgcaccgcctcctagaggccaaattcatcgaaccagtggcttaccccacgtggctctccaatgttgtaatggtgcagaaaaaaagtgggaaatggcgaatgtgcatagacttcaccagtctcaataaggcctgcccaaaggacaatntcccgctgccacggatcgacaaaatagtcgatagcacggccggatgcgaggtcatgtcactcctcgactgcttctccggctatcaccagatatacatgaaggaggaagacaaggccagcaccagcttcataacacccttcggcacttatggcttcatcagaa

SEQ ID NO: 13232 - DNA, 423 bp, Zea mays
  unsure (1)..(423): unsure at all n locations
agcttctntgacatagtcaactccaaatgtagcgttacaaanattgcaagctctacaactaatagttgcaaatccctcagcttcggcttctcttcaaccttcggcattcttcttagggcctatttggttcagctttttctgatgggcttttctgagaatctgggtgtggggagaatctagttgtaaagataatatgagtatcgtggagactatgtgcggagaaagataaaagagtccatatggtttatgatatagaaagtgatggattcctactatcgcaatgactcatcccattccgtgttaacattgattttggaaggttttgactaaggtgattctcatagaagccgactgaaaagttgcgtgtttgacagtctacaacaacttttggtggcccgaagctgaaaaaagctgaaacaaata

SEQ ID NO: 13233 - DNA, 462 bp, Zea mays
  unsure (1)..(462): unsure at all n locations
tcagctccatctatgttatggatnggctttgagtcagtccagtttccctcagccctctggcagcttcctgactcccatgaatagcaatgggtccttgattcgaaggtatcttcatgcaaaggtaagcaggatgaagaattgcttcgaaagcattgagggtgccacgaccaataattgcattgtaagggtattccatgtcaacaatgtcaaacacaacttgctcagttctggtgttgttgatgaatccgaaggtcactggcatggtgatcttgcccagtgctacaatctgttttcctccgaagccacagagagggtgtgtagcatcatgaatcttatcttctggctcttgcatttgcctgaaggccttagcaaatatgatatcagctgcactgcctgtatcaaccaagacattgtggaccagaaacccttngataacgcaagaaataaccatagcatcgttat

SEQ ID NO: 13234 - DNA, 428 bp, Zea mays
agcttgtcaagcatatattggtacccatctcttgatgggtccatcaaggttagtcaataaaaacctaggaacccaaaagtcatttgtgttagcacttggtaaactcattatctttctagtacaagttgcaattttgggttgcctagttgcatgtgaaataattgacaagctagaagtgggatagttaccaatgggacaatccttgcattgatgtcccttctttcggcatatgtagcaaaggcgatcttcaagtcttgaagatttcttctttccttgtttcttgcttgctatatggttagttaatattttcttttataacactatgcctttttgtttcaaatggggacaagatttaattaagtgacccttctttgagcatttaaaacaaagtttatcatccttgttaataatcaaaccattttcaatat

SEQ ID NO: 13235 - DNA, 460 bp, Zea mays
  unsure (1)..(460): unsure at all n locations
tggtgccgatggagaaacanaaatccttganatcttggttgttttactgcttgccgtgtcaactgttagttcggacggtactccgaaacggcaaacaatgttttgccagaagaatttttgggcagtctttgatgttattgtagaaacagccctcgcctcgatccatttggtgaagtattcgacggctacgaaggcgaacttaaggttcccctgagcggtgggcaggggcccgacaatgtccaggccccagcgctggagaggccatgtatgggcaatcagctttgtatactgcgaggggctgcctgaccgaggagaaaacttctggcatgcttcgcaggaccttgtgacccgattngcggcgcagattattgcgggccagtaaaacccttggcggatcaccttggcagctagggcccttggccctgcgtgcgagccgcacgtgccactgtggacttcacgt

SEQ ID NO: 13236 - DNA, 426 bp, Zea mays
agcttgttgcacaatcaaggccttataggtctcggtcgctgttgtaccaagaacctcttcatcaccatcataagtctctgcaatgttagctccaacagtatcttcatcttcaacatcagaagcactaacatacccaccatcaccagtagcaatgtatgcccgcttgctggggcaatctcgctgaatatgaccaagtccctggcagcggtggcacttgatgtcggaggagcggcctgtggaagaggtggtcgtagcaggttttgctgcaacacccgaaggtacagtggaagatgtggacgtccatacgcccgaagatgatgacgccttggctggcgccggtggctggcgtggagcgaaagtgctgctcctccgttggtgacgaccctgcaattctttttctgccaacatagaaagatggaacaagca

SEQ ID NO: 13237 - DNA, 423 bp, Zea mays
  unsure (1)..(423): unsure at all n locations
tgatcctctgtgggggtccggacgatacacgtggcggtctgggaccacctatagggtccgaacggcatatgtaaaggtccgggacccacctgcgggggtctggacacacgacagttgtcacacctggattaaagggctaacctgtgcgcaaatcaaatatgtgctaagatcaagtcgcccacatatgatgactcatggtacataaacaaatgtgatatctttattatataataagagttctgcacanaataactaaataattacatcatatgaagacaatgatcctgcaaccatagttgcctgggagacgatggcctagaactcccacgaacttatcatggcatcattcatgctcctcatcttgcagtacctattcttgacctaagggtgtgagtacagcaagggtgagctcacatatgttca

SEQ ID NO: 13238 - DNA, 378 bp, Zea mays
agcttcgcacctctgaactaactcggctgcatcgttcttcgctgttggccaatagaatcctgacctgaagaccttcacgactagcgttctggaggctgcgtgtattccacattgcccagcatggacctcctccagaagttgcttcccagtggacgggagaatgcacttcatgagtacgcctgatgcaccccttctgtataatgtctccccaatgagtgtatagtgagtcgactgtctggcaatgcgctcggccgagttcttgccgtctggttcttcttcattctttatatacttaatgatcggccttctccagtcatcagagtctggctcgagttgatctatgatgttgcactcttctgtttgatccattaagatact

SEQ ID NO: 13239 - DNA, 426 bp, Zea mays
  unsure (1)..(426): unsure at all n locations
tctaaaggggagaacacatttgggactaacaaatgttcattntgagaagatagggtttgtagcgcatgtcaagcaaaaaagcaagttggtgttcatcatccacacaagaacatcatgacgaccgataggccactcgagctactccacatggatctatttggcccaatagcttacataagaattggcgggagtaagtactgtctagttattgtggatgattattctcgcttcacttgggtgttctttntgcaggataaatctcaaacccaagagaccttaaagggattcttgagacgagctcaaaatgagttcggaatgagaatcaaaaagataagaagcgacaatgggacggagttcaagaactctncaaatgaaggctttcttgaggagganggcatcaagcatgagttctcttcttcctacaca

SEQ ID NO: 13240 - DNA, 425 bp, Zea mays
agcttcaccatggtcgcagtgtatcagtgtcttaggctattcaaaggatgcttggtattctgctccatgcgcctaggggtcctttttatagccccaagagacctatgagccattggagcttcatttggaaggccctggttgccttctatccgcaggtgcaccagactatccagtgcacaccagacagtaaacagtgtgtgattcccttccttgtttggcaaagccgaccgttgttagcctctggtcccatggcacactagacagtccggtgcggcctagtgaccgttggctgggcatatgtggcacccgctgatcacgctgtcgaccgttggctgagtgcgcgactcacacaccagacagtccggtgaattatagccatgtcggcgtttcgaaacccgggggtccctggatcgacgagtaaattg

SEQ ID NO: 13241 - DNA, 475 bp, Zea mays
  unsure (1)..(475): unsure at all n locations
ngtaggagtctgagttcgtccaagtcaacacccgcaacgtatgtatgttgaggagcattgcanggtcagtatcaaactatcactaatgctaatgcaatgcaaacatcctgcttattatgctgtgactgctggctagagcaagccagagtatattaattggtggtacaatagagcaagccagagtatgctgtgactactggctagagcaagccagagatttatttttttgtactttgtttactgaggtccttaaattactactgtataacattgtcatttccatatatagagcttgaagtgaggaggagtgtggtttcctatacgtgacaatgagatatnggctcccatatttactccaccatcagttgttgaagttgatgttgaggcaaacttgcccagcaggagttaaaagatgtccatattcatgcatatactgctgaagaaacaaagaagcatttatgagctcgaatgtctt

SEQ ID NO: 13242 - DNA, 422 bp, Zea mays
  unsure (1)..(422): unsure at all n locations
agcttaaggacatgctcctcacagatttcatggttttcaaatgaagcctattaccacacaagctcttttccaatctactctagagcaagatgagtatctttaggcttatgttcaaatgttccttcggctccgggctcaagcaacaactttacttaatgaaattaacgttgaaataatgatcaaggggcttcgtccagtcctagtggcccaatacttcgctagaaaacctccttaatccctggagaagtgtaacaccctgaatttggggtatacaatttcttctctaatatctaccaaattcaggtgttacctcttttctcctctctatagntntcttttctcttccttttagtagaggtttgattatttatttggagatgtattaatactttaatagattaaaccctagggtagacatgaaa

SEQ ID NO: 13243 - DNA, 400 bp, Zea mays
  unsure (1)..(400): unsure at all n locations
actaagcttacttttgaaagggatggatntacagnttattgattcctctgtggtgtacgagctccgataccagctgtggcggaaccgcccgaattattccaacttaagtgtctaagtcccaccttagaggctagactataattaaataggaataacacgtcagtccctcggatctagtccgacgaggccactaacaggatcaagtaccacgtactcactcgatggtgaggcacagagcatatacgataaaacataaaaccaacatgaaggagtattagatttatcgaatgcaatgcatgagatatatgcataagtatgacatgaacatttgtaaggggtatgcatagtaaaacagtattaagtttagtgtttctctagggtttctttttagatatactta

SEQ ID NO: 13244 - DNA, 427 bp, Zea mays
  unsure (1)..(427): unsure at all n locations
caccatgtgatcacgattatcttgagaatgttgagcaatgcactttcctttaagttgtgtcaagctcatctttagcatctcattttcttctttgagtttttgatatgtatcatcttttgttcctacaaattctagctcaaaggaagatttgcttgtcgacggacaagcattagcacatggtaatatagtttcaatttgaatacatgtgcatgagtgaggttgttgagattttaagttttctattacaacctcatgagcaatgtttaatatgatatgatcatccataagattttcatgagaatatagaagcatatcatatttttcttgaaaagctagatttttaacttttagctnttctacttggtccttaagcaaggcattcctatttactgattgagcgatacaatgtaaagcgttatcttgctca

SEQ ID NO: 13245 - DNA, 389 bp, Zea mays
  unsure (1)..(389): unsure at all n locations
taatatacgaattgactcaagcctagctacggggcataggtttcaccgaaatccaaaccttcgacttgggtgtatcccttggccacaagtcgagctttgttccttgtcaccacaccatgctcgtcttgcttgttgcggaagacccatttggtccctacaacattttgattaggacgtggaaccaaatgccatacctcattcgtagtgaagttgttgagctcctcttgcatcgccaccacccaatctgaatcttgtagtgcttcctctaccctgtgtggctcaatagaggaaacaaaagagtaatgctcacaaaaatgtgcaacgcgagatctagtggttacccncttatgattgtcgccgaggatggtgtcgacgggatgaatcttgtg

SEQ ID NO: 13246 - DNA, 433 bp, Zea mays
gcaagctctgcatgaaaattcaagtactcgtgtaataataatcagcttcccatctctgcaagcgatgataaaatggataagggcccttttatgtgtcaactgcggaagaatgtttaggtaaggtccgactaaaccggagatggtttacaaccctttgtcaacaaatatggcaaaccacttaacaaagcttcttccttgatgaacacatttctgcagcaagtatggataatgtttggaaaatcaaacctttcattggccaaggctcatctttgccatggctaagtgttggaatagcattgaacatgtgagatttatccaaatgaacttgtccagtaattgtcccaacttttgttgatacatcacttatttcctttgcataagggggctttaagtcagatgagctgtcccatggagaagtgaagggtcttacatg

SEQ ID NO: 13247 - DNA, 418 bp, Zea mays
  unsure (1)..(418): unsure at all n locations
tggttttggctcatcttccttcttcatccagatatgatggtagcctgaataacaatctagaaactcatgagttctgatgaagctgttgcatctactagagaatctattcttggtaatgggaactcatccttcggacaagccttgttgagatcagtaaaatcaatgcacattctccatttacaattggccttcttcaccataacagtattggctaaccattctgggtattttacttctctgaagactccagcactaagaagtctttntacttcattccgagcaccttcggctntgtcatcagacattntctgaagcctctgctttctgggtctgaaggatggatcgacattgagcgagtgttcaatgacatccctgttgacaccacagagatcgttggctgaccatgcaaagacatctt

SEQ ID NO: 13248 - DNA, 435 bp, Zea mays
ggtcagatcgaggaacaaaaggaccgaagagggttattagagacgaccggatgccttcagatggagacgaacccacaaggacgaaccagaggagcgcccatgaggaccaggggagccccgtcaagccaagacttagctaggactccaccttatagcttccaagctccacttccaccccgaaaagagatctgggagcctctcctccctctctcgactacttgtaacccctactacaagtttaatcatcaatggtgccaatagcgcaagccaccgatgtctcaatgtagggacattctgcccgaaccagtataaaccttgtgcccttcgcaccaccctccgaagtctggaatgcgccacaataaattacttgtcagagcgaggtacgaaacaccgacacttatgcttatgctcataccaagatggttagtttaaagt

SEQ ID NO: 13249 - DNA, 464 bp, Zea mays
  unsure (1)..(464): unsure at all n locations
tactaaagagaatgtcgatctagatgcatgtntactttcttagacaacatgggttggctatggcatcgtcgtctaacacatgttgggatgaataaccttcataagcttctaaagggagaacatgtgttaggactaaccgatgtttgttttgagaaagatagacattgtgcagcgtgtcaagcaggaaaacggtgggaaacaagtcatccaagcaaaaatataatgacgacgtcaagatcaccggaattgctacaaatggatctctttgggcccattacttatcttagcatcgagggaagtatgtatggcctcattactattgatgactgttcccgcttcacttgggtattctttttgtaggataaatatgaaacccaaggaaccctcaagcgattcctaaggcgggatgaaaatgagttcgagctaaaggtgaagaagataaggagcgacaacgtattggaatt

SEQ ID NO: 13250 - DNA, 439 bp, Zea mays
  unsure (1)..(439): unsure at all n locations
agctnttatgctccggatgccctctccacccctggaggttcggccggcaaaattgtggtagggagcgggttgttctcaacaaccccagcttcgtggagacgaccggtgacgtgggatccactggcagggagccgactccaagcgaaacgagcacgtcaggctgacagtgtggggacggggtgtcggcgccgcgcggtangaagatgaccgcgcccgcgaatggatgactgggaggacccacacggcagagactccagtgaagcgacgtggaagaagggctgacgggatgcgcggtggtaaatcggagttgggtccaaaagggtttagtcggcccatgatggcacagtttcgtttttcttttattctattccgaatttccccttttttatattntcaaattctaacatttgaacttcaacttgagttgtgatcccttcat

SEQ ID NO: 13251 - DNA, 509 bp, Zea mays
  unsure (1)..(509): unsure at all n locations
tactcagcttatacagggagaatcagtaattatgctactntaataatgaatgttgctatccttgataaagtgatacttctttaccaacatggattgagttgtagtagcatacctcatgagaagctcattctcatacttgagactacatgagattactaagagaaagtgttagtctcaacatgatcaagatatagaaatgggctccccctaatgatatgcatcaagtatttgaatgacttggttagatgcactcttctttaaagacaaataggggaattcattgaacatcttgatcaaggcatatcaaaatttgcaataattagcttatgcctggtattnttaaaatgaanaaggtttagaatacttacaaccacaccattgattaatttgaagatcttacgggctaagtaggtgttggtggtcttgatgtcttctttntctcattngagtgtcctccctntatagntgtctctttttcctttcaaacttatggaanatactcgaaagcg

SEQ ID NO: 13252 - DNA, 309 bp, Zea mays
  unsure (1)..(309): unsure at all n locations
agctttcctggcacaagaggtttatctcggtagggtccggttcttgcccttcttccggagctataaattccggaggatcggaaccctcttccgctaatcaaacacagataataacaatacatcaatcatggtgactttagtggggtgtgccaattcttataccttattatttttgtgccctataatttatttagactatttttggtgcataaaatatcagcatataaatatatatatgaaaatgggaaaaagaaatgggaaaagaaaaaggagaaaggatttctagctacctgngccgggggggggggg

SEQ ID NO: 13253 - DNA, 439 bp, Zea mays
  unsure (1)..(439): unsure at all n locations
cgtgaagccaatcacaagcttattgaagaatgatctttttttatctgtcctcaagatgcaacgaagccttcgagtagctgaaggtattgttgaccactgcctcagtattggctcaaccagacattgagaagccttttgatgtgtactgtgatgcatcaggcagtggcctcagatgtgtcttaatgcaataaggatgagttatagcatatgcttcaagacagttgcgccgacatgaggaacattatccaactcatgacttagaattagctgttgttgttcataccctgaaaatatggcgtcattatctgctgggaaatatctgccatatatatacagatcataaaagtttgaagtacatttttcccagtcggaactaaatatgaggcagaggagatggctngaactgattaagaattatgaattagaaattcactatcac

SEQ ID NO: 13254 - DNA, 432 bp, Zea mays
  unsure (1)..(432): unsure at all n locations
agctngacaatgaggagatggcgctcgtcatcaagagcttccgccaaatcctcaagcaaaggagagggaaagactacaagtcccgctccaagaaagtttgctacaagtgtggtaagcccggtcactttattgcaaaatgtccattatcaagtgacagtgatagggataacgacaagaagggcaagaggagagaaaagaagaggtactacaaaagaaaggacggcgatgcccatgtttgtcgggaatggaattccgacgaaagctcaagcgactcctccgacgacgaggacgccgccaacatcgccatcaccaagggacttctcttccccaacgtcggccacaagtgcctcatggcaaaggatggcaaaaggaagaaggtaanatcaagatcctccactaaatatgaaacctctagtgatgaaaatgctagtg

SEQ ID NO: 13255 - DNA, 485 bp, Zea mays
  unsure (1)..(485): unsure at all n locations
cgccgcagntgtggcagccgtcgtctcgtgccgacttcttgttgtctacngcgccgcttgggcacctncacgtgcaccaccctcagcatgtnctcgcgccccggcctgtgcgcctccacgcgccttgcgcggtttgccgcgtttgcggtctcgtgtcgaggaggactcccccttcttgtcaccctggcaggcctcccactgctcccgagtgagatgtagcttcccgccgatagtgataggcccagagagagcctgtggttcgtcgccgtcgaccaccttgaggcgaccaatcgcctcttcgatcgtcatcgtggagaggtctagcagagactcgatcgagcgagcaatctgcctgtacttctcggggatgcaacggaagagcttctcaacagctctctcctcatcgtaggtgtcgtcgccgaactgcaccatcttctgcaatagagtgttgaggcgaagagcanagtcatcaacatcctcacctg

SEQ ID NO: 13256 - DNA, 424 bp, Zea mays
  unsure (1)..(424): unsure at all n locations
agcttcagctccatcgatgttatggattgcttttgagtcagtccaattaccttcggcccttcttgcagcttcctgacttccatggatagcgatgggtccctgatccgaaggtatcttcatgcaaagataggcaggatgaaggattgcttcgaaggcattgagagtaccacgaccaataattgcattgtaagggtattccatgtcgacaatgtcaaacacaacttgctcagttctagtgttgttgatgaacccgaaggtcactgacatggtgatcttgcccaatgctacaatctgtcttcctccgaagccacagagaggatgtgtagcatcatgaatcttatcttctggctcttgcatttgtctgaaggccttagcaaatataatgtcagctgcactgnctgtgtcaaccaagacattgtggacc

SEQ ID NO: 13257 - DNA, 489 bp, Zea mays
  unsure (1)..(489): unsure at all n locations
tgaagccatggtaagtagcataggtaagtaatatgcgaattgactcaagcctagcacgggtgcatagatttcaccaaagtccaaaccttcgacttgtgaatatcccttggctacaagtcaggctttgttccttgtcaccacaccatgctcatcttgttttgtgcggaagacccacttggttcctacaacattttggttaagacgtggaactagatgccatacctcattcctcgtgaagttgttgagttcctcttgcattgccaacacccaatccgaatcccttaatgcgtcttccaccctgtatggctcaatagaagacacaaaagagtaatgctcacaaaaatgtgcggcacgagatcgagtggttacccncttatgaatatcgccgaggatggagttcacggngtgaatcttgtgtatcgcatggtggactatngngtgtggcggtcttggaccctgatcatcttccttgtcttgatcatngacatc

SEQ ID NO: 13258 - DNA, 421 bp, Zea mays
  unsure (1)..(421): unsure at all n locations
agcttctaaagggagagcacattntangattaacaaatggttcatttgagaaagatatgatttgtagcgcatgccaagcagggaagcaagttggtgctcatcatgcacataagaacatcatgacgactgacaggccactggaactcctacacatggatctattcggcccgatagcttacattagcatcggcaggagtaagtactgtctagttattgtggatgactattctcgcttcacttgggtattctttntgcaggaaaaatctcatacccaagaaaccttgaagggattcttgagacgggctcaaaatgagttcggcttaaggatcaagaagattagaagcgacaacgggacggagttcaagaactctcaaattgaaggcttccttgaggaggagggtatcaagcatgagttctcttc

SEQ ID NO: 13259 - DNA, 483 bp, Zea mays
tcgcacctgtgaactaacttggccgcatcgttcttcgtcgtctgtcaatagaatctgacctgaaaatcttcccgactagtgttctggatgctgcatgtattccacattgctcagcatggacctcctccagaagttgcttcccggtggacgggagaacgcacttcatgaggacgcccgatgcaccccttctgtataatgtctccccaatgagtgtatagtgagccgactgcctggcaatacgctctgccgagttcttgtcgtctggttcttcttcattctttatatgcttaatgatcggccttctccagtcatcagagtctgactcgggttgatctatgatgttgcactcttctgtttgatccattgagatactcggctgcagaatttcttgcacgaagactccaggtgggacctgagttcgactggatccgagcttggacagtatatcagctgctgtgttccgatctctttccacatgatgaa

SEQ ID NO: 13260 - DNA, 400 bp, Zea mays
  unsure (1)..(400): unsure at all n locations
agctntctcgactaagtcggtgacagggcctcatggacgggtgaagagtccagatgctcgaaacaagaggaaaaaagacgcagcttcgcaagcacggcgagggtgtgttttctggcctcggcggccgcagaaggcacacgctacaagacgatctgatcctgcaggctcgggtcttcacgctgaagggagccgtagcaccctcggcatcgacgacgtcttcagctaagtctgacccagcctcggacggcgacgcggtccagggaccactccgggaatccggcccgagcaggcggctcggccggttacccctgnggcctcggccaaccggcttccaagggcgccagcccgacccgaggcctcngcggatcgactttggcgtcggctccgctgacngacaaca

SEQ ID NO: 13261 - DNA, 422 bp, Zea mays
  unsure (1)..(422): unsure at all n locations
taatggccctaanaagatatctaattntgttaagggtaaggctcccatggttcagatagtgagggttacattttatatcctgcaaactatcccgaacataagattaggaaaattcatgctatgaaccctcacaatgtttctcatcatgcattcatgtataaaaatgagacttctagttctaggcataccacccatattaaattgcctagaaagaaaattcctgctgcatcaaatgaatataacatttcatttaagactttttatgcttcatatgttttaactaacaaatcaggcaaaatagttgccaaatatgttgggggcaaacacaagagtcccaaaacttgtgtttgggtacccaaggtgcttgattctaatgtgaacggacccaagaccatttgggtacctaagaacaaggcctaaac

SEQ ID NO: 13262 - DNA, 337 bp, Zea mays
agcttcagcatcgaactgtgttccgttgtctacagtaatagccttcggcactccgaagcgacaaacaatgttttgctagaagaatttctagacggtgactgaagttattgtggctaaaggcttcgcctcaatccacttggaaaaatactctaccgccaccacaacatattttagatttccttgtgcgggtggaagtgggcctagcaaatcgaggccccacctttgcaacgaccaagtgggctgtattaactgagtgagagatgaaggttgcttatggtctcttgcacatttttgatagccttcacattttttgactagttctgctgcatccgaagct

SEQ ID NO: 13263 - DNA, 412 bp, Zea mays
  unsure (1)..(412): unsure at all n locations
tgggtggcctaccgacgccaaagcaaccncaatattcttcttccctgtgggttccctcccataggggatcttgcttcttcccaaagctctctgggcgacaacaactatgacaacgactagccacacatgaactatcacttctgtaggtacttgacttggtatgctggtgtggctaggtccaagttaagggccagcggatagctgcagactatgttgagctagattcgccagacgacgaagacacttcgtacgacatagatgcttggcaagggtcgcaagttgaggctgctcccatcctagacagagtggtaacaagttgttaactcaatttatttttgtaattcgatgtcaaagnnttgttatgtgtatcctcatgttntggtgtgcatagggaaactctatgctcatatct

SEQ ID NO: 13264 - DNA, 456 bp, Zea mays
  unsure (1)..(456): unsure at all n locations
actaagcttctncagctngagccgagacatngcctcaccggaggagcagaattgcctcgccggacttcggtcacccgccaccgcgcgtgaactgagttatctggtaagccattttccaattcctcgcgcctaagtctttcctaacatccagtgaagctctctgacccgctcaattgaactatactgccctcgataggccagaatcctcgccgccgacgagctcccccgcctgctcacgtggaccgacctactccgaccatcgccggagacgatccgcacatcgacgtgaccgccaataccttccctacaccctcgaccacttcatcggagcagtctcgccgccggtaagccccaccgccctttcctccgctgcggtcactgttccattanggtaaagatcgcgggtntcgtttcgtagaaacctangnnggtttctacatagtcatagactcatgt

SEQ ID NO: 13265 - DNA, 423 bp, Zea mays
  unsure (1)..(423): unsure at all n locations
agcttcgtcagatgcggccccagtggacttagcttgataggcaaagattcagtcattacctttaagatttcctccacgtcggtggcagaaggtgttgcagcagtttcttcttctatatcaggtgccttctgcttcggagccgcagcctttcttttcttcgaagcatctatctttggctcaggcctcaactttctctttttcagtttttcttcatcatctttcaccaatttagcagcttctttattcaggacgctagcaactctctttctcttctgtccttcggcacctcggtccaaccgctcatagtcaggatactcaaagttcagagcatccatcacccggtttaaccttcgctntggacgagtgccgaaggctgcagtcattagttgatcttcttttntagaataatggccaagaatttcg

SEQ ID NO: 13266 - DNA, 435 bp, Zea mays
  unsure (1)..(435): unsure at all n locations
cgcaggtatattatatctcactnggcttttgcacgtatacatacatgccgcccagaattaccagcaacaagctcatgaaaaagcagcagcagaatgtaagctgtggcgtgcattacggtgttacttggctagtagctaacctgtttcttcatgctgttcaggcctcgacaggtgtggcaagagctgcaggctgaggtggataaactacctgaggccagacctcaagaggggcacattctcgcaagaggaggaggacctcatcatacacctccactccttgctgggaaacaagtaagcttaattntcatgcatggatgcatggcgagcagtaatggagaacgaatctgaacggttacatggccaggtggtctcagattgcggcccagctgcctggccggacggacaacgaggtcaagaacttctggaactcgtaca

SEQ ID NO: 13267 - DNA, 501 bp, Zea mays
  unsure (1)..(501): unsure at all n locations
atcttaagtcactgcagctgcaactttaagggagacacactgtgtgatnacttatgttattttgatacagataggatatagtggcgcatgtcacgcagggaagcaagttggtgttcatcatccacacaagaacatcttgacgaccgacatgccactctagcttctacacatggacctattctggccgataacttacataagcatcggcgggagtaagtactgtctagttattgaggatgactattctcgcttctctaggggttcttnttgcacgaaaaatctcacacccaagagaccttaaagggattcttgagacnggctcaaaatgagttcggataaggatacaaaaataaaaacgaaatggacatagtcatgactctcaaatcaatgcttcttgagaggacggatcagcatgattctctcttctacccacacaaatgggtagagagagaaaataaacttttgactggccgacatctgataaacagattcatcgtttgg

SEQ ID NO: 13268 - DNA, 336 bp, Zea mays
  unsure (1)..(336): unsure at all n locations
ttgcttagactatcatcccagttctctgtgtctttgagcgtgcccatgggaaaatcttcacagctgtcaagataatgctcctcgatgaaaaacaatgcagatggagcgatttattatccgtggcagtctgggcgctatacacaactgagtgcanggcgaccgggttcactcctttccgccttctatacggatcggaggcaatgaccccgcaagatataaatcatgggtctccgcgtacagttccgtcaagccgtacacgacgtggacgaaccatcttcaaaagatctcattgactgagacctggtcttctccctacacgccctaaacatataccaa

SEQ ID NO: 13269 - DNA, 435 bp, Zea mays
gcttgaagcgaggcaagagacacctatagtgtggtgatccttgtggtgtcttactgaaccacgagattaatgaagacgcctcactcagtctaagcgaccgtttgagagagggaaacgtgtgaaagagaccccatctttgtgaccacctcaacggtgactatgttctttataactgaaccttcggtaaacaaatcaccgtggtattcgctttatttcttggttgatttgtgtccccctctctctcttggactcggattatatctagcgctaaccccgacattgtagtgtgtctaaagttgttaatatcagtttccacctatccacctccctataagcgactgtcagtgttcatggactatctccacaagcttgtagtggtggtcattgatgatatccttatatattctcagaatgagcaaacgcatgaagaacact

SEQ ID NO: 13270 - DNA, 303 bp, Zea mays
ataaggatcagctaggtgaagggcttctacagataaaactctcaagatggaaagtacatcacaacatggtaaaggtacaaaaggaagtgctgaccttttgcgtatgctgattatcctccaatgcttgtggtgcatatgtttaacgtgtaacggggagtaatcgtagtatgtatgattctacctactaaataccctgctgtgcctcgacatcattctatgttcttgcttgatatggtttggtgttgatgtcaaagggagaattgtgcataagctacctcacctgaaggaagcttacctaagggt

SEQ ID NO: 13271 - DNA, 439 bp, Zea mays
tgcctcacgataacgaggagtacattgtataccctgtcggttatccggagtacaaaactcggagaatttattctaggaagtctcactctggctctcatcatgctcttatgtataagagtgaggcatctagttctaggcaatcaacccatgctaaattgcctaagaagaaaactcccattgcatcaaatgagcctattgtttcatttaagactcttgatgcttcatatgttctaactaacaaatcacgcaaagtagatgccaaatatgtcgggggacaagggctccaagacttgtgtttggtactcaacgtgcttgtttctaatgtgaaaggacccaagaccgtctgggtacctaagaacaaggcctacatttgttttgtacgtttatgcatccgacggctcaagtaggatcatcgattgcgggtgacataccacatgac

SEQ ID NO: 13272 - DNA, 411 bp, Zea mays
  unsure (1)..(411): unsure at all n locations
gcagctgcaacttatcctccggccttgttcatgtgcatgtattatcaccacctaatagtacagagtcagggataaatatcatagcactggccatgacttgcataggttaaaacagnacaatcacaagaccatacctttgcaacgaaatgctcatctaaaagaatngttgctcgatttgatgtccctatggcaaagtggagggttacaaaagaagtgcatatactcctgaaacgagaagaggacatggagatcaacacaacacagtgtcattcgtataaaacggaaatgttcacacacaatcagttatataatggaccaantatacgtatctcgcacaactgcaggacagatagttcctatctgctaagcatcaagtatggtccaatgaagatccagaaagacaaatggagt

SEQ ID NO: 13273 - DNA, 407 bp, Zea mays
  unsure (1)..(407): unsure at all n locations
cttcattctcacatgtgctatgcggcgatgccacaaccagcccatgcaagtcttagccattaagcatgcatctagaccggcctcttcttttgcaaaatcaaccaaataaagtttgtcgtctagtacacccttaaaagctagtgaaccatcacatcttctaaagacagacacatctacatttgtaaatagacaattatatcccatattacataattgactgacagatagtaaattatatcccagagactcaactaagaacacattagagatagagtgttcttttgagatagcaattntacctaacccttttaccttgccttggttcccatcaccgaatattatngaatcttgggaatccttgttcttgacgtaggaggtgaacatcttcttcttctcccccgtcatat

SEQ ID NO: 13274 - DNA, 389 bp, Zea mays
  unsure (1)..(389): unsure at all n locations
tcactgtctataatcaaaacgtgctatgcagcaaggttggacttcaactgcacaaataacattgcaaagtacgaggcccttctcttggtgcttcgaaaacttaaggcaatgggaattagaagggcaattgactcacaagtcatttcatgtcacgttgacaaaagtagtaaagcaagggacccatagctcgagaagtatctggacacaatctaaaggatggaagcctctttcgaaggtttctcattataaacatcccaagaggagaaaatgaacatgcaaacttgttagctatttcagcggcataggggcttccgttaccttcangggtatntttcgaaacaataatagcaccttcagtcgagctcatggagagagtagtgcttacaatc

SEQ ID NO: 13275 - DNA, 409 bp, Zea mays
  unsure (1)..(409): unsure at all n locations
cagcttgacccatatgacatgacaatacgcctaggtccactatacaaacngacagatacacaagagactattcgccccatatcgtgcttgcctagtgctggaggtatggatgacaacagtttcggttatttgcggtattccggagaccgatttcaaaatttttcgaccagattcaccagtcacggtatatttcggaaactgaatcggttttcggattcttctatcggaatctgcgtggtattatactgaccgcttccttcggttacctattattgtcggacattaccagatttgagtctcggaatttccggaattgctctcaaaattatctggaatgtgtctagatttttcgaaatttacagattggattattcgatcgctgtcctctctcataacgatactcttttga

SEQ ID NO: 13276 - DNA, 480 bp, Zea mays
  unsure (1)..(480): unsure at all n locations
agcttcggcagatagaagaagtattctnttatgtcttgctatgtaaaaacttcggcagaaagaagaagtagtcttttatgttttgctatgtgaagaacagctttggcaaaaagaggaagcgaccgtttaagcttcgttgtgtacgaaaagaagggaaggtgttttttcgccgtcggctcataatactgatttcgtccacatcatagcgactcaatcgaagggtaaggatatattacaaggtatgtacaaagttccttgagaacagntcaattgtatttacaaaacttgttacaaaggtatcctgagtttttttcctatagtacatctctactgatcttcattaagcttcagcttcggcgacagtttcggcgatataacttaagcatcatcttcaccttcgtcatcctacataaatcaaggaaccgtgagtaaaaatcaagtgcatagaanagggtaagtacgaagtattatctcttactg

SEQ ID NO: 13277 - DNA, 377 bp, Zea mays
  unsure (1)..(377): unsure at all n locations
agaacacgtgagttgtttgtcttacgcgcaactcgcaaaagatagaccttgtgcagcttgtcaagcacggtaacaagtgggatgagcacatcacagcaagaatgtgatgaccactctcagacctctggagctgatgcatatggacctcttcggacccgtcgcctatctgagcatatgaggaagtaagtatggtctacntattgtngatgacttcttccgcttcactagggtgttccttttgcaggataagtctgaaacccaagggaccctctagcgctttctaaggagagctcacaatgagtctgagctcacggtgaagaagataagaagcgacaacgggtccgaattcaagaatcttctagtggaggagttccttg

SEQ ID NO: 13278 - DNA, 374 bp, Zea mays
  unsure (1)..(374): unsure at all n locations
agcttcgcatcgatcctttcaaggtgctacagttctctgctacctggtactggtagtgaaagtcacctagaggggggtgaatagggcgaatctgaaatttataaacttaagcacaactacaaaccgggttagcgttagaaatatgaacgagtccgagagagagggtgaaaaacaaatcacaagcaaataaagagtgagacacgatgatttgttttaccgaggttcggttcttgcaaacctactccccgttgaggtggtcacaaagaccangtctctttcaaccctttccctctctcatacggtcacttagaccgagtgagcttctcttttaatcaaacgggacacaaagtccccgcacggacaccacacaattg

SEQ ID NO: 13279 - DNA, 400 bp, Zea mays
  unsure (1)..(400): unsure at all n locations
tcactctacaatatcttngaccttgctaggatctaccgcaattcctttagccgatnacacgtgccccaaaaattgaatttctttcagccagaacgcgcactngctgaactnggcatacagctgatgttccctcaggcgcgtcaatacaatccgtagatgctgagcatggtcctcttcatttttagaatatatcaagatatcgtcgatgaagactaccacgaacttgtccaactcgngcatgaacaccgagttcatcatataagtgaagtgggcaggagcatttgtgagcccgaaagacattaccaggtattcaaacaatccataccgcgtagtanacgcggtcttcggtatatcctcgggccgaatacggattgtgatacctgatctgagacaatttgaa

SEQ ID NO: 13280 - DNA, 321 bp, Zea mays
tcatttattccacccagaggtgacttaacttaacacacgagagactagaagcaacggcaatacagctgtagaagacaggcgctgtaaaccaaccaaacacaagacacatgtgatgcactgaaaatgcaagtggtctgccacactcagaagagaggatgccggtcgttgatcgaaaccacttgtttgcaacttgaaaatgaagcaaaacgcctgacctttttgtagtaacgattaaactgctctaatgggaaagctcaaagcaacttgtcacactcaggatgacattgcaagttgaaaacataaaactgcaaaaatatctag

SEQ ID NO: 13281 - DNA, 240 bp, Zea mays
atgtactccacattggcctggatggacttccttcagaagttgctttccggtggaccggagaacgcacttcatgaggacgcctgacgcgcccctcctgtataaatacctcccaatgagtgtatagtgagctgattgtctggcaatgcacttctgccgagtcttgcatctggatcttctcattctttatatacttaataaatcggtggtctcagtcatcaaaatctgacttgggttgatcta

SEQ ID NO: 13282 - DNA, 483 bp, Zea mays
  unsure (1)..(483): unsure at all n locations
gcttcggtctcttggctgcactcttgcaacatgaccagaaatcacttgggaatcggntgtaaggaccggccttcttatccctattgcctttatacttccgaagccccaaaagcaaagcttcgtattcagcaatattgtttgtgtagctgaaatcaagctttatcgcgtagcatgttctgactntggaaggtgcaactaagacagccgccgcacctgccccgaaggttccccaggaaccatcgcagaacactgtccaagcttcaacatctttatttgcttcttcttcctgagcccctggcgttcagtcaacgatgaagtctgctaacgcctgggactgaattgaggatctatgcacataatcaatgctgaattcattgagttccgcagccccactttcaattcttccagtagcttctctgtccctcatgatatccttcagaggctgtgatgaanggaacaatatatggaacactttgaaataat

SEQ ID NO: 13283 - DNA, 377 bp, Zea mays
  unsure (1)..(377): unsure at all n locations
agcttcgactaccaagtgatcaagctnttcgagttctacgagantgatgaccctgagcactcgctntgtgaaggcaagtgatctctaacctatttatgtcttattcacatgataattcatttccccgcattacataattgaaacctaaggatttactagctttctgttcaccttgtccttgattaacttttgggttattatggttagctttatagtagtgctctactttaattaatgaacatgatgagaatactttatgatacgatgttctattctggatatgataatgaacttgtgacactaaaggaggcttaagctgtttctcgagtacttctccataaggacctgttcgttggatgaccactgcgaaaaaagtg

SEQ ID NO: 13284 - DNA, 342 bp, Zea mays
  unsure (1)..(342): unsure at all n locations
aatattccactccccgtcctcataattatctacaactctggcatctttgtccatgcaaatgtcaaagaatctacgatatactaattttaggggcacatccccccaccaggtatctttcaaaagagggaacttccccgtccgtaactttattaatagcaccccatttgaacaggtgtttaaccttgtgcaaccctttccaaaattgagacgcatctctatccgatgacagganaaaatttcccttggtcatgtattctcctttgataagntngaaccaggtgtcattagacccctgagcaattttccatattcattntaccagcaaacattcattcatcaatc

SEQ ID NO: 13285 - DNA, 329 bp, Zea mays
  unsure (1)..(329): unsure at all n locations
agcttgtgaagattcttcattccaacatgggctagtcgacgatgccagagccaacccatgttagtcttagcaattaagcaagtgtcgagttcagctctattaaaatcaactaagtacagctgaccctctaacactcccttaaatgctactgaatcatcacttcttctaaagacagtaacacctatatccgtaaaaagacaattgtagcccattttgcataattgagaaacagagagcaagttataatctaaagattctacaagaaaaacattggaaatagaatggtcaagaaatatagcaattntaccaagtcctttgaccaaaccttg

SEQ ID NO: 13286 - DNA, 451 bp, Zea mays
  unsure (1)..(451): unsure at all n locations
ctgtacggcatgttgccatcctcttgggctgctggctggccatgggctttgacacccattacagtcagattagagttgccatacagaaagcaaagcacacctaatgattaattgcagaacaagcttcatgagtaaagcatgatatttctcttctaaaaaagacatagtatattatagtcaagcctggagaactaatacccatgtaaagacacataatgaagcttatgcttgttactgtaggattggagaaacaaagccacaaatatctaatgtagaactattaataaatgctcacaagattgcacaaacaatacatgtgtcctgcattntcgtgaaaaaagtaatagatcaaactgctatataatcaaatctttgagaatgtcatgaactatgataaattctactctgagagtgacaaattgagatattaatatacaatatctaactggct

SEQ ID NO: 13287 - DNA, 483 bp, Zea mays
  unsure (1)..(483): unsure at all n locations
agcttgtgaagattcttcatcctctcatgtgctattcggcgatgccagagccaacccatgttagtcttagcaattaagcatgtgtcgagttcagctctatcaaaatctactaagtatagctgaccctctaacacacccttaaatgctattgaatcatcacgtcttctaaagacagtgacacctacatcagtgaatagaacagtgtagcccatcttgcataattgagatacggatagcanattgtaatctacagaatctacaagaataacattagaaatggaatggtcaggggatatagcaattntacccaaacctttgaccaaaccttggtttccatccncgaatgtgatcgctcgttggggatcttggtttttctcataagaggagaacatctttttcttccctgtcatgtggtttgtgcacccgctgtcgagtatccaactttgagccccggatgcataaacctacnaaaacaatttagtt

SEQ ID NO: 13288 - DNA, 373 bp, Zea mays
  unsure (1)..(373): unsure at all n locations
gctattgcatgagtctgtgtcaagaagtacatttattcttcttgctggtatccctccattgctntatgagtattgcaaantctatctctcttgagaggaggaaaagacgttacatgacatgagcaccattngcttcacgtcaacagaatagttgtggagagctctaatagttggattctagtgtaataacaaccatgntttatagtgctagagacgggtatgtcaagtgtttcagacattgtccatacatggatgtttgaccttagtggcattaacagatgaaggttgtgaattcgttgattgttgtgcttagagttctaacctattatgccaagagttgcttataggctctggngagttgcatcctcatttg

SEQ ID NO: 13289 - DNA, 508 bp, Zea mays
  unsure (1)..(508): unsure at all n locations
agcttgcaacagaaatactcatgcacaactaagcatttgagcatatcgacattcctaaaggcttgttgcagacatacttcagctcaagcacaaacaccagttggacactaaaggctcgctgcagaataactaaatactcgtgcacaaaagaaataccatgcacaaaagaaatactaaaggctcgttgtagcacagacatcagtgaatttcttaaacaacaaatatatcttgatgccaccaaataaacaagaaagacacacctctctgtcacagtaacattntcatcgggtttagcggtaccggaagcttcaacaacatcactggtgcttccagcagatggnggcttgaaaggtgcangaccagatgctccttcagctctagaacgctcccaanggattggtggcgaatctgcannatcgcattacaatacangttaataacatcggaatccatgctattagtaatanggatatgtcagaacaattcaatgaaaactaacgacacacct

SEQ ID NO: 13290 - DNA, 374 bp, Zea mays
  unsure (1)..(374): unsure at all n locations
gaaatgaatgaagccgccgaagaatgccaaagagccttcggcgttgtcttgtcttttataggaacaagggacttagtacaagagcacatcgccttcanggtgtggccgcttgcggagaaatgggaaatgccacaagaaaccattaaagaggccgacgaaggtggacttatcangtttaagtatacttttaagtttggagataaatttattgagccagatgatgagtggttgaaaagcattgacaatttaagtgatgagctgcttgggacctactcgaaggccgaagatactgcaatgtcagcagccttcggaggcccgaaaaagaaaaggctgaatcgggtatttgatgccgtccggtttgtctaccctgacta

SEQ ID NO: 13291 - DNA, 393 bp, Zea mays
gatctgacactatcttcttcggcaccccatgaaggcagactatccgtgacatgtataactcggctaacgttgctccggtgtatgtcgtcttcacaggtatgaaatgggccacctttgttaagcggtccacaaccacccagatggaatcgtagccggcccgggtacgaggtaggccaactataaaatccatcccgatctcatcccacttccactgaggaatccgcaatggctgcaacagtccggcgggcctctgatgctctgctttggttctctgacagctatcacagatggcgacatattctgcgatctcccttttcataccatatccaccaaaacctcttttaaatcctggacatcttctacttctagggtgatggagtaggctgtctatga

SEQ ID NO: 13292 - DNA, 435 bp, Zea mays
ttgagcacactgagtcactggttcttgctatatcttaccttgactcctaaaggccaacatatccctgagaggcgttttcttttggtcgggtaagacttgcaaaagtacacctccgtactcagggtattcgaacccatgctgttgtaggtgaagaaactgtcgagttttgctgcttctgctccaaggttgtcctaaagtaggatgaataacaataagaaaaacttatggagggtgtttacctttccaagatgtaattagtatatacactcgaacccgtttatgtaataatgactcttctatattgcacttatgaatgctaattaagttattgtaactctctctgcttatactccgatggtatgtaatgtctgctatatggcatgaacgctcttgagccatgtgaatgaatacatgaatcatgtcctgcgagctatt

SEQ ID NO: 13293 - DNA, 453 bp, Zea mays
  unsure (1)..(453): unsure at all n locations
tagtatggtcagtcaattcatatttccgttagcttaattattgaattagctcgataaatgcaatgtgattattttcatgattctggagtagtcgggttgggtaggtttaagatgttaattatgtgacgtacggtaaattagtgaatgaagttaaatttagtattttaaaatgtctaaacaataatattgttagtattacttatgacgagatataattggttgatacaattaatgataagctatatatatagcttagagtggtatgtaatttaatccagtcgcgttgtctanaaaaagtgatgtgctcttattcttgttctagatttaaacttcttagaccactgagcttagaatntaattaattaactggatagttgtgttagactaatcgtattaatgtgatagtcggctgtctatgatggttgtgtagattcaattaattaaggagcgcac

SEQ ID NO: 13294 - DNA, 380 bp, Zea mays
  unsure (1)..(380): unsure at all n locations
atgcaagctggccttcgcttctgttaatcatccgcagttcaactgagtcgtgtatctcgccaatgggatgatcttctcagccatgcaaaacatgctcctcgatgaataataggcaaaaggactgattngatacctgatgcagtctgggcactaaacacaactgaatgcatagcgactggaggtactccctttcgccttctatacngatcggangccatgaccccgcacgaataaagcatgggtccccacgaacagtttcgacagccgtccccgtcgtggacgagccaactattaaggatctcattgacggagaccgagtcttcgccctacaggccctaaacaaataccaagcccagaccaaaacatggcgcgaccacaca

SEQ ID NO: 13295 - DNA, 443 bp, Zea mays
  unsure (1)..(443): unsure at all n locations
agcttctaaagggagaacacgtgatatgtttgactaacgtgcatttcgaaaaagatagaccttgtgcagctcgtcaagcaagtaaacaagtgggaggagcgcatcacagcaagaacgtgatgaccacttcanaacccctggagctgctgcatatggacctcttcggacccgtcgcctatctgagcataggagggagtaagtatgggttagttattggtgatgactnttcccgcttcacttgggtattctttntgcaggataagtctgaaacccaaggaaccctcaagcgcttcctcaggagagctcataatgagtttgagctcaaggtgaacaagatgatgagcgacaacgggtccgagttcaagaaccttcaagtggaggagttccttgaggaggaagggatcaagcacgagttcttcgctccctacacaccacatgcaaat

SEQ ID NO: 13296 - DNA, 381 bp, Zea mays
  unsure (1)..(381): unsure at all n locations
gaatattccaacaggggaaaatgagcatgctgatttgctaaccaagtcagtggcacaggggcttcctctaccttcggaagtattttttgagacaattaaagcaccttcggttgaactcctcgaaagagcagtgcttacaatatcccctatccatagtgaagattggaggactgagattatatctttccttcaagggaattggctttcagatgatgaagcttataataagagaatggaggcaaaagaccatatgtgataatagaagggaagttatacaaacatggagtctgctctccacttctcaagtgtctatccagaaccgaaggtatagagctgatgaaggaaatacatgcaggtntgtgtggatctcacattggatct

SEQ ID NO: 13297 - DNA, 493 bp, Zea mays
  unsure (1)..(493): unsure at all n locations
agctttntgacttcatggaaagttcactgttcaatctaacaatctcggcttgagcctttgccagtgaaccttccattgtttgaatcacgaagtctttcttttctagggtagcttcatgatctttagtcttgttctctaagccctcaattataacttcgnntttcttgtcctcgaggtcttgttgcatcctcaagggtctgcttaatagtaggctctgacaaaataaccttcatcagaaaacatcttcatatcaaaacaataaagagttaagggaagaatttaccttatagtagaataaaacaagctaccggcgatgtgctgccgtcagtatctgctgagatcggcttcgagcttcaaanaccaacacttttcaatanagtcctgacaattntcgccctagtccggtctcgaaggcaacctaagctctcttcgtctataccaccgaagagcagcacccctggcttgtacccgcaagaataacatagtccctcac

SEQ ID NO: 13298 - DNA, 355 bp, Zea mays
  unsure (1)..(355): unsure at all n locations
agcttgaaggactgcttcagcaggagagcttccttacgtgatgatctggtcggaccacggaggcgctttatccgagcgcaatgtacttatcgcagaaagggacgagtgaggtatccgtatcccggaggcgtangagtccctcagctcggtcagccttggctgcttacgtgtaccttgtctgttctaggatccgctttccgaagtatgcacgatgcacgaaagatatcctgctagaaagagatcctttgtcgaggaaaaatttgacgaagagggggtctccctccttgtagccctcgagggagggtcgggctttgccgatgctaggccgaccctttcttgatgactataactttgc

SEQ ID NO: 13299 - DNA, 274 bp, Zea mays
  unsure (1)..(274): unsure at all n locations
actagagccaaaacttctggttctatctgntctcctcgaanatgctctccgaaatcgttttaccaaatttaacttcaccagagaatctgcttcgcggtgccggaggccgaggcggaaccatcccccattctatgagaagccgaagtcccttgcaaacagatctttgcggtgagacagacttgctcaactgctacttcctttctccccctggaatgatatggccaccttcgtaggctgaagctgacgcacgtgatgagagctctgcttctgcagt

SEQ ID NO: 13300 - DNA, 392 bp, Zea mays
  unsure (1)..(392): unsure at all n locations
gccagactgacccaaaggaagaagccccgccaacactacccttcctagggatagagaacttttccgacgtcgaggaagtgtccctcgctagccttgatgatctcctcagggagtttggggacactntatcggataacgctcatgcgtagtgtaatctgtggtggttgttatgcttgtaatgaactggagtactaaataaaataacatgtttaaaaaaatgatggcatatgcatagtagtaatcctttctcccctctagcagatggcttcagataaaaccacgcctaccgcctcgggaattggagcaagggattccctangtattgaaggggaattcggtagagaatggagtgagaacccacctcccgcgcctccggaactgccattagacct

SEQ ID NO: 13301 - DNA, 514 bp, Zea mays
  unsure (1)..(514): unsure at all n locations
ctgcagcttgatgtcttgttgggttcattntcttagatggactgaagacaatcgagcagattacaatggactcagcttccgtcgagaccaatatggttagcctgctgtatcatttaattgatcctcgtactttcccactattaactgtaattagggtcttatatgcacatatcaactctttgtaaagtattctttgaggtcatggatccaagtatatcacctgataaactgtgtcaagtcttggaacagcacaacgtgcttgcaatgccagccaatttaacacatcatctctcattgttctagttgagcatgatgatcttggtagtngtgtgacggtgctgtntntcattagtagatcccgtgtactntatccttgctatactgtccatatatgctgtgtgcatgacagtcttgcattgaaaatgtcatgtgctacaatcgntaggactattaatagaatgtgctcactgctctgcattgaaaatgtcatgtgctacaattcgaaatgtcatgt

SEQ ID NO: 13302 - DNA, 355 bp, Zea mays
  unsure (1)..(355): unsure at all n locations
atgactcaactctatctagcctagtaccccaagggtgcaaaagctaagctagctgcgaggagtcctaccatcaccaacgtctaactctactctggacatctagtgagcgaatgaggcaacactcgactcggnggagggtggtcttcccgagccagcagtgtccacactggaggcaggctcatctcctccctcgatgtcgacgtcctcgttggcctccaggtcctggatctcctggtgatgcatatccaggtgctcgttagcctcagcaagctactgctgagtattaatgagctgatcctcaagaacctcaatggtgttctccctggtgcccactagctcctccaactcttggata

SEQ ID NO: 13303 - DNA, 280 bp, Zea mays
  unsure (1)..(280): unsure at all n locations
aatcgactcagaccgagacactacactgagactctcttctcatgcaagtcacctgcctgggctcagctttatcatnttatcccacaggtttggacctgacagaagtacatctttttcgatgttaacccatcatggccatgatggatcgacttacaagatttatnttttgaaaacatcccatcccacttgaagcatcatcttttgtcaaaactaaacattttgttttctagagcaagacttagcatcagaaaaaacaactttttcatataacacgtgatca

SEQ ID NO: 13304 - DNA, 387 bp, Zea mays
  unsure (1)..(387): unsure at all n locations
gcttgttgatcttccgtgagcccttgatcatatatctaaagctcacataattcccgattacttcctcgggagtcattagtgtatatctagggttgccacgaattaattgtacttgagtagagctaaggaaaataagagatcttagaataaccttaaccacctcgtggtaatcccactttttgctcccaaggttgcgcacttgattcaccaagggtttgagtcggntgtacatgtcttgtggctcctccccttggtgaagacggaagcaaccgagcttccccttgatcgttcccgcttgggatcttgggagttcataccctcgtgcgcgtcttgacacgtgccaaacttcttggcgctcttaatcttgcaccttgtgactcctcctac

SEQ ID NO: 13305 - DNA, 398 bp, Zea mays
  unsure (1)..(398): unsure at all n locations
agcttagaatacttacanattaagcaagtcttgttgcgcacgagctataaactgagtaagcaatagcagatggcaaagaaagcgtaccaaatgacattgtggtgtgctcttatttatacatctggtgcattgagaacaggagggccccgcttgacattgactgttgctattctagcaagaggaaggtgttttttcggaccttcggcttanggccttcgtccatatcgcaatctcaatttattatcctaacaaattaatattgcgaaggggctactgtgggaaggtcctcaaaaaagtgatttgacaatgtttctggagtataatacatgagcaggtaccttcagacacgaacccttcggacaagtcaaaatttgtgtatgaagaaacacanagagaac

SEQ ID NO: 13306 - DNA, 457 bp, Zea mays
  unsure (1)..(457): unsure at all n locations
atcctctgagtcacctgcngcatgaagcttaaatgtttgcctcttaaaaagattatattattgtaagctataatttatgatggaggagataaataaaagttatgagcgcgctcttcaaattgtcgttttaagacgaacaagagctttcaggcgacatttcacaaagatttgctgagttgctgcatcttgtacatgggaataatacgttcccaactaacatatgagcaacaccacacactgttcagcttccacagttttccatagccgttccccgtacagggcgaaatcagtaaaaggctatttgtattcatgagtgcagttacattactatccgtaaaattaatccgtctgaatcgtanatcacacgactgctttatcacgctttcagttctgtcaagaagctcagtgagcagctctacaacagctataccaataccacacgctaaatcccccagct

SEQ ID NO: 13307 - DNA, 460 bp, Zea mays
gcttatctatgatgtacttgttgtgtccaggaatttgcgccactcatttcaggcgcacatggttgtggttgtgacctcctaccgttaaaggccatcctccacaactctaacgccatgggcaacatcgccaactgggcggtggaacttgctgagttccaaatggagttccagcctcgccacgctgtcaagagccaggtcctggctaacttcatcgtggagtggaccccttccccgagtgctcctgggggtccggatcccatttcggaccccacacctgtggagcccagggctctggtcttcaccgagccccactggacgctcttcttcgacggatccacccgacagcagggtggcggagccggagtggtcctcattgacccaagcggagatcacgtgaagtacatggtgcaccttgagtcaaggccaccaacaacatggcgtaatatgaagcgctgatctt

SEQ ID NO: 13308 - DNA, 336 bp, Zea mays
  unsure (1)..(336): unsure at all n locations
tatgattaatacagcacactagtgtagaactcaatgatggcataataacaagcaagttacatcaaattcattaggtattctgcagatttatttgcagatatattatatacatgtggtgctaagccatcagttcagagagcaacatacattataaggctccatatatagagaacaatgtgaacaaaccaattagcaatttgaggaaaatatatgtccaataaagcattgagttcttcagcaactaaaggcctgtttggatccaagagctaaatcaaactgactaaattttagctccttcttangagctaaaagtgactaanagatacattttcacca

SEQ ID NO: 13309 - DNA, 385 bp, Zea mays
  unsure (1)..(385): unsure at all n locations
aaatattcctcgaagagaaaatgaacatgctgatttattagccaaatcagcagcacaggggctgcccttaccttccgaggtatttttcgaaacaataaaagcaccttcggttgaacttctttgaaaggcagtcctcaacatatcttctgtctatagtgaagactggagaactgagatcatctcttttcttcagggtaactttctttcagatgacgaagcttataataagaggatagaggcaagagctcgaccgtatgttataatagaaggggagctatacaagcatggngtatgttctccattactcannatgttatccagagccgaaggtatagaattgatgaaggaaatacacgcaggcctgtgtggatctcatattggatct

SEQ ID NO: 13310 - DNA, 494 bp, Zea mays
  unsure (1)..(494): unsure at all n locations
acctgcagcatgcaagcttnctcccttctttggcggaagtcgttgtcatctctgatgtactcatccatcttctgaagtagcttctccatagtttgcggaggcttccttgtgaagtactgagccgtatgttctagccgaaagcccttaatcatggcctcaatgacaatctcattgggcactgtaggcgcttgtgcccttagtcgcaagaaccttcgtacataggcctgaaggtattcttcatggtcttgcatacattcgaacagagcctgagctgtgaccggcttcgtttgaaagccttggaagctggtgaccaacatgtccttaagcttctgccaacgccgtgatggtccctggccgaagagaagaataccatgtttgggctacattccagactgccatgacgaaggacttcgccatgactgcagtngtgccncatacaaaatatangtgcttatagctcatagaactgctttgatctgagtgtcatcatacat

SEQ ID NO: 13311 - DNA, 472 bp, Zea mays
  unsure (1)..(472): unsure at all n locations
agcttattanacccnctcattnttgctctaggatccaatacanaagcaaagcaatatagaacatgtatcttcctccaatantttcaaatatttgttttcataggaacaatagcatctctaagcaaagcatcattttcaaaagcatttagatgtctagcaattntaagtatatgatgaagcattaatgctgaagtaggataataagttccagacaaagcaacagttgtatcatataacaactcaagaaaagatagaattttctcagcaacatcccagtgatcatctgtcaacaaaaaagaaccatctctttgaactgggtggttagtttggataaaaacggagaaagtgcttcgataaggaacaagatgcttaaacattaagtaagtagagttccatctaacatccatatcaacaccaaacttgcgaggaggcactccaagactcaagcaaaagcttttaaatgcagcaatac

SEQ ID NO: 13312 - DNA, 416 bp, Zea mays
  unsure (1)..(416): unsure at all n locations
agcttgtgaagattcttcatcccaacatgagcaagtcggcgatgccagagccagcccatattagtcttagcaattaagcaagtgtctagttcaacattgttatcattaaaatcaactaaatatagctgaccatctaacactcccttaaatgctattgaataatcacttcttctaaagacagtaacaccaatatcagtaaaaagacaattgtaacccattttgcataattgagaaactgaaagcaaattgtaatctaaagaatctacaagaaaacattggaaatggaatggtcaggagatatagcaatntttcccaaacctttgaccaaaccatgatttcaatcctcgaatgtaatcgttctttggggagtcatcattttctcatatgaggagaacatccttcttctccctgtcatg

SEQ ID NO: 13313 - DNA, 409 bp, Zea mays
  unsure (1)..(409): unsure at all n locations
agcttgttcgaaagatgcaaggaggccatcgatggatccaaacacaggtgctgcaatgagatcgacctggactgcatcatgtcgtagcatcgaaagctggagtgctccctccaccttataatgtacctcgtgttaaggcccatgatggctcatattagctgtgactatatatattctaccaagacctaaggactaattgctctatctaattcaaggttagtaacatggtatcaaagtcagaggtcccaaattcgaatactggcagaggctntatttgtgcttccacacatttattttcacgtttgtgcctttctttctggctgcgtntgcgccattctatctggctgcacgtgagtgggagtcttgaagtgtataagtggattgtgtaccttctctcatcaacttaagc

SEQ ID NO: 13314 - DNA, 312 bp, Zea mays
  unsure (1)..(312): unsure at all n locations
ttcgcctggtagtggagttcgngcacccggcaaaatccttcagcattggcactctatactaggcttccgagagcccatatatacacactaaggctaactatggcatttggggtaagatgatgaagacagatctcaaatagctttatacatcaccaatcatctcatatagaggggatcgaagacctgctcttataaactacgacttcgtcattccttggtttcagatcacttcttactcacaaactgaactatatcgtcatcatgcttgcaacatatcctatttcttcataaaaccgatcttcgctataccga

SEQ ID NO: 13315 - DNA, 157 bp, Zea mays
  unsure (1)..(157): unsure at all n locations
ataacgtattatttgtctactgtagggccaaaaggaaacaaacacattgtatatgttcgagatacctgtagctaggacatacaccacggctgtaatgaataaaattcacgagnnctctaaatatgctacttgctacaagatatcacatgattcacat

SEQ ID NO: 13316 - DNA, 409 bp, Zea mays
  unsure (1)..(409): unsure at all n locations
gcttcaaagaatacgacttcattctcttcgggagtaggcgtagtcttctcctcggcatctaccctgacaatagacatgtctcanaaataccttcccttcatgctatcaagatgactntgtttgatgctcgattttccgaagactgtgtgacttggtcgccacggtcgatcttcggactcttcaccaccactatccgcatcanaactgtcactgacaccaatatcttcagataaaccctccaaaatctctttagtaatcttctctgtattagtctttgacattgattgaagaaagcccagatgcatctcctcagaaagacttagctntgaatcanccaacagctttttatcttcagacatccttgcaaaacgctgagaaggtgctctcgaaactgaagcttaaaaatcta

SEQ ID NO: 13317 - DNA, 462 bp, Zea mays
  unsure (1)..(462): unsure at all n locations
tgcggcatgcaagcttctatagggagaagcacatttgggactaatcattgttcatttttataaagacagggtttggagcgcatgtcaggtagggaagcaagttgatgttcatcatccacacaagaacatcatgacgactgacaggccgcttgagctactccacatggacctattcggcccgatagcttacataagcatcggcgggagtaagtattgtcttggaattgtggatgattattctcgcttcacttggggtgttctttttgcaggataaatctcatacccaagagactntaaagggattcttgagacgagctcanaacgagttcggcttaaggatcaaagagattagaagcgataacgggacggagttcaagaactcacacatcgaaggctttcttgaggaggagggcattaagcatgagttctcttctccctacacacctcaacaaaatggtgtat

SEQ ID NO: 13318 - DNA, 396 bp, Zea mays
  unsure (1)..(396): unsure at all n locations
acctgcngcatgaagcttggtaaccgagtggctatagagcgagctcttgctaatcactttaatcacagagaaagacaacacaagagacacagtggtttatcctgtggttcggccaagtataacacttgcctacttccacgttgtggcgtaccaatggacgagggttgcactcaacccctttcaagtgatccgatgatcaacttgaataccaggtattcttccttatagttttcttcccgtctgcgaggaatctccacaagttggagcctctcgcccttacaagattgatcacatagaaagcgcggagtaaggttgggaaaagcaacgcacactataattaaatccacaccacaaacacgcacacaagtgagaagatgagcacacaaaacacgcgcg

SEQ ID NO: 13319 - DNA, 446 bp, Zea mays
  unsure (1)..(446): unsure at all n locations
actgagctcactgcgttattaatctcttaatttcatttttttcgaaaagtgcccgtaaaacacttgtctgcaatggcaggtaccgatagtggcccacttaaagctcactatttgaaatttataactttcggtcatgctataaaaagctctacctatatatgaagttaataattgaatctcaagcctcacattcacattatataagttaaaagaattcgtctgaaagttgtacatgattaaacttgggtagaagctactcttgtccaagttggttgggctatggcattggtgggctcacgattaaagttcggtatttaattcttaattaaccttgcgttacactacaagtttaagtaggaatacaactataaatgacagtttcttttaaaaagactctctccttgtctctgtaagccagtncatcatggtttgtgcattataactac

SEQ ID NO: 13320 - DNA, 381 bp, Zea mays
  unsure (1)..(381): unsure at all n locations
caaccttgtctctcccaatctcatcaacctttttctcaagcaaatcagcaagcatgtatgcatcatgtacttcactagatgcatcaacggactctaaaaagtaagtgccctctgggctgttcactaagaagttaatgagatggcgtcccctcctatcagaccatccatcagacatgagtgtgcaaccatagtgtttccatgcacgctcatgttcctccctcattgtagttgttgacttcacagcctcttgtagcaatggctcgcctagttggtacggtgttggaggcttataccctgaaccanactgtgctgtggcctcaatggcaatctgaaattgcctagctgccgcggcattgaaaggtacaccgcactcatagaaga

SEQ ID NO: 13321 - DNA, 410 bp, Zea mays
  unsure (1)..(410): unsure at all n locations
agctntatctccttaactcagcgtatgtgactcttatcatanaaggctgacgctgtggaggtaggagacttcataccgattagtttaattcacagttgtgccaagattctcaccaagattctggccaataggcttgctgcaatcctccctatattggtctcccccaatcagagtgcatccatcaagggaagaagtattcatgacaattgtatgatggttagagaaactgcaaaagcgattcacatgcagaaaattccaagaatcttgctgaagttagacattggctaggccatcgactcattatcgtggctttactccttgatagtctgaacatgtgggatttggcctattctggcgtaatttaattgctaagctattggtgtcctcctctactcgagtgctagttaatg

SEQ ID NO: 13322 - DNA, 417 bp, Zea mays
  unsure (1)..(417): unsure at all n locations
agcttgtgaaggttcttcatcctcacatgtgctaatcggcgatgccacagccagcccatgctagtattagctattaagcatgcatctagaccggcctcctcttttgcanaatcaactaaataaagtttgccgtctaatacacccttaaatgctagtgaaccatcacttcttctaaagacagacacatctacatttgtaaatagacagttataccccatgttgcataattgactaacagatagcanattatatccaagagactctactaaaaacacattagagatagagtgctcattagaaattgcaattntacctaacccttntaccttgccttgattcccatcaccgaatataattgaatcttgggaatgtttattcttgaagtaggagggtgaacatcttcttctccccgcatat

SEQ ID NO: 13323 - DNA, 308 bp, Zea mays
  unsure (1)..(308): unsure at all n locations
atcagatggcagttgcttaatagtttcccatacatctttttcactgaatggaggatccaattccnccatgttgtgtgaaggcaaccccacacaatccaagttaagagctacggatctgtccatcgttntacccaacaaattactatagaacttgtccatcangttgggggctggaacatagtttttgctgttgtcattgatcattgctatatgaataatgaagtcacttcttcatttaccatgtcatnggtggaactagcatatttataaaccggtgtgcttctctgaccaaaaagattattatctgc

SEQ ID NO: 13324 - DNA, 434 bp, Zea mays
  unsure (1)..(434): unsure at all n locations
catgaagcttctaaaggaaacacatttgtgactaaaaatgtcattctgagaaagacagggttgtagcgcatgtcagcatggaagcaagttggtgttcaccattcacacaagaacatcatgacgaccgacaggccgcttgagctactccacatggacctattcgtcccgatagcttacataagcatcggcgggagtaagtactggctagttattgtggatgattattctcgcttcacttgggtgttgtttttgcaggaaaaatcacaaatccaagagaccttatagggattcttgagacaggctcanaatgagttcggcttaaggatcaaaaagattagaagcgacaatgggacggagttcaagaactctcaaatagaaagctntcttgaggacaaaggcatcaagcatgagttctcttcntcctacgctccaca

SEQ ID NO: 13325 - DNA, 436 bp, Zea mays
gctagcaagtgcgagttctggatcagagaagttctgttcttgtgtcacattataaaccgagagggattggctatagatcaaagaaggaacaactatcttggactggagagcaccaaaagatgtccgaggaatcaagagtttcatcggaatggccggttattatcggcgtttcattgaaggtttctccaagattgtcaggccaatgacagccttgttggcaaagaaggttgagttcaagtggaacctagcatgccagaagtcctttaagacattgaaggagaagttgacaatggcaccagtattgattctgctagatgttcacaagccattctcaatatattgtgatgcttcgtacaccggactgggatgtgtgttgatgcacgaaaggagagtactggcatacttcctccgcgagttgaagattatgagaggacta

SEQ ID NO: 13326 - DNA, 444 bp, Zea mays
  unsure (1)..(444): unsure at all n locations
agcactaactcacagtctttcttgcggagtgttgcttcacttaaatgagagnttaacttgaagcaacaccaaacgatatgagcaaagaatagtgcaagagaacttagagtaagggaaagcaaacaaatcacaaacaaaagcacaatgaacacgggtgatttgctttaccgaggttcggccctcaaacgcctagtccccggtgaggagtccacttaaagacgggtctttataacccttttcctctcttccgatcacacaaagatcggcgagctcttcttcttctcaaggatcactctcgatcccacaacgaccaccacaatctttggtgtctcttgctagcttttacaagccttcaaactttggatgaagatcgaatgggagtcaaaactccacgcgcacatgaacacaaagatgtagcacacactatctctctatgaatctcac

SEQ ID NO: 13327 - DNA, 336 bp, Zea mays
  unsure (1)..(336): unsure at all n locations
gcttcggtattacaaaccgacttaaagatagaatgatcctttagtccataaaggtctgagncaatgttgtaagctttcataaggggcatacttgtaatttctcacaggctgcgtcctgtgcctataaatagtgaacagtattcctttactgttcacgcattctgatatataccgtcgcatcttctggaactcaacctctgccaaggcagaggtattatctgattcaatgattcaatatattaaagtaatataatataatccgtctatgatttatttaccccttttatacctttttatttatgctgtctcacaatatgtattgaaattttattacga

SEQ ID NO: 13328 - DNA, 397 bp, Zea mays
  unsure (1)..(397): unsure at all n locations
cttacttgatgctaacaagacatttccttcaccaaagccatcttcaacacttcgcccattaaaaagatcaattctctttttcaattgcctgtctgcaagaacagtgataattgcaataagtaacatgatatgttaaccagaaggtatgcttgcactagaaacgaccaaagaagatggtatgctaagaacgatattatgaagaagacattcgcccggctcaagaaggaatcgctcccctagtnttcaatcanaatcacttactcgagcagtcgctgatggcgacgacgacatataagttctatgttacaacgaacaatttataattaagcaacaatgataatatattctgtagcacataaatataaataagagtggtgagagatacgttaacaaaata

SEQ ID NO: 13329 - DNA, 430 bp, Zea mays
  unsure (1)..(430): unsure at all n locations
agctntagtgactaatgagagagaattgcttgtgttctttcgagctctcgcgctnggattgcttccttccttcttgattctttattgcgatcaaactcacttgtaaattgaggcaagagacaccaatcttgtggtggtccttgtaggaactntgtgttccaagtgattgagaagagaaagctcactcggtccgagggaccgtttgagagagggaaagggttgaaagagacctggtctttgtgaccacctcaacggcgagtaggtttgcgagaaccgaacctcggtaaaacaaatccatgtgtcacactctttattcgcttgcgattngttntgcaccctctctcgcggacttgattatatttctaacgctaacccggcttgtagttgaattattttgagaatttcatttcgcctattcacccccctctag

SEQ ID NO: 13330 - DNA, 463 bp, Zea mays
  unsure (1)..(463): unsure at all n locations
gcttatctctcgtttgggccgttgacggngcattatatatagtgggagagcctgcgaagccgatcggtatattacgagggaagcgagcaagcgtgggcggtgatggccggatgggcaaccgcgggcgaagccgcgaatgcatgatcatggacggacgggccttcccggatgtagcagtttggatggacgcgcgtgaaggcacgaagagggagtagcatctatgatcttgcccgtgtatggtgcctggctattgcatgtgcgctgcgagttntttttttatcntgttgttgtgggcgcctctggatagtttggatgttcaggcacggaactggatgatgatgagctacggatgcatgagctcttgcctctccgtagaaatgcttctttggagaagtgttaactctataggatctcagccncacaattttaatcactaanatgaacagaatgaatgatacttaag

SEQ ID NO: 13331 - DNA, 399 bp, Zea mays
  unsure (1)..(399): unsure at all n locations
actagtggataagccttcattcaaattcatccattnttcttatcaagagtcgagcaacaaggaggattcttcatcaaggcatgtagatgaggcctttatcccctttagtgttctactatatcatgtgaagtaagttcacctaagcaagtctatagagtcaataagtagcctagctcaagacgacatatttgcttaggtcatttgacttcacatatcacaaatcataataatattccttgtgataataatattcctttattgttcttcttttcgtcttcaaatgcatcatccttaattttattaaacttttcttcttggtttggtgcatcgataagcaagatgaccaagctcactataattatagcaattcatctaagatatgaccattctcttgctact

SEQ ID NO: 13332 - DNA, 354 bp, Zea mays
  unsure (1)..(354): unsure at all n locations
gcttatcgganagaaagtggtatcacccagttatcgaccgggagaaagtcttgtacgcctaaagactcgagggttccgcgtccgattggtgggatgccttcacagcggcacacgccaatgcagatactataacctggcaggagttccaagtgaacttctgcgctcatcatattcactcaggaattatgaaattgaaggagttcctttcccttacccaagggaatatgactggtagtgagtaccatgatcgcttcacccagctntcacgctacgccccagaagaagtggatacggatgagaagcaccaagagcgtttcttggaaggattaattggaccactgaaccttccccaac

SEQ ID NO: 13333 - DNA, 509 bp, Zea mays
  unsure (1)..(509): unsure at all n locations
gctntcaccaccctctgacgctcgaaacgatgatatgttctggagcctggagtttatgttgctcatgatcgagtacaacatggtgctcctcccgcctgtccccctggagcgtacgagcgcccatccctgtaacaccctgaatttagcggtataacatttcttctctaaatgcctaccaaattcaagtgttaccctgtgtctctctctctagtctctttctctcttttccttttgagtagatttagcttaatttagtgagagattaattattttactctgtcaaaactatgtgagtcgtgaatagttgcatcatgctgagcctaaattattctttgatttgatgcacatgtttgaatcatttgaacttgggtttgtctttgaatttgaatcgagttcactagagaaaataacaaaagaatagcatttagaagatccctggaaaaatggaaagccactttcagcggcgggttcctttcccacacgctctctatacccttcctctggcgagt

SEQ ID NO: 13334 - DNA, 482 bp, Zea mays
  unsure (1)..(482): unsure at all n locations
agcttggtgccaatggagaagcataagtcccctgtattcctgtctgtcaaactgtncgccattgtcgactgtgagctcanacaggactccgaatcggcatacaatggtttgccataaaaatttctgggcagtcttcgacgttattgtggatactgcccttgccttgatccacttggtaaaatactcgacggcgacgaaagtgaacttgatgttcccttgggtcgtggcagtggcccgacaatgtctagcccccagcgttgaagtggccatgtgtgggcgatcaactctgtgatttgcgaggggctgcccgaacagggagagaacttctgcaggctttcacgacctcgtgacttatttgcgggcagatatagcggacagagatacctgacgatcacctggaggagggcctagccccagtgaaccgagtgccgttgacttccgcagactggagcttcatcctggaccattaacatggttgctga

SEQ ID NO: 13335 - DNA, 456 bp, Zea mays
  unsure (1)..(456): unsure at all n locations
gcttgagcttgattatgtggctttgttatgcttagatccaccaaaaggcatgaggcatgtgttgagcaccagatttggcacctagacggtcggatggtccgccccgaacggtccaggggatagcccgaacgattcacgattagataaatttaggctggagtccttatccattacgtgattatcctaataatctcgcaataagctattgaaaattgtctaggaacgggtccagacgcccctcctatatatatgaaagggtacgaccgactgaaacacacaataatcgatctatcaacccaatttaccttccttaaccttaattntcacctcactttagctctacatcatctaaagacgtcttgggtagcccgtcgatccatanaagcctatgatctttcttttattggacgggatccctctctggagacgagatgcaagttctacaagagattcatg

SEQ ID NO: 13336 - DNA, 448 bp, Zea mays
  unsure (1)..(448): unsure at all n locations
agcttcgtcatctgatatgagattgccctaaagataagacatgatctcagntctccaatcttcgctataaacaggagatatattgagcatcgctctttcaagaaggtcaaccgaaggtgcttttattgtttcaaagaatacttccgaaggtaatggcagcccctgtgccgctgacttggctagtagatcagcgtgttcattttctcctcgtggaatattcttgacagaaaacccttcgaaggaagcttcaagtcttcgaactgtatccaaatatttttcaagcttcggatctcttgctttgcaacttttgtcaacatggccagaaataacttgggaatcagttntgagaactgcccttcttatccccattgccttcaacttccgaagacccaaaagcaaagcttcgtattcagcaatattatttgtacaactaaaatcaagtttcact

SEQ ID NO: 13337 - DNA, 401 bp, Zea mays
  unsure (1)..(401): unsure at all n locations
agcttccggaggccattaacacaacatacaacaccttctccaactctgtatatattttctttgatacacttaaaaattcggaggcgaagtacactggagcttgctctttgacttggccatctagtttctcctgtacaagcgccacactcactgcagagtgcgaagccgccacatataagagcaatggagcccctggtgaaggtggagttagtgttggtaaatcaatcaagtattgcttcaattctttgaaggctttttgctgagccgggccccattgaaaaacttcggctgacttcagtatttcaaagaatggcagatttctttntactgatctggatatngaatctgttaatgatgctaatctacctgccagccgttgagcccctttctttgtacttggc

SEQ ID NO: 13338 - DNA, 448 bp, Zea mays
atgcaagcttgacatacaactgacaatccggtagcctcttcaatactattctcatatgctcttcatgctcttgctcatgggattatatgaggatatcattgataaacaccactacaaacttgtcgagatagtccatgaacacactattcatcaagtacatgaagaaagctggcacatttgtcagaccgaatgacatgacggagaactcataaagcccatactaggtgataaatgcggtcttgcgtatatccgaaggtcgaatccagagttgatggtaacctgacctcagatctatctttgagaacacactggctcctctcaactgatcgaacacatcttcaattctgggtaggggtactatgtttgatagctacttcatttagagctcggaatctatacacatcctcttcgactatctttcttctccacaatatacactaggcggcca

SEQ ID NO: 13339 - DNA, 341 bp, Zea mays
  unsure (1)..(341): unsure at all n locations
cacccatggttcaggataatgagggttacantttatatcctgctaattatcctgagcacaaaattagggaagattcatactatgaaacctcataatgtttctcgccatgctnttatgtaaaaaaatgaggcttctagctctaggcacaccactcatattaaaatgcctagaaagaaaattcctgctgcatcaaatgagcccaacatttcatttaagacttttgatgcatcttatgtgctcactaacaaatcangcaaagtagttgccaaatatgttgggggcaaacacgagagttcatagacttgtgttngggtacccaaggtgcttgtttctaacataaa

SEQ ID NO: 13340 - DNA, 496 bp, Zea mays
cttgacattgtctctctgttggaagccaatgttattcttaattctcatgcgtctaccattatagagcatgcttctagccaatttaaaattttcattttctaagtcatgctcattaattctagcactaaattgagctatgtgatcatttagctgtttaattaaggctacgtgatcatgaatagcatcaacattaatgtctctacatctagtacaaatagtaacatgctcaatggtagatgtagagggtttacaaaccattaattcatcaatcttagcatgtaacatgacattttcatttctaagattggaaacaatatcattgcacacatttaacattttagccttagtagacaatttatcattatctatcctaaggctagcgattgattcacttaattgggcatacttagcatgtatactagcacttatatctttaagatttgcagagaatcatcacagacattaacttctcaaccttagcaatcaatttaccatc

SEQ ID NO: 13341 - DNA, 330 bp, Zea mays
  unsure (1)..(330): unsure at all n locations
cttcatacacacatgtgctaagcggcgatgcttctatcagcccatgctagtcttagctattaagcatgcatctagaccggcctcctcttttgcaaaatcaactaaataaagattgccgtctaatacacccttaaatgctagtgaaccatcacttcttctaaagacagacacatctacattctgtaatagacagatataccccatgttgcataattgactaacagatagcaaattatatccaagagactctactaanaacacattagagatagagtgctcattagaaattgcaattntacctaacactnttaccttggccttgattccatc

SEQ ID NO: 13342 - DNA, 414 bp, Zea mays
agctcgactactactctacaatttattgtatatctatgtatgtcgcaatatcgcctatgcattatgtcattcgactatatctataggaacataactatcattatgatactaattgagtctaaatcataaaccttgcgatagatgtggctcgactactcgtatatatgatgtccaatgcattgcatatatgtcatagtgtcgttgatatacctgtgaatatcaaccatcgtgctgctagtgttatttgcaggttgtggaaacctccccgtgcaagggaggtgctgccgatttttttgtctatatatgttagatagcggtagataagcacaagtagtggtatgtttgccgatggcatgcgtggctctaaagatggccgtcgctgatgtgaattcatatgaacaaaagttggccata

SEQ ID NO: 13343 - DNA, 265 bp, Zea mays
  unsure (1)..(265): unsure at all n locations
agcttggaagcgtctattggtctgtcactcggtgttactatcttcctcttgacttccgtcgcctagaatgcgacgggatgaactcccgatgtggacggttcatccagctcgttgatacttctcgagcctttcaccatgcactcaaaactaacaaaatgcccgataacttcctcggnggtcatttttgtatatcgacgattaaccacgaataattgaacttgagttgggttaaggaaaatgagagatcttataataaccttaacca

SEQ ID NO: 13344 - DNA, 286 bp, Zea mays
taaccttttgatgtatattgcgatgcatctggcagcggactcagctgtgttctgatgcaagacggccgaaatactcgttatgcttctaagcagttgcgccgacatgaggaccataatccaactcatgatctggagctagctgctgaggttcttgccctcaatagacagcgtcactatctgctgggaaatatctgtccatatatacaatcatcaaagttagagtcattctccccaacagagtaatatgtgcaaagcatggttgactactaagactataactggaatc

SEQ ID NO: 13345 - DNA, 81 bp, Zea mays
gtctagaattgaatgctatagctcttgtaaatggttggaacgtggaaaacttgcatgacttgaatgtggggtggtctcccc

SEQ ID NO: 13346 - DNA, 404 bp, Zea mays
  unsure (1)..(404): unsure at all n locations
attagtatattggtgctacatttgcaaataaaaatacagttttgatgccttatctacctccactagacgatgttacagccttatgcaccaacttcagttggtgcaatcaagggtaatcatcattaagttgatggctcatataaatctaaatataaacaagataagatataactattactttcttgtacggccatgcaactgacatcatgtaagcatcatccatagtttccacattggcacaagggcgaggcaaaattgtatctcgttttatcacacaagttacaataacttcacaatattgccttccaaggatctggcctncaactgtggtgcttggtttagttgaaacaattgtccatttagccacaggcaaatcagatctcaacatagcatataatataaca

SEQ ID NO: 13347 - DNA, 442 bp, Zea mays
  unsure (1)..(442): unsure at all n locations
gacaagaaatggactagaagtctactgtccaagttatactaattgcatgcgaatgcgagtatgtatgtgtttactgatgtacacaagttcagaatcttcgntccatatcctgattntagttgatgtcataaactgaagaatattataacaaattgtctgccaaaacataacttttcaaaatagaaacatcaaccggtatatcatgcatccaactntacatgaaatctgtaagagactcccttgtagtaacataatcaccttgctcaaaatttcaaaatgaagtttcataatttaaaaagagaatcataaattgtagtccagtatattaaagctaaacatatataaaaatatagtcaaccattaaggatgcagaattactttaccaggaaattaactaaattcctatgaagcaatgaacatcgaaatgtgtatcttgatcgca

SEQ ID NO: 13348 - DNA, 447 bp, Zea mays
  unsure (1)..(447): unsure at all n locations
agcttatgaagattcttcattccaacatgggctattccgcggtgcttgattcaacccaagttagtcttagcaactaagcaagtgtcgagttcagctctatcanaatctaccaagtatagctgaccctctaacactcccttgaatgctattgaatcatcacttcttctaaagacagtaacacctacatcagtaaatagacagctgtagcccatttgacatagttgcgaaacggaaagcaaattgtaatctaaagaatctacaagaaaaacattggaaatagtatggtcaggtgatatagcaattttacccaatcctttgaccaaaccttgatttccatccccgaatgtgatagctcattgnggatcatgatttttctcataagaggagaacatcttcttcttccctgtcatgtggtttgtgcacccgctgtcgagtattcaacttgag

SEQ ID NO: 13349 - DNA, 452 bp, Zea mays
  unsure (1)..(452): unsure at all n locations
gcttgtangggctgggatgtcgccacttacttgatgctaacatgttantttcttcaccanagccatcttcaacacttcgcccataacaaagatcaattctctttttcaattgcctgtctgcaagacaagtgataattgcaataagtaacatgatatgttaaccagaaggtatgctagcactagaaacgaccaaagaagatggtatgctangaacgatattatgaagaagacattctcccggctcatgaaggaatcgctcccctagttttcaatcaaaatcacttactcgagcagtcgctgatggcgacgacgacatataagttctagtttacaacgaacaattttatataagcaacaatgataatatattctgtagcatataaatataaataagaatgctgagagatacgttaacacaataagatgaattaccattggtaatgtaatgacat

SEQ ID NO: 13350 - DNA, 547 bp, Zea mays
  unsure (1)..(547): unsure at all n locations
ttacagtcacctgcggcatgcaagcttcgcacctctgaactaactcggctgcatcacttttcgccgtctgccaatagaatcccgacctgaagaccttcccgactagtgtcttggatgttgcgtgtattccacattgcccagcatggacctcatctagaagtcgcttcccagtagatgagagaatgcatttcatgaggacgcctgatgcaccccttctgtatagtgtctccccaatgagtgtgtagtgagctgactgtctagcgatgcgctcagctgcatttttgtcatctagttcctcttcattctttatatatctgatgattggccttctccagtcatcagaatctgactctggttgattcacgatattacattcttctgcctgatccattgagatgcttggatgtgatatttcttgtacgaagattccaggtgggacctgagttcgactggatcctagctcgaacaatacnatcggtgtcgtgtntcgatctctttctacatgatgaaattccagaccttcannattatcttctagtttccggac

SEQ ID NO: 13351 - DNA, 353 bp, Zea mays
  unsure (1)..(353): unsure at all n locations
agcttacgacgagatttatattttacagacgggttctattatcaaacgccagtgctatntttagtgacggtttcttaacaaaaccgctagtgacgaanaccgtcactagaaatccactagtggcaactggcanacccccctaataaaaatatatttatttactattttgaacccattttatgttttccagaaaatatttccactggcgggtttattacctcgaccgcaagtgaaaaatcgattctactaacggttttattatgtcgactgctagtggaaatcgatttccaccggtgattctcagttaccgcttggtaaaaaagaatatttctactagctactccgaaattagt

SEQ ID NO: 13352 - DNA, 386 bp, Zea mays
  unsure (1)..(386): unsure at all n locations
gtatactctcgatattggtctattgtatcccaaaggtgctcactttgaattaattggatattcggattcggactatgcggtgtgcaaagttgatagaaaaagcacctccggctgttgtcaatttcttggtagatctcttgtttcatggtcttctaagatacaaaattcggttgctctatctaccgccgaggcggaatatatatcggccggaaaatggtgtgctcaactattatggatgaaacataccttattggattatggaattattntcaagaatgtgcctctcatgtgtgataatgagagtgcagtaaaattggctaccaatccggtccaacactcaagaaccaagcatattgatatacggcatcacttcttaatggatcatg

SEQ ID NO: 13353 - DNA, 425 bp, Zea mays
  unsure (1)..(425): unsure at all n locations
tcctcaaacaaaggagggggaaagactacaagtcccgctccaagaaggtttgctacaaatgtggtaagcccggtcattntattgctaaatgtcctatatctagtgacagtgaccgaggcgacgacaagaaagggagaagaaaggagaagaagaggtattacaagaagaagggcggcgatgcccatgtttgtcgcgaatgggactccgacgagagctcaagcgactcctccgacgacgaggacgccgccaacatcgccgtcaccaagggactcctcttcccaacgtcggcacaagtgcctatggcaaggacggcaanagaaaaggtaaatctaactctcactaaatatgaattttatgatgataatgtagtgataagaggatattgcgttcctttttgcaccttacatagctcaaaggaaaataat

SEQ ID NO: 13354 - DNA, 460 bp, Zea mays
  unsure (1)..(460): unsure at all n locations
acgaatcaaagaagaggtctatgttgagcaactttccggctttgaagatagtgagtaccctaaccatgtctataaactctataaggcgctntatgggctcaagcaagccccaagagcatggtatgaatgcctaagagattntcttatcgctaatggcttcaaagtcggaaaagncgatcctactctctttaccaaaactattacanatgatttgtttgtatgccaaatttatgttgatgatatcatatttgggtctactaacanatctacttgtgaagagtttagtaggataatgtgtcacaaattcgagatgtctatgatgggggagttgaagtatctcttaggatctcaagtgaagcaactccaagatggcacctctatcagccagacgaagtacattcaagacatcctcaccaagtntggaatgaanggatgcaagcccatcatgacacccatggga

SEQ ID NO: 13355 - DNA, 517 bp, Zea mays
  unsure (1)..(517): unsure at all n locations
agcttttatcgtctccaacacatctaatacactatccatctcttttatcttgaggggtgctgctagacctttttgtgtcttcagcacctccactcctgccgaaggacttagaacttctaatgttgtcgtcccttcggttctcggttcttcaattatgtcaatcttcagcattgcagtcgactcttcaatcctctgcataagagcaggtcctttggcttcaatagctgaagaagtctcaccgccaaattcatgcactgtggccggttcaatgtagtgcggtcggtgagtaaggaccttcaactntntcctcttcggtgcgggcttgcttgaagcagccaaagcagcagtcttcccagaagttgcaccctttcttttctgcccccgcggtgggtagcgatagtcanggtacacaaatccaatagcatcaaaaactctatttagcctttttctttttcggctcccgaaagccgcagatagtgcattatcttcagacttggagtatgctccacgtagttca

SEQ ID NO: 13356 - DNA, 403 bp, Zea mays
  unsure (1)..(403): unsure at all n locations
agcttaccgcatttgaagcatgagcgctntcccttggtcttggtcttgcttgcctatcccttgcgatcctttagcgccgtcttgagctcgttgacgaaggactccttctccttatcgttgatcaccatcccctttcccttaggatccatctcttcgggcgggtagtccctttcttgaagagaacggctctgataccaattgtgagcacctagaggggggggggtgaataggtgatcctgtgaaacttgaaaacttaagccacanaacttggttaattgttagcacaataattgccaagtggctagagaggagtcaaaacacaataaccacaataaatcaatcacagagatggcacgggtggtatcccgtggttcggccaagaccaacgctggcctactccacg

SEQ ID NO: 13357 - DNA, 430 bp, Zea mays
  unsure (1)..(430): unsure at all n locations
agcttcttcagggtcatataaagtcatgctgatttcttatgcagaaactcagggcagctattgctgcaacctactatacggaccttggtattgaagattcagacatatttgtctctgatggtgccaaatgtaacatatctcgcttgcaggtgccaaagcagatttgactctcccattcttaatattacaattcatcttaaattgtttgctaatgattctcctaattcaacattttaggtactttntggatctaatgtgacaattgcgcgccaagatccatcataccctgtaagagagctcttgaattacttgtaactgtcagttacttacactnttcatattactgattctagacttatgtgtgatgataattgtgatatgttntttcgtcgtatataatacttaccgattagttgttaccattttacat

SEQ ID NO: 13358 - DNA, 82 bp, Zea mays
aatgactgacacacggttgattctgggagaaccttcttcttatcttctcttcactatcttcttttctcttctcacttttcgc

SEQ ID NO: 13359 - DNA, 166 bp, Zea mays
agctgagtaaggaccgggatgagcacatcacagcaagaatgtgatgaccacatcaagacccttggagctgctacatatggatctcttcggacccgtcgcctatctaagcataggaggaagtaagtatgggctagttattggtgatgacttttcccgcttcacttgg

SEQ ID NO: 13360 - DNA, 195 bp, Zea mays
taccattttcagcaactttgagaaatggaatacgaaacaaactataaaatgaatttcctctttaataaaaaagtgatggaacattctttatattggattatttggtttcttaatataccatagaaatgtttggtccacttgggtattctataaaatgaagataagacaaagtattaccttgaactttcaagtctt

SEQ ID NO: 13361 - DNA, 237 bp, Zea mays
  unsure (1)..(237): unsure at all n locations
acattgtactacagaaatactggtaaatcctggttttgaggaccttcggacgccgaaagtcccaacaaatagcaacagtcaatgacaagcgggcccctcctattttcaacgtactacgcgtataaataagagcacaccacgagctcatttggcaccgtttttttgcatctgctcttgcttgctcaatttttagctcttgcgcaccaacaccttctttggtnntttaattttctaagc

SEQ ID NO: 13362 - DNA, 280 bp, Zea mays
tgcaagcttgagtgttgaggggcctatatttgatatgaccagtgactctctcaatcaaagactttgtaacccaaatttatctacggctactcttgcttggtggacctaggaatgtgactctgacctttccatttgcaacttttattagaacataatgagcattgaaagcaaatggtcttgagtgcctaagcaagggagttggtggtttggctttgcagttgtgggcaaagtgaccttcttttccacactcaaagcatttgatacgcttatgagtctgctt

SEQ ID NO: 13363 - DNA, 196 bp, Zea mays
taacgctttgaataacatcatgctctacataaataagctgactgtagaatatttgaagtcctcgcagcgataacaggaatctacgttaaagaattttaccttgacattagagcaatataggctgccgacgatatgttgccgccagtaaccactaatatcagactctagcttccggaaaccgacactctgtgacaga

SEQ ID NO: 13364 - DNA, 262 bp, Zea mays
ttatatttgtgatcgattgaatatctgagctccttcacatttaatgtttatgttttcttggattatatatcttttccccttcgaatcattacatgttataaggcatctcttttgaataaaatgagtatacaagtacgattaaatgagtatacatccaacacggttatgatacttgttgcaattatgaaggtggtgttgaagtcttgtatccttgtcttaatgactgataaaccctggccccccatcactaacgggtcgatca

SEQ ID NO: 13365 - DNA, 429 bp, Zea mays
  unsure (1)..(429): unsure at all n locations
agcttcttccttatgatgaatgcgcacaagatgaagacagtattcattatgttatagtaaacgccgaagctatcaccagatggacagcttcggctcgcaatgaagatggtgaataatgatgatgatcgaaagaggaaaatactacctattccttaataacttgtattatgatcatgtgtgaatgttgacgacataaaagtacttttgctctaactacgtctcgcgcctataaatagatgaacatgaacaccgtacttgttacactaaaatgtaatcactctcccgcattctcgccgtcgagcatgtcgaaggatcaatggaatatcgatattggtgaatattcatttacattctatggagcatgaatataaaagggataacgaagatccgatcttgcatcttaccctctcacatttncattcatatatt

SEQ ID NO: 13366 - DNA, 220 bp, Zea mays
  unsure (1)..(220): unsure at all n locations
tgcgagcttttgaacactactacctcattctttttcggcttcggagtagntttttctttcgcaaacgaaccagctcctttggtgcttcgctgaagtaacccagcttcaccaattttggaagggcagcttcagagatggtggattttccaaagtccaaatgactatggttaattggtaccccgcagctgaactcattctcagaaccaacttcttcaacatc

SEQ ID NO: 13367 - DNA, 194 bp, Zea mays
  unsure (1)..(194): unsure at all n locations
cttatcgctgacgctattcgtgagaagcgagctgncaaagagcgcaggatgaatgtgaagaacgaccctagagcaggagcaggtattttttggtgcatataggataatattattgttgcaagcacccaccatacaagttgcaatttgcccagacacatcaatatgtgtttacaatcattttttaaatttgtatg

SEQ ID NO: 13368 - DNA, 246 bp, Zea mays
acatgggctagtcggcggtgccagagccaacccatgttagtcttagcaattaagcaagtgtcgagttcagctctatcaaaatctaccaagtatagctgaccctctaacactcccttaaatgctattgaatcatcacttcttctaaagacagtgacacctacatcagtgaatagacaggtgtagcccatttgacataattgggatacggaaagcaaattgtgatctaatgaatcaacaagaaaaaca

SEQ ID NO: 13369 - DNA, 251 bp, Zea mays
gcaagcttctaaagggagagcacattttgggactaacaaatgtgtcatttgagaaagacaggagttgtagcgcatgccaagcacgaaagcaagttgggtctcatcattcacacaagaacatcatgacaagtgacaggccactggagctcctacacatggatttattccgcccgatcgcttacataagcatcggcgggagaaagtactgtctagatattgtggatgaatattcttgcttcacttgggtggtc

SEQ ID NO: 13370 - DNA, 176 bp, Zea mays
cactgtgtacggtcgcttctctgctccacatactatcttttcgctgtgagatccaagaccagatatggtcggggtatggagatatagatgggagaagtttcctgtgtcacctaagcccgaaccgagacaaaaggggtgtcaagtcgtgtctagcgccctatggtaggtgtcatctc

SEQ ID NO: 13371 - DNA, 194 bp, Zea mays
actcatcatccacacaagaacataatgacgaccgacaggccactggagctcctacacatggatctatatggcccgattgcttacataagcatcgacgggagtaagtactgtctagttattatggatgattattctcgcttcacttgggtgttctttttgcacgaaaaatctcatacccaagaaacattaaaggg

SEQ ID NO: 13372 - DNA, 340 bp, Zea mays
  unsure (1)..(340): unsure at all n locations
ctacaagtattcctatgtatcacaagtctacaattagcctttattttgncttcaattgggatctttgagactacatttggtattatttacatgtcttttccaatatttgattagactatatttcacatcctatactttccatgttgctataaatgcatatgttgttaaatcatattggtacctatgcataagggaagntagtctattcaaatcatgtcttgctgaaagttgcctagagggggggtggataggcggaatctgaaaattatanacttaagcacacactacaagcttggggtaagcgtaaaaataatatcaagtccgggatagagaggaaaac

SEQ ID NO: 13373 - DNA, 233 bp, Zea mays
  unsure (1)..(233): unsure at all n locations
actaagaatggacccacattacattcacacccctgaaataccaaaaaccctaaaaaggaaccctggaaaaccctaaacctaaaccgtanggggctaagtgcaaaatcagtgcacttctggactaaagtgtaaaaaccatgataataaggtgtccttaatcatatggttcacaatcatgaagaattacaagctaaacccttgaatttggacctatttgcaaaaagaccctattg

SEQ ID NO: 13374 - DNA, 151 bp, Zea mays
ccttctacttgtgaatatcccttggccacaagactggctttgatccttgacaccacaccatgctcatcttgattcgtgtggaagacccacttggttcctacaacattttgagtaagacgtggaactaaatgccatacctcgtttctagtga

SEQ ID NO: 13375 - DNA, 364 bp, Zea mays
  unsure (1)..(364): unsure at all n locations
acttttactcttatcgaataccttatgtctgagcgcttccaatattattccgttggctctatccacctgaccattggctcttgggtgtgctactgatgcgtacttgatctggatgctcctttgctcacagaaatcaaagaactcagagctggtcaagttggatcccaggtcaataatgatggtattcgcgattccgaaccataatattatatcctggatgaacttcattgcttttgctgaggacaaagaggcgattggcttgtactctatccatattgtgaatttgtcaatgggcaccaagatatgagttttgcctccctgagctctcttgaaaggtctgatcatgttcagccnctaacatgca

SEQ ID NO: 13376 - DNA, 195 bp, Zea mays
gcatggctgtgcatgtctgggtgagacctttgtcggcgctgtatttatattatgaaaggcatagagatgacgaatccccttatcaaaaaaatataataaggagccgtgagctctcaacaactaaaggaagcctatttcagtagtgtgtttcagttcagctgcaccatctcaactagactcaggccctggtcgcta

SEQ ID NO: 13377 - DNA, 383 bp, Zea mays
  unsure (1)..(383): unsure at all n locations
acatgtgctaaacggtgatgccacattcattccatgctagncttagcaaataagcatgcatctagaccggcctcctcttttgcaaaatcaactaaataaagattggcgtctagtacacccttaaaagctaatgaaccatcacttcttctaaagacagacacatctacattggtgaataaacaggtatatcccatattacaaaggtgacttacagacaacaaagtatattccagcgactcaacttagaacacattagaaatagagtgctcggatgaaattagcatttttctaaccctttaccttgccttgttcccatcaccgaatataatgaatcttggggatccttgtcttgaatangaaagaacattctcttttccccgcat

SEQ ID NO: 13378 - DNA, 421 bp, Zea mays
  unsure (1)..(421): unsure at all n locations
cctgaggcatgcaagcttgtgaagggtcttcatccccacatgtgctaagcggcgatgccactgtctgtctatgcttgtcttagccattaagcatgcgtctagaccggcctcttcttttgcaaaatcaactacataaaggttgtcgtctaatacacccttaaaagctagtgaaccatcacttcttctaaagacagacacgtctacatttgtaaatagacaggtatatcccatatgacataattgactaacagatagcaaattatatccaagactctccactaaaaacacattagagatagaatgctcattagaaattgcaatnttacctaaccctntaccttgccttgatcccataccgaaataattgaatttgggaatcctattcttgcgaggaagtgaacatttttctccccgcatatgg

SEQ ID NO: 13379 - DNA, 322 bp, Zea mays
  unsure (1)..(322): unsure at all n locations
aactgctgatccggtcaggtacaagcacgtcctacctttcagtgtcacagttttcgtggctgattttggcgtgacccttgcctcggaattatctagctgtggcaacgcttgcccctaacttaagaacggagaactcgggtcgcttgcgtgtctcaacctcaagcaccagggagtccttatcaccgttgccaacttgtgagggcgtgtaatcctagttaagtcctgcgaatatgtcgttcacgctcacctgccattgcatgcgtgagcacngggccattccaccgatgggtgtctccaaagtcgtgacttttccaagactggt

SEQ ID NO: 13380 - DNA, 226 bp, Zea mays
  unsure (1)..(226): unsure at all n locations
gatatcagccgctaccgacgacagcatatcgtcggtagtttattctattctaatttcaagggtaattttttttcttcggcttttcattgntntaacaccgaaggtgtttcttacgaaggttgctttgcacagagtatgctattaagtaaagccttgaggatgcaacaggacctcgaaaataaaaaacatgagattataaaggcttatagagcaaaataagagatca

SEQ ID NO: 13381 - DNA, 409 bp, Zea mays
agcttgcgttcgagacttcgacctcgaaacttgtggcctattattaatctgagctctgatacaggaattggtagaccatctttctcgcgtctcagaaaagaacgggtcggcttgaagcatcatccaacttgctgacaatgacatgctacgatgtctacaactagatgcacacaagtagctagtggtcaaatatagccccccgcctgctggatcatcaagagctttacatttcaaactgctcaatacatggatagcacagcggtacaacagcgtgaaagttctaacatatatatcccagccgggcttcagtttgcaatcattggggacacaatttaatttccagagtgaatttctagcaacaagtgtcggagcctctctacataagctaacctattcctgatggcttttt

SEQ ID NO: 13382 - DNA, 245 bp, Zea mays
  unsure (1)..(245): unsure at all n locations
agcttcngcgacggttgagaatattggcagcacaacagtgcanatagctatgtatgctgtggtgacttcacacctactcgcctgtttatatagtgctgcacgtaagaaggcgaatcgccacanattttacaccacgcggacacccgctcgcactcactgtgtggtggaccgcagagaccgaacagtaactctgtaaggtggggccgctacacgctgggagattgaatcgtttctcgacaacaagc

SEQ ID NO: 13383 - DNA, 223 bp, Zea mays
  unsure (1)..(223): unsure at all n locations
caccctacgtctttgtgtatggtttgggattgggatgaagntacaagctatatactatgagaatggtgggatgaggtgagatgaaagtggtangggggcctcttggccttatatacacgacccaaggtaggtattcctgcatatatgacaaacgtaatacattcgcctatctcctagattgtaacgaattggtctcctacatcttgggaaattcctgcgctca

SEQ ID NO: 13384 - DNA, 198 bp, Zea mays
acctagttcagcaattgctatgtacatgtcattatccatgattcctcgtagagcggcaggtaaaatccgctgcaatattatatggcaatcatgagtttttaacccttggagggtgcatccatcagtagtaatgcatggtgctaggttcgaagcagatccatttggaaactttacacttcttataaagtcatagaaagc

SEQ ID NO: 13385 - DNA, 301 bp, Zea mays
  unsure (1)..(301): unsure at all n locations
atgcaagcttctaaagggagaacacgtgataggttngactaacgtacaattcgaataagatataccttgngcagctngtcaggcaggttaacaggtgggaggagcgcatcacagcaagaatgtgatgaccacatcaagacccctggagctgctacatatggacctcttcggacccgtcgcctatctaagcatatgagggaagaagtatgggttagctattgttgatgacttttcccgcttcacttagatgttctttttgcaggataagtctgaaacccaagggacccttcagcgctttctc

SEQ ID NO: 13386 - DNA, 258 bp, Zea mays
ctgcagcttctaagggagaacacgtgataggattaactaatgtgcaattcgaaaaagatagaccttgtgcagcttgtcaggcaggtaaacaagtgggaggagcacatcacagcaagaatgtgatgaccacattaagacccctggagctgctacatatggacctctacggacccgtcgcctatctaagcatatggggaagtaagtatgggttaattattgtggatgacttttcccgcttcacttgggtattctttttgc

SEQ ID NO: 13387 - DNA, 174 bp, Zea mays
actgagctgcagctttattgctttattgcttatttcaaagaggcttttgtgggagattgtttattatgggaaaaagggggagttgttgaaatccgtggtcaaattcttttgaaatgactctctctatgctctaatatgtgtgcttgacttatagatagagatttgagtttgatt

SEQ ID NO: 13388 - DNA, 442 bp, Zea mays
  unsure (1)..(442): unsure at all n locations
agcttgtctttccttctgcagacaagaatcaacattcaacacccagtctttaataaacacgacataatcaactaagggagtttacctcatatgccatcctttctaagttaagctaagcatcgagagaagaattcaaagaacacgcatcatccagagaagcagaaacccgagccaggtcggtttgaccttgagaatacttctcctcaagatcagagtaccgtcgggttaagtcggcttgactttgaagatgttnttcctcaagctcagagcaccatcgagccatacctggacaggcagcttgaaagggatatatgngtaaaaacaaggtgatcaataaaaactactanggaagaaacgaggtcactaaccagcgttcgacactttcaagtcagcaatatggttctgaagtagtaatggggtncactacatcagagacagagct

SEQ ID NO: 13389 - DNA, 189 bp, Zea mays
aactatttcaattgagctagataactctttatattgcatcgctcaattattaaatacgaatgccttgcttaaagaccaagtataaaaagctcaaggttgaaaatctatcttttcaagaaagatatgagatgcttctatggtcttatgaaaatcttatggatgaacatatcatgttaaacattgctcatg

SEQ ID NO: 13390 - DNA, 286 bp, Zea mays
cctgaggcatgcaagcttgaacacggggccctcgtcaccggagtagcccaatcgcgctcacttgagttcaagaacccgccggcgcacgtggaccgggtaagcccctgcaccgttttccaattccttgcacgcatggcctctgtgtcaccccgtgaagctcctcgtgcacctaattgagctataccgccgtggattggccggagcaagagccgccgacgacccccgccgcctgcgctcgtggccagggtagcttcgaccacctgcgacaccgacccgcacattggcg

SEQ ID NO: 13391 - DNA, 438 bp, Zea mays
  unsure (1)..(438): unsure at all n locations
agcttgagaatttgcatagcacagaggaccttcggataattaatatactatatacacggcatgaattctacgaagcaataaagagtcgttctaaacagaacgcagtgtgagttttctgctccaaagacgttcctaagggaatgcagagcttacaacgaacagtcaacgctgattccgccgagagtaaaaggcgaagaagctccaaagacgctcctaagggaatgcagagcttacagcgaaaagtcaacgctgattccgccgaaagtaaaaggcgaagaagctctcaagacgtttctatgggaatgcagagcttacagcgaanagtcaacgctgatgccaaaaagattatgtattntatagcagggatgtgtctgtgaagcttcggaacgaatacctttttctcatagcataacatcatcacatcaattttcatagcat

SEQ ID NO: 13392 - DNA, 485 bp, Zea mays
  unsure (1)..(485): unsure at all n locations
ggatcttaagcactgngctgcagctttgccccgcgaccatacctgaagggccacacgtaatgggagtggagagatggcgagagtancatgtacccttcgtggcaagaggctgaacgatggtgtatttgtgctctcggntggcgtgaacctggtctggtcttgagaaacccggttgcgaattgtgcaagggtaagtgctacatatctcgtgtgggtggagatccctagctgggtattaatcgattcggatcgcccgtacttctcgaacatgaagacttggtcactgccctacacgtagtaatccagtaaagtgaagtggtgattaaagacgctagcatangccaagtgcttgactangatagaaagactctagatgcaggtatgactaacctgaaataaaactggattttaaggatcactncgtagtagcattctacaatagagtcttgattcttgatagcttacatgactccacaaccacatatc

SEQ ID NO: 13393 - DNA, 274 bp, Zea mays
  unsure (1)..(274): unsure at all n locations
agcttgtgcatcttgtaccanagaacaggacgttgcagaatgttcggcagttcaaggtccctttgtaggcttgtagcgctgcgctgcactacgctaatcgacttctccaagagaaaaattggattcacagagtcaattgctagccaggttattatttcagttgggagtgcttttatcttgttgattgaacgatgcatttgttttccaggagataaataatgagtcaagctcctgattgacaatgtctgcttccagttgtgtatataccaacagt

SEQ ID NO: 13394 - DNA, 195 bp, Zea mays
gaagatgctcctcgacgagaaatagggcaagtgggccgatttgttacctgaagcggtctgggcgctaaacacgactaagtgcaaggcgactgggttcacctcttttcgcctcctatatggatcggaggccatgaccccgcaagaaataaaacatgggttcccacggacagtctcgttagctattccccacgtgga

SEQ ID NO: 13395 - DNA, 189 bp, Zea mays
ctgctcctggcacatgcaagcatcgagccatctccagcggcaccggccgcagcggcactcctccaccttgatgagtcgaaagcacgcgctttcctcggcgatggctccaacaaggacatgatcgaaggatggtgcctcgacaccgacgccactcatcacatgaccgggcgacgggagttcttcaccgag

SEQ ID NO: 13396 - DNA, 282 bp, Zea mays
  unsure (1)..(282): unsure at all n locations
catgcaagctngtggaggttcttcatccncacatgtgctaagcggcgatgccacaaccagcccatgctagtcttagccattaagcatgcatctagaccggcctcttcttttgtcaaatcaactaagtaaagtttgtcgtctagtacacccttaaaagctagtgaaccatcacatcttctaaagacagacacatctacatttgtaaataaacagtcatattccatattacataattgactaacagatagtgaaatatattcaagactcttcactaaaaacaca

SEQ ID NO: 13397 - DNA, 180 bp, Zea mays
ttctagcctaagagacgagtatcctgtctgagcaacactcctcactgccgtgactaaggacttgggctgacggctctattaccaccatatgatgatctcggtgcttcgtaactcatgagaaattgcttcacatcagagtgaccatcgtacatgggcaactgaggtggcttgtacaaagat

SEQ ID NO: 13398 - DNA, 252 bp, Zea mays
  unsure (1)..(252): unsure at all n locations
agcttttcccatgccgaagctaatggcttcggctcattctctcactcattttgcgtacagacaaagcttntgtatatgttgtcttgaccgacagccagctctgtccagcctttgtaattcacctaaaacacactttattataccaaaatacatgtgttttgaggaccttcggcagagangcccccaacagtagcgccttgcaaaatgagtattgttcttcataacaagctcagatcgcaaaattcataaatg

SEQ ID NO: 13399 - DNA, 252 bp, Zea mays
  unsure (1)..(252): unsure at all n locations
acatgtgctaagcggcgatgccacatccagcccatgctagtcttagcaattaagcatgcatctagaccggcctcctcttttgcaaaatcaactaaataaaagttgtcgtctagtacacccttaanagctaatgaaccatcacttcttctaaagacagacacatctacattngtgaacaaacaattatatcccatattgcataattgactaacggataacaaattatatcctagcaactcaactaagaacaca

SEQ ID NO: 13400 - DNA, 482 bp, Zea mays
  unsure (1)..(482): unsure at all n locations
tgcagcttctaagggagagcacattntatgactaacaaatggtcattntgagaaagacaggatttgtagcgcatgccaagccgggaagcaagttggcacccatcatccacacaaaaacatcatgacgaccgacaggccgcttgagctactccacatggatctattcggcccaattgcttacataagcatcggcgggagtaagtattggcttgtaatagtggatgattattctcgcttcacttgggtattctttntacaggaaaaatctcaaacccaagagaccttaaagggattcttgagacgggctcaaaatgagttcggctangaatcaagaaaataagaagcgacaacgggacggagttcaagaactcacanaatgaaggcttccttgaggaggaaggcatcangcatgagttctccctctcctacacgccacaacanaatggtgtagtggagagaaagaatcgaactctattggacat

SEQ ID NO: 13401 - DNA, 485 bp, Zea mays
  unsure (1)..(485): unsure at all n locations
ctgagggatgcaagcttcctctatcatcagaatctctagacaaaccaactagcatttcatttgtaatcttctctgcgattgccttctccatggcctcataaaaaccagctagagcaggatcaacaaccttcttctcttcagccatttggtgagcacttgtgcaaatgccgaagctcatgaatcaagcgaaatctaacagagcaagtgttggggacttggtctcaaatgctatgaattaagaataaggcaacacagaatgttaaatgttaatgcccttcatcctacgaagcattatttcccttaggatataataatcttcagatgaaggccatgaaagacataccttcatgagtgcagtacatgttaataaaagaagaagcatatganatataagagacaatataagcaatcatataacgttattaacttgttctcattatattatcatagagagacagacnaatactgaattataaatgtacctt

SEQ ID NO: 13402 - DNA, 288 bp, Zea mays
  unsure (1)..(288): unsure at all n locations
gcaagcttcgtctggaccagacacttgtatacccataatctgacgtccgaagatacctgttcacatatttcacttggaaaacattgtcaaatcatgtttttgaggaccttcggaagccgaaggcccccaagaccagtttacaccgaggaccctgngcttttcctaaaacaatcctttaacttatacccctgagcaactattcacctgagtctctgaccattcaaaaaccccctgacttcttttccttctttcatganggccctcccccttttgaaaagtacccgcgga

SEQ ID NO: 13403 - DNA, 150 bp, Zea mays
  unsure (1)..(150): unsure at all n locations
tccctcgaggagaaaatgaacatgctgattngctagccaagtcagcagcatatgggcttgccttacctttggaagatatttttgaaacaataaaagcaccttcggttgaacttcttgaaagagcaagcctcaatatttctcctgttcata

SEQ ID NO: 13404 - DNA, 134 bp, Zea mays
caacaaaggcgttgttatttcaaacagaaaactgtagtttgtatcaagagtttgctggcagcatgacttgcggtaaaatgttgcactctcatgtatctcttaaccaacaagttgaatgcatatagcagactcac

SEQ ID NO: 13405 - DNA, 251 bp, Zea mays
  unsure (1)..(251): unsure at all n locations
agcttataacacgagaatagaagcaagagctcgaccatatgtcataatataatgtgagttatacaagcgcggggtctgttccccattgctcaagtgcttatccagatccgaaggcgtagaattaatgaaggacatacatgcacgtctgtgtggatctcacattggatctatgcccttgcttgggaaagtttttcgccaaggattntattggccaaaggcagcttcggatgcagcggatttagttcaaaagt

SEQ ID NO: 13406 - DNA, 438 bp, Zea mays
  unsure (1)..(438): unsure at all n locations
agcttgaaccaatanaacccctatcttagatccaccttcgagccctcttggctcaccattcggagggagtccgcgctagcacccctgccaaacacaaatcttattgtgcaccggtgtttcgaaacatgacacttatacttattgaaagggaaatgagcacataagtcattttcatatttggttggtgagtaatgtccaacacaacatcttggactaactggtttgctaagtctatgagcacaggttcactcacgtgcaaattgaagatctcaagttcatatgagctcaaataatgccaggaagtgcaacattttgaaaaaacgtaaaatagtgacgtttgaaccttgaataagtacatacacctatagaatgttctagcacttggttgctcttactcaattctaaccaaaggtactttttgacttgtgttgagtgaac

SEQ ID NO: 13407 - DNA, 378 bp, Zea mays
cacatgcatacactaatcataacattggctctttttcttgcatataaagcacgacaccaattattgaacgataaagcttttgatcaactatagcacctccttcatctaagactagatgaccatttggtgccattggagtcgtgataggcctagcattttctaaaccaaacttcttgagcatgtacttcaaatattatgattgacttataaaaattccatctttcaatcgcttgatttgaaggccaagaaagaagctcaattcttctatcatagacatttcaaattactttgacatcattttccgaactcttacaagataaatcatttgtcgatcccaaaatgatatcattcacgtagatttgaccaacaaataaatct

SEQ ID NO: 13408 - DNA, 292 bp, Zea mays
agctttccgagctggcatgggcccatggaggactagactgtgatgagtgccatcacatacgaagcgtgggcactcggcagatcccggctcgcccgaatttttttttttgcattttagctttttaacaggattaaaatcacgtttagatctaaaaaaaatttaatctcacatttggacccttagctcggcgtcataggctatggcgcctattaaacacagctaggtgccgtaatctatggacaccagtgtgacggggccatggttgaggcgttgcactacctcggctcacaga

SEQ ID NO: 13409 - DNA, 449 bp, Zea mays
aagtcacctgaggcatgcagcttctaatggagaacacattttatgactatctatatttctttttgagaaagacaggatttgtagcgcatgccaagcaggaaagctagttggtgcccatcatccacacaagaacatcatgacgaccgaccggccgcttgagctacttcacatggatctatttcgcccgattgcttacataaacattggcgggagtaagtactgtctagttattggggatgataattctcgcttcacttgggtgttctctctgcaggaaatatctcaaacccaagagaccttaaagggattcttaagacgagctcaaaacgagttcggcttaaggatcaagaaaattagaagcgacaacgggacggagttcaagaacattcaaatcgaaggcttccttgatgaggagggcatcaagcatgagttctcttctccctacacgc

SEQ ID NO: 13410 - DNA, 297 bp, Zea mays
  unsure (1)..(297): unsure at all n locations
catgcaagctngcagccactaccatataagatctacatatatattttctttgggaagtgagaacggatgatctaccctattctgaaataacagcataaccccaagattactgataaaataatacgtccagtcatagccccccatgttaatacatacctcttgcgcccagacataagggctttcatacaagagcttttgaagaatgcattcagcactccacacaataacacctacgctattactcagtggctccaaataacaattctggcgcacaggaccatatcgtgaccaatcggc

SEQ ID NO: 13411 - DNA, 462 bp, Zea mays
ctgcagcatgcaatgcttgccctccacggaattttcatcttgtccagcttgttctctgtggcgtgttggtcttgaaccaccacgatgagtgccagcaacttccttcaacgctgaagcacctcaattggggacaattgataatattgttccatagtatcctgactcctctgttgctgagtttagtgacatatgtcaagaatctgatgtctcctgtacttcgaaaaaagcaattgatttatgtccgtcgcaacgcactggcacctaactagtctaaaaatattgagatggattgaagtgtaacttgaactaatttagtcctaaatcaacctcaacacatgtggatgggtgccaatattatagtatccaaataaagcctaagtgggattggagataaatccaaaatcatgttttgtagtgcttattaacagcgaacggaatcatatgaataaaccacatgaacat

SEQ ID NO: 13412 - DNA, 449 bp, Zea mays
  unsure (1)..(449): unsure at all n locations
agctngaagctggactctgcgctatgactaatttcgatcttgcggatagccttgcatattatagtctgaaggtgtgagaattgtctctccggaaatttacaatttttgaatcattcttttattcctataggaattcttttttcatataaggtttaatactaatcaacgctttgagacgcaaaagaatgctgaagacgaaagttataatattgctttcaacaacctacgagcataggttatcaagctgaggaacgaagctttggaaaaagataaaattctgcttacactaacggataaaataaatgaagacgagactacctctaatgctcaagctgaagcccataaacgcgaaattcaagatcttcagaaacaactggccagagctgaagaagaacacatactagaagaaacaaaacgagaacttagtgaacaatgggcaaatcatttgg

SEQ ID NO: 13413 - DNA, 461 bp, Zea mays
agcttctatattaagatcatagacgtgcgctctaagctagcgttattatatgagagaaggtggatgtgctgctacttcccacttcccttgatgagaaacaagcacctgcattgagtaatgcaagagtgagatgaaacatctcagcaagcgaattattttgacgagatatttaaaccacaaattgaattcatcaacattttaaaagagtcacaattaaaatcagaaatacttgtagatatagaactcagtagtcccactataaccaataccatctcatttcctcgaacaaccacaataggttctataacacttccctgcgtcaacaatacctgcaaatatcacttcaatgtatgcataagaatgcaatgtgtaggtactctatcttcatacctctgggggtataaaaccacatcatctgcaaatatcacttcaatgaatgcatatgaatgcaatgcatatgg

SEQ ID NO: 13414 - DNA, 388 bp, Zea mays
  unsure (1)..(388): unsure at all n locations
gagttattattgggagcttanggaattaaatcagttcaagaccctccagtgctcttgaaaagaaggacttcaagcttcagacaaccgaaggcatatatgcagaagttgtagcttaaataacagaactaaatacgaagcttctctcccagtcagaaaacttcgaacaagaagagcaaaagcttaatgcaaaattgaggccgaggtccagaaaaagtcagatttgcaaaaatcattgacagggcttcaaaacaaatgtctggagttcagtaatcgatgtatacaacgactgaagcagatcttttattcggttggagccagaagtgaaaatttaccctttggctgagacctgcgagggccttcaacatatcgaggtgaaatgatgatttga

SEQ ID NO: 13415 - DNA, 447 bp, Zea mays
  unsure (1)..(447): unsure at all n locations
agcttgtcataaanaatttatcagatgattccgtcatgtataagtatgggtgaaacttgaaacaattgtaatctctacactcttatcagtataatggccaaggatgtctattttacagccaaaaatctatagagaacaaatgggtcctaatcagacaaaattgatggccaacactacaaaactttttgtgtcataagacactggggggcgaatgaaaaatgtcgtcatattggcagagacattagagttgcatgattatacaactatgcatatttgttaactaccttgatcgcaaacattactcatgaaaactctggcatcacatgtgtctgcaatatgatgactgcaatatgttcagcccaacagtacagggccactgatataaggatagcaaaagcagattaacgagagtaagggttaattcccaagtgagaatgtgtagcatta

SEQ ID NO: 13416 - DNA, 421 bp, Zea mays
agcttggctggccttgctgcaatatccaacggtgtattcttacatcattgggaatgttgtgcgcgataagttattatgaagaccatttggatggtaggaaaaaaacaaaaatggattttgtgtaaatactattttatagaccatgaggcgctaattactcaattgacagaaaatacagcttttccttacaacggaagagattaaaacatgtctactatggggaatggaactctacttgtttagctccaaactcagcgttaaatcacctattacaattgatcaggctaaccaagtgacaaactctaagatgcagtatcgagtatcgactacaataaagtgagtaaagacggcggagtatagtgaaatgattgtcagagcactatttagacttcatgaaatgcaaagttttttttggaaatag

SEQ ID NO: 13417 - DNA, 451 bp, Zea mays
agctatgggtatttccacgtctcaggcaacttaatcgtcattgttcctagggatcgaccatggctctctagagcttaaggaagaccctaaatagatcgactaggtacacaccataattcatggcttactgagctaaggcaatcctccccatcgacctaaagtatgacgctctcagggtaaggctatatgcgaacgaagaaaacgaatcgtacctcggagacacattggactagctcgacaaagcccgcgatgtggtgcatctatggttggaaactaccaatagaagttgcgaaggtaccataaccaccacatacagagtatgactctataagtgggggaccttgtgctccagtgagttcaaactaacaaggatcgacacaagctgtgccaccctgtgaggtttataaatggagaggtacttcggccaggcacctacaagctcaaggatgag

SEQ ID NO: 13418 - DNA, 445 bp, Zea mays
  unsure (1)..(445): unsure at all n locations
gcttctaagggagaacacgtgataggtttgacttatgtgcatttcgaaaaagatagaccttgtgcagcttgtcaagcaaggaaacaaaggggaggctctcatcacaccaaaaatgggatgaccacatcaagacccctggagctgctacatatggacctcttcggacccgtcggctatctgaacatatggggaaagaaagatggtctagttattgttgatgactcttcccgcttcacttgggtgttctttttacaggataagtctgagacccaaggaacccttaagcgcttnctaaggagagctcaaaatgagtttgagctcaaagtgaagaagatcaggagcgacaactggtccgagttcaagaaccttcaagtggaggagtttcttgatgaggaggggatcaagcacgagttctccgctctctacacaccacagcaaaatggtg

SEQ ID NO: 13419 - DNA, 64 bp, Zea mays
cttaagcgacgcagcatgcaactttatatgacatggtgaagatacactgtcggttctgagcaac

SEQ ID NO: 13420 - DNA, 332 bp, Zea mays
  unsure (1)..(332): unsure at all n locations
tttagtacaatactagctatcattcttctcttcatctcactctgtttgaagtactatatggtcatccttcatgtcgactgggttttgattttagagagtcttgtactgtaacttcactgaatgattggctacatgagcgcaaactgatggttcaacttggtcaacagcaactcgctcgagctaaacaaagacagaagcaacaagctgacaagcacatatctgaacgcatttttgagtaggtgattgggctacttaaaattacaaccttacatncaatctttcctggtaagacatacanaccataaagttgtcttcaatttttttgggcccta

SEQ ID NO: 13421 - DNA, 424 bp, Zea mays
  unsure (1)..(424): unsure at all n locations
tactntctttggcggcatgacgaaggtctattcttgccgaacgtgtacgaatctcataaagtggaagtgagttcaccggaggtgggcgccaatgttggggacttattctcaaatgctaagagttaagaacaaggcaacacagaaaatgttaaacgttaaagtccttcgtccttcgaagcattatttcacttgggatataatgattttcggatgaaggttatgaaggacataccttcataaacattacatatcataatgaagaaggaattacatggaatataaaagataacataaacttttatgtgctattatcaactcatttttaatttattgctatggaaaaataggaatgacatcgagttacatatgtacctctgacttgagagaacgtaaaagtacaagcgtgacacaaaagcaaatgcca

SEQ ID NO: 13422 - DNA, 451 bp, Zea mays
  unsure (1)..(451): unsure at all n locations
agcttgtgaagattctacatcccaacgtggccttgtctgtgatgccagagccaacccatattagtcttagcaattaagcaagtatcgagctcagctctattaaaatcaactaagtatagctgaccctcgagtactcccttaaatgctactgaatcatcacttcttctaatgacagtaacacctatatccgtaaaaagacaattgtaacccattttgcataattgagaaacagaaagcaaattgtaatctaaagaatctacaagagaaatattggaaatggaatggtcaggtgatatagcaattntaccaagtcctttgaccaaaccttgatttccatccccgaatgtgatagctccttggggatcatcatttttctcgtaggaggagaacatccttatctcccctgtcatgtggtttgtgcacccgctatcaatgatccaacttgagcccc

SEQ ID NO: 13423 - DNA, 444 bp, Zea mays
agcttgtgaagagagttgtggcctttgctgctggctccctcgatcatcagtttgagcagagttatggattgacctaacatgcctcgggtgaaatcttcctccgaagcccctggtcatttcagagaaccggaatgcttcctcccttctttggcggaagtcattgtcagctcgaatgtattcgtccatcttctggagcagcttctccaacgtttgtggtggcttcctggcgaagtactgtccggaagtgttggactaacagccttcctcttctggcttcgggcctctctgagagaaaggacatcctgagtgggatccagtggctgtaaagtaccagcccctgtcgctgaagcttttttcggcggcatgacgaacgtgatgcttgccgaagttgtcaaaagtcaagaatggaaggagttaccggaggtggcgccaatggtgagactt

SEQ ID NO: 13424 - DNA, 438 bp, Zea mays
  unsure (1)..(438): unsure at all n locations
gcttgacatatagcacttcctaaagcttgtggtcgtgctacctatttgaatttagcatgggtaaattaacattttgctcgtccacttctttttaatacaaattgtatgggttggactggactgtctgacgccaccaaaacgtatgaacttttccccatgacgatggctatgatatgacaaactaaggggctgtttggtagcacgactaatccgccacaccgcaccacagttttaccgcagcagattccaccgccgcggcttatgcacggtatggcgcgggaggccacacaccaaactagccttaactctcttgaaaccctgactttntccgcgagggcttagtaatttcctaggaacagtcatataccaacagtagagtggttttctttaacgagggaatattacctcgatcatcctctctgacatatcaagatcgtg

SEQ ID NO: 13425 - DNA, 320 bp, Zea mays
ctggggggtcttttttccatgacaattctgaagttgcatctatattcaaaaaattttgccaagaaagcccaaactggattttgtttgcaagactaagaagattagaagtgacattggcaaagatatttgacaacaccaacattcatgactactgtgatgaaattgggatcaagcatgaagttctgccacattacacctaacaaaatggagtggttgaaaggataaataggaccttgatcacccttgcaagaacaatgatggatgagtataacacaccggagaggtttgcgccgaactgtcacactgcttgtatgctcaaa

SEQ ID NO: 13426 - DNA, 442 bp, Zea mays
atacacatcaagcataggtatggtaacaactttgttaaacaccggtggccgcatgcacgaccagagccatcagagaacgcaacgccgatagttgaggcaccgatagggacgacgcggcgatgcatcagcgctcgaccatcctgagcgccatcttgatccgctagacaactagagccgtcgaggcgtcgatggaggaagcagcgccagcggctgaggcgtgagaatgtcttcttaatataatacctggcactgtcatacccatcgcatgttgaggctcattggagcatggacttgatgtcatgtgccttttctctatggctgtccatctgggtacgggatcctataataagaacaccagatgaaagcgattgaaattttctctagtgaacaacctggtttgtatatatgttaatacacatgtatctaaaatcacaccacgaga

SEQ ID NO: 13427 - DNA, 450 bp, Zea mays
agcttcggtatccttgcttgtcccttcttcgtgagcccctggtgttcaatcagcgatgaagactgctagcgcctgggattgaattgaagatctgtgcacatagtcaatggtgaattcattgagctccgcggcccactttccaaccctctcagtagctactttgttcctcataatatcctttagaggtcgtgacgagggaacaattatatgataagcttgaaaataatgctgaagctttctggaggccattaatacagcatacaacactttctccaattctatgtaatttttctttgataagcttaatacttcggagacaaaatatactgggacttgctttttagtttgtcattcaagattctcctgtacaagcgccacacttactgccgagtgcgaagctgccacatacaatagcagaggagcccctggcgtgggtggagttagcgttgc

SEQ ID NO: 13428 - DNA, 442 bp, Zea mays
  unsure (1)..(442): unsure at all n locations
agcttcttctccttctcttccttgcattcagtttcatctcctcaattcttgctcgccttcccgttgttgctcgacagcaagctcctctcgtcttttctccatcctctctttgtcttctgcatcccacttttaagattctccaaccacttcttgtctttctgtgagatttctgtgtcaatccactgctcaaaatcacaaagcggtggaggagtctacaaaacatgcaatgattagtatgcaaagaaaacatgcaccacttcgagtcttcgaatggttaacatattaaaagactattctcaccattaaattcatcccgcgttgaacaatcgttggctcaaatgcatagttagcacacatccaatacctctgtcgataggtgtcatgatccttagacttgtncaaccttgcaggatcaccacataaacacataggctcttgaaca

SEQ ID NO: 13429 - DNA, 334 bp, Zea mays
gagccgcatacactttctcttttgtctgcatgacggctaatcgaactacaccctctatcctctaattattcacctaagggcaccccattccacccttatgggtgcactgttttcccggtcggtcattcaaagaacatgttcttactgagaggcactccagaaaccgctagagccctcttggagaccacaagtattacatcgcaatatgaagagggcaaacagcgcgtcattgaacattctcattatgttcattgattaaactgatcactagcattacactaaccataatcattcacccaataggtaaacatagcctggatacatactattaatc

SEQ ID NO: 13430 - DNA, 476 bp, Zea mays
  unsure (1)..(476): unsure at all n locations
cggacctctaagtcgacgcggcatgcnagcttctgcctgcggaagccgaaggttgatatttattaagctgccgaagaatgccagagagccttcagaggtatctattcttttattggaacgagagatttggtccaagagcatattgccttcagagtatggccgctcgccgaaaaatgtgaaatgccgcaagagaccataaaggaggctgacgaatgtggacttatcaggctgaagtatactttcaagttcggagataaattcgttgagccagatgatgactggctaaaaagcattgaaaatgtaagtgatgaactacttggggcttattcaaaggccgaagatactgcattgtcagcagccttcggaggccggaaaaagaaaagactgaaccgagtgtttgacgcaatggggttcgtctaccctgactatcgatatcccattcgagggcagaaaagaaaaggcacgacctctgcgaa

SEQ ID NO: 13431 - DNA, 456 bp, Zea mays
  unsure (1)..(456): unsure at all n locations
ggcagcaagcttgcaccttgaaagcagggtggaattacatatacntttctactatatatgttcattttaccatgattaggcgaggagttgtttgtgcatttgagcttggacagaaatatccataagtgccttttaactgtaaccgatatggtccttgtcctaaattgttcagcattcaggagctttttattggttctcatatgacaaacctttgcccttataggttcacattgcgatttgactactagatattttgatccctgtgtatcagatcaaatagtttctgtttagtaatgctacctctgatatggtgggctgcagatcctccatgtttgcacacatctaaacaggcttgcttctagtagttttgtgccattcagccctgttattgcttgactcgtgcttgttattatgcacctcgataaaacgaatcttcatgttctattgaattatgga

SEQ ID NO: 13432 - DNA, 448 bp, Zea mays
  unsure (1)..(448): unsure at all n locations
tttgtgatttactcacataaatgctttgtgtatcctcttncgaccattcatcatgtttacaatgagtaatcatccaaagggatagatctgttggttctatatcagtttctggatctctctgtaatgtgaaaaatgtatcatacaagtttgtcattaatcatggaaaataaagtagtggtcatatcattacctgttgaaagcttatttgggaaaaagttctagaacccattatatgcttcgttctttgtttctgacggttttccgagttccgactgcttattttctagaaaatattaatagttggaaatgaattaataaataaatcgctagaatcatccatattatgcaagtgccaatcgttaaagtataggaaatgaaacagcaaacctggaatttctcacatccaaaatacaacatcatgtaatgccactcgacgatgtctacatct

SEQ ID NO: 13433 - DNA, 410 bp, Zea mays
  unsure (1)..(410): unsure at all n locations
attaaggncaatcgggcttctaagtggaatgaagcctctgagcaactgaagacattattcaccactgctccggtattggctcaaccggacatcactaagccttttgatgtatattgtgatgcatctagcagtgggctcgactgtgtactgatgcaagagggccgagtaattgcgtatgcttcaaggcagttgcgccgacatgaggagcattatccaactcatgatctggagctagctgctgtggttcatgccctgaagatttggcgtcactatctgctgcgaaatatctgtcacatatatacagatcataaaagtttgaagtatatcttcacccagtcagagttaaatatgatgcaaagacgatggcttgagctcattaaagactatgaactggagatccattatcaccc

SEQ ID NO: 13434 - DNA, 380 bp, Zea mays
tatggtgagcaacctcccggcttttaagatagtgagcaccctaccatgtttaaaactctctaaagcgctttatgggctcaagcaagccccaaaagcatggtatgaatgccctaaagaattccttatcactaatggattcaaagtcggaaaagcccatcctactttattcactaaaactcttgaaaatgacttgttcgtatgccaaatttatgttgatgatattatatttgggtctactaacgagtctacatgtgaagaatttagtaggatcatgacacataaattcgagatgtctatgatgggggagttgaagtatttcttaggatttcaagtaaagcaacttcaagagggcacctttctaagccaaacgaattatactc

SEQ ID NO: 13435 - DNA, 404 bp, Zea mays
gattcatcccagataattgtatgcttgtgcaacaaactgccacacttttacatcatcttagaaagccaagagtcctgctgaaattcgatatcaataagggccttcgactctgtatcttggccatttttattacaagtccctatcaaagctgggtcttggaccgatctgcatagacatcctaagtggcttgatggccacatccacatcccaagtacttctgaatggaattccatgggctaatattctgtctcacgcacgatgatccattgtcccttatgctcattattctagtcatggatgttctagcacatctgatattaaaagctgaagagcaaggcttcctgcatcccctatatactccagacacctgcagcatatggtatctctatatgctgatgatgatg

SEQ ID NO: 13436 - DNA, 467 bp, Zea mays
  unsure (1)..(467): unsure at all n locations
ttaagtcacctgaggctgcaacttcggaagccaagtccataaacaccttctctgagctcgttgccgagaaacgaatcatttcccgagatcgtgtcggtcccaccttgcagagtcactgtttggtctttgcggtccactgcgcagcgagtacaagttactgcccgcctggtgtaaaaaccctgccgcttcgccttcttacctgcagcactatataaacagacgagtaggtgtgaagttaccacagcatttactgctatttgcactgtttcgctgccacaaattttaaccatcaccgaagcttgtttggcagggttgaacgcagctccatcttgaagcctgcttccgagaacaaagtattaaaagttcacaagttcataattaaatggccagagttcgctctacagctaaggttgagcgtgagggggacgaaactgaagcttcngagactgtgcccatctccgaagcga

SEQ ID NO: 13437 - DNA, 456 bp, Zea mays
  unsure (1)..(456): unsure at all n locations
agcttagcaaaagaatattctagaatcaagaatattgagctcatgcctaagtctggtaaaagattgttcatcaagtggcttggtaaagatatcggctaattgatctttactattaatgtaagaaatctcgatatcccccttttgttggtgatccctaagaaaatgataccgaatggctatgtgcttagtgcggctatgctcgacgggattgtcggccattataattgcactctcattatcacatagcaaagggactttggttaatttgtaaccgtagtcccgcagggtttgcctcatccaaagcaattgcgcgcaacaatgtcctgcggcaatgtactcggcttcggcggtggaaagagcgaccgaattntgcttctttgaagcccaagacaccaaggatctttccaagaactggcaagtccccgatgtgctcttcctattgattttgcaccccgc

SEQ ID NO: 13438 - DNA, 458 bp, Zea mays
  unsure (1)..(458): unsure at all n locations
agcttcctcccttctttgtcggaagtcattatcatctcggatgtactcatccattttctgaagcagcttctccagagtctggggggttcctagcaaagtattgggtcgtaggccctggccgaagacccttgatcatggcctcaatgatgatttcattgggcactgtgggcgcttgtgctcttagacgcaagaaccttcggacatacgcctgaagatattcctcatggtcttgtgtgcactggaacaaggccgaggttgtgattgtcttcgtctgaaagccttgaaaactggtaaccagcatgtccttgagcttctgccatgacgtgattgtccctggccggagagaagagtaccatgtctaggccacacttcgaactgctatgacgaaggactttgccatgacagctgtgttgcctccatatgaggatattattgtctcatagttcatcanaaattgg

SEQ ID NO: 13439 - DNA, 447 bp, Zea mays
gcttgtggtgccctccggcgtcttgtcgcagcttaagtaccatgtcttccacctggaagcctcggtgccgaaccattccggcgtggtagcgtcgcaaagacttgtgataccgcgcccgatgtagtaaaggcacgtcccgagcctttttcagctggtccaatgaatcttttcggctggtctgggtgctttggtcgtcatacgcctttgtcctcggggaaccgtattctaagtctatgggtaagatagtctcggccccatagactagaaagaacggcgagaaacccgtggctcggctcggcgtcgtcctcagcctccagaccaccgagggtagctctttcatccactgcttgccaaacttgttgaggtcattgtagatcctcggtttaagtccctgcagaatcataccgttggcacgctccacctgcccattcgtcatggggtgagcta

SEQ ID NO: 13440 - DNA, 435 bp, Zea mays
  unsure (1)..(435): unsure at all n locations
atgaaactagcttttgtgtataacatgtagntatttgcaataggtgtaaagatgttgatttnnatgaacatgttactcctattgataaattaaacaatgaggttgcaagtcttaatgctcaacttaagacttgcaaagatgattatcataaactaaaatttgctagggatgcctaaattgtcggtagacacccctcaattaaggatggacttagttttcgaaaggaaaccaagaacttaacaagtcaaaggacttccgttctcaacaaggagaaagggaaggcccctatggctagtagttctcaaaagaaccatgcctatatttatgagtaggaaattactagtcgtgctcataatgatagatgctatgatcatattgtttctcatgatgctacatttaattctcatgctatgttcacatctagttccactttta

SEQ ID NO: 13441 - DNA, 360 bp, Zea mays
catgtcagtcttaacaattaagcaagtgtctaggtcatcattggtatcattgaaatcaactaattatagctgaccatctaacactcccttaaaagctattgaatcatcacttcttctaaagacggtaacaccagtattagtaaatagatagttgtagcccattttacataattgagaaacagaaagcaagttgtaatctaaagaatctacaagaaaaacaatagaaatggagtggtcaggagatatagcaattttacccaaacctttgaccaaaccttgatttccatccccgaatgtgagtgctctctggggatacatcgttttctcatatgaggagaatatccttttcccctgtcatat

SEQ ID NO: 13442 - DNA, 450 bp, Zea mays
  unsure (1)..(450): unsure at all n locations
agcttggaggcgtcgatagggtgtctacttggtgtanactccttcttcttttcttccatcgccttgaatgcgacgggttgagcttctgatgtagatggatcatcaagctcgttgatcttcctcgagccttcgatcatgcactcaaaacttacaaaatgcccgataactttctcgggggtcattttagtatatctaggattaccacgaattaattgaacttgagtggggttaacgaaaatgagagatcttagaataaccttaaccatttcggggtcgtcccacttcgtgctcccgaggttgcgcacttggttcaccaaggtctttagcctgttgtacatgtgttgtggctcctctcctttgcgaagccggaaccgaccgagctcccactcgatcgtttcccgcgtggtgatcttggtgagctcatctccttcgtgcgcggatttgagcaca

SEQ ID NO: 13443 - DNA, 448 bp, Zea mays
agcttgtaagggaaaatatatggagcttactacttacaacaaaagctctgtggggaaatatatgtagccaacaaccatgcgaggagcaggctcgctcgaccatggcgcggctggatctagatccgtctagccagatattcacagtgccacacgttgcatggcttggctaacggatcgagcggaaggaaggcaccgaacacggcaagattgtcgctctagtgcttaatttgcgaactggcagctctgcgagtcccttgcggcggcagtacttgatttgcgaacaagggagatgtagattcttgcagcggcagtaccctatgacacagattctgaagaggagaagagaacgaatggaatgacgaactcacaggagagaagttcgccgacgaagatggcggtccacggcggaagagcccttgcgtcgtcgtcgtcactttcttcagatcac

SEQ ID NO: 13444 - DNA, 393 bp, Zea mays
atatgtaattcttaagctttgagatgatgatcaaaggctcaaagaaaatcatcgagcaaggcgacttctccacgcccgaagcacaaccggtcgcattctaagcaacggaggagaagaagcaagagtctacatcaagtagacttccaatcgacgcctccaagctcgacaatgaggaaatggcgctcatcatcaagagcttccgccaaatcctcaagcaaaggagggggaaggactacaagtcccgctccaataaagtgtgctacaagtgtggtaagcctgatcattttattgcaaaatgtccattatcaagtgacagtgacaggggcgacgacaagaagggaaagaggagggaaaagaaaaggtactaccagaagaatggccgcgatgcccatg

SEQ ID NO: 13445 - DNA, 447 bp, Zea mays
agcttgaaggccaaatcataaagcaagcccctatatattttgtgccagaagctcttagtctatcagagaaaaattatacacaattggagaacgtactgtatgctgttttgatggccttcacgaagcttccgcattatattcaagcttacaatataattgttccttcttcacaaccgttgaaggatattatgagaaatcgagaagctactggaaggattggaaaatgggctgcagagctcaatgaattttgtattgattttgagcatagatcttcgattcagtcccaagcgttggcagacttcattgctgactggacgccaggggctcaggaggaagaaacgaataaagatgccgaagtatggacagtggtttgtgatgggtcttggggaaccttcggagcgggagcagctgctgtgttgtttcaccttccaaagtaaaacttgtatg

SEQ ID NO: 13446 - DNA, 457 bp, Zea mays
  unsure (1)..(457): unsure at all n locations
acgctatngaatgtgttatttggctacaaaagtattgttgagggagaatccactttccttgatcaaaatcgtcctacggatcttcatcaaacgagttctggtcttctactacacaatcagcttctaaaggattcgcacattgtacatacaaaaagaaaacatacaccaataaataaacatacaccattacataagtaaaatacaccattatacaagtaaacatacaccatacaaatcatacttataaaaataagacgtctaaaatagaacttgacttgtaactataatataagtctactcatatggacaatcatctcatttgctatgacatgaaatactaattttgttttgagaattcacttgtgaaaattatatggcaaatcgactatgaaagtgtatactatataaatctcgataaaataacttatatgtagcgataaaccaaactctatggaat

SEQ ID NO: 13447 - DNA, 457 bp, Zea mays
  unsure (1)..(457): unsure at all n locations
agctngagcccccggatgcataaactcgcaagacattttactcttgtggtttaagtacccaactcttgttgggtcctacaaggttagttacaatagcctttggaacccaaatacaagtcttatctcccttgcatttggatcccaatttcctagcaactactttttcattcttacaacaaattgcataagaagtattgcaagcatggtaaattgtagaagggtcattacatactttcctaggcacatgatgcacaacatgatttctcctaggtttacttctaccatgcacaaaagtagagctagaagcaaacatagaatgtgaattaaagacatcatgatcataactcctatgagcatttctagaaaattntctatcactataaatgaaagcatgattcctttgagcactattagccataggggccttctctttctccttgttgaatatgggagcctt

SEQ ID NO: 13448 - DNA, 438 bp, Zea mays
agcttatgagcatggtgatgtgtccactgcgattaaacttcgtcatgactcggcccctgtgcaacatgcagctggggtctccttgcgagctagctgaagtataatttaaggttgtggttgaacatatcagcacaagagattttgtacaagaatatctggcaaactggacattcccaacttctggcggctggggaatgccaaaaaagaaagaagaggggaagaaatacgagcttgttctatcgtaccacttcaaatttcagaatagatttaaagaaccatgcactgaatggttagaattgatagaaaccatgtgcaatgaaattcctagaaactatacgaagaaagaagatcagctactgactgctgcattcggcacccggccgaaacgaaggctgaaccatgtaatggatgctcttaactatgagtattctgattaca

SEQ ID NO: 13449 - DNA, 445 bp, Zea mays
  unsure (1)..(445): unsure at all n locations
agcttggcgactgccagttcgacctcttttatttttctacgtgaccgcatgcgtcgctgtgttatgcaagctccggcgcaaccgccgcttggatgcggtccaaagcggctgcaccgcgctgtccatcttcaaatagggggacctcatggtcgtcgccaacgccggcgactctcgggttgttctgggcaccgcatccgacaacggcgctgtcacaccgtccagctcatcatccacctaaagctcaacctcccacgtaagtcactactgaccggccatgaattcttgtgcgctgggacgacgatcgttgctgacgttgagtgagtgtcctcgaacaagatttatgtagaggagtagcacatccggtggtgcaacgactaggtgtattacctcgctgatgagcccggngtgcacttcatttggcagcccagccaagagtcatcggtac

SEQ ID NO: 13450 - DNA, 390 bp, Zea mays
tgccattggacctacccgaagtcccttgatcattgcttcaatgacaaattcatttggcaccggtggtgcctgggctctgagtcgtaaaaacctttggacataagcctgcaaatattcatcatggtcttatgtgcactggaacaaggcctgaccaattaccggctttgtctaaaacccctgaaaacttgagatcaacatatccttcagtttctgccaagatgtaataggtcttggccggagagaggaataccaagtttgagcaacactcctcaccgacatgacgaaagaattggccatgacagcggtgttgccaccatacgatgatatggttgcttcatagcttttgagaaattgctatgggtcagagtggccattggacatggataactg

SEQ ID NO: 13451 - DNA, 432 bp, Zea mays
  unsure (1)..(432): unsure at all n locations
agcttctaaagggagaacacattttatgattattatatgtncattntgagaaagacagggtntgtagcgcatgccatgcgggaaagcaagttggaacccaacatccacacaagaacatcatgacgaccgacaggccgcttgagctactccacatggatctattcggcccgattgcttacataagcatcggcgggagtaagtattgtcttgttattgtggatgattattctcgcttcacttgggtgttctttntacaggaaaaatctcaaacccaagagaccttatagggattcttgagacgggctcaaaatgagttcggcttaaggatcaagaaaataagaagcgacaacgggacggaattcaagaactctcanatcgaaggttttcttgaggaagagggcatcaagcatgagttctcttctccctacacac

SEQ ID NO: 13452 - DNA, 449 bp, Zea mays
agctttaccaaatggacgcgaagagtgtctttctctttggaccaatcaaggaagaggtctatgtggagcaacctcccggctttgaagatagtgagtaccctaaccatgtttacaaactctctaaggcgctttatgggctcaagcaagccccaagagcatggtatgaatgcctaagagattttctcatcgctaatggcttctaagtcggaaaagctaatcctactttctttactaaaacaattgcaaatgaattgtttgtatgccaacattatgttgatgatatcatatttgggtctactaacaaatctacatgtgaagaatttagtaggatcatggtacaataattcgagatgtctatgatgggggagttgaagtatttcttatgatttcaagtcaagcaactctaatagggcaccttcatcagcaaactaagacattcaagacatact

SEQ ID NO: 13453 - DNA, 443 bp, Zea mays
  unsure (1)..(443): unsure at all n locations
agcttcatcatctgaaaggaaattaccctgaatataagaaatgatctcagttctccaatcttcactatgaacaggagatatattgaggactgctctttcaagaagttccaccgaaggtgcttttattgcttcaaaaaatacttccgagggtaagggcagcccctgtgctgctgacttggctagcaaatcagcatgttcattttctcctcgaggaatgtttttgacagaaaatccttcaaaggaagcttcaatccttcgaaccgtgtctaaatatttctcaagcttcgggtctcttgctttacaactcttgtcaatatggccagaaataacctgtgaatcagttttaagaaccgcccttctaatccccattgcttttaacttccgaaggcccaaaagcaaagcttcgtactcagcaatattatttgtgcagctaanatcaagtc

SEQ ID NO: 13454 - DNA, 422 bp, Zea mays
  unsure (1)..(422): unsure at all n locations
ncaagctgtgaaggttcttcattctcacatgtgctaagcggcgatgccacaaccagcccatgctagtcttagcaattaagcatgcatctagaccggcctcctcttttgcaaaatcgactaagtaaagtttgtcgtctaatacacccttaagagctagtgaaccatcacttcttctaaagacagacacatctacatttgtgaatagacaattatatcccatattgcataattgactaacagataacaaattatatccaagagactcaactaagaacacattagatatagagtgctcagatgaaatagcaattttacctaacccttttaccttgccttgattcccatcaccgaatattattgaatcttgggaatccttgtttttgacgtatgaggtgaacatcttcttctcccccgtcatctgg

SEQ ID NO: 13455 - DNA, 404 bp, Zea mays
aaagtgctcacttacgttgatgatttcattggaaaaagcacctagctagaaaaccacattgctgatctgcacgagactttcgcttattttagacaagccggtctaaagctgaatccaaaaaagcgtgtcttctgaagtaacaaggggaaattccttggttgtctagtttcaacaaaagggattgacgcttatcccaataaaataaaaagtattcttcaaatggagccacctagcacaaaaaaaggggctcaacgactgacaggaagacctgcatctctaaaccgattcatatcaggaacagcagagagacatctacccatctttgaagtgttgaagtcagctgaagattttcaagggggccagttcaacagaaagtcttcgacgagctgaagcagtatttaata

SEQ ID NO: 13456 - DNA, 448 bp, Zea mays
  unsure (1)..(448): unsure at all n locations
agcttgtgcgtctcaaggtacctagcctttgtctcattgttgacctcgctgacgtantaaaccggcttctggatggttcggacccctgtggtcggtccggggtcctcaacctcctggccttccatcaacatcgtggtggtcggaccaccaccttctcctaggggaacttcctgactcccctggggatgttgtgtcatcctttcggcgaccagcaccatgctcaccacctctgaagtcgctgcaatgtataagtacaacggctcccctggctctggagctaccagtattggcacggacacaaggtgctgctttaactcttgaaaggcttgttctacctctntggtccaagagaatggaccggacttctgcaatagcctgaagaagggcagcgccctctcagccagtcttgagatgaagtggctaagggcggccagtgaccccgtaagct

SEQ ID NO: 13457 - DNA, 435 bp, Zea mays
  unsure (1)..(435): unsure at all n locations
agcttagccatggcaaggctacattacctaagttttaactcaacatttttagcanacagggtgaactcaacagtcaaatgcgcacatgcagatttnttagacagccgcacaacttgtacttgttttaatcataactctggcgatctttatccccaaatatcctactaggactttctggtaagcttaaaaagagctctacaactttaggatttttaccttaacatgagtcatcacttatcaaggtcaaaaagtgcaattacagcagcgctgttcagatctggacagattcagaccctttggttcaaaaatatagaacagagactcatgcctcctaaacaagcgtttttcactttctggaaatgtaatgaaattgggtacatatcatttataaacatctcgaggtgatttatttttatctaaggataatagactcta

SEQ ID NO: 13458 - DNA, 452 bp, Zea mays
agcttggctgtgtagttgcaaccacccaactgtgagtttgttacggtggatacggcgtatctcaactacccatggacaagaatgaattcgacatgtgggtcccacctggcggtggcatacgatatatgcgcgcgtgatagtgaggagcgtgtggcgcggctgaaacgcctatgagcgggtctcgctagtcaacgcgagctaaggcgtgggccgtgcgacagttgtgcttatttgggttgtacagctgaggtgacagttgggttgtgtacgagaaaggagctagaccggtgaagggctgggcaaaaaaacctgtaacccgaaaccgaaatactcgaacccgagatacccgaaacccgaattttatttgggaatttcgggtaacaacttgcaaaacccgaatttatttcgggtaatatcggtatcaaaatcgggtacccgaaatacccgaactt

SEQ ID NO: 13459 - DNA, 446 bp, Zea mays
  unsure (1)..(446): unsure at all n locations
agcttaaagccatggtaagtagcataggcaagtataatgcatattgactcaagcctagctacgtgtgcatagggttcactgaaatccaaaccttcgacttgtgaatatcgctnggctacaagtcgggctttgttccttgtcaccacaccatgctcatcttgtttgttgtggaagacccatttggttcctacaacattttggttaggatgtggaactaaatgccatacctcattcctcgtgaagttgttgagttcctcttgcatcgccaacacccaatctgaatcctttaatgcgtcttctaccctatatggctcaatagaagacacaaaggagtagtgttcacaaaaatgagcaacacgagatcgagtggttaccccctttngaatatcgtcgaggatggagttcacggngtgatcttgttgtattgcttggtggactcttgggtg

SEQ ID NO: 13460 - DNA, 386 bp, Zea mays
ggaggagggacgggacagtgaagacagcaacaaaagaaaaaacaagcctaggttgtttttttagctcttatgcctatgataagtatatgatattaagtgtgagtgagtgagtagtaggcataaataatagtagtagtagttaattagtcgtttattagcagctcctatgctcgtttgtggcatggatggatctcactgttgtgatgatacaggtgattaaactaaaccgtagtagaatggtgtaagctctgccagttgtagttgcgaggctgcatacatcagacatggcatccaaaagaaagaatatactcactcctagatgagtggacaaaatgcagacagactgacgtatcacgagggaaaagtgatgagcactgagcactcac

SEQ ID NO: 13461 - DNA, 448 bp, Zea mays
  unsure (1)..(448): unsure at all n locations
agctngaagagcactacaagaattcgtgctttttgatgaataagaacatgaagntggtggttaggtcttgttagttctgattactctaaacatgataagctttacatttttgttacgaacttgtgaatatatatatagttgggttgtactttttcccttctaacaaaaggtttctcttttcacgaggcgaactgcatgtgaacttaattcaaatattaattacgttagttttggttttccgcgtgttttcactctgtgaattgtgaatctaaaatctgaatacttaattatattcctctcattctatatgaaatgtgaatgcctatatttatttatgtgattgaaattctgggctaaaatttataagatggagggccttttggtttgttttggtttggttgaatcaaattgttttacgagtatatggcgggccagcctgacacgtatg

SEQ ID NO: 13462 - DNA, 426 bp, Zea mays
  unsure (1)..(426): unsure at all n locations
catgcaagcttaggaatgaactcaacgtcctatattctcttatactttgatgaaatcctgcacacattgctcattntatacctctgatcatggcacgtatctttcatttgggacaaatgcatcattcttattcttcttgcgccaaagctaagacaaatgggcttccgagtatatttatgtcaggtaccgtaattaagggtacccccaatactcctaagcatagctggaaaacatcttcaaaacagaccgtaaaggctggtaagcacagcgcaaggataaagcctcatctgctaatggacgcgaactcgtctcgcccgagcctggcctcaagcaataacaatggtccctgacggattcacgccttgcacgaaggccttctcaagcagcaggcgcacccctggctcgcccgggctaatctcggcaaac

SEQ ID NO: 13463 - DNA, 450 bp, Zea mays
agctttggctccatctatattatggattgcttttgaatccgtccagattccttcagccttcctagcagcttcctgacttccgtgaatagcaatatgcccttgatctgaaggtatctacatacatagatatgctggatgaagaattgcttcaaaagcattgagtggcccacgaccaatgattgcattgtaaggatactccatgtcgacaatatcaaacacaacttgctcagtccttgtattgatgacaaatatgaaggtcactggcatcgtgatcctgccaagtgttacgatctgccttccttcgaagccacatagagggtctgtagcatcatgaatcgtatcctctggctcttgcatctgtctgaaggccttggcaaatataaaatccgctgcactgcctgtatcaactagaccattgtggaccagagatcccttgatgacacaagaaat

SEQ ID NO: 13464 - DNA, 398 bp, Zea mays
  unsure (1)..(398): unsure at all n locations
agctttgaanataactntagaagggctttcttctgaagttgcaaagagaatgacattcgaagagcagttaactagagaaactcggataagggaaggagcaacacaccagcacaccttcgtggcacccctccaaaggattctacctaaaatctcggggcaagattcatttaaggggggaggtctataacaccccaggtgtcacttatggttttcacttaaggctacacaagtaaagcccattatcacatgtgacttaacttgagtgaagaaattcacacatggaaataaagatcctaaataagtgcaacccatcctagatgtcataccttggttttatatgcacatataaaggggagaattgcccaaccctaatgaaacccctttggacaatggagcct

SEQ ID NO: 13465 - DNA, 319 bp, Zea mays
  unsure (1)..(319): unsure at all n locations
actccgaccggatcctaatcaccgcgctgcacatgatggcatgatttttcttctctcgatgaagtaagatggaggcttgggtgactaacgagtcgtgtntctcacatatgcaccactgtaatctaatatactagcgccctcccctctactaaagttctttttaccagccaaccctcattctcttcaaattctacaatttcattttctctttttccttttatttgactctaattaatcctaatttattctccttcaatatacggtccctttttcttttgcatacattttcctaaattataatgtggcttttttcttcttt

SEQ ID NO: 13466 - DNA, 443 bp, Zea mays
agcttattgttggagtttggtgatctgtttgtttttccgcaacaattactaccatgcagccaatatgatcactacattcccttggttcctggtgcaatacctgtgaattctaggccctacagatactcgccttttcataagaatgagatagagaagcaagtaaaggctctcttagaagcaggacttactgtgcctactgtaagtccctttgcttcaccagtactattggttaagaacaaggttggaacctaaaggttttgtgtagattaccgaaagttaaatgatttgaccataaagaacagatttccaatgccattagttgaggaaatcttggaagaattggcaggaactcagtatgtttctagtctatatctcacaactggttatcacgagatcagaatgggtgcggcagatgagttcaagactgtcttcaaaactcacca

SEQ ID NO: 13467 - DNA, 384 bp, Zea mays
agcccgaaggcaagacagaaacaagccccttatacttctttcttcgaaaccatagtttatcgaagaaaaagtatacacgactggagaacgagtcgcatgctgtatagaaggcttttaagaaacttcggcactattttcaggcatacaatataattggcccttccctacaaccctttgaacgatattatgagacatacagaacctactggaagggttggaaaacgggctgtggaactcaatgaagctcgcattgattcggtgcaaagaaccctcatccaataccaggcgcttacagacttcatcgatgactggacgccaatggctcaagaagaaaagcaagaaagaagccgaagctggacatattccgcaaggccttgggaacct

SEQ ID NO: 13468 - DNA, 439 bp, Zea mays
cctgagctgcagcttaccatactgtctaagactaattttttatctaagaggcgtactgcaattatcaaacagggatctggattggaggcatccatccctgatcagaggacgattctgtcccattaatgatcaatgactgttcactgggggtatgtacatgcatcccttgtactaaattcatacttatttaaaaaaatgtaattcagacgtgaatactgaagtgaatgttctatactatctctatcagcttttgcagaggaaagaagcctggccaaagtactggattcgatatcaaggatgacgatctgctaaaatggagcaatgccactatctagtcgtagcttctgctatatttggcatgcatcacttttcgctaatagtattcactatttgccctaataaaggcttcactgatcactgtgattgcaatgaatctctc

SEQ ID NO: 13469 - DNA, 450 bp, Zea mays
agcttgaagggcataccataaagcaagccccgttatacttcgtctccgaagtccttagtttatcaaagaaaaactatacagaattggagaacgtgctgtatgctgctttgatggcttccaagaaacttcgacattattttcaagcataccatataattgttccttcttcacagcctttgaaggatattatgagaaatagagaatctactggaaggattggaaagtggcccgtggaactcaatgagttctgcattgattatgtgcatagatcttcgattcagtcccaggcgttagcaaacttcattgctgattggacgccaggggctcaccaataagaaattacttgccaagtcagcggcccaggggcttgcattaccttcagaagtttcctttgaaacaataaaagcaacctttgttgaccttcttgaaagacagtgctcaatatatctc

SEQ ID NO: 13470 - DNA, 438 bp, Zea mays
  unsure (1)..(438): unsure at all n locations
agcttctaaagggagagcacattntaggattatcttatgttcattntgagaaagacaggatttgtagcgcatgccaagcagggaagcaagttggtgcccatcatccacacaagaacatcatgacgaccgacaggccactggagctcctacacatggacttattcggcccgattgcttacataagcattggcaggagtaagtactgtctagttattggggatgattattctcgcttcacttgggtattctttttgcaggaaaaatcccatacccaagagaccttaaagggattcttgagacgagctcaaaacgagttcgggttaaggatcaaaaagattagaagcgacaacgggacggagttcaagaactctcannattgaggcttncttgaggagganggcttcaagcatgagttctcttctccctacacgccacaac

SEQ ID NO: 13471 - DNA, 425 bp, Zea mays
agctctaactctcgcgagacctatccccatttctttctatccaaggtaaattcattatcgtatgtgatattctatgcatatttactttatttgttcccttgtatggagtactgtttgtttcctaatttgaatggatggatgtatgtatgcttgcaatcgcatagaaaacgatccggttgaagagcccgaggaacccacaggagaagcccctgagcagcagatggttggtggaggcaagtgtcctttgacctatcttttgcctattcattctttaattcacctcccgcattacacatttatacctaaggattgactagcttttgctagccatatccttgttcacctatttgggttggattattattgtttagctttatgctattgctcaactctaatcaatgaacatgatgagattatccatgata

SEQ ID NO: 13472 - DNA, 451 bp, Zea mays
  unsure (1)..(451): unsure at all n locations
agcttgaagatgcatcgactaanagatttgactcttttaaatgtcgactgaatatccggacttctaggacacactggagaagctaagcggcgcctaatatcatcctcgaagattaatcccagtcgaaaatccaattntgccaaactaattgacacaattggtaaactaacttatactctagcactatgatggggataggttaagtgttgagaaagggtagaactcatggtcggaggtgatggtggtggccacgaacggtgatcaattgctcaacacgaaaaagaaaaagagaataaaaacaaaatagataggctcgaggcaaggtataagccatgacattctgttttgccggtcaataagacccattacaaagtgtgatagggtttatggtagatagcataccattaagagaggagctctactntagtgaattggtcatctagtgctactg

SEQ ID NO: 13473 - DNA, 435 bp, Zea mays
  unsure (1)..(435): unsure at all n locations
agcttcagcccccaacaaaatagcaagctgctgttttttgtgcagaaatgatcacatcacaatagtgttctaggttcttataaaactcagtgtcatatctgattattttgttgttcatgttatagcacattactcttaatttgtgtcaaaggaaatgaccgaaagtggcaagccacaagtgaaagtcatatgcatttcctttcacaaactttcttttcaccatttgtggtcagttctactctactatttacggctgatgctgccttaaccattgntctgttatcatataaacacacttactgattagagtttaggccaaaatgatagtccttggttccttcctatgaatagattctaggatgtcaaagcctccaaggaatgaccagatatctttacaattntcagattntattgttgtatttcgctcatccctct

SEQ ID NO: 13474 - DNA, 425 bp, Zea mays
  unsure (1)..(425): unsure at all n locations
agcttctacaattcttttagatcttgttgaggtcttgagctactcanaagacacttggaggtgtttatacaattccttcaaggtcttaaatttttctttttcttagagcatgtagacatcggcctcacctaacattctaacaagatcatcatatgaatagccatcatcatcaacatcatcatcatcatttatatcatttaaatcggtgatgaattttaccttagcttctccctttgccatgagacaatgaggggatgagaaaagtgaaggagcttccttgatggcaatcccggcattaagcttggatgaggtgtcatcatcatcatcatccgagctatcatccgaatcccattaactaggtaggctttgccatctttcttcctgatgagaatttcttcttcttcttatcatctccatctttgccc

SEQ ID NO: 13475 - DNA, 424 bp, Zea mays
agcttctcctgtccagaataatctacggtattcttgacagtcgaattagaatagttgtagatgaacctttggcacctgtagaacatataatctagagcaaactagttagtccaattattagtggtgggtaattcaaccaccaaaatcatttaagaaaatgtttgaccctatttccctttcaatctccccctttttggtgattgatgccaacacaaaccaaagcaaatatataagtgcagaattgaactagtttgcataaagtaagtgcaaaggttgcttggaattaaaccaatttacattttcataagatatgcatggattgctttcttcatatttaacattttggaccacgcttgcaccactttgttttggttttgcaaaactctttttggaaattcttttcaaggtgcttttgcaaatagtc

SEQ ID NO: 13476 - DNA, 436 bp, Zea mays
tttatcaaatggatgtgaatagtgttcttctcaatggaccaatcaaggaggaggtctatgttgagcaacctcccggctttgaagacagtgagtaccctaaccatgtttataggctctctaaggcgctttatgggctcaagcaagccccaagagcatggtatgaatgccttagagatttccttattgcaaatggcttcaaagtcagcaaagccgatcctactttattcactaaaactcttgacaatgatttgtttgtatgccaaatttatgttgatgatattatatttgggtctactaacgaatctacatgtgaagaatttagtaggatcatgacaaagaaattcgagatgtctatgatgggggaggtgaagtattttctaggatttcaagtcaagctactccaagagggcactttcatttgccaaacgaagtatac

SEQ ID NO: 13477 - DNA, 439 bp, Zea mays
agcttatgttttcatttcatttgttatacttgtatattcttcatctggcatgtacttcatccgggtgcttggaattttagccccttctattgcttctaactaacacagatgcttttgtgttacatgtatttggataccgaattaggactaggttttatctttagatagttcaaaactaaactccccaaaagattcccttatctaaacacttgagtagggaagcaaccatgttgtgctgcgataagagcgtaattgatatgtgatgtgtaatttgcatctttttaatgtcatttaacagtaagagcccatatgtatgactcatagttctttttttctttccctaagctacgttccaagtgaaggtataccacacagacttatcaatatcgatgaaaatataaaagaagattagattagtgtaaacatatttacctatcac

SEQ ID NO: 13478 - DNA, 447 bp, Zea mays
cttaagtcactgaagctgcaacttctaagggagaacacaaaatgccttataattttctttccaaaagaagaccatgggcagcttggccagcaaggaaacacgtgggaagctctcatcatgccaaagacgtgaagactacatcaagacccctggagatacttgatatggacctcttcagacccatcgtctatctaagtataggaagaagaaagcatggacttgttatagcagaagatttctaccccattcacttgggtattcttttggcaagacaattctgaaacccaagggaccctagagcgctctctaacgagagctcataatgagtttgagctcaatgagaataagataatgaacgacaacgggtccgagtacaggaaccatcatgtggatgacaaccttgaggaagaaggaatcaagcacgaagtctcccctcatacacaccac

SEQ ID NO: 13479 - DNA, 173 bp, Zea mays
ctcctctctaaccacttggtgattattgagctaacgctcatgcggactgtggtgttgatacctgcaaatgcacaggatctattattcaccacgccccatctaggagctctcaattggtatctgatccgttctcttgacaaagggactaatcttccggagagatggatccatcg

SEQ ID NO: 13480 - DNA, 476 bp, Zea mays
  unsure (1)..(476): unsure at all n locations
agtcacctgcggcatgcaagcttactccttcctgtgaagggccgttcatcatcgtctagatattgaagcccgggacatacaagctggccaacgatcaaggcgaggtctacagcaacgcttggaacatcgaacaactacatcgcttttatccttaaaatgtttcaagtcattcatgtacctcgctttctttacatgcataaataaattctaaccatcaaggaagcgtcagccttgcctcggcaaagcccgaccctccctcaggggctagaaggggggaaccccctctgcgtcaaaatttttctcggaaaagatttctaccaaaacgactntcatgcttttcgactcatatcgataacagaatcctaaaacgacgagaggaaccttaaacggcaaggccgaccgagccgaggaactcctacgccttcgggatacggatacctcactcatcactcttcacgaaagtaactcatgctccg

SEQ ID NO: 13481 - DNA, 395 bp, Zea mays
agcttgacccgtggacccacgttaccgtaatatctcaatcgtgctcaccggagttcaagaacccgccggcgcacgtggaccgggtaagcccctgcaccgttttccaattcgttgcgcgcatggcctctatatcaccccgtgaagctcctcgtgcaccctaattgaactataccgccgtggtttggccggagcaggagccgccgccgacccccgccgtctgtgctcgtggccagggtagcttcgaccaccttcgacgccgacccgcacaccgacgtgaccgtcgcgacctcccggacgtcactaaccaccccgccggagctcttctgccgccggtaagcctcaccgccgtaatctatgccacgggtactgtttaagtcagtcagggagcgcgggtt

SEQ ID NO: 13482 - DNA, 447 bp, Zea mays
  unsure (1)..(447): unsure at all n locations
agcttcggtgctataacatatccgaatatgattagtccaaccgacttanagattaaatgaccttttagcccataggggtctgagtcattgtggtaaacttttatgaggggcatgattgtaattcctcacaggctgtgttctgtgtctataaatagtgaacaagattcctttactgttcatgcattcatgtaattgctaacgcaccactcgggaattattgtttgtcaaaggcaaaggtataaatgtacctaaacattgtgttcggatattataaatccatttaataagataaataaatgatgtcatttattttcaatgtatctaactttaatatttcatgttttacttttctttgtattatttctataagctcacttacgaaggtgaaaaccttcgtagcattatgcccgtgaccttcgtccgagttcattaaatcctcgtggaaat

SEQ ID NO: 13483 - DNA, 413 bp, Zea mays
  unsure (1)..(413): unsure at all n locations
tgaccatcgtgtactttttggatgtngntggcaagaccagagaggtcttagccattgagagcggcgctatgttgatcgtggatgaagattaagctctgattgatgaaagtggcgttgaggacattttggctgacttcgctgaagaggagtctcgcgtggatagtgataaatttgagtttgaagaatataatagtgacactcgacaatcaaagccaagccatgtgtgcttggaaaagtcaacgatgaaaaaggggcatgttgaggcaatgaaatgacgagaatatattagtgatattgatataattaggctcgggggataatacaatatcccccagcttaagaagaatgaagccgtagcattacaaagcttcttcaaactgtactttatttctcgctacataagatgattatag

SEQ ID NO: 13484 - DNA, 416 bp, Zea mays
  unsure (1)..(416): unsure at all n locations
agcttctactcatctgccggcaaacagatatctctttgctatccaggagacagtacaaaaaatcttcttctccgctgccgatgaacactaatgcccccttcggatatttcagcttctgggcatagtgttgagcttctcgtccttcttctttagagagtctttttcccgaagcatgacagatgatatattcaatactttattttaaagcttcgggagcaggagcggcaacttttttaggaaaagactgttctatagcctcttcctctgctgccttctcttcaatttccgagggttttttttctcagcagtctctgaaggcccagcttcggcactagcctggctcactgcagcttcaacttcggcccagtttgtttcagcttcgatttgcatttntgaagcctcggaaaatttctctg

SEQ ID NO: 13485 - DNA, 447 bp, Zea mays
  unsure (1)..(447): unsure at all n locations
agcttcaaccaacgacgntgcctaatgttgagatccttctgagggaatatatacttcaaactcttatgatccgtgtacacttggcacttctcgtcccacttaaactctctttccttctccagaagtgaggtgatagacttagcaatcttagaaaattcttcaataaatctccgataatatcctgcaagtcccaagaaactccgaatctccataactatagtgggtatgctccacgccactatcttcttgactttagcaggatccactaatattccttcattagaaatgatatgtccaagaaatggcacctcgccaatccaaaactcgtacttgctaaacttggcgtagagttgattatctcatagcttctatagcactaatctcagatgttcctcatgatcactatcactcttggaataactaaaaatatcattgatgaaaatcacg

SEQ ID NO: 13486 - DNA, 328 bp, Zea mays
gcatgccagctctacaagaacaaatgacaatgtatttatcatgttgggggccccccaaatataggctctcggcatatttattgctggtataattaagcctgatatatcatttactgtgaacagatagagaggattcactgtaacctaggaagagaccactgatgtgcactataatatggaatgagatacttaaaaggtacttataatatacttcactatactgggtaccctattcgactcaaatgatatagtaattctaactaaagcttaagtgcaacttagagcaataccacgactagatatatattcaccattgatggggctgcaa

SEQ ID NO: 13487 - DNA, 437 bp, Zea mays
  unsure (1)..(437): unsure at all n locations
agcttgtgaaggttcttcatcctcacatgtgctaagcggcgatgccatagccagcccatgctagtcttagctattaagcatgcatctagaccggcctcttcttttgcaaaatcaactaaataaaagttgccgtctaatacacccttaaaagctagtgaaccatcacttcttctaaagacagacacatctacattngtaaatagacagttataccccatatgacataattgactaacagatagcaaattatatccaagactctctactaaaaatacattagagatagaatgctcattagaaattgcaattttacctaacccttttaccttgccttgattcccatcaccgaatataattgaatcctgggaatccttattcttgacgtatgaagtgaacatcttcttctccccgcatatggttgtgctccgctgtcatat

SEQ ID NO: 13488 - DNA, 535 bp, Zea mays
tgaataatatgtctgattatatcttttgttggatgatcaatatctgtccgtacagaaaaacaagtggcatatcataccatatcacatactctcttgctctctctgtcccaaaatagtattcgttttcgctcttagtttttatgtctatatgaaatggatgatgatgaatataaacacatatataaaacacatgcacaagtattgtatgaatccattaattacataaaacaaattttcatttgggacgaatgaagtattagtcatgtcatagtttttctgtagtgctttggttcattgccacaactatgatatgtcattctgtcttaggctatctctagtagattatccatcctatcctctatcacatcctctatttcaaacttcagtatgtaaacagtgcaatatacaggtcaaaatagtatgtgatgcgactatctacacgatctactggagacaaccttatcactctgtctcgtctctgtctcggtccgcatatactcaaattcttgctgaaccttgctttatgtggctttaa

SEQ ID NO: 13489 - DNA, 455 bp, Zea mays
  unsure (1)..(455): unsure at all n locations
agcttttattggccaaaattaaaggttaattttagatcactttancttacttgacgatctaatgaattaacgttcgttcttttgaggctagctaaattttagataccatatactctcttcgtcctaaaatattagtcgttttagcttttggttttacgtctatatttaaatggatgatgatgataaatttagacatatatattgtcggcgtttcgagaccggggggtccctgggccgacgagtgaatgtcgccgcgtgccccagcccatatgggtcgagcgcgagggccagcgcgaatgggggagagcgaggcgaccggagaccggcgtgagagaggtgggaatcccgcggccttcgtgttcgtcccgcgcccaggtcgggtgcgcttgcaatagggggttacaagcgtccacgcgggaaagggagcgagcggccccaagcgagcgcctgtcccg

SEQ ID NO: 13490 - DNA, 564 bp, Zea mays
agcttatgaaggttcttcatcccaacatgtgctagacggcgatgccatacccttttttgttagtcttagccattaagcatgcatctagatcggcattctctttcaaaaaatcaactaaatagagcttgtcgcctaatacacccttaaaagctaatgaaccatcacttcttctaaagacagatacatcaatatttgtgaataaagaattataacccatgttacatagttgactcacagacaataagttgtactcgagcgattcaactaaaaacacattagagatagagtgctccgatgtgatggctatctttcccaatcccttgaccttgccttggttcccatctccaaagatgatcgactcctgggtatccttggtcttgacataggaggtgaacattttcttctcccctatcatgtggttcgtgcatccgatgtcgataatccagcttgaaccctcggatgcaaaaacctgccaggcaattttaagcttgggttttaggtacccaactttttgtgggtcctacaaaggtagtcacaatacttttggaacccaaaacaagtctt

SEQ ID NO: 13491 - DNA, 592 bp, Zea mays
agcttggtcattttattgctaactgtcctgataatgaaagtgaccaggataatgttttcaagagggaaaagaagaagcattacaagaaggcaaagggcgaggcgcatctaggcaaggagtgggactcggattgctcctcgtccgactccgacaatgaaggactccccgccactgccttcaacaaatcaaccctcttccccaacgagcgtcacacatgccttatggcaagggaaaagaaggtaatcactcgtaatgctaatacttatgattcttctaatgatgaagaatctagtgatgaggatgaagtagattattcatgtttgttcaaaggcttacatagatctaagatagacaaaattaatgaattaattgatgccttgaatgaaaagaatatacttttagaaaagcaagaggatttgttgtatgaagaacatgataagtttgtaaaggctcaaaaatcccttgcattagaaattaaaaaaaatgaaatgcttgcttgtgaagtgtcaacatgccatgattcaatttctaaattaaagagcattaatgatgacttaaatgctgaactagtagaaccacataaatcccactc

SEQ ID NO: 13492 - DNA, 639 bp, Zea mays
agctttcaaagagttctgtgaacaaattggcacaaagattcattttgcatctgttagacatccggagtcaaatggacttgtcgaaagagctaatggtattataatgacaggaataatgaagttaatcttcaatcagcctagaggaaagtggccagatgaattgatcaaagtggtgtggagccacaacacaacggtgtcgaggtcaacaagctttacaccattcaaattgttgtttggtgacgaagcaataaccccggaagaagctaagacaggatcaataagaacagtggcttcagcagagaacgaagctgattattctgtggcaaaagatgctatagaagggatcaggcttcaggctataaagaacatcaataaataccaagccgaaacaataaaatggcgtgatagaaaggttcggttaaaaaatatcaggccagggcacctggtacttcggagagttgccaacccagacacagtaggcaagttacagttgaagtgggaaggaccttttctggaatattttcatcaagacccgggttctacagattgaaggatatgggaggcaacgtcatttctagatccctggaacgtggatgaactttcgtgataatatgtggagcctaatggaaaccttttggt

SEQ ID NO: 13493 - DNA, 650 bp, Zea mays
  unsure (1)..(650): unsure at all n locations
agcttgaaagggacattagtaactatagaagacaacatattaccggttgcttgttttatttaaattttaaggtacaattttctattgtttctccttcatccaattaactttagtgtttttaagagtgaagacctaatagagctttgtcttttgtcatagagtctactcttgagcaaagctttgaaattacaacaataaaatgaagacaaaaagaacaaatttatcatcagtgatttagagaaaaagattgagaaccttgaaaattctttaaaggaaaaagactatttgctccgtatagaggaaggctctcttgttgaagctcgtcttcaaaacgagaagcaaggtattcaaatttcaaatcaaaatgcaagaattgaaaagttgggtaaagagctgaaagaaacaaaaacaactttggaagaaagcacgagccgattcaactgtgaatccgaagccttaaatatcaaagtcaaggtcgaagctgagaaaaactttaagctcagcgaaacctaaaactcttcggggcagatgcttcggctttgtgacgcaatgttcctctcggttgaagggcattttcaattctgttggagctacatccggaggaagttagtcattctgctgaagatattctnagggcactcgaatggatt

SEQ ID NO: 13494 - DNA, 632 bp, Zea mays
agctttatcaaatggacgtgaaaagtgccttcctcaatggaccaatcaattgtataggtctatgttgagcaacctcccggctttgaagatagtaagtaccctaaccatgtctataaactctctaaggcgctttatgggctcaagcaagccccaagagcatggtatgaatgccttagagatttccttatcgctaatggcttcaaagtcggaaaggccgatcctacgttattcactaaaactcttgataatgacttgttcgtatgccaaatttatgttgatgatattatatttgggtctactaatgagtctacatgtgaagaatttagtaggatcatgacacaaaagttcgagatgtctatgatgggggagttgaagtatttcttgggatttcaagtgaagcaactccaagaaggcaccttcattagccaaacgaagtacactcaagacattctaaacaagtttgggatgaaggatgccaagcccatcaagacacccatgggaactaatgggcatctcgacctcgactcgggaggtaagtccgcggatcaaaaggtatacccgtcgatgataggttctttactctatttatgtgcatcgcgaccggatattatgctttccatatgcatgggtgc

SEQ ID NO: 13495 - DNA, 653 bp, Zea mays
  unsure (1)..(653): unsure at all n locations
agcttctaaagggagaacacgtgataggtttaactaacgtgcatttcttttttatagaccttgtgtagcatgtcaagcaggtaaacaggtgggaggagcacatcacagcaagaatgtgatgaccacatcaaggcccctggagctgctacatatggaccttttcggacccgtcgcctatctaagcataagaagaagtaagtatggtttaattattgttgatgaattttcccgcttcacttgggtgttctttttgcaggataagtctgaaacccaagggaccctcaagcgcttcctcaggaaagctcaaaacgagtttgagctcaaggtaaagaagataaggagcgacaacgggtctgagttcaagaaccttcaagtggaagagttccttgaagaggaagggatcaagcacgagttctccgctccctacacaccacagcagaatggtgtggtagagaggaagaacaagacgctaatcgacatggcgaggacgatgcttggagaattcaagacccccgagcgtttttggttcgaagctgtgaacaccgcttgccacgccatcaacagggtctaccttcatcgncttctcaagaagacttcatatgaacttctaaaccgtaacaanagccaatgtatcttattttcgtgtatttggg

SEQ ID NO: 13496 - DNA, 566 bp, Zea mays
  unsure (1)..(566): unsure at all n locations
gcatgcaagcttaagatccatctatattatggattgcttttgagtcttttcattttttttcggcccttctggcagcttcttgactttcatgaatagcaatgggcccttggtctgaaggtatcttcatgcaaagataagctggatgcagaattgcttcaaaggcattaagagtaccacgaccaatgattgcattgtaagggtattccatgtcaacgatatcaaacataacttgttcagtccttgtgttgttgatgaatccaaaggccactgacattgagattttaccgagtgctacaatctgccttcctccgaagccgcaaaggggatgtgtggcatcaaaaaatttatctttgggttcttgcatctgtttgaaggccttancaaatatgatatcagctgcactgcctgtatcaaccaaaacattgtggaccataaatcctttgataacacaagagataaccataccatcattgtgtgggtaatccttgacctgaaggtcctttttggaaaaagtgatagggatgtgaaaccatcttgacttgacaaaggtccttgcaccccgacat

SEQ ID NO: 13497 - DNA, 652 bp, Zea mays
  unsure (1)..(652): unsure at all n locations
agctttggcaaccggtgcatgcaatggctgaagcaggttttcaatttttttggtgctagntctgaaaaatttgaaccttcggctgaagacctgccaagcacctttgatcatattgagggcgaagttgaggcgctcgacaaagttatagctaggcatggtgacttctgtgccctgctagcttctcgcggcacagctgtagctttcatgaagactggttgcacgcatgggaagatcgtaaacaggccaaactttagcctatcaccagcagacttgaatgacatccctagcctggcctgaagcattggaaataggtttataacacaaatttggacgaagggtggacgaaacttatctggtgatgaagctcggagtcatctcaagccagtattaaacttgtacctgttgcttaccttctcttgagatttctttttaccttacaccggtttgttatatataggatgacgaagccgaaagtcaatgattcgaagcttgatctatactgatgaagccactgcataaagctctagagaaatttgaattatcttttgtaaagatatttgtatttaggaatgaaaacactagtctgtaaatttggccataccttgtaatatgtttttacctttttcatcccggtgtgaaatggcttgatgtg

SEQ ID NO: 13498 - DNA, 645 bp, Zea mays
  unsure (1)..(645): unsure at all n locations
ccgcgaccttaattgatctgaggcctgccccttagcagttcgagtggattctccctggagcaccggacactgtccggtgctccaaaccagggcagccttcggntggcttttgctcctttcttttaaaccctttcttggactttatattggtttgtgttgaacctttggcacctgtagaacttataatctagagcaaactagttagtccaattatttgtgttgggcaattcaaccatcaaaattatttaggaaaaggtttgaccctatttctctttcaatctctccctttttggtgattgatgccaacacaaaccaaagcaaatatataagtgcagaattgaactaatttgcataaggtaaatgcaaagggtgcttgaaattaaaccaatttacattttcatatgcatggattgctttcttcattttaacattttggaccacgcttgcaccacttgttttgtttttgcaaattctttttggaattcttttcaaagtctttttgccaatagtcaaaggtatatgaataagatttaagaagcactttcaagatttgaattttctccccttgttcaaatgcttttctttgacttcacaaaactccccctaatgaaatcttctcttatggtcaagaggttttttaaattg

SEQ ID NO: 13499 - DNA, 598 bp, Zea mays
agcttcagtttacaagtgttcacctgagtagtactaggactgaaaaacatctttatattacacccaaaatatggtgtatttgtcgcaaccacccaaagcacaaagggaagagagttactaagagggtgtttaaatgcactagagctaataattagttggctaaaaaattgttagtagaattatctaactaagagcatctgcaagagactatctaaatggctcatcaagccaaattttggctaaacaacagtaaaataactctccaacatactaactatctgactcgtcaagctatctgactctttaaattggttccctcacttgccaaacttgaatagacactgactagcccaaataaattgatagtctgttggagtgaaatgctttatattaagcttaattttttataaaagattaaatttatattcgaatatttagttcaaaataaagggtctcttggagaatcttttactattaactaaattactaaaaatagcttatagttggagggtgtttaaatggttataactaattttaaacacttacttttacctttatggcattcaaacacccttctaaagaggatatgtcattattc

SEQ ID NO: 13500 - DNA, 636 bp, Zea mays
agcttgtgaagattcttcatcccaacatgggctagtcgacgatgccagagccattttatattagtcttagcaattaagcaagtatcgagttcatttctattgaaatcaactaagtatagctgaccctcgagtactcccttaaatgctactgaatcatcacttcttctaaagacagtaacacctaaatctgtaaaaagacagttgtaacccattttgcataattgagaaacagaaagcaagttgtaatctaaagaatctacaagaaaaacattataaatagaatggtcaggtgatatagcaattttaccaagtcctttgaccaaaccttgatttccatccccgaatgtgatagctttttggggatcatcatttttctcgtaggaggagaacatccttttctcccctgtcatgtggtttgtgcacccgctatcaatgatccaacttgagccccaaatgcataaacctacaaaaacaagtttaggccttgtccttaggtacccaaacggtctttggggtcttttacattagaaacaagcacctttggtacccaaacacaagtcttggagcccttgtggttgccccccacatatttggcaattacttttgcctgatttgttaagttaaacataagaagca

SEQ ID NO: 13501 - DNA, 560 bp, Zea mays
  unsure (1)..(560): unsure at all n locations
ccgcaagcttacaactcaaattattgaaatacatgttcaactcgaatatttggattatttttttaaagggaaaatgatacgtacgaaaacataatgttctaagatgacaatcctcataaaactgaaacgacatgactcataaaactgacacagctaacataatactgaacataagcctctgttgtcggacgagcaacatctaattggactttttaagatctatctcggaagctttgcgaagccaaacgttccttccttcttttgtcttcagggatgcaaatacatctctatactttttctcaatcaacagatgagtggcaaacaaatgtaggtcgctgccttctggtgatccatcatcgataacttgttgcaactgcgcaataacctcaacacgaactgggtctgtgtcaacagaagtaatggacttgttagtggtcattgaacgcgactcanaagcctccactaagcgtttcatgtactcttccctcgaaatctttttcttcttttggttaagagaaatcatgccgcatcttacgcttcccaatcgcatttgtgcatgg

SEQ ID NO: 13502 - DNA, 522 bp, Zea mays
  unsure (1)..(522): unsure at all n locations
agcttgnggtagtggtgtgctatgtaatgtaatggcttgatgtttttttattttataactagnaaaaaaaatggcatgtgcataatatcaactctcttcccatggcagatggcttcggatagaaccacgcctaccgcctccgggattggagcaagacttcctctatgagctgagggagaggctggcggaaaaaggggtgagacccaccttcccgcaccttcagaactaccactagacctagcccaaattctggccaatcaaaccagactcattgaagtcctcactcgaagcctggagaaccagcgcccaggcggtggaaggccccatgacaggatgggagaattccctgaaatgaagccgcccacgttcgcggggtccagcaatcccctcgatgcagatgactggcttcgcacaatcaaaaggaagttggaagccattgcttgtcctgagaatcaacgtgttcaactggcagctcatcagctttcaagaatggctttaacatggggggacacttttaatgaa

SEQ ID NO: 13503 - DNA, 526 bp, Zea mays
agcttagcaaatcacagtgcacaagagctaaaaattgagtgagcgggagtggttggccagaaagcgtgcaaaatgagtttgcggtatggccgtatttatacgctcggtgcgttgaaagctgaaagaccccacttgtcattgaatgttgctattctagcaaagggaaggtgttttttcggaccttcggcgtaaagccttcgtccatatcgcaatctaaatttattatttcgaacaaattaatattgcgaggggctactgttggggaccttcggcgtccgaaagtcctcaaaaacaggatttaacagtatttctgtagtacaatgtgtgaacaggtatcctcggactaaagtcggcattgcagtagaccggaataatacgaaggttgatacagagccgaaggtgcgagcaggaaaacttttgcgtgacagcaaagagtggaaccgacttaaagatgaaaaagctatttagacctcgatagactactatagagttattatcaaatgtaaagggcatgaatgtatttttt

SEQ ID NO: 13504 - DNA, 588 bp, Zea mays
  unsure (1)..(588): unsure at all n locations
agcttaaggacatgttggttaccagcttccaaggttttcaaacgaagctttacacagctcaggctctgttctaatgcacgcaagaccacgaagaataccttcaggcatatgtacgaaggttcttgcgattgagggcacaagcgcctacagtgcccaatgagattgtcattgaggccatgatcaagggtttcgcccaggacctgctgcccaatatttcgccaggaagccctcacaaactctggagaagctgcttcagaagatggatgagtacatccgagctgacaatgatttttgccaaagaagggaggaagcttacagattctccgaaataaccaagggcttcggaggaagaatccatctgaggcatgtcaggtcaatccataactccactcaaagtgacgacaaaggaagtcagtctcagaggtcacaatatacctcacaatctttggggcaacaacaaagctcttttaggccaccagctccaaggggcagaggcgccaggggcttcggaggaagatttggggatcagcctanaaagatctactgcttattctgtggtgaggacaanggccatactacaagaatgtg

SEQ ID NO: 13505 - DNA, 647 bp, Zea mays
agctttcgaggaaatcctgagcagccgcggtgatatctgcgcattttttttctctctgaggagttgctactgttctagagaagaaaggttgtgatcatattaagctgcttgcgcaatccaaagccactttatccgctgaagatattaaagacccttcgaccgaagctagccaagttggtggaaaatttttcaccgacgtctgggataatggtggccgagaaatggcaggagaaattattcaaagaagtgaaaagggcattcacgatgctaaagaagtggctaaggctgctgaaaagagcgcagagcccgaaggtcaattaggtattaattaataatttgtatcgtgttgtaatttttatttcaaactttgttcgtggtttgtaatagtaatgcaaaaatattctcttccctcagaacctgctggatcgtttgttgaccctcacacaaaaggggatgacgaaattaaacaaatggtcgaaactatcgtggataaagttgttgaacaacttttaaatgaggctgccgaagtagtattaagaagaagactaggtgttattaggaaaaacagttgaaagtgtgatttatgtaatattttggtacattttgaatggaatataccaggtctctgttcattatttcaattcttt

SEQ ID NO: 13506 - DNA, 601 bp, Zea mays
agcttgtgaagatacttcattccaacatgtgctagacggcgatgttattttttagaccatgctagtgctacccgttaagcaagtgtacaactcagctgtatccaaaactactaggaagtgctgaccctctaacaatcccttaaacgctactgaatcatcactttttgtaaatacagctacacctatatacgaagaaagacagatggggcccattttgcataatacagaaacagaaagcctattgtaatctaaagaatctacaagaaaaacaatggaagtagattggtccggtgatctaggaaatttacccaagcctttgaccaacccttgatttacatccccgaatgtgataggtcgctggggatctagttttttttcgtaggaggagaacgagcttttctcccatgtcatgtggtttgtgcatcccttatcaatgatccaacttgagcccccggatgcataaacctacacaacaaatttatttcttgagtttaggtacccaaacggtttagggtcctttgacattagatacaagaactttgggtaccccaacacaagtttttgatcccttgtgcttgtccccaacatacttgacaactac

SEQ ID NO: 13507 - DNA, 548 bp, Zea mays
agctttaaaagctcaaaaagatgtggaagatgaaagcggccttatttcttttggaaaccttcgttcggaggtcataacattaagaaacgaagctcttgaaaagaataagattctgctctgtttggtcgaaaggctaaaatctagcgaagctaggctgtatactcaagcagaactgcatagatctgaagtataagaattagaaaagaaacttgacgaagtgattgaaaatttcaatgtggagctaacaaaacgtgagatatctgatatagaacgattgagggtacagaaaaatgttgaagtgcttcgtgaagctaaagaggaatgctacaaaatgtgctaagaatttgaagaatagcttttctaaaattggtgcattttcctcagagcagaacttcatccgcggtgatcctgacagggttatctgatggattaacagtgaagccaaagcttttgaagagattctcaatgacagaagagatttgtgtgccttcgctggtgctcatggggccattgtcggccttgaaaaagttggcttgcaacatgccaag

SEQ ID NO: 13508 - DNA, 644 bp, Zea mays
  unsure (1)..(644): unsure at all n locations
agcttgacaacaccatttgacattttacataaaatttctgagatcatgtatgtttagttcatttctcaacatgcaaaagcgggtcttatcaagaggcttagtgaaaatatccgctaattgatcttccgacctcactccttctaaaatgatatctcctttagcaacatgatctctaaggaagtgatgacggatatcaatgtgcttggtgcgagagtgttgtacaggattattagcaattttaacagcactctcattatcacacaacaaaggtaccttttctagaactacgccatagtctagaagagtttgtttcatatataaaatttgtgtgcaacaagcacctgcggcaatgtattccgcttcggcagttgacaaggcaacactattttgctttttggatgtccatgaaactagtgatctaccaagcagatggcatcccccagaagtacttttcctatcaattntgcaactggcataatccgaatcggaatagccaattaaatcaaaagtagctcctttgggataccacagaccgacgcttgtggtgtgcctgagatacctaagaattctcttaacaacgcgaagatgagctttcctatgattaaatttgaatctagcacacatgcagaccactaacataatat

SEQ ID NO: 13509 - DNA, 578 bp, Zea mays
  unsure (1)..(578): unsure at all n locations
agcttgtgaaattggatcctaggtcggttatgatactattcggnatcccgaacctgaatattatgtcttgtatgaatcccactgctttagctgaagttagagaagcaatgggtttgaactctatccatttagtgaatttgtcgatagcaaccagtacatgagtgtatcctccttgagatttcttgaaaggtccaatcatatccagtccccagcacacgaacgaccaggttacaggtatggtttgcagttgctgtgctggtagatgctgctattttgataagtactagcaggcttcgcaccttaggactaactcggctacatcactcttcgccgttggccagtagaaaccagacctgaagaccttcctaaccagagtccttgatgctgcgtgtatcccacattgtccagcatggacctcatccagaagttgtttcccagtggtcgaaagaatgcatttcatgaggactcctgatgcaccccttctgtatagtgtttccccaatgagagtataatgaactgactgccttgcaatgcattctgctgtatttttgtcatcaggctccttctcattcttttat

SEQ ID NO: 13510 - DNA, 576 bp, Zea mays
gcgatccttaatcgactgcagccgcaagcttgcgaatgctcaaaaatcatctattgtgcatgaagttgaggtggtttctttgatgttggagtcacttgtgacttacttgatagtcttacaagtgaaccactacctactaactctatttgtgataaatgcaaaatttctctcaatgataacattgctcttgatgaatcaaaaattaatgttgagaatgaagtgttagtagatagaataaatactctaactcatgacctagaaaaagcatatggtggtaagactaaattggatttcatattgggaagtcaacgatgctctcttaaccgtgaaggtcttggatatgttcccaagaaaggaaagaatgcttttataaagcaaaagacattgtttgtgaaagaatgtgacaaagtgtgtcacaagtgtcacaaaaagggacatattaaaaaaaattgtcccaagttcaaaaatgtattctccactttgtttgagcaatggtatgttctttctcataatgcaaaaggtggttatgctaaaattgttggtacttcaattggtggaaacaaaaaaaaaactatt

SEQ ID NO: 13511 - DNA, 613 bp, Zea mays
  unsure (1)..(613): unsure at all n locations
agcttgtacctcaggtaagagcagctgtcgcagaaaaggtccataccttcattagtttttatatatccccgntatggtactgcagaagggaaagagaagggttatcagcaaacatatgtgatgccaaccagtgtcattaaaaagccatttatagaccaaaaaaaactttaacatatggaggtggcgctatgtctggaacaaatacagaaatttgttagtggggggcacctcaatagtcactacagataagcaggagcaaattgttgcggggacaccaaatcaatactcattagagctaggcaaatgcaagatgggaactgatttgcacatctgcaataaattaaggggctggcaatccaacatgctcgaccgctcgagtttgcaactcagtaaataaacaactacagcaaagacccaagctatacattgtgcttataaacacaaacacacaacaaatagcaactatcaatagtttttttgtcaatcacctgaggttgcatataacccattccttgggtgtatgctccctgttggcccatctaaaaataacagaaagttaccttttgcagtatgatcacaagaataacggaacagtccaagaaaacttaacccc

SEQ ID NO: 13512 - DNA, 643 bp, Zea mays
agcttgtaacctcatttgcatccctgctctgtgttgggctctacaactattttctgaaggaagttcctctaaagaaaatatttctcgtgacaaccattataagttcagctcttgggatgacacaagtgctctttatatcattttcttgattggtacttgcaatcttttctatcctttaaacatactgcatcggatatatttaagtgcttcttggtaagtgggttaaatcggaaagttgggaataatgacgaggggtttctattggtgattcattaatcatcacaagccctgggtcaggcccagtaccttactgcaatgcttaataacagtagaatgcattttacatgattggcataaaaaagtattcagctgatcatgtaccttttttttgttacatagtgactgtgtacatagtactttatatgttcattattagactgaccatgccattcaagaacaactgatcttaaatggaaatggtgtacctgttcttagaatatgttgacttattttgaagatgaagtctcaacgttccatgtgtacaatgaaagcatcatttgcatattaatatgagttaaataatatctagctttgacaactcctgccttcaattgcttccttgaatgcaagcttatgttgctta

SEQ ID NO: 13513 - DNA, 676 bp, Zea mays
agcttgcacgagcttgaaccgaggacccgcgccaccggaatagcgaaattttgttcatcggagttcaagaccccgccggcgcacgtggaccgggtaagtcactgcgccatttttcgattcaatgcacagatagcctctacatcaccccgtgaagctaaccgtgccattggattggactagatcgccgtggtttggccggaatacctgccgccgacgagagcacctgcctgcgcacgtggaccaaacgattccggccactcccgccgtcgagccatacaaccgtgtgaccgccagaacctctcggagccaacccccgcccttaacgggacttctttctgccgcggaaagccgcgccgcctctttctttttcgcgggtactgtttaaacctagggagggaccgcgggggagaagaaaagaaagctagggggttttgcgcaatgtcagggactcggatgaatagtaacgcgggggtataactgagagagttagtttggaaataacccgaggactctggtgcaaaagtggttttgcatgaaaccttttataaaatctgatttaaaatttaaacaaaacttgaataattcatatcttctattttattcatccaaattgagtcaaaccaattttgtcagatcttaaataatataaactacttaagaaaaaaataaaacccct

SEQ ID NO: 13514 - DNA, 623 bp, Zea mays
  unsure (1)..(623): unsure at all n locations
agcttnnggagcaagagcttcaatcttttcatatgcaatatgttttattttttttttccttaagatcagcaggcttcatctcggtgggcattgaaggcccaacttcgacttcagtttgagctatcgcagcttcagtttttgcttgcctagttttggtttcgacctgcgtttttgtagtttcaacaactttctttgtagtagcaggggcttaaaaccttcatagtttctagcacaacatccagcacgttggccattctcctcctcttaggagttgcagcaaaagccttttgcaccttcgatagagttgcctctgtccgagggctcataagttttggcagttgcatcaatttttcaatctttgacccttcagccttatcaaccttatcttcgactgccttgactgtatgcgtcttcgacgctctgtgaaatccaaatagcctgtattgctttcgctgctggagtggacccttgtgccaaatcacgcaccacgggcgggtcaatgtaatgcgggccgtggggtagaaccttcacctttttggttctcggcataagctcaatttggggggacaaaaaagcaatcttcctctttttctcttgacctccaangggtaacgataattcgg

SEQ ID NO: 13515 - DNA, 558 bp, Zea mays
agcttgacattgctcccctgttggaaaccaatgccatccttaatgccagggcgtctcccattatagagcatgcttctagcaaatttaaacttttcgttttctatttcatgctcattaattttagcagttaatttagctatatgatcattttgttgtttaatcatggcaaggtgatcattaatagcttctatattaacatctctacatctagtgcaaatagaaacgtgatcaacagtggatgtagagggtttgcaaacatttaattcctctatcttagcatttaatctttcattctcatctctaagacaggtaatagaatcattgcaaacattcaattctttaatcttagaaaccaaactagcattctcatttctaagactggaaattgaatcattacaaacatttaacttttcaaccttagaaattaaactagcattctcagttctaaggtttgaaatagagtcatgacaaatgctaagctctttgggtaggttttcacttttttctatttcctgagcataagcatttttcaatttaatatgttttttggtttcttta

SEQ ID NO: 13516 - DNA, 657 bp, Zea mays
taaagggagagcacattttatgattaacgaatgttcatttttagaaatacaggatttgtaacgcatgccaagcaaggaagcaagttggagttcatcatccacacaagaacatcatgacgaccgacaggccgcttgagctactccacatggatctattccgcccgattgcttacataagcatcggcgggagtaagtattgtcttgtaataatggatgattattctcgcttcacttgggtattctttttacaggaaaaatctcaaacccaaaagaccttaaagggattcttgagacgaactcaaaatgaattcggcttaaggatcaagaaaataagaagcgacaacgggacggaattcaagaactctcaaattgaaggcttccttgaggaagagggcatcaagcatgagttctcctctccctacaccccacaacaaaatggtgtaatggagaggaagaatcgaactctattggacatggcaagaaccatgcttgatgagtacaagacaccggaccggttttgggcccgaagccgtcaacaccgcctgctacgctatcaaccgggtatatcttcaccgaatcctcaagaagacatcatatgaactcctaaccggtaaaaagcccaacatttccataatttaaagttttggtaaccaaatg

SEQ ID NO: 13517 - DNA, 599 bp, Zea mays
agcttgtgaaggttcttcatcccaacatgggctagtcggcggtgccagagccaacccatgttagtcttagcaattaagcaagtgtcgagttcagctctatcaaaatctaccaagtatagctgaccctctaacactcccttaaatgctattgaatcatcacttcttctaaagacagtgacacctatatcagtgaatagacagttgtagcccatttgacataattgggaaacagaaagcaagttgtaatctaaggaatcaacaagaaaaacattggaaatggaatggtccggagatatagcaattttacccaaacctttgaccaaaccttgatttccatccccgaatgtgatcgctctttgggaatcttggtttttctcatatgaggagaacatccttttctccccagtcatgtggtttgtgcacccgctgtcgagtatccaacttgagcccccggatgcataaacctacaaaacaagtttagttcttgattttaggtacccaaatggttttgggtccttttgcattagacacaaaaaacttgggtaccccaacacaagtctttgaccccttgtgcttgccccaacatatttgggcactac

SEQ ID NO: 13518 - DNA, 488 bp, Zea mays
agctttttaataaaactggatcagaaatctcagatctaacacgtttctcttttttcatagctcaacttctgtcattctactctattactgggagcaaggtgtttgtaacataaaacaaaccgccaaataatgatacactttagtgagagactaaaaaattaccatacaacctaaagaaattctaatagatggttactcacagcagggtcatgtatatcaatctcctgatgcgcacaattaatgtcaccacttattatgacaagcttccatttctctaattactgcacaaccataagagacatgtatggtcatcttaaaacttatcagcatgagatacaatgtggtcggctttgatcactacctgaagtctgtaaatggaggtgaaaatgtctttgaaaaaatcatgcatatttcaacagcatggtattttttgcacaatacaacaaccgcgaagaatgcaaaagccccgccaaccacatgattattgg

SEQ ID NO: 13519 - DNA, 387 bp, Zea mays
agcttcttcaaggctgggcttcggtttcctctaagcagtttcgtggtttaagttttgaagatatttgaaatctgcctacatcaaattactcccgaagcaatcataaggatgggaatcttcgtatgggccgcaaggagccaaggcttggagccaaatgcaaaaagtttttgcagtatacacgagctggtttatgagacaaagcctttgggcaaagagcagtatcataacaaatttggttgttatagcttcggtgcccgctctaggtcaagctgtcccgtgccaacttttctgaagagatggccccgggactggatgaaagaatggtctatgtgaaaaatgatttgaaggcacgagaagatattaaaaatttcatcatgccccctatct

SEQ ID NO: 13520 - DNA, 614 bp, Zea mays
  unsure (1)..(614): unsure at all n locations
agcttgttaaagttaaaaatgcttatgctcaagagatagaaaaatgttttaaattaactagtgagctaagcacttgccatgatatcatttccaaccttagaaatgagaatgctaaactacttgctaaggttgagaagttagatagttgtgatgattcaactgttagtcttagaaatgataatgctgatttgattgctaagattgaacatttgaatgcatctctctctagccttaaaattgagaatgaaaaattaattgctaaggctaaagatttaaatgtttgcaatgatgttatttccaatcttagaaatgaaaatgtcatgttacacgctaagattgatgaattaaatatttgcaaaccctctacatctaccgttgagcatgttactatttgtactagatgtagagatattaatgttgatgctattcatgatcacctagctttaattaaacaacaaaatgatcacatagcccaacttagtgccaaaattaatgagcatgacttataaaatgaaaaaatttanatttgctagaagcatgctctatagtgggataagccctgggattaaggaatgcattggctttcaaaagggagacaaatttaagcttaatgc

SEQ ID NO: 13521 - DNA, 388 bp, Zea mays
tgagcctgccccttatgaagaatcttcatcccaacatggggctagtcgggggggccatatccttttctggtagtcctaacaattaaacatgtgtcgagctcagctctatcaaaatctactaagtatagctgaccctttagcacaccctttaatgctattgaaccatcacttcttctaaagacagggacacctatatcagtaaaaaagacagtgtagcccatttgacataattgggaaacagaaaagcaagtgtaatctaatgaatcaacaagaaaaacattgtaaatggaaaggtcaggtgaaataacaattttacccaaacctttgaccaaacccttgatttcctccccaaatgtgatagctcgtgggggatctttgttttctcata

SEQ ID NO: 13522 - DNA, 399 bp, Zea mays
  unsure (1)..(399): unsure at all n locations
tgcaccccgggatattggncctttccctgttcttgaacaatgtgtacctttttttaccgacttcagntacccgaaacattgtctgctgtacataatgtgttccacgtgtctcaattaaaaaaagtgtcttccggtttcaaatcgaactggttgaagtaatagatggtgctttagaaccaaacttgacctatttagaacatcctgtttcagtcttggatcaaaaggacaggattacccgaaagagaactttcaagttttaccagatacagtggaaccaacaaacgggagatgaagctacttgggaaacttcagactttttagaaaagaattttctagactttttagcctcggtaaattgtaaatatgtactgtggggaactgtctttaatgctatgaaat

SEQ ID NO: 13523 - DNA, 568 bp, Zea mays
  unsure (1)..(568): unsure at all n locations
nagcttcttcctctagacacacatagcattggcagctttagtcgaagccttcctttttcgttaaccctgcaacatggaaagattaagatagggaataattactgagttaatgtttgaagaccttctaaaaaacaaggcccccaacaaacatatatctctatgtatggacatatatcactaacaagcaaatctttggtcatatcacagcttgcctgatagctcactaacagacatttatatgctacatttctactgtagggaagtaagccagagagcgtgttataagttatggagtagaaacgtatactagtgattaatttctatcccatcgtcctatgaatttagggtaggcttatatctaaattttagaaagtgatagaatattaaattccaaaccaaataacatactctattaagcatattccaattcctttaaaatgaagtgattcaaaatgtcccttagggaaattgcatanggaaaatttgcaatggaaaaaaggatcggtgccaatagttaaaaaatacaaaatgggccatgtcngtgaaggggatcaatgttgatagggca

SEQ ID NO: 13524 - DNA, 664 bp, Zea mays
agcttgtgaagattcttcatcccaacatgtgctagtcggggatgccagagctagcccatgttagtcttagcaattaagcaagtgtcgagttcagctctatcaaaatctactaagtatagctgaccctctaacactcccttaaatgctattgaatcatcacttcttctaaagacagtgacacctacatccgtaaaaagacagttgtaacccattttacataattgcgaaactgaaagcaagttgtaatctaaagaatctacaagaaaaacatttgaaatggaatggtcaggtgatatagcaattttacccaatcctttgaccaaaccttgatttccatccccgaatgtgatagctcgttggggatcttggtttttctcataggaggagaacatctttttctcccctgtcatgtggtttgtgcacccgctatcgatgatccaacttgatcccccggatgcataaacctacaaaacaaatttagttcttgattttaagtacccaaacgattttgggtcctttgacattagatacaagaactttggtacccaaacacaagtctttgacccttgtgtttgccccaacatactttggcactactttgccggatttgttattagacataaatgcatcaaaagtttaaatgaatgttagattatttgatgca

SEQ ID NO: 13525 - DNA, 558 bp, Zea mays
gcaagcttctaaagggagagcacattttaggactaacaaacggtcattttgttaaatacaggatttgtagcgcatgtcgagcaggaaagcaagttggaactcatcatccacacaagaacatcatgacgaccgataggccgcttgagctactccacatggatctattcggcccgatcgcttacataagcatcgacgagagtaagtattgccttgttattgtggatgaatattctcgcttcacttgggtattctttttgcaggaaaaatctcaaaccccagagaccttgaagagattcttgatacgggctcaaaatgaatttggattaagaatcaaaaagattagaagcgataatggaacggagttcaagaactctcagattgaaggatttcttgaggagggcatcaaacatgaattatcttctccctacacacctcaacaaaacagtgttgtggagaaaaagaatataactctcttggatatgggaaggaccatgctcgatgagtacaagacaccagatcagtttttgggggaagtgaataaaactgcgtgctactaca

SEQ ID NO: 13526 - DNA, 277 bp, Zea mays
  unsure (1)..(277): unsure at all n locations
agcttgctacaggccttctttttattctccatagcaggaaccttgctataacactgccccacttaaaaagtatgaggtagaactcttgaatcttggggatttgaactccttgaagtacctcatagcaagggtgttacggngccttcttctgctattgctgcttgactaggctgcaaagagatgactgtcacagggttgattctgggagaaccttcttcttatcttctcttcactatcttcttttcaccgaccctttctttctatttgctcttccact

SEQ ID NO: 13527 - DNA, 559 bp, Zea mays
  unsure (1)..(559): unsure at all n locations
agctttggaaatctatagaaaattgtagaaaaatcctaaaaatgttctttctattttcctagattccttattttccatagtatttaataaaaataattttatgatttttaagacaaataggaaattttggagcatttaaaatagcttaaaacattggttctggatttttaaggaatagataataattccaaaaatgcccaaactttttatatgaactcaaaacattatttaaaagatttgggtagaaattggtttgatttggaccttgtttggtaactagaacccaaaacccccaccccctgctctttgaactccactgttgactccggaaaccctaagttctcggagttccgtgaaggaaagttgtattcaagactttagataataaactcttatcatctttgcactctcatgagcattacatggcattcagncttatatatatatgggtatatttagaaaacaaggaagaaattgagatagaagaggagaagactacaccaccaccacctgcggaacatcaggcagggaattgtttttactttgacatccgcggatc

SEQ ID NO: 13528 - DNA, 554 bp, Zea mays
agcttgctacaggccttcttctttttctccatagtaggaaccttacttttttactaccccacttaaaaagaatgagggtagaactcttgaatcttggggatttgaactccttgaagtacttcataacaagggtgttacggggccttcttctgttgttgctgcttgagcacgcggtggagagatgactgacacagggttgattctgggagaaccttcttcttatcttctcttcactatcttcttttcacttttcacttctcacagcctctttctttctctttgctcttgccactggaggattctatcaaagagtattaccatcatacagaggagaaaaccaaaggctatgaaccatgcacaacagtcttcaacccaagaatcaccaagcattgtgatcttatgggcgagggagtggaaaaatgaattgcttgcgatttggcagaggggatttatctagagtgtgctttgctttgagcgagatgggagttgagggagccggtgggggggaatttataagcgaatgggggtgcttggggggtgtggagtggtaatga

SEQ ID NO: 13529 - DNA, 611 bp, Zea mays
  unsure (1)..(611): unsure at all n locations
agcttgcccaaccgtgctgcctacaggactaaccccgaggagactaatgtttttcagcgccaggtccaggaccttctggaccgtgggtacattcgtgagagccttagtccttgttctgttcctgttcttttggttcctaagaaagatggcacttggtgcatgtgtgttgattgtagagccattaataacatcacaattcggtacatatatcctattcctagattggatgacatgcttgatgaattaagtggttctattgttttctctaaaattgacttgcgtagtggataccaccagattcgtatgtctttaggtgatgaatggaaaactgcatttaaaactaagttcggtctttatgagtggttagtcatgctttggggttaactaatgcgcctagcactttcatgagattgatgaacaaggttttacgtgctttcattggtaaatttgtggtggtatattttgatgatattcttatctatagtaagtcacatgatgatcatattgaacaattacgtgttgttttttatgttttgtgtgatgcacgtttattcggtaaccttgagaagtgcacctttaacaccgatcgngtgtcttttcttggatatgtt

SEQ ID NO: 13530 - DNA, 552 bp, Zea mays
  unsure (1)..(552): unsure at all n locations
gcttggnatanctattccaattggaaatatttgtttcttaaattcctgactaaatctcagggccaatgtgctctgcgataatgctaaattcaccaacgcagtttgggttggaccttctggtgtcatattgcattggggtctggtttctccgaagatcagttcaagcggactctggaccagcttctccttgtcatcatcaactttgacgtagaaccattctgatttccagcctgccggccacttgcttcggtagctgatcacaggaaattttgtagttttctgataggcaaaattgtaacaaccaaaattttcatgtagcccatcctttctggccttggtttggtaatgtagctcgtgcacccggcagaaaccttcggcaaatgtttccaccccctggcttctgagagcccaaatataaacactaagcctaacaatagcgttaggagttagttgatgaaagtggatcccaaacttctttaacacatcggccatcattctattaaaggaaatcttaaaccaactttgaagaaaactcttgaaatcactatttca

SEQ ID NO: 13531 - DNA, 623 bp, Zea mays
agcttgtgaagattcttcatcccaacatgtgctagtcggtgatgctttttccagcccatgttagtcttagcaattaagcaagtgtcgagttcagctctataaaaatctactaagtatagctgaccctctaacactcccttaaatgctattgaatcatcacttcttctaaagacagtgacacctacatccgtaaaaagacagttgtagcccattttgcataattgagaaacggaaagcaaattgtaatctaaagaatctacaagaaaaacattggaaatggagtggtcaggtgatatagctattttacccaatcctttgaccaaaccttgatttccatccccgaatgtgatagctcgttggggatcttggtttttctcataggaggagaacatcttcttctcccctgtcatatggtttgtgcacccgctatcgatgatccaacttgagcccccggatgcataaacctacaaaacaaatttaattctttgatttaggtacccaaacgggtttgggtcccttgacattagatacaagaactttggttacccaaacacaaagtcttgaccccttgggcttgccccaacatacttggcaactaccttgccggatttgtagttaaaaca

SEQ ID NO: 13532 - DNA, 452 bp, Zea mays
ccgcatgagcttctcgccgtattcctgcagctcggcgtcttatgtataggtccagccgcttgccggcgatttcctgcgtgtcgagggcgccgcgcttgtaccggtcctgcgggcggttgaagttgtccttttcgtagaaatgcacgccccgctggccccgcagcacttcttcgtaatgcagctccaggccgtcgatgccgacgtaatcgccctgctggtacgttgcgaaccgttcgttctccagcattttcgggctcacctcgccgatgtagcccataaagatgccgccgatggacttggggtagctccggatggtgcgctcgacgagttggaagccccgaaacgcgtacggattctcgttgaagcgcgctgtttgcgccgggttcagttgggccaggaacaacccctgccgcatggggccgttcataaacttggccttttcaaacaggcgg

SEQ ID NO: 13533 - DNA, 484 bp, Zea mays
agcttgcaaccaaatcgaaacaaactaccactgaaatcgtgcaatctatctatgttttttttggccctgggtccatggcttcggccatataaatacgggcaccacacatgcatctagatccacgtcgagggttgggataacgtataccgagcgagcaatgggaaaaaagacagcccagagaaacgataaatcttcgcctccggcattgaagacgaatcgggcgacatctaaaaagtgaaaagttcctttgcctaagaacaagatttggaatgcgtctataggggaaaaggtgaatatgcgaataaaaaataacacttaaaaatagaaattctaaatcactggatcgcaactgaaatgaaagccacttctaatatatcggagcgaaaatgaagaccctatttaaaagactcaacactttaaagacacttatacataaaatagtattgaaggacacggttaaaccgtaatgacagagagattaaca

SEQ ID NO: 13534 - DNA, 636 bp, Zea mays
agcttgtgaagattcttcattccaacatcggctagtcggcggggccagttccattccatgttagtcttagcaattaagcatgtgtcgagttcagctctatcaaaatctactaaatatagctgaccctctaacacacctttgaatgctattgaatcatcacttcttctaaagacagtgacacctacataagtaaagagatagttggagcccattttgcataattgagatacagaaagcaaattgtaatctaatgaatctacaagaaaaacattggaaatataatggtcaggagatatagcaattttacccaaacccttgaccaaaccttggtttccatgcccgaatgtgatagctcgttggggatcctggtttttctcataggaggagaacatcttcttctccccagtcatgtggtttgtgcatccgctgtcgatgatccaacttgagcctccggatgcataaacctacaaaacaagtttagttcttgactttaggtacccaaatggttttgggtcctttagcattagaaataagaactttgggtacccaaacacaagtctttgaccccttgtgcttgcccccaacatattttgcaactaccttgccgggatttgtaatcaaaacatatgatgcatc

SEQ ID NO: 13535 - DNA, 645 bp, Zea mays
agcttggtcattttattgctaactgtcccgataatgaaagtgaccaggatcaagtgtttctagagggagaagaagaaggcatacaagaaggcaaaaggcgaagcacatctaggcaaggagtgggattcggattgctcctcctccgactccgacaatgaaagactcgccgccactgccttcaacaagtcatccctcttccccaacgagcgtcacacatgccttatggcaagggagaagaaagtgagtactcgagactccacttatgcttcttctagtgatgatgagtccagtgatgatgatgacatagactattcttgcttattcaagggtttagatagatctaagatagataagataaatgaactcattgatgccttgaatgataagaataggctattagaaaagcaagaggaccttttatatgaagaacatgataaatttgttagtgctcaaaattctcttgctctagaaattaacagaaatgaagtgctttctagtgaattatcttcttgtcatgaaaccattgctactttaaaaggtgttaataatgatttaaatgcttaactagaagtggctaagaaatctaactcttgtgtagaacatgttatggtttgcactaagtgtaaaagattttaatgttgatgc

SEQ ID NO: 13536 - DNA, 535 bp, Zea mays
cccggcccgaaaaaactgatatccctattattattaataccttccgttttattcttaaccaaaggaaggggaagagagtctaactcctctccaagagggtgtgctactggtgtggtaagtatgctcattatattgctaaatattcatatgcaagtgatagtggcagggacaacgacaacaagggaaagaataagatagagaagaagtattaccacaagaagaagggtggcaagacgcacatgggaaaggagtgggactccaacgagagctccactgactcctcctccgacgaggtgaaagctctcttgtgggttttggtgtttggatgacaacccaattaaaggactaacaagtgtgctaagtgttgaacaggtgcttaatgcaaagctaatagggttcaacacaagtgaacaagtgtgatggtccaaagactgaattatctatagataatgaacactgcttaattgagactcggtgtgcgtaacttagagacaaccgatcaagccaaagatggaggcaagaagagcttcaaggt

SEQ ID NO: 13537 - DNA, 525 bp, Zea mays
ccgccaacctatgaaaaatcttcatcccaacatgggctaatcggcggggccatattcaacccatggtaggcctaacaaataagcaaggggcgaggtcagctctatcaaaaactaacaaggatagctgaccctctaacactcccttaaaagctaatgaatcaacacttcttctaaagacagggacacccgccacaataaaaaaaaagatggagcccatttgacataattgagaaacggaaagcaaaatgtaaactaaagaatctacaagaaaaacattagaaatagaatgggcaggaaaaaaaacaattttacccaaacctttgatcaaaccttggtttccatcccccaaggggaaaactccctggggaacatgggtttttctcggaagaggagaacaatttcttctcccctggcatgggggtgtgtgcccccgctaccgatgaaccaacttgagccctcggaagcataaacccacgaaacaaaattagtcctgactttaagaacccaaaagggtttggggccctt

SEQ ID NO: 13538 - DNA, 652 bp, Zea mays
  unsure (1)..(652): unsure at all n locations
agcttctcacaactttcttttagatcgttgtgggatgtcttgttctccttataagacacttgaaagttcttgtataattccttcaaggtcctaaacttttctttttcttggtgcatgtagtcatcgacctcacccaacattctaacaagatcatcataagaatatccatcatcatcaagatcatcaatatcatcatcatcatcgatattatttaaatcaattataatttttaccttagcatcacctttttccatgagataatgaggagatgagaaaagtgaaggagcctccttgatagtgattccagcatttagtttggatgaagaatcatcatcatcatcatctaagctcgcatccgaatcccattcaactagataggctttgccatccttcttcttatgatagaacttntttatcatctccatccttgcccttgttcttcttgcttagacaattcatggtaatgtgactgggttcaccaaactcaaaacattntctatcattaaaagcatttcttcttgatgtttgtccccttctaggttgacccttcttctttctcatgaatnttgtaaatttctcacaagagagccaatttctcatcactttcacttccatttcattcatcttcagtttcttccttttcaattgcctt

SEQ ID NO: 13539 - DNA, 657 bp, Zea mays
agcttatcgtcaaaagctaagaaatgatcctattatccatagaattattttatatccattgctattttatacattaactaatttagcatatcccatgagccggctcgtgagcctgattagctcagctcgctccttcgacgagctcaaaaaacagactcagttcgccctagtctcgcgaggtgctccaaacttgaggcgactcatgagtctcgaacatttttcagtcctacttacgcgacttgcatgcaatctacccacctagatttcctctttatgtatatacgtacacacacgcgaacaattcgattggcacgtaacatgcattttcatttattcggaaatgctgagagacgggcgtgtacctttgactccgtccgtggcttttttctgttttttttatggtatgtatatccgatttaaatcctgcctcactaccactatacaaaaatactatatattacttagaccggaatctatctattcctaattgaccgtgtaccagatacgatgattgtagtctcacatataaaaaaaacatcgcgcgcacaaacttgtagacgcgttatactactatatgcccaagtttgtaaaaaatttataggccttttgatggtctatggcattttaatactttggccataaatatcttacaccttt

SEQ ID NO: 13540 - DNA, 630 bp, Zea mays
agcttttccttgtcgtcatcaaccttgacatagaaccactctgtttttttttccgctgcccacttgcttcggtagctaattacagggaactttgtagttttccgataagcaaagttatagcaaccaaaattatcgtgcaatccatcttttctagcctttgtttgataatgtagctcgtgaacccggcagaagctgtctgcaaatggttccactgcttggcttctgagtgcccagatataaacaatatgcctaacgatagcgttaggggtcagctgatgaaaatagataccgaacctcttcagtacctctccaataatcccatgtagggggaaccttaatccagcctttagaaaacttttaaaaataacaatctcatccttctctggcttcggtgtagtctcttctccaccgaagcgcaacagcttcttctgattttcagtaaaaaaacccgcttttaccatcttggacaaatcagccttcgaaacagtagatttcccgaagtccaagtggctcggcttgcttggcatggcaatgcggtaatcatcttcggaatcagtttcctcaatatcttcttcctctgcttcaacgaatgcttggtctgcttggtttgcatcatcatgagggatcttt

SEQ ID NO: 13541 - DNA, 647 bp, Zea mays
  unsure (1)..(647): unsure at all n locations
tgcaagcttatgaagattcttcattccaacatgggctaancggcggtgctctatttccaccccaggtagtcttagcaattaagcaagtgtcgagttcaactctatcaaaatctaccaagtataagctgaccctttaacactcccttaaatgctattgaatcatcacttcttctaaagacagtaacaccaatatcagtaaaaagacaggtggagcccatttgacataattgaaatacaaaaagcaaattgtaatccagagaatctacaagaaaaacatttgaaatggaatggtcaggagatataacaattttacacaatcctttgaccaaaccttggtttccatccccgaatgtgattgctctttggggatcttgggttttctcatatgaagagaacatctttttctccccagtcatgtggtttgtgcacccgctatcgagtatccaacttgagcccncggatgcataaacctacaaaacaagtttagttcttgactttaggtacccaaaaggttttgggtcctttggcaatagacacaaaaactttgggtaccccaacacaaatctttggagcccttgggcttgcccccaacatatttggcaactactttgcccgaattgtttatttaaaacattagatgcctaaaa

SEQ ID NO: 13542 - DNA, 616 bp, Zea mays
  unsure (1)..(616): unsure at all n locations
agcttgcagtttccattaatttttatgtatatgttaatttatccttcatagtacttgnggtaggcaaagaaaacaaaggtaactgtagagaacgaaagttgtgaattgtctttaaatctgagtgatgttgacctttgtgagtcttatatgtgcctggaagataaatagacattgttgccatgcgaattagtttcatttttgcagctgacctagatcttgatgctgaacttttcttctcttggcatggttccatggtggtactggtagccaaaggagtaaagagattcaagggaaattgattccatttatttcttgttggcctgtggatacaagacccatattaatagtcatctaggccccagcaatgccagctgtttttttctatgattataaaaaaactcaaccggggtcctcccagtatattatattaagaagagaccgaaacaatggttccggccgagaaaatccccgaacccttgccatcactaacgggccggcgtcaaccatccactctgcattggtccaaccggagggtggcacacaagacatcgtaaccccagaatggataagacattacgaggggatttttttacccaaataaaaaaatttttgcccc

SEQ ID NO: 13543 - DNA, 612 bp, Zea mays
  unsure (1)..(612): unsure at all n locations
cccgcgatcctcacatcgcctgcagccgcaagcttactcctccctgggaagggccattcatcatcgccaagattttgaagccctgaacatacaagctggccaacgatcaaggcgaggtctacaacaacgcttagaacatccaacagctacgtcacttctacccttaaaatgtttgaagtcgttcatatacctcattttctttacatacataaataaagtctaaccgtcaaggaaggatcagccttgcctcggcaaagcccgaccctccctcgggggctagaaggggggaaccccctctgcatcaaaattttcctcggaaaagttttctaccaaaagaaaagttttctaccaaaacgactttcgactatatcgataacagaaccctaaaaacgagcgagacagcacgtaagcggcaaggccgaccgagccgaggaactactacgcctccgggatacggatacctcactcatcaccttccgcgaaaagtgactcacgctcggataagcggttttgttatcgaacaagtcctaaacgctncggtagaaaacgacttccgtgctttcgactatatcgatagcaaggtcctaaaacgacgagagtacacgtaagcgg

SEQ ID NO: 13544 - DNA, 487 bp, Zea mays
  unsure (1)..(487): unsure at all n locations
agctttaacttgataaagataaaaatagaataaactttcattagataagtccattttcttctctgcatctcacctagaaacatgacaagcttcaacttgataaagataaaaacagaataaactttcattagataagatatcactgccccttgctttaaagccttcccctcccctcctcacatcgaacaagcactacttaactcaattgtggaatttattgcaagatctatttaaaatgacgttgatcatggctgcaacaacactataatacccagagcaatcattttaggaagtataatgcttgcttctttgtttactgattttttatttggtgcactttgggggcgcttgggttcaaacttggattcatgttcatattangttttacagttaatatgattgtgtacctaacctataggacaaagatctactcagaggtaagcagaggatctccatccgacctcgacatgcaagaccacgtgcccct

SEQ ID NO: 13545 - DNA, 421 bp, Zea mays
agcttggacctatagaacaaacaattgctagtgctagacaggtgaccacattcttgtatgctcatacacgagtgttggatctaatgaagaaatttcttgggaatgacttggttcgttccggggttactcgatttgccacaccatatttgaagcagacgggtagatcgagttgtccaaggggctggacgcgcttcccggggatgatcccatgaaagggcgccacactagcccggatcgtggacagatcaatctacaagagcctgagggtctcggcgtaaatgatgttgaggctgctgccttcgtccatgaggaccttggtgagcctgacgttgccgatgacggggtcgacaacgagcgggtactttcctgggcttcgcacgcggtcgggggtggtcgcattggtcgaaggtgatgggcttgt

SEQ ID NO: 13546 - DNA, 503 bp, Zea mays
  unsure (1)..(503): unsure at all n locations
agcttgcattgcatatttaaatttcttgtattgcatctagggcttgtcttacctatttgagataaccgccaacaaagcaagtgaaaaagcttaactagggctcaaacttgacaagttctagcttgtaagcttttggtacttaaatttcatttactatacaattgttggtttttgagatatgcatgtggtactgcacatagggggagtattcacaactcaattcatacatgaaacctctagtgcaacacccaaatggaaaatctcaccatttacctatttcctctaaaaactatctagcctatggcacaatattttgaaaaatatgagagaatatgcgagggtatcaatacctgtctaaacacaatngttggttctttttgtgcttataagttgggatttgggttggttcaaaatttcctagaaaaattcaatatttcctttgtctgggctcaccggacagttcgatgtgtactggacactgcactgtgcaatgtctggtgctc

SEQ ID NO: 13547 - DNA, 518 bp, Zea mays
agcttctttgccaagtgtttttatcaacactaggcaaagacaatttattttttatattttgaagcagtaaattaattcaaatgaaaaaatgcaactacaaatttgtataactcatcaagatgtacaatttatattttgatcatttcttcatatgacaaaataaaagtaaatttgtttataaaacctatttctttcgtagtttatgaaactacaagagagatgcacgagatttatgaataatgttataaccataatatgagatgaacaaatgaccaaataaccaataaatctagagctggataatatacaatatatatatataacccaaaagataaaagattaatgtcctcggatccagtggcctgcactttcaatcacatggcgtcgtcgtcgaaattggccaaataatactcctccagcgcgggatcgtcgtcgtcgaaattggctaaatactgttgcaacgcgtcgtcgtcgaaattggcaaaataatgcagatccatgtcgccggccaaatactg

SEQ ID NO: 13548 - DNA, 588 bp, Zea mays
agcttgccaagccctcggacccggccggacttcaccggaggcccgagtattgatctcaccgaacttcggtcttccgccgccgcgcgtggaccgagctatccagtgagtctccgcccaattccttgcgctcatatcttctctggcatcccgtggacctctctgacctatccaattgaactatctcgccgtgaccaggccggactcctcgccgtcgacgagcatccccgcctgcgcgcgtggaccgaccgactccggccatctccgacggtgacccgcacaccgttgtgatccccgagacctccccttcatcctcgaccacttcaccggagcaatctcgccgtcggtaagcccctccgccctttcttccgtcgcggttactgtttaaggtagaaggaggacctcgggttaggatttgtagaacccgaggggttttctgtaacgtcagtgactcatgtgaatagtagcttaaggactgattcgcgaggaaaacttaaaaacccgccagggaccccaggggcaagtggattttcattaaaccaattctgttattctttttaaaatgaccagagaacttagaaaacccataac

SEQ ID NO: 13549 - DNA, 611 bp, Zea mays
agcttgctaccatgtgatcttgcagctttcccttgcaaaaatttggggctttctctgtccttgcacaagctgtccaagcagcagttccagccatttgtggatagatttgctgaccaacttcctaactggaaagctgatttgatgaccagggcaggcaggagaatcctaatgcaacatgttctaacaggtatgactgtgtaccttgcaatggcgatcgatataccccactgggcccgtgatgcgattgataaaataagaaagggctttctatggagaggaagaaaggacgccaaaagaggacactgtctggtggcttggggcaaagtgtgtcgtcctcttcaacttggaggtctgggaatataaagccttccagagctcgggtgggccctccggatgcgttggttgtggcttcaaaaaacagactccagtagaccttgacagggcttcctattcatgttccaagtaaagccaaagctttcttcagtaaggtcctgatctctgaggttggaaatgggtataagacccttttctggtctgatattgggttgaaggtaaaagcattttgaccaatgccctaatctgcattctataatcccaaagagataccaaaa

SEQ ID NO: 13550 - DNA, 569 bp, Zea mays
agcttgtcaacaatataagcacaaaagagagaaggctactttggaagatcattcgaagcctatgcttttatgtgaagacataacaaatcaaagggtattgctggggtctcagttatctgatgagcaagaaaaactttgataagatttttgttcaacaacaaaaatgtctttgcttggacagccaatgatctctgtggtgtcaacagaaatgtcatcgagcattcagttaatgtggatccatccttcaggccaaggaagcaaagacttcaaaagatgtctgatgataaagctgaaggtgctcggaacgatgtaaagagagttctcagtgctggtgttatcagagaagtaacatatccagaatggctagccaacattgttatggtgaagaaggctaatggtaaatggagaatgtgtattgatttcacagatctcaacaaggcatgcccaaaggacgagttcccattgccaaagatagactcccttgtggatgcaacagcttcttcggagctcatgagcctattggactgttattcaggctatcatcaaatttggatgaagaaggaagatga

SEQ ID NO: 13551 - DNA, 472 bp, Zea mays
agcttaaagccatgggaagtagcatacgctaataatatgccaattgtcttttttctatctacgggggcataagtttcaccgaaatccaaaccttctacttgggagtatcccttggccacaaaatcgaactttgtttcttgtcaccacaccatgctcatcttgcttgttgcggaaaacccattttgttcctacaacattttgattaagacagggaactaagtgccatacctcatttctattgaagatgttgaactcctcttgcatcgccaccacccaatccgaatcttgtagtgcttcctctaccctgtgtggctcaatagaggaaacaaacgagtgatgttcaccaaaatgtgcaacccgagatctagtagttacccccttatgaatatcccccacgatgagtgtcaccgggtgatcctcttggattgcttgacggactcttgggtgaggcggccctttgctcttcatcctg
